United States Patent Application Publication US 2026/0103690 A1 - sequence listing, part 76

SEQ ID NO: 373363 - protein, 431 aa, unidentified
MLKINPLSTLYVGIDVSSKSNYVCALDFYKNKYINSSFANNQPGAEELALKILECLKEHPDITTIVAALESTSVYSIHIANYLSSCEELMRFNPYVFVLNPKCTANYKKSYIGLGKSDPIDAFVIADYARAGNIESEPWRGSQFLALKRLTRHRLHLIECMTREKTYLVSNLYLKFSELQMLEGDDQPFCDIYGATSSSVLMEYFSPEEILDSSEEDLIAFLAKKSRNRIKDISKTADLLKKAARDSYRLDKALYEPLNVSIASSFNCIETFKREIKVIDNAIEKEIKGLNPNAFIILQSIDGIGPVFAGGIIAEIGDITAFHSSDALAKYAGLTWKSNQSGDFDGEDTPMIKAGNRYLRYYLGEAANSMRKHNVEYGTYYRKKYNEVPKHQHKRALALTSRKFVRLVYGLLARNQLYSGVSLDTSIKDSN

SEQ ID NO: 373364 - protein, 385 aa, unidentified
MQKRHDDSKACLTAFLQDNTVIAVIEMGLANWLVAGLLPGVAREPLKKIAPDPEVLLRLLYRWRDEAIKAGKEITRIAVAYETGRDGYWLARWLRDRRIDAYVIHATSVAISREHRRAKTDRIDTAMLKRGFLGWLRGERGHCSMALIPTIAEEDAKRPHRERESLVKERTRTINRMKAILTQFGVRNFKPTLRKAAEKIAEVRTPEKVPLPPNAAAALRRHIEHFRLINGQIKVIEKARLQRLRQNPTDKFNAMVFLLVRIIGLGVETAEQLVHEIMFRNLRDRKAVARYSGLTGSPDESGARHREKGLSRSGNERVRKILIQLSWRMLRFQPNSALVRWFKGRTASSQRSRKPMIVAFARKLIIALWRYANTGLVPEGFQLAK

SEQ ID NO: 373365 - protein, 350 aa, unidentified
MEAYDGPQIVGMDLHRRRSVLVRMAEDGHKLSTVRIANSPARLAAEIKRAGLHPKVVLEACYGWYWAADTLTAAGAEVHLAHPLGVREFSHRRVKNDELDARDLADLLRMGRLAEAWIAPAEIRELREITRYRGKLVQLRTSCKDQVHGVLAKLGIEVTCSDIFGAWGTQWLDELPLPQPYSWKVASLRQLTGWLSAEITVLEQVTADLLAGHDAYRAVQALPGIGPVLGAVIVAEIGDITRFRHPARLCSWAGLTPRHYESDTKVVRGRITKQGSRPLRWALIEAVQRTPAGTPIHQARDAIIARRGPQARNIAKVAAARKLLTYVFYAMRDGHVRALDTPGAAAPETA

SEQ ID NO: 373366 - protein, 338 aa, unidentified
MIGVDLAKSVFQLHGASLTGEVRFKKKLSREGFLKFMTGHAPVVVVMEACGSAHYWAREMVRLGHEVKLIAPQYVKPFVKRQKNDASDAEAIVIAAQRPEMRFVEPKSSGQQSRAILFRSRERLVHQRTELVNAVRACLYEYGHVVPQGIHQIKRIEEILNEPNSDLPALMREDCQDLLKQITEKTARIDARTQKIKALARETDTARRLQTIPGVGPLTALAVEAFAPAMESFECGRDFSAWLGLVPRQFSSGGKERLGGVSKAGQSDIRRLLIIGAMSRLNWLGRKSVPEGSWLARMITRKPRMLVAIALANKMARTVWALLTKNQDYRVPTQVAAS

SEQ ID NO: 373367 - protein, 340 aa, unidentified
MRLIGCDLHASQQSIAMLDRDTGAVLEKTLKHEGEAVREFYASLPPPVVVGIEATGSMGWFLRLMEELAIECRVGHPVAIPKAGSRRQKHDRRDAALLLQLLAEDRFPMIWVPSTELRDLRALLLHRHQWVRMRTRVQNALHAIVLAHGVRHGHTLWNRDGQALLASLPLPPHTADRRSELQALYQHLQAHLDRLDDRVQHVAKERARATLLMTHPGVGPVTALATEVFVGDPARFLDGKALASYVGMIPREYSSGTRQRLGALSKQGNPFLRFLWCEAAAHAVRRDPDLQRFYRRKVAHKGFAKARVAAARKLGIRLWIMLRDQIDYAEFCRRGLARQS

SEQ ID NO: 373368 - protein, 446 aa, unidentified
MSDRSGLSRGDRNRNARLARLRQLVSFENAIVGIDLADDKQAAVVTDHDSRVIARRRVSARAWELGGLLDWVVARAAAAGFGSVTVACEPTGHRWRVLDQLAAERGLALVCVQPLLVYRAREGEDLTFDKSDPKDAVIIARLAAGLHCYEPERADAVWARLRHLGARRSQLTTDATAEVNQVRDLLECAWPAVLTASAAPFRSASWRAAVAVVLDRCAGDLGRVRRLGEARFIAAVRRELPRWDATRPCLRIVRAVFAALADSAGVTAHRPGALERAHLALSDWRGTRARLADVEARMVAVLDDLGLRELVTTIAGLTPVGAAAILAETGDPARFASPRSLVKHAGLCPRDNASGGYQGKTSISGRGRPRLRLAAWRAVWAALPNNPVMAARFTHLTTREDNRLARQQARTACAAALLRWIHVVITRRVSWDPAIAAGSTPLHRAA

SEQ ID NO: 373369 - protein, 353 aa, unidentified
MKCDKYIGMDVHQATTVVVVLDAEGKLVLETIVATEAAAIIRLVQSLSGPLRATFEETTQAAWLYEVIRAYVTEVIVCDPRRNKLLEDGSKADKVDARKLAELLRAGLLRSVYHGHEATRNLKELVRAYETLSIDTQRTMARIKAIYRARGIRTPGRGVYQPKQRERWLELLTGAGIRQRVEWLYEQLDQLQPLRRKAKQAMLAESRRHRAVSLLRTIPQMGPIRCAFIVATVDTPHRFRTKRQFWSYVGLAVVTHMSSEYEMTAGRVVRRRKPVATRGLNHNCNRRLKEVFISAAIGGSLHEPYKPFLEKLKQNGMRAEMARLTLAHKIAAVALIVWKKGVAFDPKKLNCTT

SEQ ID NO: 373370 - protein, 346 aa, unidentified
MGMDISVLGVDLGKNVCSVVGLDASGAVVLRRRAKRETLIALAAKLPPCVVAMEACCGAHHLGRVFAGHGHDVRLMSPEYVRPYVKAQKNDDRDAEGIAEAATRPTMRFVGLKSQEQLDMQTLHRSRDRLVGERTALINQLRAILLERGIVAPQGKRKLEQFLTVLMDEQRGAGLSPRMITLVADARAQWGELDQRIAAFDTEFIRWTKENEDARRLASIPGVGPTIATALIAAIGKGETFGHGRDLAAWLGLVPRQFTTGGRPNLLGISKRGNRYLRKLLIHGARAALPHVAERDTPLGRWAKALLERAHPNVAIVAFANKLARIAWAVLRRGEGFVVRGLPLAA

SEQ ID NO: 373371 - protein, 426 aa, unidentified
MERYVGLDVSLKLTSICIVDRTGKVEREGVVTSDPEAIATFIKLHAPQVVRIGRETGATSTWLWTELNKLGLPVICIDARHAKAVLKMQINKSDRNDAAGIARIMQCGWYKEVCVKDLDSHATKALLVSRALLVKIKRDIENQIRGLLKNLGRVIGRAKMNMFAVRAAQLAEDRSELFAAVDPLLKAREAVEQQIVDLDRKVLRLARNNAQVRRFMTAPGIGPVTALCFLATIDDPARFKRSRSVGAYTGLTTRRYASGEIDWTGRISKCGDKMLRSYLYEAANVLLTRVATWSALKAWGTQLDLPLEMLQIREDTTMNQQTMKYAIAVALFGAATLASVLPSGAAPISPSTTLPTQAASSSAVTEVYYRRHYRGRGYYGAPGAAIGLGILGAAAGAAAYGAYGPGYAPDYYGGPYPYRRQYYAPY

SEQ ID NO: 373372 - protein, 347 aa, unidentified
METAYDGRQVVGMDLHRRRSVLVRMTEDGRRLGTARITNSPQELRREIARAGKSPRVVLEATYGWYWAADTLAAAGAEVHLAHPLGVKAFTYRRVKNDLRDSADLADLLRMGRLPEAWIAPAEVRELRELTRYRQKLVSLRTSCKDQVHGVLAKLGVPVTCSDIFGVAGSAWLDGLGLPQPYAGKVLSLRQLTGELTTEITMLSEVIADLLAGDRGYQVIQQLPGIGPVLAAVITAEIGEVTRFRNAGQLCSWAGLTPRHRESDTKVTRGRVTKQGSRLLRWALIEAVQHVPADTVTGALKQRIIARRGTKAKNIAKVAVQCAVQGCRAAIRPVARGEGRRVIRVRC

SEQ ID NO: 373373 - protein, 310 aa, unidentified
MFSIDWAVKKKFQIYNVAKKKLKSISPTREAYDKFFDKLKDTHSFYIEEGGGDTFKLLALHHGHKVLTTPGKKVHDLREKLELPKTDEGDVVIIGILAVEQPQVFYEYQEDDKLVMKIHLLYHEYAKVVQDCTRKKNQLFAFKNRLELLASKKEVKKIVKKREDTIKAIEKEKIALSRQLTKLLAEHPLWVNLLKDIKGVATVTSAGIIGSVRRFSRFPNKYALRKFAGMIQKKDNAEYNRHLKQALYNFIEGIIKKRTQPWRKLYDDIKVYYAKKHPDWSKGKVNNYAKKFVQTKFLDMLWKEGKKIEN

SEQ ID NO: 373374 - protein, 341 aa, unidentified
MQIAVLGIDLGKNSCSIVGLDVRGAVVLRRRMRREGIIKLAAKLKPCVAAIEACCGAHHLGRVLRAQGHEVRLMSPEYVRPYVKSQKNDDRDAEAIAEAATRPTMRFVELKSEEQLDMQTLHRARDRLVGERTALINQLRAVLLERGIIVAQGRRKLERQLTEMGTQIDALSQRMRMLIQDMRTQWYELDRRLAEFDKELTEWARDDEAARRLRTIPGIGVLNATALVAAIGHGESFARGRDLAAWLGLVPRQVTTGGKPRLVGISKRGNKYLRKLLIHGARAALPTLLESPTPLGGWLRALIARMHKNVAVVALANKLARIAWAVLRHGKTFGIEASTTA

SEQ ID NO: 373375 - protein, 372 aa, unidentified
MNYNTVYVGMDVHKESFTLCSCRYEDEKASHYQRTPASYKNVLRYLAFLRTIYGEDTRFVCGYEAGCLGYSLYHQLENFNVECVILAPTTMLEQRSKRRIKTDKRDAEIIARSLAQHNYSPVHIPTETDNQTKEFIRMRDDHKAELKKIKQQILSFCLRQGYQYDGSGNWTAKHVKWLRSLKPAGLYKEILDEYLLTYTILTDKLNRLDQRIEELASKEEYKESVSKLTCFLGIKIHTALSVIVEVGDFQRFVSARKFAGYLGLVPGQHSSGDDRNGLGITKAGNTHVRRLLVESAQSYTRGKIGYKSRVLRSRQAGNSPQVINYADRANERLRRRYYKMVLKDGKKYNIAKTAVARELACFIWGMMTDNIY

SEQ ID NO: 373376 - protein, 381 aa, unidentified
MLYVGIDAAKNKHDVTVIDNTGKMVLKPITITNCKQGFELLHNTLKQLNQNCLIAMEDTGHYALNLLTFLHQNNYQIYTYNPLLIKEFTKSISLRKTKTDKKDARTIALKLLSDPNRALFMHDNKQEELKIMTRHMNRLKKHQSDWKVQYTKCLDIIFPELHQVVTKHSDYVYELLKRFPSPEKMVTAGFDKLIEIKRLTAKHALDILELAPNSIGTTSLAREFELIEIIKNIQHYEKLIKQTEKKIDELMAELNSVITTVPGISNRLGSVILAEIRNINTFNHSAQLQAFAGLEPAIYQSGQLDAQGKMVKRGSSHLRWALIQAAIKVARYSPAFKAYFKTKLAQGKHYNVAISHVAKKLIRVLFYLLKNNETFDEDKLR

SEQ ID NO: 373377 - protein, 384 aa, unidentified
MGGIILDVLMTRCAGLDVHAETIVACVMIGEQDDELFIETETFPTLTKDLFRLLKWLENHGITHIAMESTGIYWKPVYNILEDYFDITLANAQRIKNVPGRKTDVSDAEWIAKLLRYGLIEKSFVPPEDIRNLRDLTRLRKKWIGHLTSEKNRILKVLECSNVKLNSVISDVFGVSGRKLLSKLIQNGYVDSIDVENSIHGRMKHKKQMITDSLFGTLNDHQIFLIKQSWQHIVYLESLISQIEERIDEILKNYKEEVELLLTIPGIKKDSAAIIIAEIGVNMEQFPTSQHLASWAGVAPGNHESAGKRKSTKTTKGNPHIKTVLCEVAWAISRSRNRWLAAKYWSIAARRGKKKALVAISHRMLRIIYSMLINKEPYKEPLIN

SEQ ID NO: 373378 - protein, 437 aa, unidentified
MSFAHRFSPVIADSEEDEVRAVALDVHRDFCEVAIVEEGQLRSAGRIEARPEALELFGQSLDARDWVALEVTGNAWEIARILESHVARVIVVSPSDTGIRQARAKTDRLDARALAKLLWAGELDGVWTPDERIRAMRRRLARRAQLVRARSRAKNEIHAVLMRCLKDRPPASDLFGVKGRRWLAEQELPVTERETVDSAMRQVAFLDAEIAEVEKLVAAEALSWPEIKRLMTVPGVNVIVAATFMAAVGDIRRFPDRRKLTAYLGLDPRVRQSGAGPANHGHISKQGSGSARHALVEACWSTVRQPGPIAAFYSRVKAKRGHSIAIVASARKLACLFWCLLTRGEDYAFAQPSLTTKKMRRLELTAGAPRRQGGRDVWSTNTAMRAAERELALQAQRAYERTVADWKAAAKVGASATPGRASERSSKDQAARQITSP

SEQ ID NO: 373379 - protein, 449 aa, unidentified
MKRKKMDLEIVNPNAAGIDVGSRSHYVAIGQRSDDVREFGVCASDHEEIISWLKECGIKTVAMESTGSYWQNLFSALQIAGFEVLLANGKFTKNIKGKKTDVLDCQWIQKLHSLGLLSGSFLPDETTEQLRTLCRHRSNLMDMAASTSKKMQKYLRLMNLRLDVVVKDICGLTGLKIIETICQGETDGKILASLRHGNCHKTEAEISKALQSNGRKDYLFALKQEYQIYNVLQEKIKLCELEIKTFFEVKIKSDLNTSDKIYKKANKNAPKSIDLNQIAYKYFNGVDLMEIEGISHSTILTLMSEVGPGGLKKFATGKHFASWLRLAPNNKISGGKILSSRIPKGSNRLKTALRQAANCIGNMKNANLHNFFIRICIRKGRTAAITATARKLAIIIWNMVVKMVPYRPPNQYEFLDQKRKRKVREMRKLVAKLNILPSEIGFSNICISI

SEQ ID NO: 373380 - protein, 419 aa, unidentified
MKTWKELTHYAGLDWAGDHHAVAVVDPQGQVVAEFRIDHSATGWAEFRNQIAAYPALGVALETRGGAAVEELLQSDCPVFPVQPKAAARYRERKAPSGVKDDQLDAWAMADALRLDGRAWRALAPEDPLIQELRLLCRDEVALIEQRTALVNQLRAALREYYDPALEAFDDWTLPAAWALIVQFPTPTELAQAGQRKWEKFLPVHKLWRPETVAKRLALFAGAADWKRSEPVTRAQSRLALSLAKMLQTLERQLDDYRQAIEALFVQHPDQGLFGSLPGAGSKLAPRLMSELGADRQRFDTPQSLQCLAGTAPLSFQSGQIFRVKMRRGGNAHLRHAVHLWADCSRAACGWAQAYYQAQRQKGKSHACALRCLGHRWLEVLWKMWQTQTSYDGELHARNQQKHGSWVIQILTAPAAKPG

SEQ ID NO: 373381 - protein, 371 aa, unidentified
MAKRLKYIGLDVHKETIAVAVAEGERGGEVRFHGTIPNEDDAVRGMVKRLAGPGITLDFCYEAGPCGYGLQRLLTRQGQPCIVISHSMMPRRAGEQIKTDPRDAMTLARLLRAGELDPIWVADEEHEAVRDLTCALRSAQHDSPYDQQTVRSFLLRHDRRFSGKSAWTKTYWRWLSEQRFDFAHQQLAFEEAKRRVLEAQARTARLEAALVEAVDGWRFAPLVRSLQALRGVRLIVAATLVAEVGDLTRFQNPKQLMAYLGLVPSEYSSGARVQRGRITRAGNAHARTMLVEAGWTYRLPAREERRYRDRVADLPEDIQAIGWKAQVRLCQRFRRLSATGKPQPKVNTAIARELVGFAWDIARRVQPVVAV

SEQ ID NO: 373382 - protein, 503 aa, unidentified
MKTKPSAKSAASIYRNQNDLLRALFERASDPHKVLCVALDYAKRKHVALCCDGNGDILRKPFAVDNTAEGVAFLCEQISATARRRKIPKCDIFLGGEDEPSYVANFTQALRARQYLVLRVNAAEAAENRENQIASTDLLDLLGIAKTLLSRRARATGAVVFAGAKGKKAPEDIYFQIRELTRCRRNLVRQQTAASNRVHAIVDQLFPCFLEHAKSGLTSFCEASMALMKERFSATEIARRRPRTLASFLARHGVRAPDEIAAKLIALASGALPPAPHRLAALQRTLSATVDLRECLARNANELRAQAAILLASTPYSMLTSIPGIGFTLAAGMAGELGNPIRLSPVDSLCAYAGIVPHTFQSGGPDQPACQGHTPARCNNILKDWPVQSAHKIHLYGPPELKDRITRWNANGQHGIFAGARRYLRLLRSLVLNQVPYLDPRSRSSTASDQDRADAALHAWLILIRKWRIIPDGIALIAKETNPLGFWRRVVMESRSVHLPLQP

SEQ ID NO: 373383 - protein, 383 aa, unidentified
MYTGNSAVAYIYFLTQIHMQTCEKTKTLFVGVDVHKDTHTAVGLSPFGEKLFELTIGNYPQDFAELAKKVNSTAHNENLSPRIGLEDCQGFGQRLASYLNEAGYSVNHVPPILVDHKRKKAAHPEKNDSLDARGVAEVMIQKVDTLPIHKITQDSQIAKDIQELSLDREYLVKEQTRLKNQLHLLLHRIWNTEYREKFKDPFYVKALKYWKKSVPRNTSSFLAKNMKRKVKKLENLRLEIKELETDMETLIKKSGHTIHTANGCGIVLAAMIIGETGDISRFKSPAALAKYAGCAPREHSSGKTHRHRKTRGGNRRLNCAFHRLALTQISRMGNEKARKYFLRKISEGKSKAQALVCLRRQMINIVWMMMKHKTDYNLQKKLT

SEQ ID NO: 373384 - protein, 355 aa, unidentified
MENVIRQCIGIDCGMKEHVASFSRMYADLRVEYVSTLTIPNGPGGFVKLSKWIRKLMDPSMPCQFVLEATGVYHETLACFLTEKGWPVSVVLPNRAKYFSKTLTVKTVNDKVSSQTLAAMGLEKKLDVWSPPDPIYNQLRQLTRERDQLKAESTQIKCQLHAEESGAWPNKSSIKRMNQRLSLIERQVEEVETSIREVVAESPEIDQAVRRMTSIVGVGMLTAVTVLAETNGFNLVRNKKQLVSYAGLDVVERTSGISVRGRSRISHRGNRYLRKCLYFPAMTAARHSNDHKALYNRLISKHGIAMKAAVAVQRKLLVMMYAIWKNGTIYDPNYESKKQQNELGQTRRPALTELA

SEQ ID NO: 373385 - protein, 396 aa, unidentified
MSALFIGIDVSKDFSTAQAIDGKGNKCFYLELAMTADGFEQLLKAITSYCKDIGEVTVAMESTGCYHVNLFSFLTYKGIRCIIINPLLTANFAKLSLRKTKTDKKDALTIAQFLLVQKDSLLKTDLSPDRQDLKDLAREHESLTNLIAGMKNDIRRMLQITFPELESICNIFSETILEFLRQFPSARSIKIARPNTIAKALLHEDKRKKTSVSAEDIIRAAKTSVASHAAAKEIILPEKISTLQHLIEKKVRMKKALVEACEAMMVEDIEIITSIGGISNITASRLLAEIGDYRDFSTYKHIIAFASLDPSVHQSGKFEGISRISKRGNRHLRYIIYLMTTCVVRGDNIFSSYYQKRRAEGQPFKMAIIATAHKLIRVLFTMLSKRTTYKPKEVNA

SEQ ID NO: 373386 - protein, 346 aa, unidentified
MMIIGCDFHPSWQQVNWLDTETGETGEQKLVHASGDAKQFYQQLAGPVLIGMEATGNSQWFVELAEDLGHEVWIGDAAQIRASYVRKQKTDKRDAAHILKLVVEGRFPRLWTPDREQRDVRQLVLHRHKLVEIRSRVKNELQHLSLNKGVQCKRKLWSQAGQKLLRELPLKPWAACRREDLLGLLAMLDQQIGKLDEAVQKAAEENPQAKLLMTQPGVGPNTALGFVLTIGDVSRFARGKQVASYLGLIPREESSGGRQKLGAITKQGNRMLRSLLVEAAQIAVRFDPEMKKQYLHRCHQKPKGVAKVAAARKLAVRLYWMLRTQVGYPEIVRIESSPRVPLVGAS

SEQ ID NO: 373387 - protein, 342 aa, unidentified
MNITTIGLDIAKNVFHLVGTTSSGEQEFKKRLKRSEVLQYFANLPVCLVAIEACGGAHYWSRQFSHMGHEVRLINPKFVKPYLRSQKNDYNDAGALCEAVIQPRMRFVPTKSEAQQDMQVLHRRREGLVKDRTALVNRARGLLAEQGLVMPKGIGIFRRQLPYLLEDAENGISDLLREVLSETREQLLDLEQRINWYAQRLESVCRTDEACQRLDEIPGFGAIVSTALVAAVGDARVFKNGRGLSAWMGLVPRQYSTGGKPRLLGITKAGDRRLRAMIIHGARTVASYAKHKEDPLSLWIRGIQARSGSNVASVALANKLVRIAWVVLSRGEHYRPASITRI

SEQ ID NO: 373388 - protein, 342 aa, unidentified
MLLIGCDYHPSVQQIAMLDTETGDYSEHRLKHSDGEAEKFYRDLKLHTLKIRVGLEATGHRRWFERLLMELDCELWVGDAARIATMRVRKQKTDRQDAQLLLKLMMEDRFPRVWISSLEDRDLQQLLWHRHRTVQMRTRILNQLQSIAMNEGIQRRGGLRSVQGRKRLEQIPLGPWGTRRRSDLLVLLDRMNERVNELTAAVQQEAEKRPEAQLLMTHPGVGPVTALAFVLIIGYPERFQCGKQIGSYVGLIPSESSSGVHRRLGHISKQGNVLLRSLLVEAAQAAARFDPEWHKEFSHLAMRRERKIAKVAMARKLAVSLYWMWRRHRNSQMAPKIGSYAG

SEQ ID NO: 373389 - protein, 401 aa, unidentified
MKYGVGIDVSKGKSTISILSIEGEVIEMPFDINHDVEDLEKLDKKLQMFSKEDLKIVLEQTGTYHLPILIYLLDKGYCVIAENALKIKKYLDRSLRKAKTDKKDSLKLAEYACDNWYKLKANFVEEEKYKELRFLSRQYFSLNSMKVQQKVDFSDLSDMLFPEYYQLLEECNFIVGLKIFEKFSDPKIIRKKKLETFLNDIEKIAQKIGQKRAGRNLAIKVYELAKKSVPSCPSNSSTQLILNKRVVALINLIETTNEIIAKMNEIAKTMDEYKEVRNMKGVGDRLAPLLIAEIGDIRRFKNAGSLIAYAGIDSPPYQSGKYEATNRHISKRGNKYLRKTGFEVMQSIKSFCRIDCEIYDYIVKKESEGKCKKSAKIAGLNKFLRQYYGILKKKYIELGTW

SEQ ID NO: 373390 - protein, 344 aa, unidentified
MTQYKRIGIDTSKAVFTLHGIDQAERPTLRLNLRRRQMIDFFTKLPPTEIVMEACGGAHHWARELTALGHKVHLIPPQYVTPYVKRGKNDRNDAAAVCEAGGRPGMHFVPVKSVDQQAQAMVLKVRGTVVDQRTQLCNTVRGHAAEFGVVAGKGRGQVAMLLSVVEQQPAIPPEAKAMFVVLGQQIEALDAQIQHLDARLAEAHKSNPVSQRLATIPGVGPITALTLAIEIDPGAFESGRHLAAWAGLTPKEHSTGGKPRMGGISRAGNERLRALLVSGATSVIQAAVRPGGRQMTEWLRALLLRKPRKLAAVALANKMARIAWAMMTTGETYRHPLGVGAVAA

SEQ ID NO: 373391 - protein, 451 aa, unidentified
MSSTSTPSAHREPFVLVNPNAAGFDIGSAEIWACVPADRAPQPVRKFGTFTPDLQALADWLQACDIETVAMESTGVYWIPIYELLEARGFQVYLVNARHIKNVPGRKSDVKDCQWIQQLHSFGLLSASFRPEAEMCALRAYLRHRANLVDYRAAHIQHMQKALQQMNVQLTQVLSDITGETGLAIIRAIVAGERDPVKLAQLRNPRCAHSQDEIAKALTGHYRPEHVFALQQALALYDFYTAQIRECDVEIERHYKVFKPVVDVEQNPLPPTRKKNTHSKNAPSFDVRTQLYRLTGVDLTAIDGLNEATVQTILSEIGTDMSRWSTEKHFCSWLHLAPHNDITGGKVVRSRTLKGKNRAAQAFRLAAQAVGRTDTGLGAFYRRKRAKLGPEAAIVATAHKLARVTYHLLKYREPYQEMGREEYEQQVRERELAQLTRKAAKLGFTLTPQAA

SEQ ID NO: 373392 - protein, 461 aa, unidentified
MRPQRVIPQPVRIEAMPCVFPNAAGLDIGSTEIVVAVPPDRAAEPVRAFGTFTPDLAALVAWLVGLGIDTVALESTGISWVPIYDLLEQHGITPYLVNGRHVKIVPGRKSDWNDAQWLQKLHMLGLLHGSFRPDAEILALRTLVRYRAEVIHHRAPHILHMQKALLLMNLHLSVVLSDITGVTGQAIIRAIVAGERDAARLAALRNPACKARVAEITKALTGTWQAEQLFVLQQALSLFDHYTERIGTCDQEIERLLAAMESRGEDAAPLPDLPPAKGKSKTKNAPAASTRAQLARIVGVDLVAVTGLSASSVQTILAEIGTDMTRFPTVKHVASWLGLAPHNDISGGKILRSRTMKVVNRAAQAFRQAAQSVARSHTAFGSYFRAMRARKGPQQAVVATAHKLARTVYFMLLRGEPFQEESDTAADERRQEREIRQLARRAKKLGYTLTEAAPRTTETPT

SEQ ID NO: 373393 - protein, 337 aa, unidentified
MIIIGCDFHPSFQQIAMLDTETGATKGHKLMHTSGEAESFYRKLASPAVVGIETVGNDQWFVQLLQKLGHEVRVGDAAQIRASYVRKQKTDRRDAKHILQLLVEGRFPRIWIPDAGMRDHRQLLIHRHKLVQIRTRVKNELQHLMLNQGMQKKQKLWSTEGRAALASLPLEPWTDRRRKDLLNLLAMLDAQLESLDDAVTRVAKEYPGVPLLMSQPGVGAVTALAFVLTLGDVHRFPRGKQVASYLGLVPREHSSGGKQRMGGISKQGNRLLRFLLVEAANIAVRFDPELRKEYLHRCHQKHFTVAKVATARKLAVRMYWMLRTQTPYPQVLSSRVA

SEQ ID NO: 373394 - protein, 339 aa, unidentified
MGIVGGLDLHRRQITYDWLDTTNGETKRGVIRPATRQSLREWLAELARTDGAFALEATTGWRFVVEELQRAGLEAHVAEPADTRALRGKKRRAKTDRADARHLRDLLLAGSLPESWIPTEFIADLRTQVRLRKSLIDQRSGWIRRVRAQCFHHGLADPPNVQTAAGLAWLARAELPAVARQVVAVALTMIEAIDVHIHALEAELCAVARHQKGCLALQSQWGVGPLSAVALVAELGDVTRLSSSRKAVRFAGLDITVSESDIKRSRGYLSRQGPPVLRRTLYEAATSAWRKASPDHEYYLQTKGRLGTKRARLSVARRMLRRSYHLLANLGEAAIEPSR

SEQ ID NO: 373395 - protein, 397 aa, unidentified
MPAVWAGVDSGKRTHHCVVINQIGMVLLSRRVNNDEAELLELIGAVVDLADGDQVCWATDLNAGGAALLITLLAAHSQRLLYIPGRVVHHAAATYQGSGKTDAKDARIIADQARMRTDLQPVRDADQISVDLRMLTARRTDLICDRVRAINRLRATLLEYFPALERAFDYSKNKAALTLLSEYQTPDRLRRLGATRLAAWLRKRGCRNSAAVAAAAVDAAHQQFTTLPAEPIGSTLVIRLAAEISAIDRDLVELDAQLTDRFRQHEAAEILLSVPGFGPVLAATFLANIGGNLNGFDTVDRLAAVAGLAPVPYDSGRISGNLHRPRRFNRRLLRTCYLAALSSLKNSPASRAFYDRKRREGKSHKQALIALARRRLNVIWALLRDRAHYQEPALAAA

SEQ ID NO: 373396 - protein, 445 aa, unidentified
MAHAIQLSRGDVRRNARLERLRGVVGCDRAVLAVDLADDKQAVVVCDHDSRVLARRTWRCRPWQLAKALGWGLGVACRQGFAGVVVACEPTGHRWRVVVEQASGLGLAAVCVQPLLVRRAREAEDFTHDKSDDKDALLIARLTTQLHCYLPEQPTAAWARLRHLGNRRVEQLTLVTAAQQRLRDLLECGWPAALEVTRHPLDSLTWRAAMTVGRCDPAYSAGWAWPALPGRSPVSCPAGVDGAATCASCGRCMPPPVTTAGSHPSGPGRWNKARWSWPTSSRRWRRWPRSKGRMASVLGELGLAELVTSIRGLSVVGAAAILAETGDPARFDDAEAVVKHAGLCPRDNASGAFAGRTTISGRGRPLLRLAAWRAVWGALPHTPVVAARYAHLTSRQHNRLSDGQARAAVAAALLRQLWVVCVNRTPWEPAVAGGTANKEVTDPAA

SEQ ID NO: 373397 - protein, 329 aa, unidentified
MMTNPPQIVFNHIVAFEVSKETLVVHTLPADEQCTIDNKPQAVRRLIKAEIKRNRNKQLGQMLVICEATGGYERHVLDVALEMGVSVHRAHGTRVRHFGHYRGLLAKTDPIDARLIAQYGLKTENIRLYSPPPPDTAALRALHARRTEIQQMIIAETSRLDHAQHKSVLKSLKAHIASLKAALAAIEADIAQLVEGCEMLRKKVALMQTVIGIGPISAMVVLAYLPDIGQLTKGQAARLAGLAPINNDSGKKRGARHVEAGRTAIRRALYMAAGVAMRVNPILKAFSDRLRGKGYPFKYVVTAVMRKLIVILNAVLRDGQSWKGAQISA

SEQ ID NO: 373398 - protein, 410 aa, unidentified
MDVLYANCAGLDIHKDTVVACSRRVTAGKVMREVRTFKTTTGELLALSEWLASLGATHIAMEATGVYWKPVWNILSDGDFALILANAAHVKNVPGRKTDVNDATWLADLLAHGLIRASFVPDVQTQEQRGLLRTRKQLTRERTSHVQRLQKTLEEANIKLDSVISDVIGASGRAMIEALIAGESDPLRLASLASSRIKASPAALGEALRGRVTRHHRFLLRLHLQQIDALDRAIAEIDKEVEANLAPFRELIPVLTSIPGVGELAARVLLAEIGADMSRFPTAGHLISWAGLCPQNDESAGKRRSTRMRKGAPWLKTTLIQCAWAAARKKAAYLAAQFHRLRARRGPKKAVGAVAASILTAAYHMIADGTFYQDLGADHFERRAKPNQIKRLVAKIQSLGYDVEIKPLAT

SEQ ID NO: 373399 - protein, 482 aa, unidentified
MKPKSPLGTNKTNDHAMQGRWQEMNRKQRRETMRKIQSEDLSLEVIHRNAAGIDIGNESHYVAVPQSRDSQPVRRYGCTTGELKAMADWLKQCGIQTVAMQSTGVYWVAVYDILEQVGLEVYLVNARDTKNLPGRKSDVQESQWLMKLHTYGLLRNSFRPVQEIRTMRSYWRQRNDLVQSAGRHIQRIQKTLTQMNIQLANVLSDVSGVTGQAIIKAILEGERDPHKLAAFRDSRVKASEGQIARSLEGNWQPDLLFVLKQEQDGYEFCQKQMAECDQQLKQYLQNREDRSQGAALPEEQRKARRQKKKGNKPQFDLRAELFRLTGTDLTRIDSIDVMTATTIISEAGYDMSKWETENHFVSWLRLCPDNRISGGKIIGKGRLPTNNRATVALRMAASTLRLSDTYLGAQFRRLRTKLGAPCAIKAMAAKLARLVYRMLRYGMKYLDRGAAFYDAEHRRLQIKHLKWKAANLGLRIVEAPAT

SEQ ID NO: 373400 - protein, 337 aa, unidentified
MEYFAGLDISMEETHICLVDREGAVVHEAKTASSPAAIASVLAGAPQCRRVVFETGRMAPMLYHGLVELGVPVICIESRHAYQALKSLATHKTDRNDARGLAHLARTGFYKPVHVKSLPAHAVRSLIIARKKLIGQRVTLENQIRGLAVVFGVRLPHALTRAFIEQALKASEGVDGLSAAMRGLVGARTAVLEAVSAIDADMRRLVRACDAGRRLMTIPGVGQLTALAFTAAVDDVERFKRSRDIGAYLGLVPRRYQSGEIDYSGSISKCGDRRVRTLLYEAANVMLTRYKGPLKLKDWALAIAKRSTMRKARIALARRLAIIMHAMLRHGTDFVAA

SEQ ID NO: 373401 - protein, 405 aa, unidentified
MDYIYERCCGLDIHKASITACVNVNGKKEIVTFGTMTDDLLQMAAFLKERNVQMVAMESTGSFWKPIFNILEVEGIDAILVNAAHLKTVPGRKTDVKDAEWISDLLRIGLLKASFVKPRDQRELCELIRYRNSMIEERAREFNRMGKVLEGANIKLTSVASKLDTVSGMNMIRALAEGEVNPEVLASMAKGTMRSKRGELERALNGLVRPHQQMILKSMLNHVEHLSELIAGLDAEIKIRMCEDVELIDALDGITGVGENSAQTIIAEIGTDMSRFPSANHLASWAGMSPGNNESAGKKKSGKTKKANSTLKKTLVQCGRSAANSKDTYLNSQYRRIAARRGGKRAAVAVGHSILVICYHMIKNRTQYEDLGADFFQNRNEELFVKQSLKRLENLGYAVTINKVA

SEQ ID NO: 373402 - protein, 343 aa, unidentified
MQTITAIGLDIAKSVFQVHGVDADGQVVVRRQLKRRYVLAFFQKLPPCLVGIEACASAHHWARELQALGHTAKLMPPAYVKPYVKRHKNDAADAEAICEAVTRANMRFVATKTPEQQSCLTLHRARHLLMRQQTSVINAIRSHLAEFGIVAPVGRNGVEQLLGVVADSNDKRLPEVARACVAALGAQLRVLKVQILEFDRMIRAWHRSSEASMRLDQVPGVGPVLATALIASVADPKAFRSGRDFSAWIGLVPKQNSSGGKERLGNISKRGDRYLRSLFTTGALAVIRYAKIHGTRHRPWLTSLLARRPTKVAAIALANKLARMAWAMMAKGERYKEPAALAA

SEQ ID NO: 373403 - protein, 397 aa, unidentified
MYIVGIDIAKRKHEAAVIDGEGAVIIKPFSFTNNCSGYNRLLAMLTKAKLPLDEVSFAMEATGHYWLALFTRLQKEGFRVQVINPVQTNSIRSFYIRQAKTDPRDALLIAEVIRFGHFSESTLHPENIYELRELCRGRHAIVSMQADVKRKVVALLDQVFPEYETAFTNMFGDTSMAILQTCPTPKELSEMPLEELCHLIEVSSHKRFRMAKAQELQALARNSFGFAMAGDVFSTMIRLYAKHLVFLKQQVQEMDRKIAEIMDTLDTPITTITGIGPTLGAYILSEIGDISRFSSAAKLAAYAGIDPTMRQSGEYNGVRNRMSKRGSPYLRHAIWLAASSAVLHDPALKLYFQKKRDEGKPYMASVGHACRKMVSIIYAVMRDNKAYTPYIPNEISA

SEQ ID NO: 373404 - protein, 503 aa, unidentified
MTTPSIPGQPASASSARGPQAQAQAQRKAYHRRQTRAKAKSEALRHKEAAHVEALPVLHPHAAGIDIGSRSHWVCVGFTSEAPSCLIREFPAHTDGLKAIVAFLREHQVTTIAMESTGIYWVALYELLQAEGFEVFLVDPSYSHQLKGRPKTDRRDCQWIYRLHSVGLLAAAFRPDEKTCQLRAYLRQRANLIRQASRYVQHMQKALEQMNLKLTEVLSDITGVTGRTIIRAILRGTRAPEKLAKYRDKQCKASEAEIAQALTGSYREEHLFELKLAYEAWQFALKQVDKVDTQIALQLGRMKCDRALPPLKPKARPKRRANSPRFDVRMALYYVVGLDLTEIEGISELTALTIISEIGPGVSRFATVKKFCSWLGLCPNWQKTGGRVQSSRTRRGVNRAALALRLSAQSLHHSKGALGGFLRRMRGRLGTQAALTATAHKLARIVYLALKRGMTYVRQSQQEYLAQMREKQIKALRRKARQLGLEIVEKPSDGVAESASVQE

SEQ ID NO: 373405 - protein, 350 aa, unidentified
MSNHMFAAADVHAATTTFAVLDASGKFVMETVVETKGESLLSVVKSITGAVHLTFEEGTHAAWLYDLLKPHVAELLVCNPRKNRNDSGNKSDRIDARQLARWLRSGDLSPVYHGHDSTRALKELVRGYENLVSDSVRTKNRLKAVYRSQGESTSGGDVYKLEQREEWLSKIQSSGLRSRAGWLYSQMESLGELRREAEKAVLREAKKHRPCSLLRTVPGIGPIRSATIVAHAATPFRFRTKRQFWSYCGLAVVTWGSSDWVIDGEKLIRKRQPVATRGLNRNYNRRLKDVFKGAVRDAGLFRPHFDSLVASGTRPEMARLTVARKIAATTLAIWKKGEKFIPSKAVIRSE

SEQ ID NO: 373406 - protein, 337 aa, unidentified
MTLYCGIALHANNSVVAIIDEQDRIRFEKRLPNSLEAILSALSAFASELAGCVVESTYNWYWLVDGLMDAGYRVHLAHTSAVPQYAGLKYTNDHSDARHLAHLLRLGIVPTGHILPKEQRAIRDLLRRRLLLVHQRTLHHLSLQSLIARYTGERLSANETKKLDVDAVLARLGEPIGLGGQISCLGIQWLDRAIGLIEHEVYKQLKPRPDYRLLTSVPGIGQALGSTIALETGSIERFPGPGNYASYARCVKTEKISNGKLKGRGNAKSGNKYLAWAFMEAAHYAAIWSPEIKRYYQRRQAKSHILVAKKAVANKLARACYHMLKNQEPFDVKRAFG

SEQ ID NO: 373407 - protein, 291 aa, unidentified
MDLSLAGQPPCRHANNAALIKVLKKLPVPVQVICEPSGGYERDLLQALWAGGLAVSLVHAARVRAFARAQGLLAKTDPIDALVLREFGELLQPGTLAAPSPQRERLAALVQRREQLVNLLSTEVQRLAQTHDVVVRKLGCHLLKTLERQVEQLAEMIAAQIAADATLKAQSERLQQVKSIGPVTASTLLAELPELGTLSRNESGALAGVAPYNRDSGLHCGRRTIRGGRVRVRRVLYMAAVVAARFNPILKAFYERLLLAGKPKKLALTAVMRKLVVLLNHLLKNPHFKLA

SEQ ID NO: 373408 - protein, 416 aa, unidentified
MDIVHEQCAGLDVHKKTVVACVLRSAPGGVIDKEVRTFGTMTADLEAMRDWLAERGCSHVAMEATGVYWKPVYNVLEQREALTLLVINAQHLKTVPGRKTDVKDAEWIATLLRHGLLRASFIPDRHQRELRELVRYRTALIHQRAAEVNRLQKTLEGANIKLAAVLSDVTGVSGQRILEALIEGESDPEQLAELAHVRVLKHKREALEQAVVGRLSDVLRFVVQQQLQHLHDLEAQIATCDAKVADLLRPFEAALERLRSITGVGPRTAEIILVEVGLAIQRFPTARHVSAWAGMCPGNRESAGKRQRVGTRKGSPWLRAALAEAAWAASKSKDAYLPALFRRLSARRGKKRAIVAVGHSILVTAYYLLTRGAMYQDLGETYFDERDRQNVVRRSIRRLQGLGYTVHLESTDTKAA

SEQ ID NO: 373409 - protein, 422 aa, unidentified
MMGKERRWFVGVDWGSQEHVVSLYDDEGEKISQRRFAHGGTGLTDMIAWLLKASGGKPGDIHVAIETPHGPIVEAVLERGFNAYSINPKQLDRFRDRFTVSGAKDDSRDADVLADSLRTDMRAFRKLSIADPIVVELREWSRIDEELKVEHVRLTNRLKHQLWRYYPQMLELADDVGANWFLDLFEVVPTPEKAANVREKTIARILKNHRIRRFDATHVLSELRKPALSVAPGTIEAATARIRGLIERIRIINNQIKDAGRQLDRLCKNLSEPVADKDEETSPGKKTEQRDAAILDSLPGVARTVLATLLAEASDTLQRRDYHALRALCGSAPVTRRSGKSCIVVRRYACNQRLRNATYHWAQNAIQHDATSRAKYDALRAKGHGHARALRSVIDRLLNVACAMLNSGTLFNPEFASKQTTG

SEQ ID NO: 373410 - protein, 401 aa, unidentified
MVSDFRKGRYNLMKIYVGIDIAKLNHFAAAISSDGEIIIEPFKFTNDADGFQLLVSKLESFDKNSLIIGLESTAHYGDNLVRYLVTELYQVCVLNPIKTCQMRKNNVRKTKTDKVDTYVIAKTLMMQDNLRFVSFFDLDMMDLKALGRFRQKTIKQRTRLKIQLTTYVDQVFPEIQYFFKSGLHQHAVYALLKEAPSPKEIASMHMTHLANLLKVNSHGHFTKEQAKELRVLAQKSVGANDSAISIQITQTIQQIELLDSQLEKIEAEMTDIMKFNDSVIMTIPGIGYINGGMILGEIGDIHRFSNPNKLLAFAGLDPTVYQSGNFQAKTTRMSKRGSRVLRYALVNAAWNVVRNNATFKAYYDAKRAEGRSHYNALGHCSGKLVRVIWKMLTDNVEFNLK

SEQ ID NO: 373411 - protein, 391 aa, unidentified
MTQSAMAGRSTKAFDADATLVVVVEMSRSVWLVAGLLPGIERRPLKKMTPDENELALLLGRWRGEVAATGRCVRRVVVAYEAGRDGFWLARWLRAQEVECEVIHASSIAVSRDRKRAKTDRLDTALLMRALLGWLRGEQGHCTMVSVLSIEEEDAKRPTRERENLVGERTRLINRMKGAMARLGIRGFNPALRKAEGELEDIRTPEGTKLPPNTLAELRRDTSRLRIIEGQIREIEQGRRERLEAAGSSEADAMVSNLTRVVGLGLETADMLVHEILLRNLRDRRAVARYAGLTGSPNESGGRRRERGLSRAGNARVRRGMVHLAWRFLVFQKDSALVRWFRQRTADGRVRTKMAMVVALARKLLVALWRMARTGEVPEGVRLRPMAPVIA

SEQ ID NO: 373412 - protein, 319 aa, unidentified
MSPIVIGVDIAKLKFDVARLCEGKYRHKKFDNNPAGFEAFIAWLTSFADEQPWICMEATGSYSIPLAEWLTEQGYRVSVVNPAKIHAFAKSELIRAKTDKADAKLIARYCLNMKPDLWTPPPRAIRELQALLRRVEHLLEMQQMERNRLDTADPAITESIKTVLTTLDQELTATRDQIQRHIDNHPDLKQRRDLLESIPGIGPSASAYLLTALSAHYGFINAKQAVAHAGLAPKIQESGQWVGKTRISKTGDPALRKALYMPALTAWQHNPVIRAFCQRLQANGKNGKAIACAAMRKLIHIAFAILQSGKPFNPKLALA

SEQ ID NO: 373413 - protein, 343 aa, unidentified
MLHAGLDLSRRKIDVCLLSAEGEIVDEWASPPDADGLRGLAARAAMWAPAVRGVIESMNGARFVHDRLEEHGWEVLIADATKVKGLAALACKTDKIDARVLATLSARDLVPEIWLPDPSIRRERELARFRLHLVRHRTTLKNRIHAALIAFGHPCPVSDLFGHAGRELLDRLEIPDPWRANIDVSLALIDDLDLQIAALTVQLKRQGVDHRYIPLLVTAPGIGWINAYTIASEIGDIGRFASPAKLCGYTGLCPRVKQSGATDARGPLSKHGPKYLRWALFEAALNACKHPYYAERYQHTKRRLGRQRGPKVAQIDLSRRLTEAIWHMLTRNEPFAPAGAPVV

SEQ ID NO: 373414 - protein, 390 aa, unidentified
MILVGIDVAKDKHDCCIINSDGEFPEEVFSILNNREGYETLYKRICSLAVDLAKVKVGLESTGHYSSNLLAFLLDKHLTAYVINPLRVNLFRKGQSLRRTKTDKIDSRNIAHLLMTDSSLKPYSLSSYHMEELKSLTRYRASMVRERTKLKTSIARLVTILFPELEQLVSSIHIHSIYAMLEKFPGAAYIAAAHLTRLAALLLKASRGRFGRETAIRIKDTARRSIGAVSPAKSMELQHTIAHLRVYDQEIGEIESEIEKIMDDVNSPITSVPGIGMQMGAVILAEIGSFRRFDSPDKILAYAGMSPSTYQSGKLTGSYSRMEKRGSRYLRYALFNVTRYVCHYDPGFTAYLSKKRKEGKHYYVAISHAVKRLVRVLYAMEISGNRYQTA

SEQ ID NO: 373415 - protein, 398 aa, unidentified
MSNYIIVGCDLSDRSMMLQIAHQGNRPRKKAFANGESGRFRMISYLHAQARKAGGARIVFAYEAGPHGFGLHDALTDHGIACHVLAPSKMPSSPKKRGNKTDEKDALDIFEALRGHLLAGNRLPSVWVPDPRTRQDREIVRARLDAGDKARRVRTQIRMLLKRAEIGKPKTLGKNWTVKHLAWLRGLIGSASPLGDGSRLMLASLLRQLAFLDEETATLDAAVATLARQERYRAKAAALQDEIGVGILTTMVFLTEMGDLGRFSNRRQIAAYLGLAPRSNETGQRSDRKGHITRQGSARIRWVLCQAAWARVRNHPGEKPVYDRIVAKNPKKKKIALVACMRRLGIRLWHDGIEAERRARMAPPSRPPEGGKRQLALTAPRPKRRRRSPTEEERRRAV

SEQ ID NO: 373416 - protein, 454 aa, unidentified
MSSKAYRATRVNEVNWAQIARGKEGLGVTVGIDVGKFDLSVICRWADGRFERPWRVKNPWGIPTLVGVLKQVKADRRLVVALEPSGTYGEALRQALGDNGIEVQRVGTKASHDYAEVFDGVPSQHDGKDAAVVAELAALGKAKPWAYQAADPWEEELAYWVEEMVAQRQMLTPWQGRLEGLLARHWPEASQVLKLSSGTLLRILKRYGSPQALAEDADAATQLARWGRSLLSSAKIEELLTGARSSVGVRPGPWQQRQIQEYAERVLAARQQANRAQRRLRELAAGHPVLQAQGKVVGVPTACVLWASTGDPGKYHAAAAYRKAMGLNLVERSSGSYQGRLRISKRGSARTRQWLYFAALRLIQKSGVRPWYEAKKARDEDDARRVIVAVMRKLAVALYHVGVHGEEFRPRRLFGRIWGRGSPAELRTGTRGPVRPRGSPLADDGRRGVRGLLV

SEQ ID NO: 373417 - protein, 338 aa, unidentified
MPLYGGIDLHANNSVVVLLNEQDQVIYQRRLANHLPTILEPLAPHQADIMGVVVESTYNWYWLVDGLMEAGYRVHLANPAAMQQYNGLKYTNDHSDARWLAHVLRLGVLPEGYIYPKAERAVRDLLRKRAHLVRQHTAQVLSVQNLMARNTGSRFSAKRLVDLTPADLQGMLPEAAHVLAVTSSLAVVHCLGQQIKTLEKTVNTCLKPTPAYAQLQTVDGIGTTLAQTIVLETGEIGRFPTVGHYASYCRCVGSTKISNGKRKGQGNIKNGHPYLEWAYMEAAQFAIRFSPTVQRFYQRKPAKSHLMIARKAVAHKLARACYDILRDLVPFDVHKAFG

SEQ ID NO: 373418 - protein, 352 aa, unidentified
MPILADRADVVVAVDTHTDTHSAAVLSPVGAVLAELTVASDPAGHARLLAWASRHTEALRRVWIIDGARSHGIGLTRDLRQAGEEVIDAPRVAGQGRRRGGKSDTLDAIHIGRTALGASKLATPRSDGDREALRILLVCRRHYTDQRTATVNLFKSLILTADHDLRGNLRGLTTARQVTHAARLDATTSGDLDPAARVRRQHLAALATQISTLDQTLAANKAQLTKLVAAMCPVLLDQPGVGPVTAAIALTAWSHRGRFRNDAAFAAFAGASPLQASSGRTVRHRLNRGGDRTLNAALHTIVITRRRAHQPTRDYIARRTAEGKTDREINRCLKRYLARKLLRIMQANRPAS

SEQ ID NO: 373419 - protein, 343 aa, unidentified
MQIRSVGIDLGKTTFHLVALGDNGKVLLKKKFTQRQLITFTANLQTTLIGLEACAGAHFLGRALREQGHDVKLIPAQFVRPFVKSNKNDFLDAEAIAEAVDRQNMRFVSIKTDDQLDLQALHRVRDRLITRRTSVINQLRAFLLERGLVFAKSPAKLRERMPEILENAEEDLTPRMRNLLALLWNEWKDLEQQVVDLNHEVELIASSDAACLRLMQIPGIGPLVATAIVASIGNGAAFHKRREFAAWIGLVPRQYSTGGKAKLYGISKRGNRYLRKILIHGARAMVLRCKRDRVPMGAWMTALEARAPRNVLIVAAANKLARIAWAVLSSGQDYRAVQEPVAA

SEQ ID NO: 373420 - protein, 358 aa, unidentified
MDHYIGCDAHKKYSVFAGISEAGELMPPTRVEHDREVYRAFLKGLPQGSQIAVESVGNWYWMIDEMEKAGHIPALVHAGKAKLMMGRINKTDKLDAQGLAVLSVNGTLPAIWIPPRELRDQRELARMRISLVRMRTGLKNRIHATFAKYAITFPEVSDLFGVRGRNLIEKRLEELPPETRHCVKEQLKLLDQLQRQIGEAEDRIWQMVKITPEMRLLMSMPGVGPILAVLVALEIGDVTRFPDAAHLASYCGAVPRVKSSGGKTYYGKTRPDVNHYLKWAFTEAANCIVLNQHRMTGRHVAKLYQRIRHSKGHAKAVGALRRHLAEAAFVVLRNGQPYHEPELPRRHSIAKEVCAGFA

SEQ ID NO: 373421 - protein, 430 aa, unidentified
MEKIRKNVAGIDIGARHVFVGIESNKAKMFETFTEDFEDLAHYLLENKIESVAMEATGVYWVILYDILETQGLDVWLVDGRSTRQVLGRKTDVKDCQWIQQLHSYGLLNRCFIATELVQELRNYQRLREDHIRSASMHINHMQKALTLMNIRLKEVISQIHGASGMRIIRAIIQGERNAETLTAMCEDSILKNKRDRVIKSLNGHYNSSGLFTLAQAVECYDFYQIQINSCDKKIDQVLLKMSSGKELTQNKRTPRKPIRHHKPDVKNMDNYLLKIFNEKDATVLPGITDYNWMQLLSELGTDLQKWKTEKHFTSWLGLAPKQHNSGKMRRNYKPKGSPKAGLIFKQAAVSLINSKNIALGAFGRKIRAKKGGLVAIKAVARKLATLYWKLFVKGLDYVEKGIKAYEEKVLINKQKAVTRMAKELGLSIV

SEQ ID NO: 373422 - protein, 339 aa, unidentified
MKLYCGMDLHSTNTYCAIMDENRKRVFERRLPNQPKVILGFLEPYRAGLEGIVIESTYNWYWLVDLLQENGYRVHLANPSAIKQYSGLKHSDDRHDAFWLAELLSLGLLREGYIYPKEVRPIRDLLRKRGHLTRLRTSLLLSTQNIVLRNQGIKVGSDDIKKLSKDLLTPYLRESEGLFLAGKISKELIDAFTRQIKEIEAWVMKRLQPHKLFSNLLTLPGVGEILAMTILLETGCIARFPKAGNYASYCRLVASQRTSNDKIKGKGNDNNGNKYLAWAFSEAAEHARRHYPMCRSFYNRKLNQRNATVAHCALARKLSRAAYYIQKDQVVFDETRLFS

SEQ ID NO: 373423 - protein, 338 aa, unidentified
MKVYAGIDLHSNNSVALVLDEQDRVLVERRVPNDLERVLSLLEPYRDDVVGVVVESTYNWYWLVDGLMQAGYRVHLANTAAIQQYEGLKRTDDAHDARWLAHLLRLGILPVGYIYPKAERALRDLLRKRSQLVRQRTANVLSVQNLVARNTGARISGNAVKRLDAEEAVKLDVDALRGQAIEANVVVMNCLEGQIARIEREVLSQAKEQPEFALVCTTPGIGKVLGLTIVLETGAVSRFAKVGRFASYARCVDSERISNGKKKGVGNVKCGNRYLAWAFVEAAHFAVRYEPRIKRFYEKKRAKTNAVVAIKAVAHKLARAVYHMLRNQEGFDVTRAFG

SEQ ID NO: 373424 - protein, 314 aa, unidentified
MIKRAIGVDVAKHELVIYLDQNHYSIKNDKKELNNWFKSNKDQIKSCDVIAYEPTGGYERTLTSFLKDKSLPGFRAHANHVRYYAKAMSLNAKTDNIDAKIIAKFAISKCNAPDNIANHDEDLTALISRRQQLIDMKKQENSRLDTINNKIMIKDIKSSIKTLEAKIKKFNTHIQNHIKSNPKSKEDVELMESIAGVGFITASSILGYLPEIFVANNKSLAALSGLAPMNKDSGNYSGKRRIFGGRSQVRNILYMATITAKTYNPVIKDFFDRLIKKGKPFKTAMTAAMRKLLTIIRSVVTRRTPWVNEAPINI

SEQ ID NO: 373425 - protein, 339 aa, unidentified
MAIVTIGLDLAKSVFQAHGVDETGATALTKRLHRKQMAPFFSKLPRCLIAMEACGTAHYWARTLAAMGHEVRLIPPSYVKAYVKRGKSDALDAEAICEAVQRPAMRFAPVKTVEQQSILMAHRARSLLVRQRTMLANALRAHLAELGLVANPGIANLAKLAHQALSDENGLPSCARTTLEALVRQIMTLSQEITALDRKLLAWHAENEVSQKLTAIPGLGIVTATAIAATVTDPDQFRSGRQFAAWLGLTPQQHSTGGKTQLGGISKQGDRYLRRLLVVGATAVIRHTKDKPTPMANWIRKLLVKKPFRVVSVALANKLARIAWVVLTRKEAYRPYQLA

SEQ ID NO: 373426 - protein, 343 aa, unidentified
MEHFAGLDVSVKETSVCIVDDTGKIVREVKVASEPDALLAVLTNPAYRFKRIGLEAGPLSQWLFTALAEAGLPAICVETRHMRAALKAQINKTDRNDARGIAQMMRAGLYRPVHVKTLRSQKLRMLLTHRKLLQSKAIAIENDLRATLRNFGLKVGGVGTVKFEARIKELVEKAPDLMMLVEPLLVVRRALREQIGILHRRLLAIVRDDDVCRRLMTVPGVGPVVALTYRATVDVPVRFRNSKAVGAVFGLTPSKYQSGEINRTGAISKCGDEMMRAMLYEAAHILLVRSAKWSWLKVWAMQIARRRGLKKAIVALARRLAVIMHRIWVDGTEFRWTREAAAA

SEQ ID NO: 373427 - protein, 397 aa, unidentified
MYIVGIDIAKRKHEAAVIDGDGAVIIKPFSFTNNCSGYNRLLAMLAKAKLPLDEVSFAMEATGHYWLALFTRLQKEGFRVQVINPVQTNSIRSFYIRQAKTDPRDALLIAEVIRFGHFSESTLHPENIYELRELCRGRHAIVSMQADVKRKVVALLDQVFPEYETAFTNMFSDTSMAILQTCPTPKELSEMPLEELCHLIEVSSRKRFRMSKARELQALARNSFGFAMAGDVFSTMIRLYAKHLDFLKQQVKEMDRKITEIMDTLDTPITTITGIGPTLGAYILSEIGDISRFSSAAKLAAYAGIDPTMRQSGEYNGVRNRMSKRGSPYLRHAIWLAASSAVLHDPALKLYFQKKRDEGKPYMASVGHACRKMVSIIYAVMRDNKAYTPYIPNEISA

SEQ ID NO: 373428 - protein, 353 aa, unidentified
MDRITRVGVDLAKNVMQVHAVDGTGRVVVRKAIARERFVSWFANLEPCLVAMEACGAAHYWARKLRALGHDVRLIPPQFVAPYRKGGVHVKNDALDAEATCEAASRPHMRFVPVKSPAQQSVLVLHRMRTGFVEERTALVNRLRGLLAEFGVFLPQGIDQLRKHFVDRVEDGNNELAGPARQALMHGWAQWQALDEEIAWFDRQIAEHASHDPQAQRCMDVCGVGRLTASAAVATVVDARQFKNGRQMAAWLGLVPRQKSSGGKQRLGRITRQGDDYLRTLLFQGARSAVLTAHRHDDRLSRWIVQLQARVGYYKTLVAVANKHARILWAVLAKAERFDPSHAPARYSRAAGA

SEQ ID NO: 373429 - protein, 336 aa, unidentified
MSAYIGLDVYKDWTFAIVLDQSGRVVVRRKLENEDVPSFLENFNVEKIGLESSTYVVPLYRALVDRGFRVEVGHPKKTRYIAEARIKSDRVDSKAIAELVRLEALPQSYMPPPDIAALREKVRRRAFLVRQRAKLMAKIRVVLAYEGLKPPEGLGLFTRKGVDWLESLGLEPVSCYLRLIMAFNGEIHRLSLDLRRLAGLDEDVRLLMTIPGIGYYTALLVKAETGDVNRFSNGEHYCSFIGIVPSTYSSGGVTRHGGITREGNPWLRWALFEAAMTHVKYDTSISRSYHRIAERRGGKVALVATARRLALCCYSVLKNRRPYRAFPHGQALHDSS

SEQ ID NO: 373430 - protein, 397 aa, unidentified
MYIVGIDIAKRKHEAAVIDGEGAVIIKPFSFTNNCSGYNRLLAMLAKAKLPLDEVSFAMEATGHYWLALFTRLQKEGFRVQVINPVQTNSIRSFYIRQAKTDPRDALLIAEVIRFGHFSESTLHPENIYELRELCRGRHAIVSMQADVKRKVIALLDQVFPEYETAFTNMFSDTSMAILQTCPTPKELSEMPLEELCHLIEVSSHKRFRMAKAQELQVLARNSFGFAMAGDVFSTMIRLYAKHLDFLKQQVREMDRKIAEIMDTLDTPITTITGIGPTLGAYILSEIGDISRFSSAAKLAAYAGIDPTMRQSGEYNGVRNRMSKRGSPYLRHAIWLAASSAVLHDPALKLYFQKKRDEGKPYMASVGHACRKMVSIIYAVMRDNKAYTPYIPNEISA

SEQ ID NO: 373431 - protein, 352 aa, unidentified
MERQRLEDSEIVGGVDTHKQAHVAAAVDGVGRLLGTSEFPATSRGYRDLLRWLRGHGVVSLIGVEGTGSYGAGLARYLAREGVSVVEVIRPNRQLRRRRGKSDPVDAEAAARAALAKEADVTPKSADGPVESMRMIRLARTSAVKARTQAANQIDALVTCAPQSLRSQLKDLSLRRLVERARRWRPGDIQDPLSACRATIKGLARRWSQLGAEIAGYDEQLLRLTRRVCPELLARTGVGFEVASSLLVAAGDNPDRLRSEASFAALCGVSPLDASSGQQRRHRLNRGGNRDANRALWVVAMTRLRVDERTQAYAARRTKQGRTKREILRCLKRYIARELYSILRCNTLLTPP

SEQ ID NO: 373432 - protein, 388 aa, unidentified
MHVVAAQSEAAIAIRTDLCATFVSLELSRSTWLLTSLSPGAGEKMSKHSVSAGDTAGLFSRFVELQQKARTRTGRTFPIITIQEAGLDGFWIHRLLQGEGIESWVVDPASVLTSRRRRRAKTDKIDGETLVRTLLAYKRGEPRVCAMVKAPTPEEEDRRRICRERKTLTAERVRHVNRIKGLLFAQGVGDYEPLRRNRRGRLKELATGDGRPLPEHLKAQISRELDRLEVILAQLKAVGSERDAMLEPAKEGPPTPALLLAQLKGIGPEFAAVLWSEGLFRSFNNRRQVAAYAGLAPTPWQSGSVAHEQGVSKAGNPRLRTTMIQLAWLWLRHQPGSALSIWFRERVQRNGGRGKKTAIVAMARKLLVALWKYAVHGILIDGTTAKAA

SEQ ID NO: 373433 - protein, 351 aa, unidentified
MERYLGGDVHAASVTLSVLDELGKQLRRDVVETNGQALVGYLKQQPGNLHLCIEEGEWSQWLYEILSPHVSELVVYRSEWKPGVKSDAIDAHGLAEKLRTGTLGRPVYKDAKRFTALREQARAYAMVTRDVARVKSRIKAFYRSRGVPCAGNAVYQPAERAKRARALPPATRRAVELLGRELDALLVLKAEAERAMLRESHRHRIARILETAPGFGPVRVGLMLPIVITPWRFRTKRQFWAYCGFGIVTRSSADWIRVDGRWVKARMIQTRGLNFNHNHTLKALFKGAATTVIAHSGPNPLRAGYDRLLANGTKPNLAKLTVARQIAAIVLALWKTEAKYDPGRIQASMNR

SEQ ID NO: 373434 - protein, 359 aa, unidentified
MKQNIMVGCDLHDGTMVLRLVGANGKTLGGLYSTGKKGRQEMFDALKTESKMAGGAPIYLAYEASGLGFTLYDEAVKEGIQCFVLAPSKIEKSVKQRKNKTDAKDAEALLELVRCHVLAGKKMPAIWIPDAELRDDRELMRERLELGEEAARIKTKIRSLLKRYEIKLPKETGKGWSKKTESFLRKESDESVVLGPQGCEVLGSLMRQLEALEKEIKVLEKGFKDLARKPRYQKPVEKLVELKGVGLLTALVFMTEMGELERFRNRRQVGSYMGLAPSVNESGESGDRKGHITRHGSKGLRKVLCQAVWSSIRHGGKEREFYDKLVEKNSNKKKIAVVASMRRLAVRMWHVGIAAQKAA

SEQ ID NO: 373435 - protein, 320 aa, unidentified
MTILTSPTVIGIDVAKAGIVAYREDIKTTQAIDNDRETLSRWLKALPAQSSIALEATSIYHLDTVELAHEMGHRVYVVDAYRLSHYRESIGQRAKTDPCDARLLARYLSSEQERLRLWSPPPQAYKVLKSLLHRRAELINVRVGIALSWSSEPLLKDELARQLKSFKQAEQAIQKLLHKVSKEAGITENIKRCKAIEGIGELTAVGLATAFMRGHFANGDAFIAFLGMDLRAKDSGKKNGPRHLSKKGDTELRRLAHNAAMAACRSATWKPYYESYLARGLAKTQALVILARKLCRVAFALMKNQSEYQPNLRLQGSPAT

SEQ ID NO: 373436 - protein, 346 aa, unidentified
MRFYNRQHTYYCGIDLHVKTMYVCILDGAGQVLVHRNVPSTPAAFLEVVALYREGLVVAAECMFTWYWLADVCAAEGITFVLGHALAMKAIHGGKAKNDRIDSHKIAVLLRGGMLPQADVYPAAMRSTRDLIRRRLHLVRKRGQLLAHIHNTRAQYNLPIFGRKLAYRTNRDGVVEHFPDPSVQKSIAVDLALIDQYDALVIDLDLTIVREAKRHNADACHRLRSVPGIGKVLALTILYEIHDITRFDRVQEFASYARLVKCKKQSGGKTLGTSGAKMGNVHLKWAFSEAAVLFLRHTEGKKLIARIEKQHGKGKALSILAHKLGRAVFYMLSRGTVFSMEKFLAA

SEQ ID NO: 373437 - protein, 373 aa, unidentified
MPRYSTAFGMDVHLRSTTVCALDAETGEAVTRRFRGNPWGEVAEWMSGFPGPSLAAYESGYLGFAPQRELSGLGVDCVVAAVSRVPRSAADLSSKNDRNDAARMAKAILSHDVTPVWVPSPEIEGLRDLAAAHDAATARLAAAKQRLLAFLARRGYAYGGTTPAGNPRRYWTYDFLRWLDKVRPADDGGIRALAALRSEVEAAAETRDDLLAEYRAAVAAGPLSAEVEALQSIKGCGFALAAAFASEVGDFSRFRSGRQVTSYFGLAPKQRSSADSVRLGGISGAGNALVRRLAVEGSWSYVQASHQPKLMPKGSGVPLEVRMHGRKGSERLLRRREEMLARGMPQAKANAATAAELVRWLWALGAMCREATE

SEQ ID NO: 373438 - protein, 381 aa, unidentified
MDQKQATTVKEVTTRFPVLYVAFELGNSTWKVACSDGRKVRQVTVTARDLEQLQRALLRTQAHFGMGEAVAVVSCYEAGRDGFWLHRYLQGQGIDDVVVDSASLEVDRRLRRAKTDRIDAGKLLRMLIRYHGGERQLWRVVRVPSREDEDARQLHRELEGLKRERTRHRNRIHGILMQQGLRIPNPSKKRFLKDLEALRTWDGKKLPGGMKARLGRSYQQLRLVEDQIGALATEKREQLKQVDNVKMRQVAQLLRLPGIGPVSSWAFVMEFFGWRQFRNRREVAALAGLTPTPYDSGRKLREQGISKAGNRRIRTLAIEIAWAWLRYQPHSKLSQWFSERFAGGGTRMRRIGIVALARRLLVDLWRFLEYGVIPEGALLTS

SEQ ID NO: 373439 - protein, 319 aa, unidentified
MNTTTSAHIDCRERHVGIDIGKSMLDICIFELDVYLQYPNTPEGIRALLKKLSRYNLSRILVEATGGYERVLVEACAEKELPIVIIQPTQVRQFAKAQGIIAKTDKMDSRLIAQFGAVMKPEVRPLNSKKVRYIRDLLSRKRQLNEMRTQELNRQHKAPAMLAATHKRLIKMLDKEIEGINKLLAKAVSEVTEWQRTCEILNSVPGVGDGVTFTLLGELPELGQLSPRKIAALCGLAPFNRDSGIMKGRRRIKGGRAPIRTVLYMAMLSAIQCNPVIKKFYKKLVEQGKHKKVALTACMRKMMTILNAMVRDNCEWQAN

SEQ ID NO: 373440 - protein, 332 aa, unidentified
MNLVSTLGIDLAKSTFSLYGVNLNGEVVLRRTLSRAKLSELVAQLPPCLIGMEACSGAHEWARRFAASGHTVKLMAAKFVTPYRKSGKNDGNDAEAICEAVARPNMRFVPVKSLEQQSDLSLHRVRQGFVEERTATLNRLRGLLAEFGHVLPLRAIELHRRVPLLLGKLPVRVAACARDLLEHAARLAAKTLEYEHEIRAHVRSNALARRTQTRMGIGPITASALVATVGNGRDFKNGRQFAAWLGLVPRQYSTGGKTRLGHITKRGDPYLRTLLVMGARAVLQRAASLTDPLSRWALAVRERRGYHRACIAIAAKNARVAWALLAREPVAA

SEQ ID NO: 373441 - protein, 369 aa, unidentified
MKQYSKVVGMDVHKKMIMVAVLPSESDRVTERMTIQNETKVVEKLVNRLAAQGPVEFVYEAGPCGYEMQRQIAAMGHRCVVIAPSLTPVRPGDRVKTDRRDAEKLARFYRAGELTEIHVPSREEEAARDLVRGREDILEDRLRARHRLMKFLLRQGRVFGETRAWSVAYQTWLKSQRFQWVPLQQTFGTYVRTAEEAQARLDVVDQQLQDLTQQEPYRIPVQYLRCLKGIDTLSALTLFVETQDFRRFPTARGFMSYTGAVPSEHSTGGNHKRGSITKAGNAHIRRILGEAAWSYRRRSVISRPLAERRQGCPQEVVRIAKKAQDRLERKFSRMIARGKLHQVTVVAVARELAGFVWSIAQHCPVRTTA

SEQ ID NO: 373442 - protein, 326 aa, unidentified
MEHELHYIGIDTAKEKLDVDVLRPDGRHRTKKFANTTKGHDELVSWLKGHKIDHAHICIEATGTYMEPVAECLYDAGYIVSVINPALGKAFAQSEGLRNKTDTVDARMLAEFCRQKRPAAWEAPHPLERALRALVVRHQALTDMHTQELNRTETAREVQRPSIDAHLLWLEAELKRLEKQIKDLTDDDPDMKHRRKLLESIPGIGEKTSAVLLAYIGLKDRFAHARQFAAFAGLTPRRYESGSSVRGASRLSKAGHVSHRRALYMPAMVATSKTEWGRAFRDRLAANGKKGKVILGAMMRKLAQVAYGVLKSGVPFDASRHNPVAA

SEQ ID NO: 373443 - protein, 335 aa, unidentified
MQIYGIDLAKEKFDVSFFDLTSKKVSNHPSHKVVKNNFKSIGRFLETLPSDAVLVAEHTGVYGDTLLKCCMDSNVKIAFVGGYVIHRYRATPDRAKTDVLDCALLRDFGERYPDKLKYKTFPEEALYELRQLARHREMLVEQRKQLMTADKSEDCRPIRSLAVKRSMDRIKEMLDTEIAETEKEMLKVINGHESIHHNYELVKSVDGVGLITAVELLVKTENFTKITTARQYAAYAGTAPYEKSSGKMDKGAHISKIGNRRSKTLLYICAESARLHNKEIKLYYERRTLIDKKPRHYVLNAIANKLLRIIFTLVEKGEYYDANFIRQDPRVVKYN

SEQ ID NO: 373444 - protein, 387 aa, unidentified
MQALLYCCCGVDVHDEVIETCIIKGFEDEPEIIRRQFQTRPRNLKDFAMHLMEHGCFNISMESTGVYWRPVYEAIEDYCERFDKIVVTNAAHMRNVPGRKRDQDDAEWLATLLRHGLLKSSFVPERIFRDLREASRLYKKFVGEQSRYTNRIMKLLQAHGIKLSHVLSDILGVSGRNILKTLAVRGSLSVDDVASCLRGRTSHTPEEIHETVSGSLNPDERQMLLILLNKVEAAKRDMEAITTLMLQMMTPYPRSLEIVDSVPGFDVLGSLLLLAEISVTPHLSFDSANKLCAWAGLSPRNDESAGKIKSRKILPGNPYVKSLLCQAAWAAVKSRNNTFRDWFWAHQGKMGQKKAIIAVSRKLLKTIYTLLSIDSLFDHDIAAANRK

SEQ ID NO: 373445 - protein, 344 aa, unidentified
MDHFAGLDVSVKETSVCIVDDTGKILREVKVASEPGALLQVLTNPAYHFKRIGLEAGPLSQWLFSALAEAELPVVCVETRHMQAVLKAQINKTDRNDARGIAQMMRVGLYRPVHVKTLRSQKLRMLLTHRKLLQSKAIAIENDLRATLRNFGLKVGMVGKVRFEERIKELVENRPDLAVLVEPLLVVRRVLREQIVILHRRLLAIVREDEVCRRLMTTPGVGPVVALTYRATVDVPARFRKSKAVGAVFGLTCSKYQSGEIDRSGRISRCGDEMMRVMLYEAAQSMLRSKKWSWLKAWAMQIARRRGMKKAIVALARRLAVILHRIWVDGTEFRWTREQATAAA

SEQ ID NO: 373446 - protein, 350 aa, unidentified
MLIGVDYHPSFQQIAFFAEETGECGERQLNHSHGEAERFYRDLQQRGTRVRVGMEATGYSRWFERLLAELGFELWIGDPAEIKAKRVKKQKTDRKDAQLLLRLMREDNFPRIWVPSPENRDLRQLLWHRHRLVQMRTRIMNQLQALAMNEGRRWKTKLWSEQGRAELEKLALAPWASRRRQELLDLLDRLHPTIEELTVAVEREARKRPEVVRLMTHPGVGPLTALAYVLIIGTPARFHCGKQIGTYVGMIPGEDSSAGKQRLGHISKQGNSLLRFLLVEVAQAAARSNPEWRRRYMHLAMRRHRSIAKVAMGRKLAVRLYWMWRNGCAYSSSLEFGSYVGQLGTGHGVQ

SEQ ID NO: 373447 - protein, 340 aa, unidentified
MKQVIAIDLAKRVFQIHIPTNANRPALNKVLTRNKLLAFIAKQPESIIVMEACGTANYWCNQFAQLGHEVRQISPQYVARFRIGNKNDKNDAIAISEAFSRPDMRFVPIKKIEQQDRQCLHRVRQRLVKNRTAIINQIHGLAAEYGMALSEGKHKMLSEILDELEDGSNGLSPIFRELLQELYLEFKDIDLKVKKLSSQITQLNSISETAQKLLTIPGVGPLSASVLGIELGDGTCFKNGRHFSSYLGLVPKERSSGGKVRLLGITKRGDSYLRGLLIHGARAVVYSVSKIPLEQCNRLQSWLKKLITQNGVNKAIVALANKNARMAWAIVKTGEAYKAV

SEQ ID NO: 373448 - protein, 421 aa, unidentified
MWAVALDVHRDFCEVAIVAEGRLRSAGRIATRPDALELFAQSLDPRDLVALEVTGNAWAIARILEPHVARVIVVSPSDTGIRQARAKTDRLDARALAKLLWAGQLDGVWSPDERIRAMRRRLARRSQLVRARSRAKNEVHAVLMRCLKDRPPASDLFGVKGRAWLAEQQLALTERETVDSAVRQVEFLDSEIAQVERLIAAEALSWPEVKRLMSVPGVNVIVAATFMAAVGDIRRFSDRRKLTGYLGLDPRVRQSGAGPANHGHISKQGSSSARHALVEACWSTVRQPGPIAGFYQRVRARRGHSIAIVASARKLACLFWCLLTRGEDYAFAQPSLTTKKMRRLELTAGAPRRQGGQGVWATNDAMRHAERELALQAQRAYERTVKDWQQKKGASATPGRASSGSSKEQVARQTPRPKSAL

SEQ ID NO: 373449 - protein, 364 aa, unidentified
MKRKVYVGMDVHKETIRIACLTSNTKEIVKEQQIKHNEVQIKKFVNKLKSEWNEIHSCYEAGVTGYPLYRNLKSLGVNCILVAPGKIPRQSSDKIKTDKRDAIKLAKLLRSGELESIHVPSEEDEAVRDYLRSRDSLRLDLGRNRQRLMKFLLRKGITYSATKYWTVSHNKWLNNLQFNNEILQETFNDYYSRVRVQEENLKAMDKRIQEIAKSEPYREKVGILRCFRGVDYLTAMFLLCEVCDFKRFKTAGSFMSFLGLVPGEYSSGSKRKQTGITKTGSPRLRRILTEAAWQHRFPGTGSKIVTARRSGQPALVVALAEKASLRLHKKFRNLQQRGKTPQVMITAVSRELSGFLWAAMNLVA

SEQ ID NO: 373450 - protein, 394 aa, unidentified
MKLVGIDVGKNSHHFCVMDKETGEFNVTPTSFSNNKEGFDFLINSLKPYSKKSILLGMEDTGHYHVALLKFLLSNGYTVALINPKTTDLTRKMEGGITKNDKLDTITICDVLDTPERKKQYRITKVDRFDFYEQRQLTRHHHDLKEELNVYCNRLQKSIDLVFPEFNTLFSSKYGVVYMNLLKTFGNAEIIASTDIRTIRKCFEIKGRGNRISLTPEKLKECAKNSIGISSEVETIQIKHLVSQIMLIKEQIAEIDKKIEEFSITNNSPILSIPGISHFSGTSILAELGDIGNYSKPSRIIKFAGVAPYHYESSQYNAQHTGITKKGSKYLRKTLYQIILPVIKYNPVFKKYYLLKISQGKGHRCAQGHCIRKLLRIIYHLLETGQSFDPALLR

SEQ ID NO: 373451 - protein, 420 aa, unidentified
MKEPKVSNFSLLVGIDWADQKHDICERSVDGKNQRLLVISSKPDAIDDWANSLKKRYPDKPVAVCCELKKGPLVYALLKYSHIVIFPANPATVSQYRKAFATSGAKDDPSDAMIQADFLMLHMNKLRMLEPESASIRALAQLLETRRKMVQNRVDICNKIIAALKNHFPLVLDIFPDRDTTIFCDFLDRWPTLKEAKKARKSTLLRFFNNHNARYPDINEKRIRDIKNAVPLTDDFGVIEPSVILVNILVSQLRLLIEAIDILNKEIKTRYRVTKDHFIFDSFPGAGPQMAPRILVAFGENRERYETCEELQRLSGVAPVLERSGNQEWVHWRRSCPTFLRQTFIEWAGLSIRYSFWAQAYYDQQKAKGKHHQTIIRALAFKWIRIAFRCWKTKTPYDETKYLNALKKRNSPLLNFAVQS

SEQ ID NO: 373452 - protein, 376 aa, unidentified
MYSITKYVGFDVSKEKIAVSVADLGIAPARFFGLIENSPEKIRKILKRLGKREELYVCYEAGVMGYELARFLKGLGVKCMVVAPSKIPQAPGPKVKTDRRDAMRLAELLRAGELISVWVPGEDDEALRDLSRARKARKEDLKRAKQRVKMFLLRHGIRKPDGMKAWKEPYRAWLRSIEFPFRATQMAFQEYLIVVEEIEQSVRRLELEVHEIATDSPHAPIIKALQALKGVQETAAVTIVAEIGDFTRFSNPEELMAYAGLVPREYSSGNKTWRGNITKTGSSCLRWILTECAWSYRYKPRISRDLMKRMEGLSPHIQAISWKAQVRLNKKFTKLLIRGKSGSVAVTAVARELLGFIWAIARQVNYEMKGGQGKVA

SEQ ID NO: 373453 - protein, 413 aa, unidentified
MDIIFRNVAGLDVHHKTIVCCVRKIQPQGDLVEEVQTFGTMTSDLLHLSDWLAVQNVTHVAMEATGVLWKPVWNILEDQFQLLLVNPRELKRVPGRKSDVRDCQWIAQLLQCGLLRSSFVPPRAQRELRDLTRLRAQLSAEHTRIANRLHKVLEDANIKLSAVATDILGKSGRAMLQALLAGERDPQKLADLAEGSLRGKIPQLQKALHGRITEHHCFMLRKLLEHLQAVEKQIADFSQRIEVCLRPFVDAQQMERLDKIPGVNRRAIENVVAEIGTDMSRFPDEDHLSSWAGMSPGNEESAGKRIRNRTTKGNRWLRRVLIEAAWAASHTKSSYLGAQYRRLAPRRGRKRALMAVGHTLLVIFYHLLKVEVEYQDLGKDYFDKLKPEQYRRYLVKRLEGLGFEVTLTPKTAA

SEQ ID NO: 373454 - protein, 380 aa, unidentified
MSRLAIGWDLHRKFSQVSVMRREDDGELRVVERARLDHADREKMLRWLSRQPPGTTVAMEGAFGWQWVADFLTEAGFDPRLGHPPKIKALSSGEAKCDRRDADRCARLQLRNTFPECYLAPPEVRQIRERTRFRQSLVAARTEAKNRVQALLHRLGILHDLSDLFGEKGRRLLKELMLGDAYRNSLDGWLSVIDVLEEQIREVEAWMNANLVEDTLIRHLRSIPGIGLILAHVIRAEIGELTRFVDRRQLTAYAGLAPLSDDSADRHGKRHIGRYCNHTLRWAFIEAAAGALKSKSFPKRLRKLHNRLTGGNQFNKGVARVAVARELCELVYVIWNKGTPFTENPPSRPGAAGGESSLRSEQPRHPMVRRQANRRGQTPK

SEQ ID NO: 373455 - protein, 353 aa, unidentified
MSQQNARVAVVGIDIGKNSFHIVGQDGRGEIVLRQKWSRSQVEARFANMSPCLIGMEACVGAHHLSRRLRALGHDARLMPAKYVRPYSKGQKNDFRDAEAIAEAVQRPTMKFVATKTADQLDLQALHRVRERLVSQRTGIINQIRAFLLERSIAVRQGIRFLRAELPRILAMPPDVLSPRMVRIVEDLACDWRRLDERVEGLSNEIETIARQDAGCERLMSVPGIGPIISSAMVAAIGAGDVFTKGRDFAAWLGLVPKQISTGDRTILGKVSRRGNRYLRVLFVQAAWVVLIKPKIWERHGLKPWLEAARKRLHHNVLAIALANKLARIAWSVLARGRAFEVRKINQAAPQPT

SEQ ID NO: 373456 - protein, 447 aa, unidentified
MVNRRAYRRVKVNSIEKKSLFSSLQNQKAAILGLDIAKLEIVACLRLESGEFERPWSVLNPTGIGDLVKICQELRDQGLQIRVALESTGTYADALRMAMDNAKFEVVRVGGKSVSDYREIFDGVPSQHDGKDAAMIAELCAIGKGKLWNYKPQSESMCEIAYQVRRMDAFQKEVVQWHGRFEAHLARHWPELSQLIKPGRASVLKLLLKHAGPAEIAAGKDVVEQMMRWSKGKISEAMASSILHCACTTGGIPMTRQDKDWMKEICTRLWESKNSVKLCEKAIGKQLQLDLFWSKYVNDVGASTLGVILSKLGDPRDYESAGAFLKASGLNLKELSSGKRIGEKAITKRGPSAVRRWLYFWALRAVQKEELREWYYRFHHQHFGNADRPSSHRKMKGIVALMRKLMKALWSSMHKGEAFEYGKVIAAVAKPKRRRRRKTKSSPTESN

SEQ ID NO: 373457 - protein, 536 aa, unidentified
MLEQSSTGRTYTRDAYADISFAVMHKLAERPAPARRHSSSRKLVNNCAAGDNFAGGRPAPARTRSRVCNPKRIEGRLPAEPEALAPTSNRKTPQEGHHISLVDSRAKRRKNRRQQRQSMNDSQQWKQYPGFGAVDWASEKHSVIVVDQAGKVIEDFEIEHSALGWKKFREKLQAYGSIPFAIETSQGAAVEQLLEAAMIVYPLNPKSAQAYRERKAPSGVKDDRLDAWSFADALRVDGQDWKALRPEEPLIKELRLVCRDEVTLIEQRTALISQLRHALAEYYPAALEAFEDWTSVSAWMFVQRFPSPELLAKAGKRQWQKFLHTRRLWGSDQGPRRMEIFAHATELSGSAPTANAKSLLALSLVQMLFVLEKQLAVYRQRIEALFARHPDHDLFGSLPGAGPKIAPRLLAEIGDERDRFQGDAQNLQCLGGTAPVTMRSGKYRHCHRRWACNKHLRHAIHLFAEKSLSRCAWAQIYYEHHRKKDRSHSDALRRLGHRWLKIIHKMWIERTPYDPELHQRNQLQHGSWIFQLKACE

SEQ ID NO: 373458 - protein, 424 aa, unidentified
MEKATRTKWAGIDWGDKSHSLAIVNAQGTVVARQDFAHSAAGLDELIAALAKHAPIGGVAIEKNRHLLIDKLLEATFAVYPINPKVSKRWRECLYVDPGKSDGTDSIHLADGLRLYQDKLTPLRPDDPLTRQLRALCDDECGFIKDRTATANRLKACLKEYHPEALGWFHDFTKPTAADFVLAFPTPEALRAASDNKLLKFLHSHNIGLGPTWKERFAARTTAARWPSDPATVAAKSRKAIGLAKQLRTLAGILTSYRQEIEALFGQHIDAELFASLPGAGVKIAPRMLTHFGSDHTRYSDATALQALSGTVPITKKSGDGGGPKFRWACQKGFRNTMFLFAFQSITRSAWARAYYDRARERSMSHPKALRSLGAKWLKIIYRMWRERKPYDERLYIASLIRHQSPLVPRILKAQEGEDTKQKP

SEQ ID NO: 373459 - protein, 342 aa, unidentified
MTIVAGFDVHRRQITFDALDTETGELMRGRIDSTPAAVEQWATRFQGRGVQVALEACTGWLFVSRALERAGVVAHLAEPVETSALRGRKRRAKTDREDARWLRTLLGEGRLPEAWIPPEHVRQWRSRARLRKTLVDERTQWLQRIQATLFHHGVDGVPAELRSGAGREFLDELELPADARERIEIALGMIDALEGQLRPLEAALRKLALRQTGCRALMAQFGMGELTSLVTLTELGDVGRLSASRKAVRCAGLDIGVHRSDRRSRVGKLNRQGSPHLRWALYEAALSATRPTSPDHQDYLALKARGLSHTRASLTIARKLARRSFHILRELGPSALDPIPTS

SEQ ID NO: 373460 - protein, 362 aa, unidentified
MEKYIFAGIDLGDKNSVTRIAVDREKGERLGFVNTRGGRARLFKELNRQADQAGGAKILLAYEASSCGFVLRDEAQARGMICWVLAPTKMEKSVEQKRNKNDDRDADDVLEKLRGHVLAGNKLPTVWVPDVETRDDREVLRTRLALSEKQTQVKAQIQMLLKRYGVEKPADLGSTRSKQYRQWLESLCVCASLGWGTRQSLASLLRQLSGIEEEIKNLDKLVGQLGSQPRHKPIVEALMKEKGVGLLTALVFRTEIGQASRFRRGRQVGKFMGLTPTSHESGQQQDRKGHISRQGPPRLRKVVCQASWVHVRHDPHSRQVYQRLVAKNPKKKKIALVAVMRRLSVRLWHRMLEAELELKTQP

SEQ ID NO: 373461 - protein, 402 aa, unidentified
MNAVGIDVSKGKSMVAIMRPFGEIVSAPFEIKHTASDINSLVELINSVEGESRIVMEHTGRYYEALAHQLSEANLFVSAINPKLIKDFDNDSLRKVKSDKADAIKIARYALDKWQNLKQYNVMDELRNQLKTMNRQFGFYMKHKTAMKNNLIGILDQTYPGVNTYFDSPARSDGSQKWVDFASTYWHVDCVRKMSQNAFIDHYQNWCKRKKYNFSQSKAEEIYGKAKELVPVLPKDDITKLIIKQAVNQLNSASTTVESLRTLMNETASKLPEYPIVMAMKGVGASLGPQLMAEIGDVSRFTHKGAITAFAGVDPGVNESGSYEQKSVPTSKRGSSDLRKTLFQVMDVLIKTHPQDDPVYQFLDKKRAQGKPYYVYMTAGANKFLRIYYGQVKEYLSSLPES

SEQ ID NO: 373462 - protein, 397 aa, unidentified
MIAVGIDVSKSKSTVAVIDSNGVVLASPYTIAHTQPELHALAKYLKELKEPVTILMEYTGHYHYPVLKQLQSEGFPVCLINPYQMKKYGDTEIHKAKTDKKDALRIATYALEKSYKLVPYSSMEQKYEDLKFLSRQYEQRISFVAKLKVQLLDLLDQTMPGITKQLSLTSRNPEKCALLLFIKRFKSFDEIQRMGKTRFLSSYETMTKKTSDRYAAQKGLAIYELAKDSITTRGDAPYIWLSQAQCVDLLSAAQNAADEIILKMQNIAQTIPEYAVLRAMHGVGDRLGPIILAEIGDIRRFHSGKALNSYAGNDAPPYQSGQFESRNRHISKRGSSALRKACYEVMQALKLTKPQDDPVYLFMLKKEQEGKPYNVAKMAGVNKFLRIYYAKAMELYR

SEQ ID NO: 373463 - protein, 374 aa, unidentified
MENTITYVAMDTHKKQHKIALHYPCQEELVEFTINNTARDIKKMVNKITKHAPGRVEFCYEAGVCGFTLKRRIEQFDCRCSVIAPSLVPRKPGERVKTDRRDAKKLLMMFKAELLTEVHAPNEHQEAARELTRLRETAKENLKRIRHQLLKFLTRHGYVYSNGRHWTQKHITWLRTIEFSEPMLTSVFENYFNEMIYCIGRLEALDKEVELLANSKEYKEIVGLLRCFHGIDTLTAITTLTEIFEFGRFESPRYLMSYLGLTPSEDSSGDKQKKGSITKAGNKRIRRLLNETSWHYRHRYVPSTALKKRRKGQPQWAIEIADAAGRRLSKRHRHLVNNGKMPCKANIAVARELAGFIWFVVTQYHARKNTKDVA

SEQ ID NO: 373464 - protein, 337 aa, unidentified
MKLTIVFVGLDYHQAWVQVCVMDCRGNVLVNRRCPNDGQAIAALVHQYSRRVQASIEACCGAAELAEELIDHYGWSVDLAHPGYVARMKQGPDKTDFGDARLLADLERVGYLPCVWLAPEPIRELRRVVRFRQQLAAQRRDVKLRIRALLRDGRVPRPTSKAWTVPWMQWLKTTEQVSKQSRWILDRYLKRLKELLLEIRVVEKRLAQMTKEDKVVEQLLRQKGIGLITAVTLRAEIGRFDRFRTGKQLSRFCGVSPRNASSGERQADAGLVKAGNRQLRTVLIETAHRLARYEYRWIAMKAKMRHRGKPGSLVAAAIANRWVRWLYHQMQTVSQAA

SEQ ID NO: 373465 - protein, 340 aa, unidentified
MGEVSTIGLDLAKSVFQAHGADSAGGVVFRKKLRRDQLLGFFAAQPRCVVAMEACASAHFWSRELGSLGHEIRLIAPAYVKPFVKRQKNDMADAEAICEAAQRPTMRFVATKTAEAQAAAVIFRTRDLLVRQRTQLINALRGHLAEFGYIARKGPGHSERLIEVVRDPASELPSEARTVLLVIVDSLAALRGKISELDREIAMRARSSEQAHRLMTIPGVGPVVATAMVALAPPASSFRRGRDFAAWLGLTPKQHSSGGKERLGRTSKMGERSLRRLLILGASSVARIAARDGTRDRWLARMLATKPRMLVTVALANKMARIVWALMAHGGSYRAPAMAA

SEQ ID NO: 373466 - protein, 355 aa, unidentified
MNQITTVGVELAKDVIVVCAADPAGRTVFFKQFGFQGFASWAANLPPCTIAMEACSSAHYWARTLSSLGHHAKLLAPDLVKPFRKSQAAKNDRNDAQAILITALQPDMRFVSVKSVEQQSILACHRMREGWKIERTALINRVRGLLAEFGIWLGRSPQNLARSLPRLIQDEQLPARVQGLLVQAQGHLQQLEALMEQGERDICEHARHSEAAQRLCALNGIGPITASALVVSVGDARDFRNGRQMAAWTGLVPKQSSSGGKDRLGKITKRGDTYLRGLLTQGARSALNAALTRAPDKRSRLEHWIVALRHRVGYHKSLVAIANKHARICWAMLARHESYAPQDGAAPHRHRRLSR

SEQ ID NO: 373467 - protein, 338 aa, unidentified
MQLKVIGLDTAKHVFQVHGADKSGHAVLKKRLRRNQVSDFFSTIPTCVVGLEATTGAHYWARVLGSFGHDVRLIAPQFIKPFLRGQKNDPADAAAICEAVSRPEMHFVARKSIEQQDMQALHRIRSRLIGCRTQLGNQVRGILAEYGIILPLHLSQVRQHLPDLFSEEHPLLTSFSRELLAELYHELCALDQRIEAFESRIEASYRANALCLRIGAIEGVGPVTATAVVAAIANGRVFRNGRQFAAWLGLVPRQHSSGDKQRLFGITKRGDRYLRTLLIHGARSVVYRAAGKGDSRNRWIAEKQKKLGTTKACVAVANKNARIIWALLAKDEEYRAAA

SEQ ID NO: 373468 - protein, 397 aa, unidentified
MFYLGIDIAKHKHYASIIDQTGKPITKPFPFQNHKEGGQALLNWMYQYIESPTEILIGMEATGHYWLAVYSFLLDHGFSVVVLNPIQTNAWRKGTEIRKRKTDAIDATMITDIIRFGRFVETPLVDEKMFALKQMSRFRNALVSNMSDLKRKALVVLDQTFPEYQSIFSDVFGKTSSQILLEYASPSDYEQISINDLTQIIEQTSRNRLGKKTANKLMELASNSFGVTFCKDAFSFQLKMLMEQIRFIEDQIKECEEEMSQLLIDLDTPIMTAPGVGPILGATILSEIGDIHRFDKPSKLVAYAGIDASVSQSGQFEASGTSISKRGSSHLRRALFQAAITAHKHDPVLKAFYEKKRKQGKHYYVCIGAVARKLCYIIYAILKSNKPYEVPPHTTET

SEQ ID NO: 373469 - protein, 356 aa, unidentified
MQTIACTVEEVVLGVDTHLKTHTAVLVDLLGRQVDAETFATTKRGNEALILWAQRCGTVKRAGVEGTGSYGVALARRLSLEGIRVFEVTRPKRKRARHRGKNDLRDALAAAASVLADGHELAAPKSRDGIVEAIRVLRIARASAVKSRTQTILQLRNLILTAPEDLREALRDVSAKQLVAHCARWHRRDPHGALQATRQALRSLARRHQVLDAEIAELDADILRLTRQAAPRLLAQPGIGPETAARLLIVAGDNPGRLRSDAALAALCGASPVEASSGQTIRYRLNRGGDRQGNNALWTIANNRMIHHPETRDYVKRRTTAGKTSKEIRRCIMRTLARRLYPLLLADLNDAQAIPI

SEQ ID NO: 373470 - protein, 337 aa, unidentified
MTDVHILAIDLAKRSFQICATAPGGAVLFNRTVSRAKLETHLREQAPCIVAMEACATSHFWGRFAQALGHDVRLIPPIYVKPFVKRQKNDAADAAAIAEAAVRPNLHYVAVKSAEHQARAVAFRTHQSFVGQRTQLINALRGHLAEFGLVVAQGPANLKSVVGMIDDGAIDLPDAVRDVARLYLDQIALLTNKIEELRSKLVHSTKVDDAMRRLCTVPGVGPVTAGAIMAFAPDLRTFASGRNFAAWLGLVPRQRSTGGKTRLGSVSKMGQADIRKLLIVGAMSRIRWIVRKGVLPDNWLGHVLGRKPRMVAAVALANKMARMIWAMMTREENYRMA

SEQ ID NO: 373471 - protein, 371 aa, unidentified
MAALTIVAQTRPFVIGVDCHARTHTYAIIEASTRRQVACEQFPTTSAGISRALAWVGRRSDGDMACLWAVEGIGSYGARLARAVTDAGYDVAEAPRMNARGRRGIGKSDPLDAAAIGTAVLGLEESQLRAPRRDEGTRAGLRILSAARDQLTRDRTVNVNALIALLRAHDLGIDARKPLVPAQIATITRWRERDEQIELSIAREEAVRLARRVLEVTTQLTANQKRMTELIQDSPAAPLLEMVGAGAVTVATVLAAWSHPGRVRSEAAFASLAGVNPLPASSGNTVRHRLNRGGDRRLNRALHTITMTRMVHDPGTRDYVAKRTQEGRSYREIRRSLKRYIARILYRQLNSLYATAEPARSHVAGAAPCQE

SEQ ID NO: 373472 - protein, 414 aa, unidentified
MDVVHPRCAGVDISKRDAKVCVRIAGAGRAKAKSTVTTWGAVTSQILALRDHLAAEQVTLVVMEATSDYWKPFYFLLEDGPFEVMLVNARHVKNLPGRKTDVSDAAWLAQLGAHGLVRGSFVPPEPIRQLRDLTRTRTTLVRARAKEIQRLEKLLEDAGIKLSSVASDITGVSGRAMLSALIDGQRDPEVLADLAKRRMRSKIPELTEALTGRFSEHHGFLAQLHLDLIDNHTRAIDELTDRIEVVVEPFRHVRDLLITIPGVSTLVADVIIAETGGDMSRFPTAGHLASWAGTCPGSNESAGRIKSTQTRPGNPYLKGALGIAAMSAARSKDTYLAAKFRRIASRRGPIKAIVALEHAMLIATWHMITTDVPYGDPGGDYFTRLNPDKAKQRALDQLRKMGYSVTLEPLAVAG

SEQ ID NO: 373473 - protein, 329 aa, unidentified
MHNRPHFEQLNKRIIDLVQKDGQVPAIVFEATGVYSRPLERFMNDHGFPYCLLNPLESKIQTATMRIHKTDKSDAHRLAQTHFTTERRIKKPQDHYFDQMRALSRYYHELDEELAMLRSRMHTLLQLTFPEMESLFTQKSELFLNILQLFPHPDYVKNLSKTVVRNRLLANTDKKLAPKTAEKKAIQLISAAQDSYPAVDQDDIRCEQLKDYAKRSLAILRKREELIQQMVVLSEERNEYQILISIPGIGKNTAVRLIGEIGDMTRFENHKQLNAHAGIDIRRFQSGTLFYKDKINKRGNSHLRKILYFTIQNMIRQQTLWTQSFCRIL

SEQ ID NO: 373474 - protein, 343 aa, unidentified
MKITRVGVDLAKKVFQVHGVDAAGRRVWQRQLKRANWLSVLSETVEPGCEIGMEACGGAHHWARELKSRGFKVKLISPQFVKPYLKSLKNDVNDAEAICEAMGRHHMRFVAVKTVEQQDIQAMHRVREGLMNHRKAKANQIRGLVAEYGLVAPRQMGPLRKAIPCWLEDAENGLRAAFRVLLHGLWQDLQRLEIRLKVLDKEIFVLSETHADAKRLKQLRGIGPLIATAMVAQFGNGRHFKRGRQASASVGITPRHAGTGGKNYLFGITKKGNPYLRSILIHGARSVVSKAKHKDDRLSRWVTELARRKHPNVAAVALANKTVRIAWAMLRNGTDYDPHLAMA

SEQ ID NO: 373475 - protein, 345 aa, unidentified
MKKIIIGIDFSKETFDATLLDCRNSELSEALQSAVHEKFTNKKEGFQAFVTWIKSFVKKINSAELLLCGEKTGKYSLALSNFLYAKGYSIWLDSGLRIKRSLGISRGKSDKADSLKIALYAYRYQDMAVCYVPLSKNVSRLKELFLYRQHLVSQIKAMAVRKNVTDDFKKELGDVRFIVDSATEIIQQIKATIKKCEEKMQELIEEDEELKTTHDSITSVKGISLINATAFIAYTNNFKDFGGNAKKIATYWGVAAFAQESGTSVHKGARVSKIASKMLKSLLTQAARIAVRWEPKFRQYFEHLISRGKHQGVALNNVKNKLIHVITALAVSKEKYNPEYECINR

SEQ ID NO: 373476 - protein, 481 aa, unidentified
MSKPKQHSKKPGAKKIATGPGKRGRKRKGMCLEDRPILEGNAAGIDIGAREIYVAVPPDRDEHPVRVFSTFTEDLEEMAQWLVSCGITTVAMESTGVYWIPPYDVLERHGVQPCLVDARGMKNVPGRRTDWHECQWPQFLHSVGLLRAAFRPDRDVCAVRSLMRHRSNLVEMTSQHIQHMHKALTQMNVQIHHVISDMTGLTGLAIVDAILDGQRDPVELAKLRDPHIRAPEETIRKSLVGNWLPEHLFTLKQSRQMYQHYQEQVAACDVEIEKLVVAFQPRVDPGEKPLPPDRKRRRRRGRQKSTHPKTGFDLRAESYKLFGVDLTQIPGLMAMVLTLFSELGRDMSRWKTAGNFVSWLALCPDNDISGGRVLWRARRRVHNRAGDLFRMAAYSLHHDQSPLGDYLRRMKSKLGPEGATVATAHKIAIIFYTMVKKQVEYDETLWAQRDTEREKRFEAKLKRQAQQLGYKLVPIEEKPAA

SEQ ID NO: 373477 - protein, 343 aa, unidentified
MGEISTIGLDIAKSVFQVHGVDDTGTVVMRKRINRSKVLQFFGDLSPCLVGLEACPSAHYWSRELQTLGHTVKLMPPSYVKAYLKRSKNDANDAAAICEAVTRPSMRFVPIKTQEQQTGLMLHRTRQLLVRQRTMLSNAIRGHMAELGIISAKGRNGTAELLQIIGNVGDDRIPPVARFCLELLARQYLSLSVEVASIDKRIHAWHRSCEESRRLEEIPGIGPIAATALVAEIGDWKAFRSGRNLAAWIGLVPKQHSTGGKERLGSITKQGNRYLRWLLVAGAMAVIRYARQHGTKRLWLTRIMDRRPAKVAAVALANKIARMAWAIMVHGERYKELKLLQAA

SEQ ID NO: 373478 - protein, 355 aa, unidentified
MSSEKYIGLDVHQATISVAVMDSQGKVVMESILETKASTILEFLAGLRGSLFVTFEEGTWAAWLYDLLKPHVSEVLVCNPGKIPLLKQGNKSDKIDARKLAERLRLHDLKPVYHGETGVRMLRELARSYLTVVKDLSRVMNRLKALYRSWGIPCAGRDVYYTRHRSQWLEKIPEPGTRRRAEQLYQQLDMLQHLRQQARRELLAEGRKHTISAKLRQIPALGPIRSALAVALIQTPHRFRSKRQLWTYSGLGLETRDSGEYHYVRGQVRRRKKQATIRGLNKDYNHDLKSLFKGAAPWASVQPGPFQEFYQRALAKGIKPTMVRLTLARKIAAITLTLWKKGEDFDIHKLNSQAA

SEQ ID NO: 373479 - protein, 438 aa, unidentified
MSNKVIFNLDELFISVGIDVGADFSWMSIALPNQQFVGKPYKILHNSIDSLTTAVSKIKEAEELYSLESRIFLESTGIYHYPLFCYLRDKGFNCSVINPIITKNSTNINIRKVHNDRFDSKKAALVGLKPDLKVSLMPSDLALNCRNLCREYYDLMDNRSAYVNKLQGELRMAFPQYFGIFSKVTINTSLTLLETYTSPSAFLEADKQEIIDLIKSTARFGLTYAQNKYNAIIQAATDANQFGYIIESNIKRIRLYISFIRKYDEEINDILESLHKLVDSNEDTKFVKQIHLIETFKGAGFLSAATIMGEIGDFSAFSKPKQLFAYFGLDPAVKQSGKFEGTKVQMSKRGSSIARRVIHTLSLQSISISRNGKAKNPVLREYYLKKCDSKPKLVAMGAVSHKVCNMIFAILRDNKPFKIIAPQEHIKQYNAAKCDIAA

SEQ ID NO: 373480 - protein, 332 aa, unidentified
MYLGIDVHKRYAQVAVMDEAGELVEEVRIENANLDDLAQRYAGAEAALEATSNYYHIHDTLSEHLDVTVAHPKELTQIADTDKKTDRVDAKELARMVRLNSVPESYVPTDEIREARALVRGRQTLVENRTEYANKIHGLLSDHGITEDVKPLNVEGREFLRELSLPTPWDTLLESYLDLIETLTEEIQNLEKAIEERAGSLTETQLLMTIPGVSYYTALTIYAELGEIDRFDGDKEVVSYVGLNPVIRESGDSRIEGSISKRGSGRVRWLLVQAANTAVHTCNDEYLSRFYERLASRKNSQKAIVATARKMLVSIYHMLDRGEVYDPPGVSA

SEQ ID NO: 373481 - protein, 342 aa, unidentified
MKQYVGLDVSQKETSVCVVNESGQVVFEGKAKSDPNALTELLRKRAPYAERVGFETGAMSSWLWHELRRVDLPVVCIDARQAHAVLSVRMNKSDQNDARGLAELVRIGWYREVKVKSAESQRIRAILVARSRLVSIRRDIENQVRSLIKEYGLVFPRAIALPFRKNITELLGGDHQLSAVIEPLLTIHEQVCQQQGKFDDQVRRLAKSDEISRRLMTVPGVGVVTALTFRHTIDDPSRFRSASTVGAYLGLTPRRHQSGETDTNGKISRWGDRLLRTYLFEAATVLLYRTKKWCSLKAWGMKLAKRIGMKKAKVAIARKIAVILHCIWVDGTTFEWGQAQAV

SEQ ID NO: 373482 - protein, 316 aa, unidentified
MLYVGIDIAKNKHDVTALNVPGKTVLKPLTFSNNKAGFELLDLSLRQLNQDCLIALENTGHYAFNLLNFLHEQGYKVYTYTPLLIKEFAKSLSLRKTKTNKKDAHGIALKLLSDPNREQFQHDNRQVELKILTRHIHRLKKKQSDWKVQYTRCLDIIFPELDKIVGKHSEYTYQLLTRYPNPQKRLEAGFDKLIEIKRLTASKIQDILSVAPRSIGTTSPAREFEIIEIIKHYKRLIDKAETCVNDLMAEFNSVITTVTGIGGRLGAVILAEIRNIHAFDNPAQLQAFAGLDSSIYQSGQIDLAGRMIKRGSPHLR

SEQ ID NO: 373483 - protein, 371 aa, unidentified
MTSTDAATETVYAAIELSKKTWVLAIAFPDRDRPSIHRVSGGNVAELVSRLRVAARNNRRILVCYEAGYDGFWLARALAKMGIECRVLDPASIQVNRRARRVKTDRIDVLALLRALIATDRGERHVCAIVRVPSVAEEDARRSHRERQRLIRERTGHINRIKGLLFAQGIRDIKPKLRRTRIDFAALETGEGHPLPDRLRRELEREYARLALIETQLREVEKERDLADAQDPVVERKRQMLVALQGVGGTSAAILAREVFARPFASRRQLGSYLGLTPSAYDSGSVTRCQGISKAGNSWARRILIEVAWLWQKHQPASPLSHWYIQKTSGQSSRIRRIMLIALARKLAISLWRYVETGLVPEGVVIAGAEA

SEQ ID NO: 373484 - protein, 352 aa, unidentified
MEMSIAFDSHKCYTLALVEDEEGRIIDESRIEHERGAIREYLESFPDGTPVAVETIGTWYWIVDEIEAARKVPRLVHARKAKLMSGEINKTDKLDVRGLSRLQRVGTLPTVWIPPGEIRDKRDVARTRMVFARHRTRLKNRIHATLAKYALHHFEGVSDIFGKKGRERLEGRLHKLPEHTQHTTRSSLGHLDETEKRIAALEARMEEFFEPTPEVTLLMTLPGVGPVLSVVIAWEVGDVSRFHRPQSLASYAGTTPRIHASGGKVRYGRLRPDVNRYLKGAFSEAANSICVNRKRRPERHVSRLYIRMRQRKGHAVAIGAVARTLAESTYWVLTKREAYREAQNEQARSRKA

SEQ ID NO: 373485 - protein, 353 aa, unidentified
MTDTTSIAWLGLDAHSRNCVLAQLDDQGTELNCWRFPTQPQQLLKHVQAIPATVKRLMLEESNLARWIGQLLKPQVQQLIVCDARRNRLISQDSHKHDRRDAFALARLLRLNEFKPVWQPADDQRVLFKRAAQAYENAVLRQTRLKLQIKSLFQHWGLFPAGASVFAKAGRATWLKQLPYDPLRSQALLLYELLDQALAGQAQARRLMCQAGRLFPEIQRLRTAPGVGLVGAHLFVAYVQDPHRFAKFSRLSKYCRLAIRDRTSDNKPLGFKQLDRQGNGVLKAISYRAFLQAAKRRSGPLWDFYQASLRLTGSTTHARLNTQRKILLVLWTLWLKGEEFDPNQFSRSQPMNV

SEQ ID NO: 373486 - protein, 419 aa, unidentified
MIRIETKKLRIVNTKTLMVAVDISKATLMGYCRCPDGRDCNPFEVSNNTEGFKKLWDRICWMKAAHHLEEVVVGFESTGIYGEPLVHFLRSKPLRLVQVNPLHTRRMKDLEGNSPNKTDQKDPKVIADLMELGHALSVVIPEGAAAQLRRLTQARERSVQRRTTLYNQLHDLVFLLFPEFVQVMKDLRTQSAQYLLRHYPTPQAVVQCGLETLNTILRRVSHGKLGRERAQALYEAAQESAGLQEGRDGMSLEMEHLLLEIDSSNRFIERVEQEMSRYLDQIPYSSLILSLKGIGEITAAGLIGEVGDFKKFPTASEVEKLAGLDLFEISSGKHKGNRHISKRGRPLLRKLLYFAAMNTVRTGGVMHAPYQRHLERGMPKIKALVAIARKLLRTIFALVRDHRLYIENYSQQETLKLAA

SEQ ID NO: 373487 - protein, 344 aa, unidentified
MSNLDTCGIEVSAKELVVSLRRQGDLEPLRNFTNTPEGHMIILRYLRRAGRVVRVCMESTGLYGLDLALALSGQEGIEVMVANPRAVRHFAQAMMKRSKNDQIDAGVLEQFALHMPFKPWQRPSVAVLALHALARRLRELVEMQTAEKNRQHAAGLSQAIPAVVRRDLARSLRAQEQAIERLTRQARKLIAQDPQLAERFELLDSVPGIGETSAVQLLGELGVLAPDLQARQWVAYAGLDPRQYTSGTSVHRKPRISKAGNKHLRHALFMPALVAVQHDPHLRAFYQHLLAKGKYKMQALVAVMRKLLHALHAMFKTHQPYDGSKLFRLNADAAQEVTHVLVAS

SEQ ID NO: 373488 - protein, 342 aa, unidentified
MQVTTIGLDIAKNVFQVHGIDAVEKVVVRKQLRRSQVLEFFKALPPCLVGMEACATAHYWGRELTKLGHQVRLMPAKDVKAYVKRNKNDAADAEAICEAVRRPTMRFVQVKSAEQQSQLMLHRTRDLLMRQRTQVINALRAHLGELGITAAQGKAGLTELLAIIAGSTDERLPTEAHASLMVLAAELQAMRTLIASIEKRIIAHHRLDEASKRLRSIPGIGLVGATAIVATITDPKAFRSGRDLAAWIGLVPRQDSTGGKQKLGPISKQGDRYLRRILVVGAHAVLKLARQKPEKYPWLTQLLARKPFKVVAVALANKMARIAWALLVKGGPYRARSLVAAA

SEQ ID NO: 373489 - protein, 415 aa, unidentified
MALKIVYQICCGIDVHKTFVVACIASTNKQGVTTYKRHRFSTFTQGLKELLQWLLDNHCKDVCMESTGKYWIPIYNVLEKDCNIVLAHPKYVKAIRGKKTDKKDAKWIADLFKHDLVAGSFMPPADIRQLRDLMRYRFKLTCFMSSEKNRLQNCLTVSNIQLASVVSDTFGKSSQRILDKILENPDDTSFDIEPLIHGSMKKKLPELELAIDGFITPEQAGKLKVIKKHFEDLESRKAELEKLILALASPYQQELGLILTAPSFKNKFTAIGIISEIGVNMEAFPSAKHLCSWAGLTPTNNESAGKKKSVRVSKAGCYIKPLLVQCANSVVKSEKHPEIRNRYLRLRKRRGHKKAIIAIARMLLTALYNMLKNKEPYNAELYRKSDVLPVNREITIEQAILMAQFQGYKIKSAAE

SEQ ID NO: 373490 - protein, 344 aa, unidentified
MSQVTTIGLDIAKNVFHAHGADERGAMVFSRKLTRAKLLEFFAGQPACVVALEACSGAHHWGRELRTMGHEVRLIPPSYVKPFVKRSKNDAVDAEAICEAAQRPGMRFVAVKSEDQQAAGLVFRTRDLIVRQRTQLINAIRGHLAEYGWVAPRGRAHMEMLAGLLEGDEIASTLPEAARPMFTLMVKLLGDLDARIATLDREIARRVKDDEDARRLMTIPGIGPIAATAILALAPPAETFRKGRDFAAWLGLTPRQHSTGGKQRLRGISRMGERTIRRLLIIGGSSMVRQASRFGAPAGSWLERMMARKPRMLISVALANKMARMVWALLTKKEDYRAPAAVAA

SEQ ID NO: 373491 - protein, 496 aa, unidentified
MIPFRRVKRKVSLAPLSSAPSTNLTIEEALMKHKPKRERTSRKERPSLSLLERIQPDAAGIDCGQNSHFVAVPPNRDAEPVREFRTFTADLERLADWLSHCRIKTVAMESTGVYWIPLYEILEQRGFEVMLVNARDVHNVRGRKSDVLDCEWLRELHSVGLLRPSFRPAAAIAPLRSFMRQRETLVEEVSARILRMQKALTQMNVLLHVAVTDITGQTGLKIVRSILAGERDPERLAVHRDPRCHASHAEIMAALTGNYRAEHLFALKQNFAAYEFLLQQIAECDREIEALLSQLASQQPPPATPLPGPRSKRSPKHAPAFDIRSPLHRLTGGADLSQIDSIGPHAALQIVAEIGTDKGRWPTEKHFTSWLALAPNNKISGGRLLSSRTSPSANRAAAILRRCAMSLTRTSTALGAFYRRLAARTGKAKVITATARKLALLVYRALSGNLVYSDPGAAAYQQLHRSRELKSLRRRARLLGFHLVDQTTGEVLNAVS

SEQ ID NO: 373492 - protein, 354 aa, unidentified
MKTPNNQLDFTGYQLYIGIDVHLNQWTVTIRMRDLELRTFSMDPSPQKLLEHLKKNYPHADYSSTYEAGFCGFWAHRELTKLGIKNIVVNPADVPTTHKEKTQKRDKRDSRKLARELADGSLKAIYIPTQPQEALRLLSRLLVQLSKRNRQLKSRIKQFLHTQGIILPKRSEMSHWSGRFIQWLKSLDFEYDDARYYLDELLIDLQRARKQKTQHLRKIRTRITGNQIIQLLRTVPGVGLVTAFTFYTEIMDICRFQKLDHLIAFIGFIPSVEASDKKEKIIGLTNRCNKYLRYLLIEATWVAVRKDPALTLAFNNLLKNKSKQRAIIRIAKKLVNRMRSVWKNQQQYVIAVIE

SEQ ID NO: 373493 - protein, 384 aa, unidentified
MDQATPSTASANTLHCALELSKKSWLLAIQFPDREQPSVYSIKGGDIEKLMAKLTAARDCWAKVSGAVPVITLCYEVGYDAFWLARCLKARGVECVVIDPGSLQVSRRGRRVKTDRVDVKTLLRTLIAWCRGERHVWSLVRIPSIDEEDLRRSHRERSRLVRERTAHINRIKGLLFAQGIRDINVKSRYKTLAVDELVTGDGHRLPPRLAGEIAREIRRLATVQEQIAEIERERDAAPTTCEATERKRDLLSQLKSIGPAISAFLSREVYYRQFANQRQVGSFLGLTPSPYDSGDEERCQGISRAGSGHARAVMIETAWLWIKHQPKSALSRWFVERTAGQSKRVRKIMIVAVARKLAIALWRYVELGLVPQGAILNPRMKARS

SEQ ID NO: 373494 - protein, 357 aa, unidentified
MKKGYQKDKTLARGKDVYIGIDVHKESWHVAARVDGEEVFHGSMASEYHSLRKLLDRFKECRIKAAYEAGPFGFWLHDRLSGDAIETIVVPPSLIPMESGNRVKTDKRDSRKLAKLLEGNILKKVYVLDEEDRADRELTRTRRQLLEHRGDVMRQIKSKLLFYGIKAPFSQKRESWSKRYVKWLRDLTFDHAVLKAPFESLIDLYEYLTSQVKKISKQVVALSRSEKYRHKITLLRSVPGIGILIGMELLVELADMERFKTAEEIASYMGLTPSEYSSGQHVRQGRITRCGNKRARTCLVESSWHLIVKDPLMRFKYMKLKTRKGAKKAIIAIARNLIIRIRRILLQDEPYVVGVAA

SEQ ID NO: 373495 - protein, 357 aa, unidentified
MQEKLYVGVDLHKTQFTICVINEEGDSFEAGTKFPMDKEGYIAFADKMKKLSRRHDGATVSIAIESTANARFFRDIMEAKGFEVTVVNTLRFKVVNLSTKKTDKNDAKTLAEFLARDILPKSHLCRPESESLRRVLKSRTLMVQDAVALKNQAHAVMLAYGYITQPAQFQSKSSRTKLLARLPAKVKEIIEIIFETLDLVESQTHVLERRLRRITIDNECVNLLMTIPGIGIVNACTIYAYTDDIDRFESYKNFSAYCGLVPWVQTSNESVYYGKITKRGPQELRTALVQCVVAMVRMPGKTADLGIMKQYHQLKDDKSSGKAIIATARKLSRIIYVMLKTMTSFDSAKLIKDDPKE

SEQ ID NO: 373496 - protein, 387 aa, unidentified
MPQPNDLSRSLVALDQNSTIIAVVELSQSSWLVGGVVPGIERQPCKKLEPSPERLLAVLHRWRDEAVRAGRTITRIALAFEAGRDGFWLARWLEARGVEAHVIHASSVAVSREHRRAKTDRLDTELLKRGFLGWLRGERGHCSMARVPTIAEEDAKRPNRERESLVGERTRIVNRIKSTLARLGIRNFKPTLRKAAERLASVHTPEGMPLPPNTLAELQRDMARLGFVVSQIREIEEARQKRLERQAETGPPAMVRLLARIVGVGVETADMLVHELLSRPMRDRKAVARYAGLTGAPDESGAQRREQGLARAGNARVRRGMIQLAWRFLLFQKESALALWYRARTADSRSGTRKTMIVALARKLVIALWRFVTTGEPLEGVVLRPAS

SEQ ID NO: 373497 - protein, 412 aa, unidentified
MEVIHSRCAGMDIAKRDAKVCIRLAGSGRRRTVEIVTTWGATTRQILALREHVVAERVTCIVMEATSDYWKPFYYLLEDLVGVEVMLVNARHVKNLPGRKTDVADATWLAQLGAHGLVRGSFVPPAPVRQLRDLTRTRTAVTRERGREIQRLEKVLEDAGIKLSSVASDITGVSGRAMLEALIAGNSDPTAMADLARRRLREKIPALTEALTGRFTGHHAFLTRTHLNLIDQHTAAIDELTARIEVVIEPFRRFRDLICTIPGIGGNTADVIVAETGADMSRFPSAEHLASWAGTTPGNNESAGKVKSSRTRPGNPYLQGALGIAAISVSHTKHTYLAAKYRRIASRRGPLKANVAVQRAMLIAIWNMATTDTAYLDPGADYFTRLNPEKARTKAIRQLEAMGYHVTLEQAS

SEQ ID NO: 373498 - protein, 413 aa, unidentified
MELLHEHCAGLDIGKRDLKACLRTPSPGRGRSRRQEIRTFATTTNALLELRDWLVAEKVTLVVLEATGDYWRGTFYLLEDCLNVILVNAAHAKGLPGRKTDVSDAAWLCQMGECGLLKASFVPPEPIRHLRDLTRYRVTLTAERSREAQRLEKELEDAGIKLSAVATDILGVSGRAMLAALIEGERDVHTLAEMAKARMRPKIPQLVQALTGNFGAHHAFLCRLHLERIDQLSTAIGELSTRIEEQMRPFAHQLELLATIPGVGQATAEVIIAETGADMSRFRTAANLTSWAGVCPGHHESAGKRKSGKTRHGNRWLAGALGTAAMAAARTKDKTYLGARYRRLTPRLGKKKALVALEHSILTAVWHMLTDDVDYHDLGGDYFTQRDPAAAMRRITRQANALGYTVRFDPIAA

SEQ ID NO: 373499 - protein, 357 aa, unidentified
MKINEKKFIGKAFVGIDVHKSNWKVCVLGELKFKKEFSCDPNPKAFHTSLKNLLPNFEFDCAYEAGFCGFWIHDTLNEIEGISCIVVNAADIPTSDKERAQKEDKRDARKIATLLKAGVLNGIHVPDKDAVALREIQRLHYTVTKDLTRSKNRVKSFLFRQGIEICKEQFKKPNTHWSNKFIKWINSLELCPKLKFALDELMANVLRLRNQKLRILKIIRKEIQSKEELESRFNKLIKINGVGLISCITIITEVGDIKRFNTYEKFHSFAGLIPSTNSSADIEKIRGITNRANKRLRSILVEVAWISMSKEPTLLHYYNELKQRMSSNKAIIRVAKKMATKIRYELLKDDQELKVAA

SEQ ID NO: 373500 - protein, 420 aa, unidentified
MKVVYQTCCGVDVHKSFLVATIIKTTSGVQPSYQKKRFPTFNNSILEFKKWLLDNSCRDVCMESTGKYWVPVFNLLEDELSVTIANPKWVKAVKGNKDDTKDSKWIGDLFRLGLVPGSYIPCKPIRILREFTRYRYKLTSCRSSEKNRFQNALTVCNVALDSVVSDIFGKSATSVIDYLLQQSDNSINHEEISSRLLRSLKKKSESVIESIEGYQMTESQKYRMRLVHAHMDYITSTISDIDSMIDSLVEPYENAVQLLCTIPGVDRNSAITIISEIGTDMTQFSNSKRLCCWAGLTPGNNESAGKKKSVRITRAGVYLKPALVQVAHAAVKSNKSPYYKAKYERIMKRRGKKRAIIAVARMILTAVYHMLSTGESWNPTDLYKIDMPEPLKNKQKEKAVKQAMKLLIAEGLIKESQLTS

SEQ ID NO: 373501 - protein, 378 aa, unidentified
MSNVRFVGLDVHKDSIVIAIADAGDAPAEVFSRILWDEHQLLKTLRKLGPLTSLRVCYEAGPTGYGLQRFLAAAGVDCIVVAPSLIPETNSRVKTDRRDACKLARFLRSGDLTSIWIPDEQTEALRDLERARDDARLAERRIKQQLLKFLLRHSRVFTAGKTLWTKTHWAWIRRQKFEHEAQSRVLADAIQTATQAAERIARLNQDIHECVQEWALAPLVQNLQSLHGVRELTATVIAAEIGDFQRFSSAGKLMAFVGLIPSEHSSGASRRQGGITKSGNRHVRRLLIEAAWQYYHAPAQASAALMTRREGLPENIVVIAENALRRLRKKSRMMQRNRKSAKKIVAALARELTGFIWAIGQATNLTQQHQRCLPTQTT

SEQ ID NO: 373502 - protein, 404 aa, unidentified
MADSIRWVGLDVHVHESTIAILDQGTGELITRRFIGRPHQLMPLLGQIERPARMVYEAGPTGYGLARRALAEGIDMCVCAPGHTERPPNEHVKTDKRDAIRLARRLASGELTMVCVPSVEQEQLRDLVRCREDIRGDLMRARHQLGKFLLRREIYYEGPYTAWSRKHRAWLASLRFQDRASQLTLADYLHGHDVLVARRDQLDRELCQLAGDSSWAQTSARLGCLRGIATLSAIGLCAEVGRFDRFLHPDPLAAYLGLVSCENTTGERRRQGAITKAGSTHARRLLVEAAYHYQRHPAVGQVLERRQRDQPAEIINIAWRAQRRLHARWRQLKHARGKANGIAAVAIARELVGFCWEIATWEKPVRTASASVHAGGRQPRAGSPRPAEAKPHHTANGRRTPAAN

SEQ ID NO: 373503 - protein, 390 aa, unidentified
MHRAAEQPQAPTAVRTDLGAIFVSLELSRSTWLVTSLSPGGGEKMSKHQVCGGDIAALLARFAELKAKALARTGKSFPLVVIQEAGLDGFWIHRALVGEGIESHVVDPASIATSRRRRRAKTDRIDGEALVRALLAHKRGEPRVCAMVRVPTPEEEDRRRLCRELKSLIGERVRHVNRLKGLFFAQGIGDYEPRRLDRRERLDGLRTGDGRPLPEHLKALARRELDVIELLNAQIEEVKAGRDALLAAARATASPPAPVAMLLGLKGVGPGFAGALWSEGLFRHFDNRRQVAAYAGLAPTPWQSGRVDHEQGVSKAGNPRLRAVIVEMAWLWLRHQPDSALARWYRDRVRRDGGRMKEVAVVALARKLLVALWRYVTAGVAIEGAAMKSA

SEQ ID NO: 373504 - protein, 326 aa, unidentified
MTTIGIDVSKEKIDCAWLRDIDTGKVKTKVLKNKIDGFKSLIQWAEKNTKHTINEIHFVMEATGIYHEALAYALHAAGAIVSVVNPAYIHEYGKSLGSRIKTDKKDSVTIAHYGATQKLTLWQPEPGEIRQLKALLTRHEAIEKDIQRENNRLEKAEITMVSVDVIDSIMTVIKELSKEKKRIRKLIDDHIDQNPKLKKCRALLESIPSVGPVISQYMIALIYSRHFKTAKQCSAFIGLNPVMHESGSSVRGRSRLSKVGNAKIRAKLYMAAVVAIQYNPDIKQQYERLLKNGKSKMAALGAAMRKLVQICFGVLKHQTPYQPQVI

SEQ ID NO: 373505 - protein, 442 aa, unidentified
MKTQIFEFCGCDVHKKMIEVAWLDITGQVFLHGSFENSSEGNQRLWKECLRLGTTKVAMESTGIYWRAVYKSCPKSITVMVFNSATIKLKTRPKTDVKDAMWIARCLRAGFISPSNIEMGKAVEIKELCRLRNTIVEEITRKKNHIHKILDEYQRKPSSFSSSLNTHFALYVVTTLAQGGTLNDLKANCHTTRLKNSVKKKQEALEAFLFPLLPSEARLNLELSLRGLLERAQACSKIDSQLAQKLKEPSIRESLGILNSIPGISGVSALHLLFEIGRIDRFPSKRQLVSWAGLCPRIYSSGGKTSRGHITKRGNAHVRRILFQAARASLRVKSNPLKGWYHRLAARKPGRVALVALARKLLVIIYTLLKTRQTFLCAPLKTEIRVHSTAKKLVRGLTSEPIAPLLTILVNWLDTPRQFRDSLTGVFDSMYGEVRQKRGAYS

SEQ ID NO: 373506 - protein, 424 aa, unidentified
MKLTYQTCCGVDVHKSFLVATIVKTTGGVEPSYQKKRFSTFNNSILEFKHWLLDNDCLDVCMESTGKYWVPVFNLLEDEINVVIANPKWVKAVKGNKDDTKDSKWIGDLFRLGLVKGSYIPCKKVRILREYTRYRYKLVSYRSSEKNRYQNALTVCNVALDSVVSDIFGKSSTSIIDYLLEQSGTSINHEEIASKLLRSLKSKEDAVIESVEGYQMTDAQKYRMRLVRAHMDYITAEINDVDKMIENMISSNPDFENAVQFLCTIPGVKRDSAITIISETGTDMSQFSSSKRLCCWAGLTPGSNESAGKKKSVRITRAGVYLKPALVQCAHAAVKSDKSPYYKKKYESLVKRRGKKRAIIAIARMILTAIYQMLSTGEQWNPSDLYKIDMPVALVEKQKAKAIKQAKKLLQREGLLPPDEPLAS

SEQ ID NO: 373507 - protein, 344 aa, unidentified
MHIASIGIDLGKTTFHLVALGERNKILFRRKFSRSQLLAYTANLPASLIGLEACAGAHFLGTVLREQGHQVRLIPAQFVKPYRKTNKNDFIDAEAIAEAVAKQNMRFVQIKTQEQLDWQAMHRVRDRLVQRRTALINEMRGFLLERGLVFAAGPTQLRKNLPSVIEDAEQNLSPRLRWLLDRLWQEWKQTEIDIKTITDELERISNEDARCRRLRQIPGFGPLVSTATVAAIGNGAAFRRGRDFAAWLGVVPRQYSTGGKQKLFGMSKRGNVYLRRMLIHGARAVLFRVKYDSGGFGQWVHRLAQRAPRNKVAVAIANKLARIAWAVLSSGKDYRHQPLQLAAA

SEQ ID NO: 373508 - protein, 368 aa, unidentified
MNDCIYVGLDVHVQTVSMATAGWDQEPVFVGTFPNKPAKILEHLAALGDPAALRVCYEAGPTGYGLARMLLAHHIACTVVAPSLIPITPGRQVKTDRIDALKLARLLRSGDLTAVVIPTPELEAVRAVSRAREAIRRDTHRAMMRLVTFLRQRAIGEPTGTRWTKKWWRWLDELALPYQADQIVLTQLAAQIRFLGNQNASLVTALETTAGASASFGAGIDALQRMHGVGLITATGIVAELGDLTRFATAPQLFAYAGLVPREHSSGGRQKQGAITKTGNKHVRYLLVEAAWRIVRPFKPDTLTADDPIGQIAATARRRLHKRFWRLIAKGKNRNQAIVAIARELLGFLWSMACTVAAAPAAPAALAA

SEQ ID NO: 373509 - protein, 476 aa, unidentified
MSKRAVSQQASAQKRSRKGQKRKAKAKAKTQGVVTLPVFRPDTAGVDIGAMEILVAVPPDRDAEPVRSFGTFTRDLEETVAWLESCGITSVAMESTGVYWIPLYQILVDHKIEVCLVNARHFHNVPGRKTDVLDCQWLQYLHSVGLLRGSFRPEQVICAVRTLLRHRQNLVQMAAEHTLHMQKAMEQMNVKLGHVISDITGVTGMRIIDAILQGERDPRALAQLRDKRIQAEEETILKSLEGDYRPEHLITLEQSLAGYRFYQKQMAELDQKIEGFMEALPPKIDLREHPLPPDTKKHKRQHNAPAYDLRTHCYRAFGVDLTEIPGIQAPTAQVLLTEVGPDLSKFPSGSAFANWVTLCPNNVITGGKILSAKTRPGKSRAALALRQAAQTLEHSENHLGQFFRRMRAKLGRAEAITAVAHKLARIFFAMVRTGQAYDESALAKADVRQRAQQEARLRRQARQIGFQLVPMEAAQG

SEQ ID NO: 373510 - protein, 381 aa, unidentified
MLESITYVALDDHKRKHQVAVLLPGMDRGDAITWRIENTRAGIRKMVRKVLKMAPGDVRFCYEAGPNGYVLQRRIEEFDGVSCVVVAPTKTPRRSGDRVKTDRRDAKKLVGLFRAGELQGIVPPVPEEEAIRDLCRCRRAAQRHLMASRHQLDKFLTRNGFVYWEGKNWTRRYREWLRTLSFDDWRREKTFHSYLFGEEQDEDRVKRLDAEIIRAAEEEPYRTLVGFVRCFRGLDTLSAMILITELYAVGRFMTAPAIMGFVGMVPSEDTTGWDPHRGPITKTGNGHVRRILVEAAKHYRHPARISRALATRRKGQPGWVIAIADKAQARLHQKYWKLVMGKGKHPNVATTAIARELVGFIWSVLSRAATEMPSVADELVA

SEQ ID NO: 373511 - protein, 427 aa, unidentified
MASIALERSAVIVGVDTHKDEHVAFAVDGLGGALGEPCAVPATNAGYEELLAWADGLGPVHGFGVEGCGSYGIGLARFLRRHGRRVEDVGRPPRKGERRLSGKSDAIDAEHAARAVLSGAATSTPKLADGQIEAIRLIKIARDTAIKAHSTAMITLKAVLVTASSGQREPLEPLTDYQLICACAELSTVGAVADPEVAMRHTLRSLARRWLELHDEIKTHTGHLKALTLAAAPDLVAVFGVGFDSAAELLITAGDNTDRVRSEAAFAKLCGACPIPAGSGKTNGRHRLNRGGNRQANASLYRIVIVRMRWHPPTMTYVERRTNDGLTKKDIIRCLKRYVAREIYHLLPPPAHPTATTPTDLPLRSALVTGRRRQRAVQPPRIPPSSGPARPLTLRGAGRRPRADPSRGRPAWSGRCWRQCRSRCRPT

SEQ ID NO: 373512 - protein, 348 aa, unidentified
MSKHWVPASDVSGLLRRFAELRRKAAARTGRDFPIIIIQEAGLDGFWIHRVLQSEGIESHVVDAASILTSRRRRRAKTDRIDGETLVRTLMAFKRGEPRVCSIARAPTPQEEDRRRVCRERRTLVGERVQHVNRIKGLLFAQGVFGYEPLRKGRRERLDDLRTGDGRPLPVHLKAQIIRELDRLEVLLEQLKTVEAERDALLKPATDEAASPAAMLARLKGIGPESAAVLWSEGLFRQFDNRRQVAAYAGLAPTPWQSGSIDHEQGVSKAGNPRLRTTMVELAWLWLQNQPTSALSLWFHERVRRLGGRMRKTTIVALARKLLIALWRYTTAGVVIEGAVMKAAPATI

SEQ ID NO: 373513 - protein, 422 aa, unidentified
MTHNTTRTDIVHSSRALHIAMDLGRDSWQLAISDGGKTIREVKVSRKDVDAGKAEFLTEVAKARVKFGLDDEAPVHALYEAGRDGFWIARWLESFGIPCLVIDPCSILVDRKAKQRKNDAIDARALLDLLVRHVTGDREVSIVAVPPAEIDDQRELGRVLRKLAQTRRSLANRVRSVLWRYGIDEGYHADLAKKFPDMRTGDGQALGPVTRLELDTLCGQILGLDADLQRLEDERVAQLKKPVTRAQEQARDLERLVGIGPIGAWTLAHEVFSWRTFANGKKLGAYAGLAPTPFCSGQMQRDQGISKAGPRELRALMVQLAWLWIYHQPESALAKWYKERFGPTAKRSRRVGIIAVARKLLIALWKYAMTGEVPEGAVLKPMSHPIVAPLQNGARRVRLSVQRGESTVKPARVRGPRVKQAA

SEQ ID NO: 373514 - protein, 374 aa, unidentified
MIDDIAIYIGLDVSKEKIAVGLAEAGRKGEVRYYGEIANRADAVRRFVDKLAGRYGRLCFCYEAGPTGYGLYRQLSGLGHECLVVAPSLVPTRPGLQIKTDRRDAVALAALLRAGELSSIWVPDETHEAMRDLCRAREATVADLRRARQHLLSFLLRHSRVFEGRTHWSKAHRNWLAMQRFEHRAQQIAMEEYIHAIRQIEERRDRLTRQMLELLPDWSLNPVVEAIQALRGVAQISAVTLVSEIGDFRRFHNPRQFMAWLGLVPKERSTGASVSRGAITKAGNTRARRMLVEGAWTYRLPARVSRELLKRNEGLPEEIRMIAWKAQVRLCQRYRRMQASGRPTNIVIVATARELAAFVWAIATAVSITAPKAA

SEQ ID NO: 373515 - protein, 339 aa, unidentified
MVEVYAGLDVSDKSTHVCIVDIQGVVVWAGACVTDPEVIARTLKTRAPGLARVILETGALSSFLYHGLTEREVPVTCVCARHAKGVLSARVNKSDPHDAEGLAQMARTGWFKAVRIKDEATHMDRARLKIREQLILSRQAMGGQLRGLLKLFGLRLGKVTTPGKRRERLEALFAQKPELEPILKPLIESLEAIETQVGRSSRQLAAQAAADPVARRLMTAPGVGPVTALVFKSSIEDPARFTRGEDAGAFAGLAPRRNQSGERDIKGRISKAGDPMLRAALYEAANVLLVRVKRSCPLQAWGKRLAETKGPKRARVAVARKLAILLHRLWQSETEFRWA

SEQ ID NO: 373516 - protein, 348 aa, unidentified
MAKLSQIGVDTSKSVFQLHGADESGQPVLRRKLRRVEFLKFFEKLEPTEIGIEACGASHHWARELTRLGHQVLLLPPQYVRPYVDRNKNDAADAEAICEALSRPKVRKRRVAVKSAEQSALQMLIGTRDSLIGRRTQLSNAIRSYAAEFGLVIAKGLARIEPLLERTVTDDSVPAIAKEAFATLGREFRELAPRIAELDAKLLAWHRGNELSRRLREVPTIGPIGACLLPIKVPDPHIFRSGRQLAAWIGLTAKDHSSGGKHKLGGITRAGDEPLRAVLVSGATALIAHVRSGRSQPTPWLAGMLKRKPPKLVAVALANKTARIAWKLMVSGQRYDRARAAAPLTAAA

SEQ ID NO: 373517 - protein, 369 aa, unidentified
MKHFTAKIQKKLYCGIDLHTKKSFIYLLNRDGEKIKSKEIDTDEQSFISFFEPFIENNEIYSAIEVSSLTFQYCNILRAIGISVYVVNPLKNAYISKSMKKTDKEDAKRLAIGLWKDILPEPVYIPSYEELQLRKLVSHRAFLVKEKTRLINRMRNRLREKEIKIPLRTFNKVNKIETVLQTISKTTQAILHFEMFQLFEQFKILEEQINKTEQLIVSQIEKDSEFKKMYRLLLTIPGMGKITSAAFISRVGKDVKRFKNVRKLISFFGQCPKVRESGGKTIGNQGITKQGNGMLRGYLSQAAIGALRSKRKEAIPLKMWYETIRKRKGWKKARVALSRKIAATCYGVLVHQKPYNPMLVTGESKYVSA

SEQ ID NO: 373518 - protein, 358 aa, unidentified
MAIITVGIDLAKNVFAVHGVNDTGKAELVKPKVPRDQLLDLIAKLPPCLIGMEACSGAHHWARLFRQHGHTVRLIAPKFVTPYRLSGKRGKNDAADAAAICEAITRPHMRFVPIKDEHQQAILCLHRTRQGFVEERTALYNRIRGLISEFGIVLPLKVERLKREIAPHLEDLPGWANRCVGDMLAHANRLDERIGEYDAAIKEAARQDERSRRLMALPGIGPTTASALLASIGIGHDFANGRQLTAWLGLTPGQYSSGGKTRLGRITKAGDAYLRSLLVMGARAVLSGLGEKQDRFSRWARSLQERRGYWKAVVAIAAKNARLCWAMLKYGEDFKLYAEREEGEEQKDCVLAELALPA

SEQ ID NO: 373519 - protein, 371 aa, unidentified
MNSILYVGMDVHKENYTLCCYSFDRDKVEYRQMVPSDYRLILKYLEQVRRKYPEEVEFICGYEAGCLGYSLYHQLTDHGVKCIILAPTTMGITNTNRVKTDRKDAANIARCLAFHTYSAVYVPDGEDNAVKEYLRMRDDQKLALKKIKQQITAFVLRLGKQYTGGKSLWTENHLKWLRGLDLTLLEKETLQEYLITYDYLTDKLERLDARIEELARNERYGERVRRLGCFIGIKPHTALSLLVEVGDFRRFEKAPNFAGFLGLVPGEDSSGGGRNRLAITKAGNSHLRRLLVESSQSYSRGTIGFKSKELKKRQEGNPPEVVAYADRANERLRRRYYRMTLKNGAKRNVAIVAVARELACFIWGMMTDEIA

SEQ ID NO: 373520 - protein, 365 aa, unidentified
MKKTTTTATASEKNFGGKLTIGLDLGDRSSWYCVLDKGGEVMAEQKLSTTPKAMKEVFAAMPRSRVALETGMHSPWVSRLLADLGHEVIVAHARNVRLIGESRRKDDRLDARTLARLARIDPQLLAPVKHRSRQAQAHLTVIRARATLVRARTALVNAARGLTKSYGERLRGCNPRNLDLEKAQALSPELQTALAPLLQASEALSEQIAAYNRQIVEIAKQSYPQTALLKQVKGVGTLIALTYMLTLEDPHRFRQSRDAGCYAGLQPGRRNSGQSAPQMHISKEGDPYLRTLLVQGAHHILGPFGADSDLRRWGLKLAERGGKNGKKRAIVATARKLAVLLHRLWVSGEVYEPFHNSHSTMLATA

SEQ ID NO: 373521 - protein, 334 aa, unidentified
MLYAAIDIHKQAFQAAVLDPETGEVVEERFGADRESLTRWTERWRGRVAAVAIEATTGWRWVWRELTAEGFEVRLAEPVQTRALLGRRRSAKTDRLDARWLARLLAKEMLPESWIPPAEIQTLRDRTRLRKAVAEDRRRWGQRLHAYLLHEGWPCSRSNLLRPPGLRWAAALQLPEHARQQVDSLLSVMAALEAQLDTVDGELRRFARADERCQALQSIYGIGPILACHLLAEIGEARRFRRAEQITRLAGLDPVVDESGETRRRGHLAKAGSPHLRWALVEAAVHAHRTTAPDLALYRATRERRDTTVARLTVARKIGKRAFHALRELELATA

SEQ ID NO: 373522 - protein, 408 aa, unidentified
MFAGIDWASTEHAVAVNDDAGRALASFMVEHSAEGFDKLVARLRALGEPGGLTVAIERPDGRLVDRLLEAGHPVVAVSPNAIKAWREGEVVSGAKSDPGDAAVIAEYLRLRFHLLEPLQPFSDHTRALRAAVRARGDLVAQRTAAHNQLEATLDAFWPGAKKVFSDVTCKIALAFLRRYPTPASAAKLGEKQMAAFCRKHGYSGGRSAAELVERLRRAPAGITAVAETAARKAAVLAYVGVIASLNAAIKDLDKEVATALGEHPDGEIFASLPRSGLINAAQMLAEWGDCRQAYGAPEAVAALAGMSPVTKRSGKYKAVHFRWACNKRFRTAVHTFADNSRHGSDWAAGIYAQARARGADHPHAVRILARAWLRVIYRCWSDGVGYDPAKHKAAVALAARDKPAPQAA

SEQ ID NO: 373523 - protein, 331 aa, unidentified
MEIKDTIGIDISKLTFDASIHGNRTAHVFENSGKGFKKLVEWAYRNSPFPKDRILFIFEHTGLYSHSLSVFLAERDIPFALVPGMEIKRSLGIARGKDDKVDAARIALYGYRLRDEIEPSELPQKDITDLGRLLSLRNRLVKQRACHKTSLKEQRRVLSRKGNKVLFETQEETVAHLSKQIKCLDREMADIIGKNKRLDKLYRVVTSIKGVGPQTAMFIIVYTNGFTKFNNARKFASYCGIAPFPNSSGTSIRGRAKVSHLANKKIKSLLDLCAKVAIRHSPEMKRYYDRRIAEGKNKRSTINIIRNKILSRIFAVAQRGTPYVDFMKYAA

SEQ ID NO: 373524 - protein, 349 aa, unidentified
MTEQRISYTGERVYVGIDVHKETYTVTCVCHKQIVKTATVPAEPASLAASLLRWFPGATLTSAYEAGFSAFVLHRALTQVGITNLVVNPASIAVAANDKVKTDRRDSKRLARDLADGRLRGIYVPTEAEELARLLPRTRAQIVQHRATIARQIKAKLHQFGLIAPSNRRLISSRYLREIATWPLPLELGVSLRLLAEQWRFATRQLIEMRRLLRDQAKAQEEIEKVYRSVPGIGEVVARTLATELGDMTRFANERALFSYTGLTPSEYSSGTSVRRGHISRQGSSRVRHLLVETAWRAIPRDAVLKEIFDRIAATRGKKRAIVAIARRLTGRIRACFRQGTAYAVGTYA

SEQ ID NO: 373525 - protein, 343 aa, unidentified
MQTIATIGLDIAKSVFQVHGVDATGQVVVRRQLKRRHVLAFFSKLTPCLIGIEACASSHYWARELHAVGHTVRLIPPAYVKPYVKRQKNDAADAEAICEAVTRPNMRFVPIKTVEQQGCLVLHRTRHLLIRQQTATINSIRAHLGEFGIVAPVGRRGVEQLLEVIADANDTRVPEVARACVATLGVQLRQLKAQILELDRQILAWHRSSEVSRRLNHIPGVGPLLATALVASIAAPKAFRSGRDFSAWIGLVPKQNSSGGKEKLGNISKRGDRYLRSLFTAGALAVIRYAKIHGTKHRPWLVALLARRPTKVAAIALANKLARIAWALMTKGSRYRQPAALMV

SEQ ID NO: 373526 - protein, 320 aa, unidentified
MNTMTIASLRNKERHIGIDVGKSFLDVSIYELDLHWQEDNNPQGIKRLITALRRYKLTRVLVEATGGYERHFVEACAEKSLPVIIVQPIQVRQFAKAQGILAKTDKIDARLIAMFGKVLQPDVRPLPDKKVRLIRDLLARKRQLNETRTQELNRQHKAPKVLAASHKRLIKILDKEIAWVNDKLTQQVSEITEWQRTVEILRSVPGVGDGVAFTLLGELPELGKLSNRQVAALCGLAPFNRDSGQMKGKRRIKGGRAPIRTVLYMAMLSAIQHNPVMKKFYEKLVAQGKHKKVAITACMRKMMTILNTMVRNNQEWQMNH

SEQ ID NO: 373527 - protein, 469 aa, unidentified
MAVEARTLEGLKQINLNAAGIDIGSAENFVAVPAHTVKEGEPTVRCFGVTSPEQDAAVEWLCACGITTVAMEATGVYWIALYDKIEAAGIEVVLVDPHSVKAMPGRKSDVLDCQWLQQLHTYGLLRGAFRPDRATRRLRTLTRQRAELVAAGASHQNQMQKALIEMNVQLHRAVSDIDGDTGLRIIEAIVGGERDPKALVKLRDPRIKKSTVAEMEAALAGHYQVDLVFVLGQNLESWRFYRGQLERCDQRILQLLESFPPPPPKALSQLPPKPVPPCTQPGREYVLKKRSIGRGKNAPTVDMVEVLKRVCGVNLMAVTGLNVLSVLMLLGEIGVDMSRWRSAKAFCSWLGLCPGTKISGGKVLSRRTRRVVNRAAVLLRVSAVAVGRSNTWLGRFYRRKKAHLGAPKAVTATARKLACILYHMLKYQDAYVPINEAAYEAKAKKQRLERLKREAKMMGLQLVEVEKAA

SEQ ID NO: 373528 - protein, 372 aa, unidentified
MQLKSKVFVGLDTSKLKISVAVAEDGRQGEIRFLGEIDHTPEAVRRLISKLSGKHRELLFCYEAGPTGYGLQRQIAALGHECAVIAPSLIPKRPGERVKTNRRDALSLARLHRAGELTAIWVPDPGHEAVRELVRAREAAMEDLREKRQHLQSFLLRHGRIFSGRKPWTRAHARWLAELIFEHPAQYLVLGEYRQAIEDAEARLERLTRQVAEVVKTWSMAPVVEAYQALRGVALLTAVTFVAEIGDVRRFESPRQLMAYLGLVPCKSSTGERVRRGGITKAGNTRVRRVLIEGAWTYRFPARMSRVLQERQEGLPQIVRAIAWKAQVRLCARYRRLMAAGKRQTVVVTAIAREMAAFLWAIGREIQPRSAA

SEQ ID NO: 373529 - protein, 419 aa, unidentified
MSFKILKNNCCGLDVHKTWIFACIGITDSHRRTEYKQARFSSFTKGLQELCDWLAKYNCTDVCMESTGKYWIPVFNVLEKNNIWVTLSHPKYTKPQKGNKTDRKDAKWICDLYMCGMVKPSFIPPADIRQLRDLVRYRFKLTCMITSEKNRAHNCLTISNFKLDEVFSDIFGKSSRSITEQILQHPGETFDVAQFVDGRCKTPIEEIQAAVDGAISTEQAVKLRQCLNHIDELEKHQAEIEREIFRLSDKYEEVLNLIRTVPGFDKNPMTAIQVLSEIGGDMSVFPTAKNLVSWAGCCPRNDQSNQKIKSTRISRAGSYFKPVLVQVANALIKSKKHPEFTTRYRRIKARRGHKKAIIAICRMILTAIWHILTDLKPYTTEGFLESRPVNDSKILTTSQALNLLKQRGYVIKDDTVPVT

SEQ ID NO: 373530 - protein, 343 aa, unidentified
MAHYVGLDVSVRQTSICIVDDVGKVVREARVMSEPEAIIPILTAQHLACRRIGLEAGPLSQWLFNTLASAGLPVICVETRHMKAALAAQINKTDRNDARGIAQMMRVGLYRPVHVKSEPSQEKRTLLAARKLLQGQNRAVENDVRGLLRSFGLKVGPTSAGAFDARVRQLVEGLPRLTAIIRPLLEARAALRSQFAVLHRMLLDLVRDDPVCRRFMTVPGVGAVVAITFQATVDIPQRFINSKAVGAHFGLTPRAFSSGETDYVGRISRCGDALMRATLYEAAHTLLTHTQRWSSLKAWGVRIAQRRGLSKATIAVARKLAVILHRMWIEKTEFRWSARPATA

SEQ ID NO: 373531 - protein, 324 aa, unidentified
MTSTSIVGIDVAKATFDVALPLDKPGKFQTRAKLANQPKGFAEFKAWLDKYAPDAAVCMEATGIYHEALASFLHAQGVTVHVVNPLQIAHFAKSGLLRNKTDRTDAKVIARFAAAQDDLRPWVPPTPSQRRLRELVMRLEDLLQMKVMEENRRDVTLAPDVLASIDRILQGIIEQIAQIRRMIDDHIDSDPDMKGDRRLLESIPGIGPGVSATLLACVGDLRRFDDPGKLTAFAGLNSFVRESGKWKGSAAIAKLGSALIRAKLYMSTLTAMTHNPAIRAFVQRLKERGKPSRVAMVAGMRKLLHIAWGVVRSGRSFDPAIALA

SEQ ID NO: 373532 - protein, 404 aa, unidentified
MWYSGIDWADEHHDALTIDEKGHQMGSIRVDQSPQGFAKLDTFLGQIIGSESKEHMACIIETTHGLLIIHLLEAGWPVYPVNPRTVDRRRSASGAKTDLIDAYLLAKTGRADFADLHRLIPDSDKVAELKQLTRDQDTLIRTQTRLVNQLTACLKASYPVALDLFSQLQQKSTLGFLQTYPTVEAARAASLKEIQQQLKQTRHPQPAQAAASIVEMLHPPQLQADAVLTRTKSRLMLALVSQLLPLLEQIATYDKEIHTLFLTHEDHAIFESLPRAGQHLAPRLLAEIGDDRTRDLDASSLQALAGTSPVLYQSGMYSKAHRRLGCIKPLRNALHQFAWQTTQSEAWAKDYYQRKRMEGKSHTVAIRALSNVWVRIIFAMWTRRECYQTATFELAQQQHARRAA

SEQ ID NO: 373533 - protein, 408 aa, unidentified
MKTLHQRCAGLDVHKQEVVACLRLGRRGRVEREVRRFPTTTRGLLELADWLEAARCTIVAMEATGVYWKPVWHILEGRFELVLANAAHIKGVPGRKSDVNDATWIADLLAYGLIRASFVPPQPIHDLRDLTRTRKQLSREIVRHEQRLQAVLEEANVKLTSVITDILGASGRRILKAMIAGETDPSRLAELGSRRLGCSRETLVEALDGHVRDHHRFLLEQHLKTIEQLEETMAAFDARLEAALAPFRDTVECLTQVPGLSTTAAEVVIAEIGLDMRRFPTAGHLLSWAGLVPGLHESAGKRRSTRVTKGAPWLKPVLVQCAWAAARKKGSYFEAQFLRLKGRRGPKKAAVAVAASILTTVYHMLRDGTCYQDLGPNHFIRRDPARTAHKLADRIRSLGYIVEIRSAA

SEQ ID NO: 373534 - protein, 345 aa, unidentified
MNNTIVGVDLAKNVIQVCIVKNNEVVSNEEVIPEQFMLWLINTKPVTIIFEACGMSNYWKQEALKHGHDAKLVSARLVAMIRQNQKTDKNDALAVAQASQLTDVNFINGKNIKQQEMQSILRMRELAVKQKVAIQQQITALLLEFNIRISAKQGGLSGVVQTVLEDADNGFTFPFRAALEATWQSYLSLVDSIKVYETALESILKEHPDCQKLLALEGVGVINAVNLYLTLGCSDSGVFKSGREAAACIGLTPVQHSSGGKVKIGSISQRSGNPSVRSCLINGAMSMVNQMGKRAPKTEKERWLKQLIERRGKLCAAIALANKTVRTAFALLTQDTEYKAQPLMA

SEQ ID NO: 373535 - protein, 363 aa, unidentified
MIVIGTDTHKQTHTCAAVFAETGQLAGGLTAPARKPGFRELLDWGRDLDEERIWAIEDCRHVSGSFERFLIASGERVIRVPPKLMGESRRGERTAGKSDPIDALAVARAALREGPETLPAAHLDEDALQVKLLLDHREDLVRARAEDQQRLRWHLHDLWPELEIPAGALDRIVWLDRVARKLSRAEQDTRVRVARELVVEIRRRTRRASELEREIGGLVKDRAPELLELEGCGALTAAKLIAETAGAKRLASDAKFARLAGVAPIPASSGKRIRHRLDRGGNRQLNCALHRIAVTQGRVHAPAREFLAKKQAEGKSRMEALRCLKRHLARRVWRLLINSEIDRSVKTADSQRGTLAPQFAVAA

SEQ ID NO: 373536 - protein, 348 aa, unidentified
MHEALYYVGMDVHKRTISYCVKTADGVVKDEGVVRSSRECVLEFLEQLNFPWIGAMEATMFTNWIYDALTDAGHIVKVADPYMLRAIVASKKKSDRIDARILADLLRCDLFPEIYMPSREIRELRRVLRFRNMTVHMAVRMKNKAGSLLMEAGVEYSKSRLHGKRYFNELLSKLDEVPESVIELLKLSRAGVEIFDGWQKSLLKGLREHPHIRERMKRLMSIPGVGEVTALTWVLEVDDPRRFSSVRKAISYCGLCSSLKESAGKTFRTPLSKQRNANLQTILIEAAKLAPQWNPQLKAVYERDAARGNRNRATVAVARKLVAYMLSVDKSGKDFELNEPACCSEKGF

SEQ ID NO: 373537 - protein, 340 aa, unidentified
MTITTVGIDLAKNVFAVHCVDQNGKTVLVKSRVSRTALPGLIAGLPPCVIGMEACSGAHYWARLFRQYGHEPRLMAAKFVSPYRMAGKSGKNDAADAQAICEAVRRPHMRFVPVKDESQQAMQCLHRTRQGFIEEKTATYNRLRGLISEFGVIAPQSTDALRHIVFEQKNSLPLQVQQCVDDLLEHVARIEDNIAEYDRILSRMAKTDHRSQRLMELKGVGPTTACALVASIGNAHDFKNGRQLAAWLGLTPSQYSSGGKSKLGRITKAGDSYLRTLLVQGARSVLIGAEKRTDLFSRWVCSLVERRGYWRAVVAIAAKNARLCWASLHYGDDFRLYSAS

SEQ ID NO: 373538 - protein, 339 aa, unidentified
MNQISILGVDLGKSSFQLHGNDEQGREVLTRKVSRQKLLTMLATLPPCVVAMEACGGSHYWAQEIEKLGHQVKQIPPQEVKPFVKRYKTDARDAAAIAECAARPSTRVVAQKSPEQVDIQSIHRVRDRLVRERTAIANELRGLLLERGIVGQQGRAGLQQLLTNLAEREEDISPLFRELILDLWQQWRDRDEAVDRYGHQLEQLGKEHEICKKLMQIPGIGSINATLLFSYAGNGHQYPNGRDFSASLGLVPKQHSTGGRDLLLGISKRGNKQLRKQLVHGARAAYRWFLNEKEPSRIGTWVKRLAQRKHPNQVIVALANKLARIAWKVMARNEAYRAM

SEQ ID NO: 373539 - protein, 356 aa, unidentified
MHSENKILNFKNQPFFVGIDVHQKSWTVTIRSTKVVLKTFSMNPSAKELSRYMNENYPGGSYLSVYEAGYFGYSIHRELKENGFNNIIASPTEIPRSAKEKIIKSDRVDSRKLSRELENRSLKGIYVPEVFHQELRSLARTRYQLTRKQSRIKNQIKSYLTFYGHKYPDRYHMGHWSGRFIEYLQSLDFAYEPGKEQLKIYLDELQIIRGLLTKTTRLLREYCRKYDINDTILLLCSVPGVGFTTAISMYTEVIDMKRFPDLDKLASFVGLIPAIVSSAEKASNLGIKNQHNRYLRSLMIEAAWIAIRKDPALILSYNNYIKRMCKQKAIIKIARKLLNRIRFVWKNEKKYKLSVN

SEQ ID NO: 373540 - protein, 418 aa, unidentified
MSYRIAAIDVHKKKLAVVAADVDVEDEYQFERRWYGSNPEQLRVLSEWLREQQIEEVVMESTAQYWKPVWGALERYWKPRCQSRESAGRMSGTLHLAQALSNRGRRGRKKDFRDAERLVKRLVSQELVLSFVPDTEQRMWRTLTRTRYQRTRDKVRLQNQMEALLEEAHIKLSSLVSDLLGASARRMLKALADGETDPAALAALADQRLRATPAQLHDALGACTELNPVYRRLVKMTLEDLQLVEQQISQLDQEMASLLRPHQDAVERLAVVPGLGVDSVQQIIAEVGAKAATFPSAEKLSSWVGACPGEEESAGVNRSRHSPKGNRQMRRVLNQAANAAVKHKGSIFEIVYRRLVPRLGHNKTIGVIAHRLCYLIWIILHKGVRYEERGPSVSESPDNAVRHEWSGHSESLATESNL

SEQ ID NO: 373541 - protein, 435 aa, unidentified
MISAAIERCAGIDVHKKFLAVCVMMGPLDGEPRVEKRRYGTTTIELSELREWLRSQSVTHVVMESTGSYWKPVFNVLEEAVKVYLANPQEVKNRRGHKTDDKDGWWLAHLLRHAMIRPSFIPPRLVRELRDFTRRRKRLLGNATSERNRVQKILEDANVKLGNVLSDVFGASGQLMLDALLEGHATPEQVAHLAQRKAKKKIPEIIAALEGHQMTAHHRKLIRYSLEHLQFLEEQISKLDDDIAAKIREAQLEPQWQLLQTVPAIRDTSAAAILAETGGEMSTFPSVKNLSSWAGLCPGNNRSAGKNKSSRTTGGNPWLRSSLVECSWAATVKRGCFLKEKFWRIVSKSRDHKKGPALIAVAHTLLQLVFQVLSTGKPYAERGLAPLDERQRNRIVRHHVRRLGRLGIAIYSLQPTTTAGVGRPLKAVILGPETQ

SEQ ID NO: 373542 - protein, 366 aa, unidentified
MNLHQTTTSFNCGIDLHAKNMYVCLMDRQGRKLIHQNIKGNNFEYFLEITSPYIHDMTVACESTFNWYWLSDACSLNGIKFVLGHALYMKAIHGTKTKNDRVDSEKIAHLLRSNMLPEAYCCSPEKRPVRDLLRRRTCLVRHRSGILAHMSESVQVHGQQPLSRQEKRKSARLKAVPLRFSNPILNFSMKIDSYLANQYDILIKELEIEVIKHTRLLASKEYAILKTAPGIGKIIGLVILYEIDDLKRFNTSNEFCSYSMLVPSNATSDGKTVGSQGKKMGNHYLKWAFSEMVVIAKRNPYIKEYSSKLEKKHGKTKANAILRHRFGHVVYNMLKHEKVFSIEKFLKGKIDMKKVKNKGDVVRPKA

SEQ ID NO: 373543 - protein, 372 aa, unidentified
MKNIREAFAKGKPIYVGIDVHKRNLAVRVNCEGEEIYQAMIPADPERLIRLLSRFEASEVHTVYEAGPTGYSLHDALTAAGFDSMVTPPSQVPQLGGKVKTDHRDSKKLAEMLAGGFLKHVHVPTPEQRAERQLLRTRNQIRKHRIQTQNQIKSMLLFHGKRPPSTVREGWTQEYIHWVETVPWEYEELKVSMGALLELFRQLDKQLKEITKQLAALAMKEQYREHVQLATSIPGIGRYTALALGMEIQEMSRFRRSGQLSSYLGLTPSQHSSGQSIRMGRITHCGNARLRALLVESSWTLIRHDLQARETYERIKHQTGSGKKAITAIARRLALRLRRVLLDKMPYRIDPGSLAQTKIDLLKAKRFIVTVS

SEQ ID NO: 373544 - protein, 371 aa, unidentified
MDVHTTNYTLCALESKFGEEDVVLANITVGPDHKNILDFVRKIKEKMDPKGNDEIDIECGYEAGCLGYSLHQTLTACKLKCIILAPTTMHSEKGPRIKTDRRDAKLIAQCLSNGGYHAVHIPTAEDNAVKEYVRMRDDHKIALKKLKQQTNALCIRFGSYYEGTKWTGMHLKWLRALKLPELIRETLNEYLATYEELTAKIARYDQRIREIAGQEKYRGKVRKLECFLGIKTHTALSLIVETGDFIRFRKGNVYAAYLGLAPGEHSSAESGGKLGITKAGNSHLRCLLIEAAGGICKGQIGRKSKDLIARQAGNAEDVIAYADKANIRLRSKYYRLTRHGKKRNVAVAAIARELACFVWGMMTDNIHGNAA

SEQ ID NO: 373545 - protein, 350 aa, unidentified
MSECTTAVIGCDLGDKQSTLCILRADGRVERPKPIKTVGEAFRTFFLARPPAHVVIEVGAHSRWVSVLLEELGHRVTVANARRVKLISQNDSKSDQVDAELLARLGKADVELLAPIHHRGMEAQADLAVPKARDALVGCRTKLINTCRGLVKSFGERLPQCSGESFHRQAREYVPAALKPALEPVFQTLERIDEAIRKEDKLVARLAKKYPDVEVIAQPNGVGILTALVFLLTLEDKNRFKSSRQVGGFVGLRPRKNQSGEDDPQLRITKAGDPFLRRLLVQCANYMLGPFGRDSDLRRWGLELARRGGKNARKRACVAVARKTGVLMHRLWVTGEVYEPLGYSAKRLAA

SEQ ID NO: 373546 - protein, 367 aa, unidentified
MSSRTIHPTHPTTSRVTVDTTVTGGVDTHSQTHHAAVLDHLGRLLATRQFPATGAGYQALLAWLNSFGTLERVGVEGTSSYGAGLTRHLISHGVWVIEVNRPNRQARRQRGKSDPLDAENAARRALSGEQTIIPKDTSSALESIRTLRIARSGAVKARTAGYNQLKDILITAPEDIRDRWRDKTLYRVSLEAARLRPDTSDLHHPDSAVKIALRSIARRIAELTTEITELDRLLAELVNQVAPTTLELVGVGVETAAQLLTTAGPNIDRFRGEASFAALCAASPIPASSGKTHRHRLNPGGDRAANKALHTIALVRMRYCPRTQTYIERRMSEGLSKREAIRALKRYIARDLYHSLVTDLTRPLDDL

SEQ ID NO: 373547 - protein, 320 aa, unidentified
MASRESLFIGIDVSKQTLDVAFGADPHAPRETIPYTDEGVQLLVTRLQRLQPTLIVLEATGGLERMVFAQLLQAGLPTARVQPRRVRALAHAEGRQAKTDRLDARLLARCAERVRPPHHQATDEQRASLRDLLVRREQVIQMRTAEINRLTAAAPNLRSGIQKHIDWLDQEIRALEQERDTEAERTDEVRRKRELRESVPGIGAITALNLLLRLPELGTINRKEAAAFVGVAPYANQSGAQHTPRHISGGRRDVRSVLSMATLAATRRRLVRRAFYQRLCQAGKPRKVAIVAAMRKLLTILGAILRQQKPWDPAVHTSAP

SEQ ID NO: 373548 - protein, 348 aa, unidentified
MVRFVGLDIGKWKCRAAIMNQEGQILDEFWFTNNHEGIESLTAKLTLQDHVVMESTGSVWTNLYDRLDDRHIHVSLANPLKTKAIASAKIKSDKVDARILAHLLRSNLIAESYVPEKPLREIRALIRHRVAIVKIRTMVKNQIHAIVDKHGFACEYSDMFGKSGMKWLRSLELPSLDKLILDNHLTHLESLNQQTDRVDEEVHSKACEDEDVRLLLSLTGVDVYSALLVHSEIGDISRFPDYKKLVSWAGLAPSLHQSGSIEHHGSITKQGSKMLRWIMVEAARVAVNHDPRMRGFYERVKHRRGAQKAIIAVANKMLKITWFMLTRREPYESRNEKRYLQKLNSVAA

SEQ ID NO: 373549 - protein, 412 aa, unidentified
MLFIGDDWAEGHHDVVVQDDAGKALARRRLPEGVDGLARFHELVASCLGEDREPDPAQVVVVIETDRGPWVKALAAAGYRVYPVNPKQASRHKETVAVSGKKDDFFDAACLADMGRTRRHQIRELAADSDIAEAVKIAARAHQKLIWERTRHLLRMRSALREYFPAALDAYAAVTLTGPDALELPGRAPGPASAAKLTVTQITAALKRAGRRGDLAQRARDIQAALRTPHLTQPAVIAEAHAASVQAGAAVITTLNAQVKIMEAKVSELFRRHPDAGAYLSQPGIGDITGARILGELGDAPGRYASAKARKNYAGTSPLTIQSGKKKAVHARYIRNRHLIDALHAQALSSLTASPGARAFYDELRARDVGHDDAMRRVASRLTGILHGCVKAGAGYDEAAAWSHRAEPAQAA

SEQ ID NO: 373550 - protein, 342 aa, unidentified
MQITTIGLDIAKNVFQVHGIDAAEKVVVRKQLRRSQVLGFFKALPPCLIGLEACATAHYWARELTKLGHQVRLMPAKDVKAYVKRNKNDAADAEAICEAVRRPTMRFVQIKSAEQQGRLMLHRTRDLLMRQRTQVINALRAHLAELGTTSAQGREGLKELLKIVASDADERLPADAHASLVVLAAELQAMQTLIGLIEKRIVTQHRENKASKRLLTIPGIGIIGATAIADTVTDPKAFRSGRDFAAWIGLVPRQDSTGGKQKLGPISKQGDRYLRRILVVGAHSVLRRAKLNPQKHPWLTQLLARRPFKVVAVALANKMARMAWALLAKGGAYRAPALAATA

SEQ ID NO: 373551 - protein, 347 aa, unidentified
MDHYAGIDVSLEASSVCVVDGAGKIVREAKIASEPAALIGWFASLGLDLARIGLEAGPLSQWLYAAMKEAGLAVELLETRHVRVALQTMPVKTDRNDARGIAQLMRLGWFRPVHCKSMAAQETRALLTARKLVQSKLYDVEMSLRGILRGFGLKVGPTTPKRFARRIEELVAGHATLEVIAKALLSAHAALLREFDMFEKRVRAMARQDKRVRLIMSAPGVGPIVALTYVSAIDDPSRFSSSKRVGPHFGLTPRKYQSGETDVTGRITKIGDAGVRAALYEAANVILTRPVKGSGLKSWAMKLARRAGMKKAKVALARKLAVILHRMWVDGTTFDARKAGSTIPAAA

SEQ ID NO: 373552 - protein, 391 aa, unidentified
MRRVVIGMDPHKRSATIEVIDEREQVLAQGRYGTDTDGYARMLAAGRQFPDRVWAVEGCAGIGRHIAQRLVADGESVLDVPAKLSARVRVFDTGQGRKTDPVDAHSVAVAGLRSPGLRQVQADGVTVALRLLVDRRDELGRARTETVSRIHQLLLELIAGGAKKFLTRGQASYLLRTAPTPVGIVAQTRHQLARELIDELTIIDAKIRAADKQLRQLVTAASSSLGQLNGIGPSGAARLLGDIGDIDRFATAAHFASWNGTAPIEASSGDQQRHRLSRTGNRRINRVLHIMAIVQLRHDTPGRAYYRRRLAEGKTTMEALRALKRHLSGVVYKRMVNDAKQARAGATGPGGQPGATLQSSAASPIPTADSSDKSQPGPATGKRRTILAATP

SEQ ID NO: 373553 - protein, 343 aa, unidentified
MTEVTTIGLDLAKSVFQVHGVDEAGKVVVRRQLRRRQVLAFFKKLPPCLVGLEACASSHYWAREIAALGHEVRMMPARYVKPYVKRNKTDAADAEAICEAVRRPSMRFVPIKTPEQQAVLVEHRTRQLLVRQRIMLVNALRAHLAEFSIVAGVGRNGLEKLLEVIAGDHDERVPPAARACLLALRAQLVMMRRQILEADRRILAWHRASEVSRRLAEIPGVGPLIATALVASIPDPHAFRSGRDLSAWIGLVPKQNSTGGKQRLGKISKAGNRYLRSLLLIGAFSVIKRAKLTGCRRRPWLAGVLARRATKVAAIALANKIAHTAWAMMAHGTCYQEPLPRAA

SEQ ID NO: 373554 - protein, 402 aa, unidentified
MIFINCLGIDIGKSESVVAHYKDEVLVKEMVIQNNQNGYRYLKNYIKHLDSLFILFESTGIYSRGMKRFCEIHKIDYLEMNPLEAKFKTSSLRSWKTDKSDAHKLALLAFRMKDSKVQRQSEEIYFELRERAHFHLEMEINQNRLKVELVETLHQTFPGLEKLFTNRYSKIALSIAKAFPHPDFVSTLTHDELVEKVLHSTDKGISVNKAHKYVQKLIEIQINSFPNVDKSSFLLQKVQYLCDKLLIGIEEMKEFDQEMIDLAKNTTEFENIISIPGIGELTAALLIGELGNIREFKTNKQLNAFVGIDIKRYQSGTSKSRDTINKRGNKKARRLLYLIIMNIIRGRNHYQSHIVDYYYKLREQPHGKTHKTAVIASINRLLKTIHYLIVNNKLYDYQKAPH

SEQ ID NO: 373555 - protein, 417 aa, unidentified
MTEQYAWFLGIDWGYETHQICLIDAAGHMRDTRRLDHDSAAVDVYITWVLAQTGVPPAHIAVAIESPRGALVATLLERGFAVYAINPKQLDRFRDRHTAAGAKDDRRDAWVLADSLRTDQAAFRPVHVADPLVLQLRELAHAEADCARDFSRLANQLRDQVYRIAPPLLRLCPAADEPWFWTLLELAPTPAEQQRLTPTQVLTVLRTHRIRRLIAADVLTALRAPTFALAPGVIEATREALQILIPHLQFVRAQRQRCEARQEAILAELRERPASEAEPGEHRDVAILASLPGVGRMTTVAMLTEATQPLATRDYDGLRTYMGAAPVTKASGKRRLVHMRLACNARMREAAYHWARVSVQQDEASAAYYRGLRARGQTHGRALRSVVDRWLRILVAMLRHRTLYDPTRFMTAVAISA

SEQ ID NO: 373556 - protein, 344 aa, unidentified
MNEVTQHPAATMSATVGIDVSKRKLDCALLMNGKIKSKVVANDTAGFTLLNTWLRERGVDVQCTHLCLEATGPYSEQAALALTNQGWCLSVVNPVRIKGFAQSELNRNKTDRADAALLARFCAAMHPALWVAPSPAYRHLRTLVERLQTLKDMHQQETNRLEAHHASGEISIIANVTSHITWLKQQIAQLQQDINDHIDHHPELKQDAELIASIPGIGETTVAKVLAYAGDVRRFANGKALAAFIGVSPRQKQSGSSVKGRTMLSRTGHAALRKALYMPGLVALKHNPLLQVFGARMKTNGLAPKAVVGAVMRKLVHLIYGVVKSGKPFDAHFLTRGLACQDGI

SEQ ID NO: 373557 - protein, 422 aa, unidentified
MKKRIYRRMPVNQFQPSSISLDEVGARLVFAVDVAKVDMVAAIAGDDGRVLNTIAWKAPSENAAVLGILQAFRAAGFLVEVAMEPSGTYGDVLQYHLEKDGFPIFMVSGKRTYDARELYDGVPSLHDAKSAAIIARLHLEGLSKPACAPCPERRQLHAAITIMELHQRRYLQLVGNLESWLARHWPELPALVDLTAASLMALLARIGGPADVAAQRSEAEKLLHGISRGLMDKEKITAILDSAGPSVGVPLMGMERNALMEIAAEAHRALRAFKGAKTELEKLAAPTPAAAMAPVIGRTTAAIVYTDVGDANLYSSAGSFVKAMGMNLKEKSSGTIKGQIKITKRGSSRVRHYLWLAVFRWIQKDPIANAWYERKVKRDGGKSSRAAVALMRKLAKALYYVGRGAPFESSKLFDVRRLELAA

SEQ ID NO: 373558 - protein, 376 aa, unidentified
MREKLRFLGLDVHAETIAVAVAEPDGEMRSLGTIANREDSIRKLIRKLGPPEQLRACYEAGPTGFVLYWQLTQLGVECAVVAPILVPKKPGDRVKTDRRDALKLARSHRSGDLTAVWVPDEDSEALRDLVRQREAAKQDQLRARHRLTKFLLRTGQRPPLGLKAWTERYLRWLAQVRYTQPAQEATRLDCMNEVEHMSARVKRLEEAILEVVKLAPQPMQELIRGLQALRGVAHISAVTIASELGNISSRFESARKLMGYCGVFPSEDSSGKRIRRGGITKAGNAHLRRIVVESAWCYRHLPRVGEKLRKRHQGVPAEITEIAWKAQHRLHKRYMTLMARGKEQRKTMTAIARELLGFIWAIGIKAEAACKQQLAA

SEQ ID NO: 373559 - protein, 321 aa, unidentified
MQKDLLYCAIDVSKDKLDVDGAALALPAQLGNDQAGFRQLIKAAKKYPGAVQFVFEATGPYHLGLALALWEAQIPLSVLNPARVRYYAKAQGKAKTDPLDKQVIGDFARSFRPPPTPAPDPVRRELTELLQRRDGLISTRAAEQNRLGQCRHKIIKGQIRRLMAQLAEQIGQIDGLMKKLVNSSQELKAKVKALCQVKGVGHLTAVTLLITLPELGTLGRNRIVRLVGLAPLNDDSGTQKNKRYIQGGRARPRCALYMPALSASRHNPVLKEVYERLLKAGKLKKVALTALMRKLLICLNALLRKLADQHPSPQGLCLAKP

SEQ ID NO: 373560 - protein, 338 aa, unidentified
MSSPNCHKDGPGRHSPGAAMLVGIDVAKAELVVAVRPSGERWTVANDERGLRTLVERFRGAVPELIVLEATGGYELLCVAALVAVGLPVVVANPRQVRDFAKATGQLAKTDRIDADILALFAERVRPAVRPLPDAEAQELDALLARRRQLIEMLGAERNRLGQVFGRGKRQVKKSLKGHIAFLERELRIADTDLGDMVRQSPAWRERDDLLQSVPGVGRVLSLTLLADLPELGRLSRRSIAKLVGIAPLSRDSGTLRGRRFVQGGRASVRAVLYMGTLVATRRNAIIRTFYQRLLAVGKPKKLALIACMRKMLTILNTMVRTNQRWSADHISPALVPA

SEQ ID NO: 373561 - protein, 413 aa, unidentified
MHYKQKHIYVGLDLHKAHHTAVIIDCWNTKLDEIQIENKPNSFDDLLKWVKKHCKKGMTPVYGLEDTGGNGRALAVHLVEKKQIVKEVNSALSYNERKSYATTQKSDSWDAYCIAKVLLSRLDELPDANPQDIYWTIGQLVARRNALVKHASSLKNQLHQQLSYHFPSYKKFFCDIDGKAALAFWEEYPAPHHLETVGEEELATYLRKASHNTCSTRKAEGILELVKKDGETKRNYQESRDFLIVNMVQDMKRSRELIKETEAQLRQVMPQLDYKLESMDGIDVVTASQLVAEIGDINRFSKADKLARFAGIAPVRFSSGGKGKDQASGQGNRVLNSIFHNLAVQQIQVAKGSNKKQRNPLMHEFYQRKLGEGKTKKQALICVMRRLVNIIYSMMKNKTEYRMVTPLTDRQAG

SEQ ID NO: 373562 - protein, 358 aa, unidentified
MNYIGIDLHKKFSQVTVLGEGGEIRERVKIDNREEVLNRHFNNFDEPSKAVIEATFSWGWLADYLQSRKIEVVLAHPQKVKAIASSQIKTDKVDSLILAKLLRADMIPQAYFCPKPLREVKEVLRSRASLVGLKTQVKNKIHSLLHKYNIREDEKFSDLFGKRGKEFLNSLELGEYTTPVLKRYLETLSFLEEEVKKTSVDLKQVFEKDEVAQFLERLPGIGFYTALILSKEIGNIGRFFSAKHLCSYAGLVPSTYQSGEHTRHGKIKQGNKYIRWVLIEAVPKTIGKDKVLNAFYQKIKAKKGHNKAKVATARKMLGQIWYLLKTKQSFVDPETGSPVFFSGASSFPLKGIEVNSHR

SEQ ID NO: 373563 - protein, 421 aa, unidentified
MGGIREVAKVACGLDVHRSEVVACLITSGTRKRPKVEIRRFRTVLAELVQLRTWLVEAGCEVVGMEATGPYWKPIYAALEGHVQLVVGNPLQMKGLKGRKTDQKDAEWIADLTRLGMIKPSFVPPPEFRALRDLTREWRNVIHARTMLRNQILKLLEGTGIKLASFISNVFGVTGMGLLRSLSVGQDVRAQLPLLVKGSLRRKLTDLNLALEQPLPEHLRELLAIQLVRHDDLDHVVGHLEAMIETRMAPYQAERNLLLQVYGLGITAVNIILAEIGVDMNVFPTPAHLAAWAGVCPGNRETGGKRISGTTRKGNTYLTTILVECALATVRAKGSYFRSKYHHLRARIGHKRALMAIAHKLIRLIRLIHRLLSRKEPYKDLGEAFLDKREKTVKADKLTRRLQALGYRVTLEPLPDAGLIA

SEQ ID NO: 373564 - protein, 371 aa, unidentified
MKKPIRVGGRQLVPSRAEKADLKPGRRSRTRCKPARLSGPKSPYLQGRVVASDLRAGDRMAPTIFVGIDVSKDTLDIAVRPSALRWQLANDDAGIRDLVSRLAELSATLVVLEATGGYEHPAAAALAGAGAGVVIANPRQIRDFARATGQLAKTDAIDAGILALFAERVRPEPRALPDEARQMLEALVTRRRQVTEMLVAEKNRLGHARRPVRRGITAHIRWLERQLSDVDRDLDEAIRQSPLWRSQDDLLQSVPGVGPITSRTLLAQLPELGLLDRKEIAALVGVAPLARDSGTLRGRRTIWGGRATVRAVLYMATVAAARCNPLIRIFYQRLRAAGKPAKVALIACMRKLLTILNAMARTHTPWRPAHA

SEQ ID NO: 373565 - protein, 364 aa, unidentified
MFTERTSVGLDVHARSVAAAAIDSQTGEVFQKKLTPAYDDIGKWLAQLPGPVAVAYEAGPTGFGLYRHLTAAGIRCEVAAPSKLQRPAGDRVKTDARDAVHLARLLRLDDVAAVAIPSVDREAARDLVRAREDCRGDLMRARHRLSKLLLRHGIVYYGGNAWTGKHDMWLRTEALPRLPMGATRSAFDSDYDAVLTVLARRDRLDDQIEAMAAASEFTPVVRRLGCLRGISTLTGFALAVEIGDWHRFSGNSIGSFVGLVPCEHSSGSTRSQGPITKTGNGHARRLLVEAAWHHRPAYRIGKTMRERWDLAPAAARARGDAGNQRLHHRWVGFIDRRKRSTVANVAIARELAGWCWSLAVLDDD

SEQ ID NO: 373566 - protein, 372 aa, unidentified
MTSIIYIGMDVHTTNYTLCCYTVDSDDAFAVVNVKPDYHEILKYMGRVRSTRGGNCDFICGYEAGCLGYSLYHQLAKHGVACIILAPSTMPQQKGKSIKTDKRDAKNIAKCLAFNMYSPVYVPTAEDDAIKEYIRMRDDVKADLKRTKQQIISFCTRHGFHYEGKSRWTQAYFKWLDSLVFENALYKETLQEYLALYYTLDEKIAVYDARIEELAHQKRYEENVRKLCCFKGVSTHTALSLLVEVGDFHRFRTAQHFSAYLGLVPGESSSGEKVIHTNITKAGNSHLRTLLVESANSYSRGVVGKKSKVMKDKQGGNSPEIIAYADKANERLHRKFYKIAIRSKKNVAKTAIARELSCFVWGMMTNHISRAV

SEQ ID NO: 373567 - protein, 339 aa, unidentified
MTKITTIGLDIAKSVFHLYAVDDKGRYLKKKELKRAQLLAYVAHLEPCLIAMEACGGANYWAREFISRGHQVRLIAPQYVKPYVKGNKNDYNDAEGIAEAAQRPNMRFVPIKSVEQQDIQNFHRQRERIKKERTALVNQVRGLLAEYGVVINKGVTAVRRALPEILEDAENGLTPLTREIFAELQEELRIIDKRFKQCEKRIQCLNQKNEVCQRLNEILGIGPITASATYAAAGNGKDFVNGRHFSAWLGLVPGQHSSGGKAVLLGISKRGNAYLRTLFIHGARAVLRHSANKTDRFSRWAQALLERRGHNRACVAVANKMARIAWVIMAKGEHYRVAV

SEQ ID NO: 373568 - protein, 377 aa, unidentified
MKRIIRIGLDVHSTNYTLCAMEPIIGEDDRIFATVDVTPDYKNILMFIENLKMKLGVDNQYDIQCGYEAGCLGYSLYNQLTAANVKCVILAPTTMLTPQGVRIKTDARDARMIAQCLSYGGYHAVYVPTEDDDSVKEYIRMRDDHKTALKKIKQQISAFCLRHGHHYAQSKWTVGHWKWLKQLELPALYREVLNEYMTSYEEQTAKIERFDQRIEELASQEQYAERVKKLGCFLGIQTHTALSLIVETGDFARFAKGNIYAAYLGLVPGEDSSGPKANRTGLSKAGNSHLRQLLIESAGGICKGTIGHKSKVLKARQSGNTAEVIAYADKANTRLRSRYYKFIRHGKARNVAVAAIARELACFVWGMMTDNISTKAV

SEQ ID NO: 373569 - protein, 326 aa, unidentified
MQGKDVSEQETKGESSVGIDVCEAWLDVHILPAEQAFRVPNSHPGHRTLKRRLERYDLGLIVIEATGKWHRQLHRTLHAGGYEVRVVNPLRARLFAESMGLLGKTDRLDARMLAVFADKLGNAGRPPAPELIEALQELVQARVSAVEEQTALANQLKSAETVFLRRQLGRRLKRIAADIQAIETELRRRIKADEALMRRYAILLSIPSFGPVVAMTLVARLPELGSCDDKQIAALCGLAPWPDDSGPREGARHIRGGRHPVRIVLYLAALSATRCNRDMKAFFRRLTAGGKQSKLALIAVARKLVLLANTLIAADRLWLPEPPKYA

SEQ ID NO: 373570 - protein, 387 aa, unidentified
MPQPNDLSRSLVAVDQDSTIIAVVEMSQSSWLVAGMLPGIERQPRKKLEPSAERLLGLLHRWRDEAVKAGRKITRIALAFEAGRDGFWLARWLRAHGVEAHVIHPSSVAVSREHRRAKTDRLDTELLKRGFLGWLRGERGHCTMARIPTIAEEDAKRPNRERECLVRERTRIVNRMKGTLARLGIRNFKPTLRKAAERVTTLHTPEGSALPPNVSAELQRNMARLGFVVSQIKEIEAARQKRLEQEPETEPHAMVRHLARVVGLGVETADILVNEVLSRPMRDRKAVARYAGLTGSPDESGAKRREQGLAKAGNARVRRGMIQLAWRFLRFQKESALALWYRARTADSRVGTRKTMIVALARKLLIALWRFVTTGETLEGVVLRPAG

SEQ ID NO: 373571 - protein, 453 aa, unidentified
MAQRNARVSLKPGKSRAALTITHPNAAGIDIGSTSHYVAVPADRDDTPVREFPSFTVDLNALADWLKGCGVDTVAMESTGVYWIPLFELLESRGFTVLLVNASHVKNVSGRKSDVLDCQWLQQLMSYGLLSGAFRPTDQVCVLRSLWRQRVMLLKSQGRDVQHMQKALTQMNVQLANVISDVAGETGQKILRAIVAGERDGQVLGSMKNARIRASIDEIAKSLQGNWRGEHLFALKQALNAFDFIGTQLAECDREIEQQLQRLQAHDGEPAKGKQRGRARNAPKFDLRTQLFKMCGVDLTRIDGIDVTTALAVISETGADMSRFPTVAHFASWLGLCPGTKITGGKLMSSKTKRCANRAALALRLAAAALRSSQSALGAYFRRMCSRMDKPKAVTAAAHKLARLIYTMLTKGTEYTDKGQDYFEERYRQRVMHHLAKRAEKLGFQLTPIRNAA

SEQ ID NO: 373572 - protein, 426 aa, unidentified
MYSNTQNSKIAAITEKTLVIGIDIGSETHYARAFNWRGIEFTRKPFIFNNDDEGFEAFRVWIEELKTGHDLDKVMPGMEPTGHYWFNLGAFLQDNGMRPVHVNPHHVKKSKELDDNNPSKNDRKDPRVIARLVIEGRYSYPYIPTGIYADVRNLSNLRLQAQGELTRIKNRIARWFAIYFPNYKDVYGKLDAVTGLAVLKVAPLPEDIVKLGADGVNKIWRDAKMRGAGMKRAMTLVAAAEHSVGCTEASEAARYEIRILLSDYDLYAQRESELIGMINEAIAEIPYIDKLLEIKGVGLKTAIGFVSEVGDISRFDDPKQVQKLAGYAIIENESGKHKGEHHISYRGRKRLRYVLYEAAISVVAHNAEFKEIHQHYITRDKNPLKKMQSLIAVACKLIRVFYMLATTDNHYDGQKMMCDIKRPVVA

SEQ ID NO: 373573 - protein, 290 aa, unidentified
METQTNLEKSFFENKELFVGMDVHKAKWVVTVRSYDLELKTFSMQPLAEMLEKFLLSTYPKAKYKIVYECCFSGFWIYDYFFEKGYSIIVTPTNRIYKDGNTIKTDKIDSRKLAFQLSRGLLREVMVPAKKIREYKYIFRIYDKQKMRKGQILRQVKAFLEQKNHPLKWEKWNKGLIEKLKELKFEDKLFDLKFGNLLKEYEYVVSQIKDSEEIIERIKEDEVLGPRITRIEKINGIGIISSVRMSVYLFDRKDRFESSEKLNHHLGLTPSERSSGDKVSSRSLKSEFKN

SEQ ID NO: 373574 - protein, 421 aa, unidentified
MRKADTRKVKVVKDNTLIVAIDVGMEMNHGYCTTPDGRDIKPFKFDNTREGMDKLWGMVMTSNNRFQCKEIIVGYESTGPYGEPLVHYLMKKQVMLVQVNPMHTKRVKEISDNSPLKTDDKDPRVIADIIKLGRTLSIVVPEGDAAYLRRLNNSRERHVKERTALVNQLQQLVFLLFPEFKKVLKNIKCRTPLYLLNKYPTPEAISVLGKDALGEEIRKKSRGKFREQHADMLINLAKNTVGIREGVAGISMDIRHILVQLEMLKSLITEIENEMEIALGRIPYSSKLLSIKGLGIVSVAGIIGEIGDFNKFQTQGEIMKLAGLDLYEISSGKMKGRRRISKRGRSLLRKILYYAAIQTIRKNGILHDYYTRLTDRGMKRIMAIVAVSRKLLGIIYAIVRDDSEYIINFGSIKRQVIKKAA

SEQ ID NO: 373575 - protein, 424 aa, unidentified
MTVVMIGVDPHKASHTAVAINAAEQPLGQLRVRASAVQAERLLGWAQGWPERAWAVEGAGGLGHLLAQQLLSAGERVLDVPPQLAARVRLLATGDVNKNDPNDARSVAVAALRSAQVREVRRDDHATVLKVWAKRYQDLGQARTQVACRLHQVLCELVPGGVSGEITAGQAGQVLASSTPAGAVDAARWELAAELTEDLRGIDTRIRETRKKAAAAVRAAGTSLTGLFGVGPVIAATVIGDVRHVSRFPNRDHFAAYNGTAPIEVSSGSRKVYRLSRRGNRRLNHAIHMAAVTQIRYRHTKGRAYYDKKLAEGKTPKEALRALKRQISDAIFSCLQEDARRAAAKSPGGQPGNRSVSRAAGSHPDHRLFGQATPGPAAHPTTPAAPFPAPLPSRASGQPGPGPGAARPRSGTRRASSTRPPTSR

SEQ ID NO: 373576 - protein, 413 aa, unidentified
MATTSPPLRFVALDIHRKYLVVGAVDSHQQVVLTPRRFGFEAFSAWATTHLSPSDAVVLEATSNAWLLYDQLEPLVGSVTVAHPLAVKLIAAARVKTDSRDTIKLAHLLAANLVPAVWVPPVHVRELRALVSHRKRLVNQRTQVRNRLHAVLHRHNLTVPPGKPFAAHQQEWWLALDLSSSEKLRVQQDLSLLHSLEELIGAVEAELGRLSTCDPWVKQVPFLVQLPGLGVLSVMSILAAIGDITRFPSAKKLVGYAGLGASVHDSGETHQGGHITKEGRRDLRGVMVEAAWVAVEHHPHWQAQFERLTKRIGKQKAIVAIARKLLVAVWHVLTEQEADTNAQAQAVARKLMNWITHHGVIPGQHRDRLLLLYQHLDELGLSEELAEIDYYGTTYRLSVRQKLLREAQKSTRS

SEQ ID NO: 373577 - protein, 337 aa, unidentified
MNNNAVGLDISKNVFHLYSQTDDGKVVKKKLKRGELLAYIANMPVSLIGMEACGGAHYWAREFSKLGHEVVLLNARFVKGFVVGNKNDFNDAEAIFTAVTRPNKRVVAVKNETQQDIQMLHRLRQQRIDQRTALVNQVRGLLSERGITLPQGINQVRKQLPWILEDAENGLTSLSRELFAEQYEQLKALDGDIKAQDSRINRRCQQNALSRRFLEVPGIGPIFATIMASDIGDGKGYTKSRDYAASLGVVPRQHSSGDKQVLLGISKRGNAYLRTLLIHGARSVIKCCHDKSDPLSRWLQALVERRGFNKAAVALANKNARILWAMARQDQPYQAAA

SEQ ID NO: 373578 - protein, 314 aa, unidentified
MEQRQSSMKVAGIDVGKHRLDVAVHGSEDATAAANSGAGVSELIGWLKAREVGRVGLEATGGYERGVREALDAAGFEVVVHQPIEVRRFAQLKRRRAKNDRLDAELIAAATAQVEAVKAAQDPRLVELAQRLTAYEQVTDQAAELKTFLESVTLKDVAILIRAQIRSLERAKAKLAADIVDRIKAAADLLARFRLLLSLPGIGPIVAATLVIRMPELGAMKRGQAASLLGVAPFDRDSGQWKGLRFIAGGRRRPRRMLYLAALAAKRCSPNLKAFADQLLARGKPTKLVIVAVMRKLITILNAILRDNNIWAHA

SEQ ID NO: 373579 - protein, 414 aa, unidentified
MSNPLLVGVDVHRKTNAVCVMDGQGQELIPRFTMDNNRPGTEAFAQQMAQLMLDGDFDVLQVAAEATGWYWFHFFQTLSQDPFLNQWPLELYPLNPRLTANFKKTFVDLDHTDHIDSFVVGDRLRLGRDLPAPFHYEEIYLPLRFLTRYRYHVVHNLAREKAYCLAILYLKVSEYTHKDRKPFSNVFGAASRAVLQEFASIEEIAAIPFHELVEFIDLKGKRRFPNPAENARKLQQVARNSYTLPEALQHPINLVLDLSLKHITFLERQEKRLNTAIAQHMEAIPHTLDTIPGFGPVFSGGIISEIAGIERFDYNQAKVAKFAGLKWRKHQSADFEADETRLTRTGNRYLRYYFCEAAQSVRLRDTEYAAYYDRKYHEVRKHQHKRAIVLTARKLVRLVTRLLTTNQPYRPRRR

SEQ ID NO: 373580 - protein, 378 aa, unidentified
MATTRTAPRSQHTLKPVALYMSLELGDKRWHISIGDDRRSVSRYTVEAGHTEEVADCIAKAAARLHTTARARVQSCYEAGRDGWWLHRWLTSVGVDNIVVDPASIEVNRRARRAKTDRLDADKLLAMLVRHHSGERVWSVLREPSPSDEDARRVHRELQRLTHERIAHTNRISSLLVLHNLRPRIVIGGRDWPAWWNSHREQVPPSLRAELEREAVRLKVVKEQVRVIEAERAKELAEGKQPLVAQLARLRAIGAKGAWVLVKEVFGWRHFANRRELAGSLGLVPTPYASGGSEIEQGISKAGNRRVRALLVELAWSWLRLQPDSALTQWFNRRFAGAGKRMRRVGIVALARRLAIALWRYLQDGQIPAGARFKPAVA

SEQ ID NO: 373581 - protein, 350 aa, unidentified
MTQQLSTVAIDLAKKVFHLVGADTTGKILWRKRLTRHALMPFIAQLPLVLIGIEACGGAHDWARRFREHGHEVKLMAPQFVKPFVKSNKNDMRDAEAIAEAVTRPTMRFVPTKDIDQQDLQALHRVRERLIGERTALINEVHGLMNEYGIVIPTGVSKFHQAVVETLASAKDTLTALSQEMFGKLVEEFVALEEQIAYDQQQLESLAKTHPECQRLMTIPGIGPMTATALIAAVGHVGVFKNGRQFAAWLGLVPKQHSTGGQTRLLGISKRGDSYLRKLLIHGARATLRWVELRTDSRSQWIRGLLKRRGWNRTAVAVANKTARIVWALLSRGGVYGETASRPHGVTDKG

SEQ ID NO: 373582 - protein, 427 aa, unidentified
MAAREKVGEPEFVAFVGIDWADQKHVWCLQAANSAKREGGELEHQPEAVEAWVSELCRRFGHGPIAVAVERVKGALVYMLGKYECLHLYPVPSTMSASIRQALYPSGAKDDPRDADLLLDLLVQNRDKLRRLMPDNEVTRRVQNLVEERRKLVEEKTAQLNRLTGYLKVYFPQMLEWFAKLDTKLACELLERWPSLEELQAAAPAEVRKFFRQHRGRHPELTEWRLQGIGQAMSAIRDRAVIEAKRMVVQVIARVLRTLLEGIAALDGKITEAAEAHPDFFIFQSFPGAGAALAPRLLAALGSQRDRYASAEEVQKYSGIAPVTERSGKKKWVHFRWACPKFLRQSFHEWAGHSIAQSVWARAYYQQQRQRGKDHHAAVRALAFKWIRIVFRCWQDGAVYDENRYLATLAKRGSPLIPVSAAAATGL

SEQ ID NO: 373583 - protein, 412 aa, unidentified
MEVVHSHCAGLDVHKKTVTSALQVPEPSKGWYQETRTFDTMTADLLQLSDWLMQHGVTHVAMESTGEYWKPVFNILEHNFEVILVNAQHIKAVPGRKTDVNDAEWIADLLKHGLLRASFIPPEGQRELRALTRERSNFVRGRSTLVNRIQKVLEGANIKLSSVASNVVGVTGRAILEALIQEGVSPTEMAELAKGKLRKKREQLVKALTGYVKPHHRFMLTELLCQIDALDETIAHFDAEIQRYCAPFEEAVELLDTIPGVARQTAQVIVSEIGIDMNRFPTANHLAAWAGVAPGNNESAGKRRSGRTRKGNTPLTTALIQAAHGVQHTRGTYLAAQYHRLAGRRGAKRAAVAVAHSILVIAYYLIKRKEPYREMGADYFDKRRPEASAKRLIKRLENLGYRIAVEKTPVAA

SEQ ID NO: 373584 - protein, 471 aa, unidentified
MPKPATKVIPLLARESVYVGVDVGKLRHVAGFVSSTLLKRHGRFEGCPVLTFEQSREGFRALIDRIREYTPLEQCFVLLEKTGHYHQALVQYLQEHDISVYLIHVQERPKGMIKTDKRDALGLANHLYNQLELGVQVADKLQLIRRAIPPTEAASLLRGLIRHRYELAHEATRRKNKLIAICDELFPEFAHLFKDPNAPGALAIRQHYPTPHAIATASFQALRALRLGSHPSDAKLNKLQEIAQQSIGTKDLGRQRGLALEQGQLIAELHLLQHHLDELEEEITRIVGQSREGKILTSIPGIGSIQAATLIAAIGHINNFPTAAALKSYCGWAPTLTQSGKTLDHAKLSPKGTRTVKQMMFLIVSNAIQMDCEWAKIYERLVPIKCIYDERTRTYKGKLKVMGRIAGQILSMIYALLKRDAEILHASAGRPVPEPQLYDPVVHQTHRQGGYRAMKPKSPRSPLIQLPTKTS

SEQ ID NO: 373585 - protein, 356 aa, unidentified
MIKINELNFEGQTIFCGIDVHKKSWRVNVRTEEFELEDYSQDPSEELLINRLKKRYPNATYQIAYEAGFCGFSLQRSFEKSGLNCIVINPADVPSSDKEKKRKTDKIDARKISRHLAKKELQAIYIPSIEMEHIRTLVRHRSRLVKDQTRCKNRIWHLLMFSGLKLKEEKVEQYWSHRFITSLQQLPCGTLPLRQALDTAIEEYILIRNLLSNITKQIRALNSSSQVSFTAKLIQSIPGIGLINAMTIMSELQDIKRFRTLDKLCSFAGIVPDTGSSGDNEIVKGITRRSNQYLRPAIVESSWVIIRKDPAMLMLYKKYCSRMIPNRAIIKIAKHLLSRIRYVWMTQEKYEIGFVR

SEQ ID NO: 373586 - protein, 412 aa, unidentified
MRVFCGIDWAEDHHDVALVDAEGNLVAKRRIGDDAAGFTTLLQLLAAAGDNDQQPIPVAIETSRGLLVACLRATGREVFAINPLAVSRYRDRHSVARKKSDAGDALVLAHILRTDQSAHRPLPADSELAQAIAVLARAQQDAVWDRTCAHNKLRSLLREYYPGIIAAFADKRHGLLRPDARAVLAAAPTPRAAAKLTKTQLRALLRRAGRQRGIDAEADRLQAILRAEYLHQPPLVEDALGRQALALLRQLDTACANADELAAAVIEHFEAHPAAPIIASQPGLGALTGARVLAEIGDDRSRFADARALKAYAGAAPVTRASGKTIAVMHRRIKNHRLADAGYRWAFTALTASPGARAHYDRRRHAGDHHAAAQRNLFNRLLGCLHHCLTTGQTYQETIAFPQPQTQQSAAA

SEQ ID NO: 373587 - protein, 384 aa, unidentified
MTKHNILFIGLDTHKTFTEVAYIKDQRGAKSIHLGKMLSNKAAFKKLARQLQSKYPDATLHFVYEAGPCGYWIYRLLTSLNHCCYVIAPSLIPKKPGERIKTDKRDSLKLAKLLKSEDLTPIYVPEPEDEAVRDLSRSRETAMKDLKDAKYQLKALLLRNNINSKVKDNWSLQHLRWLAELVLPHPCQQIVLQEAVSTITERLRRLKRLDNELTHQVKSWRYYPVVKAVQAMRGVRLLVATGVIAELGDLTRFDHPRKLMSYLGLVPSEHSSGSKRHLGAITKCGNSRARRLLVEGAHSYKHNANISKEMQLRQEGLSKEIIDMAWQAQLRLCRRYNRLMHKGKHRNVVVTAIAREMIAYIWAISREVVLPVIDVKLRLARMPA

SEQ ID NO: 373588 - protein, 370 aa, unidentified
MLNTTTFVGLDVHARSIKAVALDAMTGEVRSATFGYDAAEVAGWVSSVDPSAKCVYESGVTGFDLQKRLSSMGIDCVVGAVSKMIKPSADRRRKNDRNDAEFLARMLSVGNVVEVWVPDDECEAARDLTRALDDAREDLKRCKQRLSKFLLRHGLVFSETNAKGQRKKNWTAAHWAWIRSISFPDKADDEVLAYYIDAARQAMEDKARLERLVEAEASKPRWKKRVDSVRCLKGIDVTSAADLVFEAGEFSRFKSARSFAAWIGLTPSEHSSGESVRQGGITKAGNKHLRRVLVESAWHYLGCSPHSKDLAKGQAPDPGARRHAAKGVRRLVGRRAAMLERGVHKNKANVATARELACWCWAIGRMVENG

SEQ ID NO: 373589 - protein, 343 aa, unidentified
MHVSTIGVDLAKNVFQVHGVDSAGKVVITRQLRRKQVVEFFSKLPGCLVGMEACGTGHHWAREISKLGHTVRLMPPSYVKGYVKRSKNDAADAAAICEAVTRPSMRFVPIKSTDQQALLMLHRTRDLLIRQRTQLINALRAHLAEFGLVAETGREGLAQLGAIITDESNHEALPSAMKQALQAIVDQLAALELQVGALDRAIHAHHRANDMSCRLETVPGIGVIGATAIASTVADPSGFKSGRDFAAWIGLVPRQHSTGGKERLGGISKQGDRYLRRLLVIGATAVVRQARLHPQKHVWIMRLLAKKPAKLVAVAVANKMARIAWAIMARGGHYRAPELAAAT

SEQ ID NO: 373590 - protein, 327 aa, unidentified
MNSYLGIDVSKAWLDVVLLREGHEAEAGRFDNSDPGFRRLHHFLKKRKVKTLHACLEATGYYGDPLAQFLHQAGYSVSVVNPARIKGYADSRLSRTKTDSRDAALIADFCRTQQPEAWTPPAPEQQELQALMRHLENLRDMRQQEVNRRQAGIPSQTVLQTLDEHIAFLDQQIADLLRQIHDHIERHPYLRQQRDLLTSIPGIADLTAAKLLAEIRDIHVFDNARQLAAFAGLTPRQHVSGSSVRGRTRLSKRGSARLRNALYFPAIVAQQHNPILRPFALRLLAAGKSKLAVIAALMRKLLHLVYGILTSGQPFDPLYLEKRIALP

SEQ ID NO: 373591 - protein, 405 aa, unidentified
MKQPATLHYAGIDWATRTHAVCVVDQTGAVRARFQVPNTGKSFAGLCKRLAKLGVAGVAIERPDGPLVEAMLDAGLKVVVITPRQVKALRSRYAASGAKSDPADAYLLADVLRTDGHRLAPLTPDSEPTKVLRALSRTRKDLQEARVALCNQLTAQLERCFPGAIGLFADLHSPVAVAFLRRYPTSHAAAGLTQAKLAALLRRIHYPGRTPVATLLGRIQTAPLSGIGPAEAAGRAVCVLALLDAIQVTARQERELEAEIIERLEVHADAKVFTSLPKAGHGVRAAALLGELGDVRARFPDNDCLAALGGAAPVTITSGKRRVVKFRWACDKKLRNAIIDFADDSRHASPWAAKVYADALARTGRHPHAVRILARAWIRVIWRIWQDGVAYDPAKHRGAVRLLAA

SEQ ID NO: 373592 - protein, 440 aa, unidentified
MSKRAYRATRVNDVNWDQLAQGKDGLDIALGVDVGKYSLWAVCRWADGRFERPWRVQNPGEIPTLLTLLKRVSAGRKLVVAMESSGTYGDALRQALADNQIEVQRVGGKAAHDYAEVFDGVPSQHDGKDAAVVAELAALGKAMPWEYQPADPWEQELAYWVEWMVAHRQMLTIWQGRLEGLLARHWPEATQVLKLSSGTLLRVLKRYGTPQALAADGEAAKLLARWGGAFLAPEKIEQLLAGAGASVGVRLGEWQQRQIQNYAQQALAARQEADRAQRRLRSLAAGHAVLQAQGKVVGVPTACVLWASTGDPRKYHAAGAYRKAMGLNLVERSSGTYQGRLRISKRGSPRTRQWLYFAVLRLVQKCGVRPWYEAKKAHDEADARRVVVAVMRKLAVALYYVGVHNEEFQPGRLFGRIRRRRDSPGEQKSRTKRRSRAEQI

SEQ ID NO: 373593 - protein, 457 aa, unidentified
MSKRKSKAKRKSFQVPKLPAQLQHMNLNAAGIDIGSERHLVAVPEGRDPVSVREFGTFTTDLEALVAWLKQCGVTTVAMESTGVYWIPLFELLERRGFEVKLVDARHVKNVSGRKSDVLDCQWLQQLHTYGLLAGAFRPPDEVCVLRSYLRQREMLTQSASMHIQHMQKALQQMNLLLHNVVSDITGVTGMKIIKAILAGERNPRVLARNRDERCQNTAATIAKSLVGNYRAEHLFALRQAVDLYETYQAKIADCNQALIKQVEQQPDISDEGPPTPEKPVQARDRLRDGIDVRDLLFKKSGVDLFAIPGLAADTLLTLASEVGFDLTPWKTEKHFASWLNLCPGTRISGGKLLKNKTKRHPNRATQAFRMAAASLHHSQTALGAFYRRIKSRAGGQYAVTATAHKIARIYYAMLTRGTNYVELGQQAYEQRYKKRRLDHLKVQAKSLGFQLVPCAT

SEQ ID NO: 373594 - protein, 343 aa, unidentified
MDVHKRESQVCILDEGGAVVVERRIRTERSRFAAVLGERPPARILLEASTESEWVAQSLEMLGHEVIVADPNFAAMYATRSRRVKTDRRDARTLAEACRVGAYRPAHRMSAARREVRAALAARDALVRTRVRYISLVRALLRREGIAVASGSSGAFLRRLEAITLPAALQAALAPLVAVLAPLNAAITAADTWITQAMASDAVAVRLCTVPGVGPVTAAAFVATLDEVARFRGAPQVAAYLGLVPQERSSGDRQHRGGLTKAGNARARWVLVQAAWAIWRDRTPRTATLRAWAERIAVRRGKRVAAVALARRLAGILYALWRDGSTYEPQRVGQRPAVPRAAA

SEQ ID NO: 373595 - protein, 309 aa, unidentified
MFVGIDVSKASLDVAFRPEGASFQVGNDEAGIAECVRRLQEVKAQLVVVEATGGFETALVAAAAIAQLPIVVVNPRQVRHFAKAIGRLAKTDRIDAAVIAHFGEAVRPELRPLESEASERLTALLSRRRQVLEMIVAEKNRLGAMREKQMRQRITYHLHFLKQELAELDEDLDAEVRSSPAWREKDDLLRSVPGVGRVLARTLLAELPELGRLDRKRIAALVGVAPMNNDSGSLHGQRRIQGGRAHVRTALYMAALVASRFNPRLKRFYDSLRASGKTGKVALVACMRKLLVILNALVRSGQRWNAEVA

SEQ ID NO: 373596 - protein, 421 aa, unidentified
MNNIEKEECMDVFCGIDWAEDHHDIALVDHDGKLLARQRISDDAAGLARLLELLAEHGDSPEDPVPVAIETPRGLLVACLRVTGRPVYPVNPMSVARYRDRHSVAGRKSDKGDSAVLASVLRTDRHAHRPLPADSELAQAIAVLARAQQDAVWDRTQAHNRLRSHLREYYPGFLAAFAAAKGGIMRPEARVLLAAAPTPAAAASLTLTQLRALLRKAGRSRGIDAEATRLHDALRTEQMRQLPLVEEAMGRQAQALLRQLDAACASAADLEAAATESFNQHPDAGIITSFPGIGALTGARVLAEIGDDRSRFTDAKGLKAYAGAAPITRASGKSKSVTHRKVKNNRLAAVGYIWAFAALTPSPGARAHYDRRRDAGDRHTAALRNLYSRFLGCLHHCLATRQHYDESTAFPSRNNKLPAAA

SEQ ID NO: 373597 - protein, 350 aa, unidentified
MIIIGVDFHPEHQEIASVNTDTGEYQEKRLTHPREAEEFYRSLASTGQAVRVGMEASGQGQWFERLLEGLGVELWRGDAEVIRAKRGRKQKTDREDARHILKLLLKDDFPRIWVPSWENRDLRQLLWHRHRMVQARTRVMNQLQAVALNEGLRCKKRLFRAGGRQQLECLQLAPWASRRRGELLELLDRLNPRIAELSQAIEREAGKSPEAQRLMTHPGVGALTALAFVLIIGNTERFGCGKQVASYLGLVPLEKSSGNRRRLGHITKQGSSIVRFLVVEAAQATVRSLPEWRSKYHHLLVRRGRKIAKVAMARKLAVRLYWMWRKGWDYEQWKKFGSHVGQPGNRYGVQ

SEQ ID NO: 373598 - protein, 332 aa, unidentified
MKITTIGIDLAKVVFQIHGVDERGKVALRKQLKRAEMSGYFANLEPCLIGMEACGSAHHWARKLEGYGHTVKLMAPQFVKPYVKTNKNDMADAEAICEAVSRPNMRFVALKNVEQQAILSVHRARQGFVKARTAQGNQIRGLLSEFGIIIAQGIGAIAKRVPEILEDGENGLPGTMRNLIERLTENLKEMDRQAKELEAQIQLWHRDNAASRKLAEIPGLGPITASAIVATVGDAREFKNGRQLSAWMGLVPKQNSSGGKQNLLGISKRGDTYLRTLMIHGARSVVRVAEKKAEPGSWMRKLMDRRNKNVAAVALANKNARIVWALLAHDRM

SEQ ID NO: 373599 - protein, 343 aa, unidentified
MKDTTIAVDIAKDIFEIAVSHEPGVVNEKHRVSRKKFLSFFANRPAATVVMEACGSSHHWGREINKLGHQVVLLPPHVVRPYVQRNKSDQTDAKGMLEAYRNKDIKPVPVKSIEQQSVTALHRVRSSWVASRTASLNMSRGLLRELGIFIPVGARKVVPTVLELVEDADSRLPDAIRNTLHEVSMEIRNYEKRILGVEKQLEALSKQIPTVGLLRTIPGVGLLTSTALVAFIGDIQRFRSSRQFASFLGLTPRLRGSGFAVHLGSISKQGDRYLRSLLTHGARSVLIRAGAMEKPDRLRAWALKVYSRRGHNKATVAIANKLARTVWAVWKHNTEFQSYPKAS

SEQ ID NO: 373600 - protein, 410 aa, unidentified
MIFVGVDWAEAHHDVCVLDQGGDVLARKKIPDSLIGVNQLHAMVAEHLGEENVAGSVIVGIETERGLLVSALVAAGYKVFAVNPLAASRYRERHHVSGAKSDPGDAKVLADLVRTDRHNHRALALDSVLSDAIKLLARNHQNTIWECQRQVNTLRSALKDYYPGALEAFGNDLSGPDAVAILAIAPTPTKGRALSKARIETALRKAGRRRLLEERVTRIHEVLRREQLAQPALLEDAYGVATEATIANIAQLNASIQKLEASLSTHFEQHPSAKVILSLPGMGTVLGARVLGEFGDDPNRYSDAKSRKNYAGTSPVTRASGKSRVVLARHSRNKRLASALDQWAFSSLLQSPGGRAYYDELKSRDKHHRKAIRQLANRWVGILHGCLESDTPYDEAIAWSRHRQDVAACN

SEQ ID NO: 373601 - protein, 320 aa, unidentified
MHKAEPAYPMKTPIVHVGLDAAKATLDLHVSGQAYAFPHDPAGCAALIELLRSRPFPVQVVCEATGGWERPVVAALHGAGIALSIVNPRQVRDFIRGAGRRAKTDRLDAQMLAQFGATHQPAATPAPSPAQVELAAWVTRRDQLQARLVAERARQIPGLPTSLDQELQASIAALQQRHQAAVKYLAQLLAATPPIAAQAQRLRLIKGVGPGTAATLLAHLPELGQLSSPSLAALAGLAPFNHDSGPRKGQRPIAGGRVSVRCALFMAALSAARCNPILKPFYQRLRQAGKHHKVALIATARKLLTTLNYLLQNPQFTPCT

SEQ ID NO: 373602 - protein, 364 aa, unidentified
MRECSLKPAGDEKEMMRYVGIDVGKAKCRAALMNPNGTIESEFFFENNSKGIANLVSTLNIEDKVVMESTGNLWLNIYDTLDSKKIKVVLANPMKTKAIASAKVKTDKVDARILAHLLRADLVAESYVPAGDVREMRALVRHRLSLVKMRTMVKNKVHAVTDKYSYHCEYSDMFGKAGLEWLKSQKVSELDRLLLENHLSLVESINSQIVKVDEAIRKRASQDEDVRLLLSLTGVDVYTALLLRSEVGPIGRFADYKKLVSWAGLAPSVHQSGNVEYHGAITKQGSSMLRWAIVEAARVAVVHDEKLGGFYLRVKARRGDQKAVVAVANKMLKIVWVMLTRRETYSGANVVRYGKKLKAMDSKR

SEQ ID NO: 373603 - protein, 340 aa, unidentified
MSLVLQSFLPYPDSCLGTSPHQQGWDTKMAELSFGGIDVSKDRLDVLVLPEGVCFSVCNDTPGWAELIARLRPLAVSAIGLEPSGGYERGIIRALLAAGLSVRRINPNKLRQFARARGVLAKNDRLDARLIAEYVAIMPTRVVRRDDAVEHLAEIVTMRRQLCDEHAAAMNQAAHLEDAMLRRLSKRRLVRLEADILLLDKRLAELVAADPRLAHRYRLLISMPGVGPTLAYTLLATLPELGQIDRKQIAALVGLAPYDFDSGKLKGHRCIYGGRMPVRNVLYMAALSARRYNPALKEFSNRLAAASKKSKVIIVAVMRKMIITLNAMLRDNTEWRPSSV

SEQ ID NO: 373604 - protein, 346 aa, unidentified
MDHYAGIDVSLECSSVCVVDAKGKIVREAKVASEPEALIDWFHSLGFDLARIGLEAGPLSQWLYAAMKKAGLAVELLETRHVSDAFKAMPVKSDRNDARNIAQLMRLGWFRPVHCKSMSAQETRAMLTARKLIQTKLQDIENSLRGILRGFGLKVGKTTKRSFATRISELVAGHPALETIATTMLAVHMVLLREFNSFEKRVRAISLLDAKARLLMSTPAVGPIISLTYACAIDDPARFASSKRAGPLFGLTPKKHQSGETDYSGRISKNGDASVREALYEAAHIILTKPIKGCAQLKSWAMRIAKRAGMNKAKVALARKLAVIMLRMLKDNVPFNSTAKATAAAV

SEQ ID NO: 373605 - protein, 336 aa, unidentified
MDSLVEFWIGIDVSKRKLDVALLDARGKLKQRVFANDAAGCGELHQWLMGRGVTPLAGRICMEATGPYSETSATALVDAGWVVAVVNPARVKGFAQGELLRNKTDSADAALLARFCARMKPEPWQAPPPAVRELRALVDRLQVLRDMQQQERNRLEAHAADQVVSPSIREHISWLQACADKLQTQIDDHIDAHPLLAKDAELLNSIPGIGQVTTPKVLAFLGDVRRFANAKALAAFIGVTPRLKESGSSVRGRSMISRAGHAQMRKALYMPALVAARHNPAVRAFSERLRASGLAPKAVVGACMHKLAVLIYGVLRSGVPFDPRIAMPRLDLEDGI

SEQ ID NO: 373606 - protein, 304 aa, unidentified
MSASAGWTWPCTAWRTRCGSRTAPAGYSELIAWLKAREVGRVGLEATGGYERGVRTALEQAGFEMVVHQPLEIRRFAQLKRWRAKNDRLDARLIAAATAQVEAAKAAQDPRLVELAERLTAYEQITDQIVELKTFLESVTLKDIASLMRAQVRSLERTKARLSLDLLRRIKAEADLLARFRLLTSLPGVGPIVAASLVIRMPELGDMKRGQAASLIGVAPFDRDSGQWKGLRFICGGRARPRRMLYLAAVTAKRYDPTLKAFADRLLAAGKAKKLIVVAVMRKLIEAANLVLCRGQPWLKQPAS

SEQ ID NO: 373607 - protein, 439 aa, unidentified
MTNPIPEMVLAIDFSLDRLDVSLRGDDREWCWAHQAYVNNWPGWQQLKQDLLLELNQTQPVRLTVAGESTGPYWWHAFYQFSHDDDLRPFDPELALFNPARVKGYRKALPEQDKADPDDARLIDQYYRAVGNKQPHHFHDRYLRLRTFTRAYRRVTQTLAAEKAYLLSLIYLSASEYQRKDEKPFSNLFGTTSQYILDEFADIQAVADIPLDDLATLLIACSGNSFTDPQLNARKLHDVAHNSYPVPTGLAEALHQVIQHTLAHVRFLSDNQKAYRQLIQQELDTLPEAQRALNFKGLGPILVAGCLSEIQDTSRFVSGTTFDRRLKRNRPRSYRDGQAAVAKLAGLWWPRHDSGKVQGLQPSLARERNPYLRYWLVQAAHTLQRYQPDYGRFYWKKYHEAHQHHHKRAIVLTARKAVRLIFALLHKGRLACLEEGILS

SEQ ID NO: 373608 - protein, 421 aa, unidentified
MKGLRKKRGDVVREGTLIATVDIGLTNNVGYCATLDGRSTKTFKFDNTREGFEKFWGMAIASKNRFGCDEVLVGYESTGPYAEPLVHYLANKPVKIVQVNPMHTKKMKEVQDNSPLKTDDKDPRVIADIIRLGRVLTIIVPEGDAAYLRRLNNARERHVGERTALLNQLQQLVFLIFPEFKTVLKDMKGKTAQYLLKRYTTPERIGSLSKKVLGEEMWKRSRGKFGIQDAESLIVLAQGTVGIQEGLAGLVIDIRHILMQLEAEERFMAEIEAEMEATLDRIPYSARLLSIKGLGIVSVAGLIGEVGDFSKFSTQSEIMKLAGLDLYEISSGKRKGQRRISKRGRSLLRKILFYAAIQTIRKNGILYAYYTRLTDRGMGRMRALIAVSRKLLGIIYALVRDDTDYVGQCQAPERRGLKKAA

SEQ ID NO: 373609 - protein, 276 aa, unidentified
MSPSILGIDLAKDSYQVTLLQAQHTARQSFQNQPAAFADLTRWLQAHGVTELHACMEATGRYGEPLASYLHTQGYLVSVVNPAQIKHYAKSQLRRNKTDKVDADVIAQFAQTQQPPAWQPTVPEIRELDELLHQYDALQAARQQENNRLRAGVQSESVRHLLTNHLAFLEAQLAEVLRLIEEHIDRHPDLKANQGLLTSIPAIGALTAAKLQTLELQRFDNARAASAFVGLNPQQHTSGSSVHRRARLSKMGDAAMRRALYMPAVCAKRFNPLIRD

SEQ ID NO: 373610 - protein, 318 aa, unidentified
MNTNTLQNINVGVDTGKSQLDIYIRPLDIYFTVPNTEKGISHAIKTIKKHKPQRVIIEATGRLEMPFILACDKAKLPYVIANPLRIKRFAGAIGQRAKNDRLDAALIAHYAERVQPELTKIKSENIRLMSDLVTRRNQLLTMQTMEKNRLQILPKNISSTITPILTALKNQIEKVEAKIAKLIDSCPEYQAKNTLLQSMPGVGKVLAASLISNVPELGYITNKQASSLIGVAPITRESGCFKGKRMIQGGRAQVRTVMYMAMMSAIQCNPVFKAAYERLLAAGKPKKVAIVACMRKMVVILNSMLRDGVMWDKDSVKN

SEQ ID NO: 373611 - protein, 402 aa, unidentified
MIFINCLGIDVSKSESVVAHYKDEVLVKELVIQNNQNGYRHLENYIKHLDSLFILFESTGIYSRGMKRFCTVHKIDYLEMNPLEAKFKMSSLRSWKTDKSDAHKLALLAFRMKDSKVQRQSEEIYFELRERARFHLEMETNQNRLKVELVETLHQTFPGLEKLFTNRYSKIALNIAKTFPHPDYVSMLSDDELVEKVLHSTDKGISVNKAHKYVQKLIEIKNNTFPNVDKSSFLIKKVQYLCDKLLIAIEEKKVFDQEMIDLAKNTTEFENIISIPGIGELTAALLIGELGDIRNFKTNKQLNAFVGIDIKRYQSGTSKSRDTINKRGNKKARRLLYLIIMNIIRGRNHYQSHIVDYYYKLREQPHGKPHKTAVIASINRLLKTIHYLIVNDKLYDYQKAPH

SEQ ID NO: 373612 - protein, 346 aa, unidentified
MEHIGIDVHKNESQICRLTDCGEIIERRIATRRDRLAAVLGALPRARILIEASTESEWVARCLEEVGHEVIVADPNFAPMYASRTRRVKTDRRDAQALMDACRLGAYRPSHRVSETQRRVRTLLAVRDNLVRTRVRQVQLLRALLRREGLRPRTGQVASFAKRLDELDPPQWLRGMIEPVRTVMDSLNQEMVRLDRAIVDIVHDDPIVQRLCTAPGIGPVTAVAFVSTLDDVQRFEGAHKVRAYIGLVPSEFSSGERQKRGAITKTGNTRLRWLLIEAAWSVMRSRHPRTEELRLWTQAIAQRRGQRIAIVALGRKLAGVLFAMWRDGTAFGEKSVTTSRAPAQVA

SEQ ID NO: 373613 - protein, 324 aa, unidentified
MTDAVLGIDVSKNTFDTNLGAGTKARSKSFANSPAGWHHLIAWLGEHKIGQVHACLEATGRHGLGIALALHQAGHVVSIVNPAQIRDFARTKLGRNKTDQVDAVHIREYAELFKPRPWTPPSPAMRRLCELQTIRAGTVAGLTEWKNRRHSGIMDDLAQSLAKTTIQHFTSQLEAVDQAIAETIDNDVELSAKRDLLVSVNGVGEALAGIVLAELPGPDILGSSAAVTAYAGLNPQQHQSGISVNRPVRISKIGNAVLRTALYMPALSAMRYNPAVAALVDRLKAQGRLKGKQIVIAAMRKLLVLCFGVLKTGKEFDPAMAMGK

SEQ ID NO: 373614 - protein, 450 aa, unidentified
MATRNRSLSRKALELTHPNAAGIDIGSASHYVAVPADRDDEPVREFASFTADLHRLADWLQACGVDTVAMESTGVYWIPLFELLDARGFNVLLVNARHVKNVSGRKSDVLDCQWLQQLMSYGLLRGAFRPDDQVCVLRALARQRATLLKTQARSVQHMQKALVQMNIQLANVIADVAGASGQAILRAIVAGERNPYVLAGLKNSRVRASDEEIARSLQGTWRAEHLFALRQALDAFDFCGQQLQQCDEEIEAQLQRLHITEVEPDKGKKRSKARNAPKFDLRTRLFQMCGVDLTRIDGIDVTTALVVVSEIGTDMSRFPTDKHFASWLGLCPGTKITGGKVMSGKTKRCANRAAQAPRLAAAALRTSQSALGAYFRRMCARMDKPKAVTAAAHKLARLIYSMLTQGEEYTDQGQAYYEERYRQRVLHNLNKRAQQLGMTLVPTAPAAQEG

SEQ ID NO: 373615 - protein, 411 aa, unidentified
MRVHHNVCCGIDVHKKSVTACLMWGPADKEPEFEIRRFGTMTRDLQKLAEWLKQAGCEAATMESTGSYWKPVWNVLEGQIPRLILANAQHVRALPGEKTDRKDGKRLAELTRHGQVRPSYVPPRAILELRDLTRYRSKLLSAGSSERNRIQKVLEDANIKLGSVLSDVFGLSGQKMLQQLVKKDTVDIANVMQLAHWKLKPKMEAIEQSLEGKLTDHHRFMVKASLEHMRFIEQQLKRLDEEIQRRLQPYQEEYALLQTIPGIKETGAARILAEIGADMSPFPDGDHLSSWGGVCPGNNESAGKKFQSKIRKGNVHLLSALTQCAWAATKKKDCHFRNKYYRLKSRRGSQRAIVAVDHAMLKCIYVVLSQRKPYEEPKPVSLTEAQKQRKASSLCRQLRALGYDVKIQKTA

SEQ ID NO: 373616 - protein, 322 aa, unidentified
MSPDVQGRESAMDVYVGIDVAKRFFDLYDLANDHSEHFDYNASGIDGCLRYLTEHTPALVVMESTGGYETDLAVALSDAGLPVAVVNPKRIRDFARATGRLAKTDQIDARMIAGYAATLQPPPRGVWDEQTRTIKALVARRNQLIEMKIAESNRREHVNDPVVARSITAVVRTLVHEITKVEKQLRDQITRTPQFKQKANQLTSVPGIGETTALMLIAEMPELGSLNRRQIAALVGVAPINRDSGTFRGKRMTGGGRRDVRTRLFMPTIVATRYNPAIRQFYQRLLASGKTKMTALVAAMRKLVTMLNAMLAKNQNWEPNHA

SEQ ID NO: 373617 - protein, 346 aa, unidentified
MHYVGMDTHITTLDFAVVDEGGRLVKAHSVATSVNGFIGFVKTVPAPRIIYMEEGTLAAWALETCVHFGEKLVIADPKKNRWIGSSGQKDDPLDALKLAQLGRGGYIKEIHHPVGQRRRFRELMIAYHDTVRSTTRIKNKIKAKFRQNGIQCTGVTVYSETYREEWEAKLPQETTVLLILDGLWRQLKQSEQTEKELLKAARAQAKQYPEIKHFEAIPGIGFISAATSSAILETPYRFADKRKVWMYAGLGIMTRSSGGKTYSEKLSTDYNRLLKYTLKQAAEVAIRAEDNPFRRKYLDMTLLRSIAPHRAKLTIARDMMATLLAMWKKGEKYSPKIRENVAYKQI

SEQ ID NO: 373618 - protein, 342 aa, unidentified
MNITTLGIDLAKNTFSIVGMNQHGKVVCRKTLSRNKLLPFISQCPPCLIGMEACSGAHFWARSFEDIGHRVGIIAAKFVAPYRKGGKNDNNDAEAICEAVMRPNIWFVPVKSPDQQAVLCIHRARQGLVKDRTALLNQLRGLLAEFGIVIPKGRYPAQATIPEVLENMNNGLPMLARSIITDLWGRIQVSNKQILSYDRDLAKLVREDPVAKRLMTIPGVGEQVATGVVASVPDPRLFKNSRQFCAWLGLVPRQYSTGGKTRLGRITKHGDKYLRMCLVHGARAVVATLKEKQDHVSCWIRNLVERRGYLRAVVALAARNARLIWTLMIKEENYKAMPIMAA

SEQ ID NO: 373619 - protein, 347 aa, unidentified
MEQYVGIDVSLDSASVCIVDAQGKILKEAKVACEPEALIAWLAAHGTPMARIGLEAGPLSQWLFAEMKAAGLPVELLETRHVRAAFKAMPVKTDRKDARGIAQLMRLGWFRPVHCKSLPAQEVRALLTTRKLLQAKRHDVEMSLRGVLRGFGLKVGPTTPKTFAMRVQELVAHHDTLRTIAEALLKARAVLAQEFKAIEKRLAALARTNAPTRQLMTTPGVGAIVALTFASAIDDPSRFRSSRRVGAHFGLTPRKHQSGETDVTGRISRIGDHGVRVALYEAANVILTRAVRGSDLKSWALRVAQRAGMKKAKVALARKLAVVLHRMLADGTTFMASKVAQSAAGAA

SEQ ID NO: 373620 - protein, 350 aa, unidentified
MVLIQNVGIDASMKELQVCFMALESGQVQKIKGTRTFSNSPKGFTALVNWALKKACQTAVRFTMEATGVYYESLAYFLHQRGYYVSVVLPNQSKAFIDSLNLKSKTDKLEAKALAQMGVERQLPQWEPISEQMYQIKRHCRERVMLLEEKTMIANRLHAEEHCAQPNKIVIKRMKQRLKLLEKQVAQVEAELHQLVARDQELAERITNIEQIKGLSFITVITIIAETNGFALFKNRAQLTSFAGYDIVERQSGSSVKGRTRISKKGNRYIRRALHLPSLSVIRYNENFQQLYERVYERTRIKMKGIVAVQRKLLILIYTLFKKNQTYDPAFIQRNTQQSSRQDTVPAYAG

SEQ ID NO: 373621 - protein, 345 aa, unidentified
MNITTVGIDLAKNVFQVHGVDPRGKVVLRRQLRREQVAPYFVNLPPCVIGMEACASAHHWGRTLERFGHTVRLMAPQFVKPYVKANKNDAADAEAICEAVSRPNMRFVPIKSIEQQGILSVHRVRQGFVKARTAQANQIRGLLGEFGLIIPKGICHVVERVPALLEDASNELPLAFRQLIDRLNCHLKELDQQVRELERQIIAWHRNSALSRKLEKIPGIGPLTATALVASIADARSFKNGRQVSAWLGLVPRQNSSGGKSTLLGISKRGDVYLRTLLIHGARSAILVAKRQMENKNVWLANLLNRRHPNIAAVALANKNVRTVWALLAHDRDFNPDYVPIRAAA

SEQ ID NO: 373622 - protein, 411 aa, unidentified
MKVVHEICCGIDVHAKMLVACLIAANGEKKIRTFSTMTAELLQLRDWLVAAKCTHVAIESTGVYWKPVFNILEDALTVILINPEHARALRGRKTDVKDAEWLADLLRHGLLKASFIPPGEIRELRELTRYRESLVREQSGVANRVQKLLESGNIKLGQVASDALGVSGRAIIKALAKGENDPRKLAALARGKLKEKSLSLERSLEGRLTVNQRYVLGELVKRWEELEAADARVTSEIDKYVQARPKLARAREILDGIPGIGLRVAEVIIAELGITMAVFGDAAHLASWAGLCPGNKATGGKRMSGRTRKGNTYLRAALVQAAWGVTMKKNCYLSSQYFRLLKRLGRKKALVAVAHSLLVIIFHVLQSDQTYTELGGDYFDRHHVEQQREYYLRRLQMLGLKVTVEELPTAA

SEQ ID NO: 373623 - protein, 477 aa, unidentified
MSSQKKQPGQPGKSRGKRRKGMTLDDRPVLQPNAAGIDIGAREIFVAVPADRDENPVRVFPTFTADLEEMARWLVSCRVTTVAMESTGVYWIPLYDILESHGITPCLVNARNMKNVPGRRTDWHECQWLQFLHSVGLLRAAFRPDGEVVAVRSLMRHRTDLVQIAAQHIQHMQKALTQMNLQIHHVISEITGVTGLAIVDAILAGERDPAVLAELRDHRIRASEEIVRKSLVGNWKREHLFTLKQSRQIFQYYQESIAACDEEIEKLVVAFAPRADPAERPLPPDRKAQQRKRKRRGLNPGVNAKTGFDMRAEIYKLFGVDVTQIPGLMATPLLLFSEIGRDMSKWPTADHFCSWLGLCPDNDISGGRILWSGTRGTRNRAGQIFRMGAFALHHDLSPMGDHLRRMKSKIGPPAAQTATAHKIAIIFYTMVKKQVEYDASIWARKDAQREQRFEAKLKRQAHARGYKLVKVEEIIAA

SEQ ID NO: 373624 - protein, 393 aa, unidentified
MFIVGVDIAKRSHEATVIDDSGSKIKKPFNFKNDSSGFHSLLSVLESISLDPDDFIIGMESTSHYWLALYSGLRKKGYTVHVFNPIQSNALREMYIRQVKNDDRDCFVIAEVIRFGRYSEGGMPPSNIYELREMCRARFFMVDAVADLKRKAIALLDQVFPEYETLFTDIFGLTSSELLRNCSTPEEIMAIETDRLCEIISVPSRKRFGMKKAEEIKSLAENSFGIVQEFDAFGCLIKQYMEHIRFSEQQIAALDERIAALYSSFDTYLSTIPGVGPVLGATILSEIGDISRFSSAAKLAAFAGIDPTVKQSGEFVGTRNHMSKRGSPYLRRALWQASTIAVRCDPVLKEFMAKKRAEGKPYMNAVGHVTKKMANIIYAVLRDNKPYYIRSNI

SEQ ID NO: 373625 - protein, 451 aa, unidentified
MSKRKQVEGLAIVNPNAAGLDIGSAEIWASVPADREGETVRCFGTYTTDLLDLATWLETMEIQTVAMESTGVYWIPVFEVLEERGLQVLVVNARHIKNVPGRKSDIKDCQWIQRLHSYGLLSGSFRPQAEIASLRAYLRHRDGLMEHRAAHIQHMQKALLQMNLQLTQVLSDITGETGLAILRAIVAGERNPYTLAKMRHGNCAHSIADLVKALTGHYRPEHIFALKQALALFDAYTEQLRECDEEIERQFENYKPDLPNDLPPLPPNPKPGSHSKNGPDYDARALIYRKVGVGLFAIPGMNAVLVQTILSEVGMDMSRWPTAKQFCSWLGLAPHNGISGGKVLYSHVPKTHNRAGQAFRLAAQAVSRGKSVYSEFYRRVRARSGPAQAIVATAHKIARIFYYMLLRRQPFQSMDIQEYYRRQREKDIQRLSRNAARLGFQIQPVTAGNML

SEQ ID NO: 373626 - protein, 351 aa, unidentified
MNIKHYIGFDVHKKSISYCVKTADGKIIEEGKLRSTHQVLREWAQKRTEPWHGAMEATLFSSWIYDVLKPFAAELQMGNPSMMKAIGAAKKKNDQLDARKIADLVRCNLLPVCYVAPPELRDLRRLLRYRNLVVGQAVQMKNRMSGLLMEVGAEYSKQRLHGAKYFSELLDQLEEVPESVKDLLRLSRGALETFAATQRQLLDRLQRDPLLVKRVNLLKSIRGVGEVTALSWALEICDPRRFPSIGDAESYCGLTSALKSSADKQQRGPISKQRNAHLQTVLIEAAKLAPRWNRQLAELHERELKRGDRNRATLAVARKLVAYLLAVDKSGKRFEVRNPPANEMQEVKQVA

SEQ ID NO: 373627 - protein, 355 aa, unidentified
MIIIGVDFHPEFQQIAFVDTNTGEFQEKRLVHREEAEQFYRGLAAAGQQVRVGMEASGHARWFERLLSELQFELGIGDAAEIQSKRVRKQKTDRQDAQLILKLMLKDDFPQIWVPSWENRDLRQLLWHRHRLVQARTRIMNQLQAIALNEGLRCKKRLWRERGRQQLESYQLAPWASRRRRDLLELLDRLNPTIAELSQAIEQEAEKSPAAQRLMTHPGVGALTALAFVLIIGQAERFQCGKQIASYLGLVPLEKSSGNRRRLGHITKQGSSMVRFLLVEAAQVTVRSLPEWRRKYVHLMMRRGRKIAKVAMARRLAVALYWMWRKGGNYEQSKSSVRTRASSEQAMVCSRTPSN

SEQ ID NO: 373628 - protein, 457 aa, unidentified
MLPVSGLPSEFEQINLNAAGIDIGAQKHYVAVAKGRDPEGRDIRYFDTFTIDLHALADWLKQCGIDTVAMESTGIYWIPLFEILEQNGFDVRLVNPRSIKHAPGRKSDVVDCQWIQQLHAYGLLTSAFHPDDQISVLRAYHRQRTMLVNHAGTHIQHMQKALEQMNLKLTNVISDITGTTGMKIIRSLLAGERDPKKLSKHRDPHCKKSEKEIAKSLNGNWRDEHLFALQQAVALYDFYQTQIMDCDKQIQAQLCRFEDRSDTGELPPAASKSSGSGKKLTFDAREHLYRMAGVDLTQIVGLNTPTVLTVLSEVGLDMSRWPTAKHFASWLGLCPGSKISGGKNFSSKSKPSANRAAHAFRMAAYSLHRSQSAIGAFLRRKKAQLGAPKAITATAHKIARIFYEMLKTRTEYKDLGVDYHQNRYKERMLHNLKRKAKEFGLELVNPNQDQLVMANSE

SEQ ID NO: 373629 - protein, 412 aa, unidentified
MDIVHCRCAGLDISKRDAKVCLRTQEPDRAKASSKVTTWAAVTSQILALREHLILERVTLVVMEATSDYWKPFYYVLEGGPFEVMLVNARHVKNLPGRKTDVSDAAWLAQLGAHGLVRASFVPPEPIRQLRDLTRTRTTIIRERTREIQRLEKLMEDTGVKLSSVATQMNGVSSRIILDALVAGERDPVVLADMAKGRLRSKIPELTEALAGRFSEHHAFLVQIQLDLIDQRAKAIDEITARIEVVMEPFRAARDLISTIPGISTRVADVIIAETGADMSRFPTAGHLASWAGVCPGSNESAGRVKSTRTRPGNPYLKGALGIAALAAARTHDTYYAAKFRRIASRRGPIKAVVALEHSMLITVWNMLQTGENFNEPGGDFYTNRSPEKAKRRAIDQLRNLGYTVTLEPTAA

SEQ ID NO: 373630 - protein, 380 aa, unidentified
MGSLRFVGMDVHAEKITVAIAEENGTVAVWGDIFNREEAIRKLVQKLGPKEQLRVCYEAGPTGYALYRQMRRLGVECAVVAPSLIPVKPGDRVKTNRRDAKKLAWCHRNGDLTAVWVPDEEQESLRDLVRAREAAKKDQTRARHRLSKLLLRHGQRPPEGVRAWTSKYGEWLKKVQLLGKAQQVVVEDYLHEVDHCGARLQRLEKAIHEAIQEAPAGMRAVIENLQSLRGVAEVIAVTLVTEVGPFSRFASPRQLMAYSGVVASESSSGERVRQGGITKTGNAHLRRVIVEAAWAYRHRPAIGSTLRRRQKNLSGEILEISWKAQQRLHQKYRRLLGRGKNQPQTIVAVARELLGFLWAIAVKVEPAVNLWPTAVASRKT

SEQ ID NO: 373631 - protein, 310 aa, unidentified
MDATVVVGIDVSKDRLDVHVLPEASAFAVTRDGKGLAELVERLRPLGCAAVAVEATGGFETIVAAGLGGAGLPVIVVNPAQIRAFANALGKRAKTDPIDAAVIARFVEATRPQVRPLPSAETQALADLVARRRQIVEMIGAERQRLKRATVQAAKSIARLLKALEKELASLDHDIDGQVRGSPAWAAAEDLLTSVPGVGSITARTLIAELPELGTLDRRQIAALAGLAPWTRQSGQWRGKSFIGGGRAAVRSALFVAAMVAGRYNPVLRAFRQQLIDRGKPKKTAIIAVARKLLTILNAIIREQKPWRTA

SEQ ID NO: 373632 - protein, 352 aa, unidentified
MTVTNLPRCVTGGVDTHLDVHVAAALDERGTLLGVESFATTTEGYKKLLGWLSDFGPVELVGVEGTGSYGAGLTRHVQAEGIKVVEVDRPNRQRRRRKGKSDPQDAIAAAHAAQSGDALGEAKTRDGNVESMRVLRVARSSARNGRTRALNQMRSLISTAPEIIRTELRGLNVFRLLERTSTYRPGAKRDIVSLTKFSLRMLARRAIELEEEIIEIDAILKSLVKETAPELVATLGIGTDAASALLVAAGDNPERLRNEAAFAHLCGASPLDASSGKNQRHRLNRSGDRQANSALWHIVITRIVYDPQTSEYIHRRMLEGKTKKEAVRCLKRYVAREVYGLLPHDKLGVDRP

SEQ ID NO: 373633 - protein, 371 aa, unidentified
MEWSPPALTVSRRPSSVDRSVGHCWFGMSAAKENQMESSTIAIDLAKRVFQIHYVDTETGAIYSKALKRTQLVPFFTNRPACRVVMEACGSAHHWARTLARLGHDVRLIAAQFVRPFVKSNKNDAADAAAIWEAAQRPGMRFVAVKTEEQQAMLALHRVRQQLVRIRVMQINQLRGLLYEFGIVLPQGRRPSIEAAKAALASLADQLPVMLTDSLQDQLSRLRILDEQIELLERRIQEWRRNDEACRRISEIPGVGVLTATAAVSAIGQAKSFRSGREFAAYLGLVPRQNSSGGKPKLGGISKRGDVYLRTLLIHGARAVISSSKHLPERLRLLLARRPTNVVAVALANKMARTIWALLAYGRTYQAPPMP

SEQ ID NO: 373634 - protein, 320 aa, unidentified
MDHSAGLDVSVKETSVCIVDETGRIVREVKVASEPEALLPVLKNPAYHFKRIGLEAGPLSQWLYSALAEAGLPVICVETRHMRAVLKAQINKTDRNDARGIAQMMRVGLYRPVHVKTLRSQKLRMLLTHRKLLQSKAIAIDNDLRGTLRNFGLKVGMVGTVKFEARIKELVENIPDLAVLVEPLLIVRRVLREQFVIQHRRLLAIVRDDEVCRRLMTVPGVGPVVSLTYRATVDVPARFRKSKSVGAVFGLTCAKYQSGEVEWSGRISRCGDEMMRVMLYEAAQSMLRSKKWSWLKAWAMQIARRRGMKRRSWPWRAGWP

SEQ ID NO: 373635 - protein, 433 aa, unidentified
MSQQQESKPPSGGVEEPEFAAFIAIDWADQKHVWALQMAGSDQREQGEIEHGPEAVDAWMQTLLQRFGGRPLAVCLEQARGALLYLLMKYPNLVLYPIHPAAVKRFRAALYPSGTKNDPLDAALQLELLVHHRPRLRAWKPDTVETRMLQILVEYRRQLVDQRTAESNRLTQVLKLYYPQALDWFDHPASALVGAFLKRWPTLQSARKARAQTLRDFFHQHNCRNQELIQQRIQRIGQATPATSDPALLRTCVLQVKHLLQSLAGLRHSIAELDKEIRSVSRNHPDFPVFDSFPGAGEALGPRLIAAFGTQRERFSSATDVQSFSGIAPVTERSGKTERVHFRWACPKFVRQTFHEWASHSIGFCDWARAYYLQQRDKGAEHHAAVRSLAAKWIRIAYRCWKDRTLYNQQLYLDALRRHGSPLVAKIASSQRC

SEQ ID NO: 373636 - protein, 311 aa, unidentified
MSADEKELSHKSFDNTPTGIQSLLDWIAGYHLSLSKLLFCAENMGSYVTELSVSSVSMGFSLALVCPLTIKKSMGLQRGKNDRIDAKRIANYAVLHYRKLELYKLPDKDLVRLRGWIIIRDNLVKQKVSSIKLLETFSWMAKLADVTESISFLEEQLKSIKERILEVEEDMEQLIAASTSLYTNYLLLRSIKGIGIINAIVLLCVTDNFQRFDNPRKFACYCGVAPFERTSGISIRGKTQTSPLANKEVKVYLTRAAITAISWDPQMKAYYKRKIAEGKHKASVINAVRAKIIARSFAVIRRQTPFVTLAV

SEQ ID NO: 373637 - protein, 347 aa, unidentified
MLVIGIDVGKEELVACLQQSLSGEPPRVIGSLQTVANTLSGHNKLVRWLEKQLQAQDLAPDLSSSQVHVVLEATNVYWEACAYHFYALGCPVSVMNPAQIKFFARSTLRRGKTDAMDAEIIARFGLMMRPALWTPPSPGLLAVKQLGREREAMLTELGRERNRLQALQRAQYTSPVLVRLAKQRMRLLERQTHQLEEIIRAAFARDPELQTQLELLLSVPGFGFIAAATVLAETNGFATLEDGHQVAAYAGLAPAPNQSGLSNRKGSISKVGNARLRRIAYLAALGARNSNSRFKAFYESLRERGKPPRLALVALARKLLRVGLAVVKSGQPYQAAYQRPAQTSCVT

SEQ ID NO: 373638 - protein, 365 aa, unidentified
MEAIYIGVDFHARQQTICYLKIETGELVITELKHKDKEQVRAFYRQFQGPVIVGLEASGYSPWFEVMLEQLGHEVWIGHATEIRRRARWRQKNDRRDAELIWDLMVHNEFPRLHRPAFPSREVLRMLRYRQKLIKLRTMAKNSLQAIALQAGLAKGPQLFTAAGQKEFRAAALSPVLEWQREHWFELLNPLNQQVLETMVWFKTQSKDDASVTRLRTHPGLGLLTAVCLVHTLQPLSRFRNARKVAAYAGFDPVERSSAERQRFLGISKAGSRLLRYLLVEAAQTAVRNDEDLKRFYKRLGQRRGRPKAKVAAARKLLIRAYIMLRDEIDYAEFRRRAVAARLARTGQRPNVPEVLIGQPASSEQ

SEQ ID NO: 373639 - protein, 404 aa, unidentified
MKGPILSIDVSKGKSDYQAFKDLNVKYTGSRSIKHNKEGFDEIVNLVREMEKKLETEVCVVYEATGVYHRVLKKVLEDNNIKQFIINPLLSAKTRKNDSLRSPKTDKLDPKSIAKTYYSHSLHNSHKQETIYHELRELSRYYEDILVHIRKDKVAFRAQLDIVFPGYDTLYDDLYGPVALAIIEKYPHPEMLQKKKINTVSKVIQNKTCHRQAVSDTMADKAIEYSKTIYSGCDKDDIEVLILQRFIKKLNEDMAEAERTIGEMIKLAQELPDFNIIKSIPGIGDNLAARIIAELGDMTRFKKKNELVAFAGLDPRISESGQNDGDHMHITKKGNKRLRCLLYLAVTCSIRLKRDDNSIKDFYIKKKQQSNPMCSKAAKTACASKLVRIIYRMCKTDELYQYNK

SEQ ID NO: 373640 - protein, 349 aa, unidentified
MNDNITIGMDLGDKFHIAVVFDGEGTELETVKVVNTKSGIDKYFKRYRGSTVAIEAGTHSPWISRYLEEMGCHVYVGNPRKLRFIWDSTDKSDERDARMLGMVCRIEPRLLSPLRHRGQKAQADLAMVKSRDMLVKTRSKLINHVRSVVKTNGERLPSCSTDYFVRRCAAHVPKDLQSSLASILDTISQVSEKIHELDAEIERMCQDEYPETRQLQKVPGVGPVTALAFVLTIEDPDHFTKSRQVGAFLGLTPRRDQSGETDKQLRITKAGNKYMRQLLVSCAHYIIGPFGPDSHLRRHGLSIAERGGKNAKKRAVCAVARKLAVLLHRLWSSEQPYEPFYGIVRKKAA

SEQ ID NO: 373641 - protein, 352 aa, unidentified
MEYIAFDAHKRYTVASVARSDGRLIREQRIPHERGALQQFLERCERGSPVAVETIGNWYWIVDEIEAAGCVPKLVHARKAKLMMGEINKTDKLDARGLNRLQQTGTLPTVWIPPGELRDQRDLPRTRMVLVRQRTQLKNRIHATLAKYALHDVEVSDLFGARGRDLLRQRLHLLPPHTAYATRQLLEQIEHLDRQVRAFEQRIQAVFKPTPAIQLLLTMPGVGLTLAVVIALELGDVARFATAEKLAAYAGHTPRIHASGGKIRFGPSRPDVNRYLKWAFVEAANAICLNRQRAPRRHVSRLYERLARPKGHATAIAAVARHLAEATYWMLSKEEPYREPKAAVSSTGDQRG

SEQ ID NO: 373642 - protein, 521 aa, unidentified
MTTTKNSTRNKGKKGATRRYIGKPSGVIQQRVQEVGPQRFGIVSVDCAKRRSKCMFCDFFGRVIIEPTIVEHHAGALKAMTQQVAAACEAEGIGDSIAAVEMTGIYHKPVQAAFRKAGFDTRTVHPFASSHYRGALHPNDKTDDNDLEAIFHAAINGYGLATLPVSEIYLSLQRLIRHRRNLVKQRARLQVQIRALLHQSMPGFADLFEDDKLFNKSIAMTIAQEFSSADSIKKIKADGMATFLRNSKVRFQERTLDKIYAWSLQAADADPLHRLLTEHWKQLLQLRSLMTEQILDTERKTANSLAKTPYILLLSVKGINIVSAGELAGEAGPPEHYASATAINGRAGLYPSRYQSDEVDRSGSVAKSCNRRLRAACILVAKNLIKCHPYYRGLSAVWEKRGIVTVDRQCRMANRANRMIFQIVSGRQVWRGKSIDQEYILLKLREFHRTHKTTLEQTVVDLNEAFTWLPKSTHAAEAKPLAELARKKNRRTASIGDLLIRLLIRLGVRTENPVESRSSEA

SEQ ID NO: 373643 - protein, 392 aa, unidentified
MVCVGIDVAKDKHDCFILSSEGEVLAEVFTVANNREGFETLLQRIRACTSPTDKIKVGLEATGHYSYNILGFLLDNGLATFVLNPLHTNLYRKSLSLRKTKTDRIDARTIASMLMSDVDLKSYSSTAYHNEELKSLTRYRFSKVQERAKLKQSVSRLVNILFPELENLVSSLHIASVYTMLSEFPGAKQIAGAHLTHFKTVLSDASKGRYDKEKAVEIRETARRSIGSVMPAKSLELQHTIRMIRELDKEIEEIEAAIQTIVDEMTPPILTIPGIGVRMGAMILAEIGDFSRFESPDKLLAYAGLSPSTHQSGKENATGAYSHMEKRGSRYLRYALYNAAKYVCHWEPSFKAYLAKKRAEGKHYNVALSHAIKKLIRLIFALQTSGRAFQPA

SEQ ID NO: 373644 - protein, 312 aa, unidentified
MELFVGIDVAKATLAVALSTGEQWDCANDADGIARLRERLLAARPVLVVLEATGGYEGELLAALIGAGIEARRVNPRDVHHFARARGQLAKTDRIDARVLAQFAECMRPQARALPDLEREQLKALVTRRSQLVQMLTAERNRRAQAPRWLGKSLERTIRGLARELAVIDREIAERLDRSITLKPLRDLITSVPSAGPVLSATLIARVPELGQLSRRQIAALIGVAPFTRQSGQWRGHDMIFGGRAPVRAALYMAVLSAVRYNPPLRAFYRRLRARGKPAKVALTAVMRKLLTILNAMLKHHSPWSAPCPTPA

SEQ ID NO: 373645 - protein, 370 aa, unidentified
MSVSEPTLSVAFEVGKKEWQLAMTSGFGVDPWVRTVVSGDLPAVAGALRQGRMRFALPAQARVVSCYEAGRDGFWIHRALTQLGLDNRVVDSASIEVNRRARRAKTDRLDALNLVRMLVRVCAGERKVWSEVRVPTVAVEAARHVSRERTALRQEQTRLSNQLRGWLATWGCRLPRYRKPGWWTAVRDWAGAPLPLEVQTRLARAEARWAVLERQLTELEAQQQAAVPAAAPASALRQLVQLKGVATTSASVLLDEGLVWRGFRNRRQIGGLLGFAPTPFDSGESEREQGISRAGNGHLQSISIQLAWNWVRWQPLSALTQWYRARFGTGKRARRRGIVAVARKLLIALWRYVTTGVVPAGATLKVAAIA

SEQ ID NO: 373646 - protein, 416 aa, unidentified
MSHILFVGIDVSSKNNVVCCLPEGDTAKSVSRFTVTNDEPGVLALQERIVALMHKHNLTHIRFGLEATGCYSSHLARYLESVLRFAPYEHSVYVFNPSLIKVFKKTHFLDAPKNDRVDAWFIAAKLRSGHLPRAFTWSETNAALQRLCRTRFHVTQCLTRETNFLLTNLFLKFSSYSVGPFGKKTSATSLAVMEHFASVETLIDMPLEGLVAFVARCGKNRFENPQEVAQALQKAARSSYRLPKAMTDAVNLAMASNIRIIRSLQEQAKSLQKAIEEHLATIPQTLTSVPGIGPIFAAGLLSEIGDIQRFPNQMALAKYAGLAWTESQSGDFKGVESRLIKSGNRYLKYYFTEAAKSVQVHDTVFAQYFSLKAAEPAKYAEKRALALTARKLVRLVDHLLRTNRLYEPREVIRQHG

SEQ ID NO: 373647 - protein, 345 aa, unidentified
MPIVGGLDIHRKQITFDYLDTATGEVRRGQVAPAGRAHLRAWLARFAGRDDVAFALEGCTGWRYVAEELAAAGVAAHVAEPAEAAFARGRKRHAKTDRTDSRHLRVLLEQDRLPECWIPPPQILECRALLEAYHDLRREHTAWIERIHAVFFHQGAPRLGEGALRTDRGLAALREAAAVHLSPAGQLQVATALDMLAAVEARMEVLRQQLLHAARQLAGARALQARLYGVGPLAGLAMTCWLGGAGRFSSSRKAVRFAGLDVTVYSSDGKRSPGHLSRQGPEILRWVAYEAGKTHGRASAPGHDYYAAVKNRTDGKIAALSQARKLIRQACHILAELGDDALAAA

SEQ ID NO: 373648 - protein, 317 aa, unidentified
MEQGDVSTTIAGIDVGKYWLDAAVHGHATPLRVANDAAGIATLSRWLTAHGVGRVGLEASGPYDRRVRADLQSAGLEVVLHQPVEVKLFGRIRRQRAKNDRLDARLIAAATAGIERRPLRHDPRLADLAERLTVYEHVSDTIARLKSLLESVGLDDLRRAVLDQIETLTALKSQLAERAMAAIRDQPDLRHRLELLRSLPGFGPVVATSMLIRMPELGDMQHGQPASLIGVAPHDRDSGTLAGTRFIAGGRSRPRRMLYIAALAARRCDPDLKAFAQRLEANGKPKKLILVAIMRKLIEAANIVLKRNAQWTATKAN

SEQ ID NO: 373649 - protein, 378 aa, unidentified
MKKHSIGARGWRSRARAQKRKWTIGMDLGDRSSRYCVLEEEGEVVVEGCVATTQKGLPQVFGALPRCRVALEVGTHSPWVSRQLAAVGHEVIGANARRVRLISESSRKDDQLDARTLARLARLDPQLLSPIQHRSAEAQADLMRVRARAALVEARTALINSARGLVKSYGERLPPCTSERVSEELGLELSPALRGVLGPLLAEIETLTGRIKDYDRQIETVARERYPEVEQLKQVSGVGTLIALTYVLTLEDPLRFRRSREVGCYVGLRPKRRDSGDSHPQLRITKEGDRYLRKLLVQAAHYILGPFGPDCDLRRWGLKLAARGGKNAKKRARVAVARKLAVLLHRLWVSGEVYQPFYRRGLGRQIKCCQVCGSAEFG

SEQ ID NO: 373650 - protein, 355 aa, unidentified
MERYIGMDVHAASCTLAVISEKGRKLKDFPVETNGQALVEAVRMIPGHKHLVIEEGLQSAWLYETLSPHVDELVVAGITRSRGPKSDKRDAYGLAEKLRVGNLDKHVFKSPRQFTRLREFSRTHMTLVSDVVRTQARIKSLYRSRGVLVTGIDVYSSRRREEWLKQLPSTTQLRATRLYDHLDFLLEQKKQAEADLLREGKNHSIVQILETAPGFGPIRAARLVPIVITPHRFRTKRQFWSYCGLGLVTRSSSDWVQTAEGAWIKARVPLTRGLSRQHNHFLKAIFKGAATTVVTQRNKDPIHARYERLLDGGTKPTLAKLSLARMIAATVLRMWKNEEEYDPGRAGLQTQTRKG

SEQ ID NO: 373651 - protein, 341 aa, unidentified
MTQYVGLDVSMEETSVCVLDASGSTLWEGRVESEPSRIAGMLRRRAPDAAKVGLETGPTSTWLWHALRSAGIAAICIDARHAQAALSMRLNKTDRNDAAGLAQLMRMGWYREVQVKALSTHGDGALLASRALLVRQRCELENQIRGLMKNIGLRAKATKGNAFEQSVSALVAGNALLEDIVMPLLAVWSQLRLQIAVLTARVRARAGASVTCRRLMTMPGVGPLTALAFQAAIDDPMRFKHSASVGAYAGLTPRRYASGEIDRMGRISRCGDALLRSYLYEAANVMLTRSRNANPLRSWAAKLAKRAGYKKARVALARKMAVVLHRMWLDGTDFGAHKQAA

SEQ ID NO: 373652 - protein, 408 aa, unidentified
MSPDGEVHRKPFKIMHNRNGFDYLVDQIKKAEKEFNMKTAIFMESTGVYHLTLFHFLKDTFETCILNPLITNCNKNVDIRKVKNDKKDALTIAKIGKFQDVKYSCNFDIEIYTLKSLCGDYYKFTDSKSTFKKKLSTDLRVIFPTYNTVFSNITSKTLIAILKTYSSPEAILNADKNKLIKLISAHSRKGQVYSENTYKKLIDAAGEAVYIGLNSPSLFVKIINTISIMEALEIQIENLLKEIHLLMCSNRISAEFKKNVQLIYSIPGVGELTATTIMSEIGNIKSFVKPKHLVAYFGIDPSVSQSGKFNSNKNVMSKRGTRIGRRALYAVALASIRKIRNDEPINKVLLNFYKENMKGKSKKVDLVAIMHKLINYIFSVLKNQKEYELRDPKIHVKMHLNKQSNSAA

SEQ ID NO: 373653 - protein, 413 aa, unidentified
MQCNCFVGIDVSLKSNAVCVLDSQGSKLCSFTVRNDREGSQALANRVCSCLSKADAAPSIKLGIEATSIYGLPLLYFLKQEHTLKNIDAHYYILNPKQVNGFKKTYSDLPKTDPVDAFVIADCLRFGRIGTKEAYMDDVYSSLQKLTRARFHVAQDLAAEKNRYLSSLFLKFSAMTQLDLFSDNFGATAMALVEEFETVDDIANTPVEELAAFLNDHGKGRFADPNELALTIQSAAKASYRLPKTVLGSVNQTLAVSARTIRFYEKQLKDYDKAIADLVSTLPGNPLATIAGVGPVYSAGIIAEIGDVSRFKDQAALAKYAGFAWSRHQSGEFDADQTHMINSGNHYLRYYLIEAANKVRMHDPNYMAFYQKKLAETKTTPHKRALALTARKFVRLVYALLRDNKFYSPSFVE

SEQ ID NO: 373654 - protein, 317 aa, unidentified
MGDFMGDFMSVAGVDVHKDSISITMLFQEGGKWKQEYFESQTFSQDLAIAGKKIKSKKITEVAMESTGIYWKPIFHIWNEMGIKITLVNAHHLKRVPGRKTDASDSAWIAELHQKGLLKSSYIPDETFQELRALTRHRTTLVNANSPIKNRVQKILEDGNVKLSSVLSDVFGVAGTEVIKGIISGEDDPDKLVELIKTNVKETKETIRKSLVHTLKPYHRLLIKQLYQDYLFRSQLIFEIEHEIDEKMKPFEAQIKLLDTIPGVDKVTAQIIIAEATTETKNFENERIFASWAGVVPGNNESGGKKKDQNVGMEIPL

SEQ ID NO: 373655 - protein, 420 aa, unidentified
MKVVYQTCCGVDVHKSFLVATIIKTTSGIQPSYQKKRFSTFNNSILQFKDWLVKNQCRDVCMESTGKYWVPVFNLLEDEINVIIANPKWVKAVKGNKDDTKDSKWIGDLFRLGLVPGSYIPCKPIRILREFTRYRYKLTSCRTSEKNRYQNALTVCNVALDSVVSDIFGKSATSVIDYLIEQSDNSINHEEIASRLFRSLKKKADSVMESIEGYRMTDSQKYRMRLVRAHMDYITSTINDIDTMLDSLVVPYENAVQLLCTIPGVDRNSAITVISEIGIDMAPFSTSKRLCCWAGLTPGNNESAGKKKSVRITRAGVYLKPALVQVAHAAVKSANSPYYKQKYERIMKRRGKKRAIIAIARMILTAIYQMLSTGEAWNPSDLYKIDMPEPLIEKQKEKAIKQAKKLLINEGIISESQLAS

SEQ ID NO: 373656 - protein, 345 aa, unidentified
MSKLSSDLSTVTVVGLDLAKHVFQVHCIDTEGRVVLNRSLRRREVADFFRRLPPCRVGMEACGSAHHWGRTLISLGHDVKLMPPAYVKPYVRRQKNDAADAEAICEAVTRPSMRFVTVRSIENQAVLMRHKVRELIVAQRTQLLNALRGHLAEAGVIAAQGACNARALAALVAAGDDEVPTCVVQALLPLVEQLRHLDAAIAEADKAILEAARGSADARLLMSIPGIGSLTANAFVATLGPDGVGQFSGPREFAAFLGLVPRQRSSGGKERLGRITKMGNVYLRKLLVVGAHAVLHHHARHEDPLRLWARKLLATKPFKLVAVAIANKLARIAFALLSRQARYAA

SEQ ID NO: 373657 - protein, 314 aa, unidentified
MTSQSVSTAAGIDAGQRFLDVALAPSGKTFRVPNLASGIATMIARLTAAGVTRVVLEAIGSYAQTAVAALTAAGFQVGIVNPRRIKAFRDAEGRRAKTDRLDAQLIARFALVMTDADRPLPSAEQQTLKALSLRRRQLTEMIAMEKTRLKQTLEPLLIESHRATIAELAVQCERIEAELARRIATDAELVRVSRILTSIPGIGTRIATVLVTDLPELGHRDRKSIASLAGLAPHVSQSGNAPPRAAISGGRPCVRTALYLAALVAVRHNPKLRDDYKAMRDQGKPAKVALIAVARKILVVANGLVKADVVYAPA

SEQ ID NO: 373658 - protein, 463 aa, unidentified
MKKFYLGGDVSKGYADWIILSENKKPMSDNFQLDDTYDGHCKLYAILKSYFDKYPDLEMYSAVESTGGYENNWFNSLKSYQKMLNIKVARLNPLGINFNQKARMSRNVTDAVSAYSIAEYIINHPENVQYDQDENWKALRRHWNFVEMQKMQRTQNINQLETILYSANPTLMRFKNDKFPNWLLELIILCPTAKKLAKAKPERLAKIPYLTLGKAKELVAETKQSIASTVDKNTEMLVKQIAMQIKNNSMNIKIQMALIEKEFKCPKIDILKSFIGIDTTSAIGLLLEIGSIERFPKVKSICCFYGLHPKFKQSGDKIIGVKMSKQGSKNMRKTLFNIAKGAIVNNPLIKELYEKKVSQGMKKMAAIGVCMHKILRIIYGMLKHNKPFNPDIDKQNRKRSKQKLQEDKLQNFAYVEKNRKHQEFDSKAPISKKQSKKRKEHVLSQCEITTHSAGSTRPFHIPS

SEQ ID NO: 373659 - protein, 352 aa, unidentified
METETFVGLDVHKNLVVATAVDAAGRRVNQVHLGSSDRELVEYLRQLPGSKRVALEACSMWEHYHDAAVAAGAEVVLSHPYRTRLIADASLKSDKVDSEALATLLRLNALPTAFVPSLETRALRRLVRERVFYRKQNKSVANHTYAQLFGKGIAYEEGILTRSRRREELRELGIPEVDRGLDRLQDLSEATKDLDRAIHAAYLESAEAQLLETIPGIGELTAVILVAFLCPIERFGTFDELSSYCGLCPTNHQSANRSYHGALKSDCNHLLRWVLVEASWAHRRVSRTSYIARVGRRNARRKGTKRGAIDTAHALLRVVYAILKRRTPYLPHAPERPSCSASTARSPRPSHD

SEQ ID NO: 373660 - protein, 347 aa, unidentified
MDQIIRIGMDTSKHVFQLHGVNAAEQPILRKKMRRKEMVGFFTECPPTVIAIEACGASHHWARLLTALGHEVKLIPPQLVKPYVKRGKNDAADAEALCEAMSRPTMRFVPVKSADQQAVLMLVGMRERVVAAQTQLANTIRGYAAEFGLTAGKGMSHIPLLLERIMIDETIPALARDLFASLADEFVQLDERRKEVEAKLMAWYRNNEYCRRLAKIPGVGPIGAVLLVMKAPAPELFASGRQFAAWMGLTPRDHSTAGKVRLGVITRAGDEALRKTLVVGATAVLQHLRAGRGRNASPWLVGLLKRKSPKLVAIALANKIARIAWKMLVTGATYRQNAEPPKLASAA

SEQ ID NO: 373661 - protein, 483 aa, unidentified
MKRTQPSRVAPTAAKRPCSGTGPTRPVKNLPVIHPHAAGIDVGATQHFVCVPTDAVGPQESAVRSFGAFTGELDQLVEWLLACQVTTVAMESTGVYWIPLFQKLEAAGLTVVLVNARHLKQVPGRKTDVKDCQWIQRLHSYGLLHGSFRPGDAICRLRTLMRHRANLVEACSQQVLHMQWALDQMNVHLHHVISDLDGETGLRIVDAILAGQRDPKALVALRDPRIRKSTVAEMEAALQGDWRPEQVWVLGQAREAYRFFHGQIAALDRQVEALLPHLVTAPPAPPEAERPPNPQAAPDGQRPRKKKHAGNAPAIDFTAQLKRICGVDLTCVVGFNLLSVLILISEIGLDMSPWRNGKAFCSWLGLCPGNKISGGKVLSSRTARVSNRAATLLRTLATAVGRSDTWLGSFHRRMKSRLGPAAANTATAHKLACLVYHLLKYREPYIEVDRLAYEANLQHRRVARLKQLATELGFELVQAKQVA

SEQ ID NO: 373662 - protein, 345 aa, unidentified
MPIVGGLDIHRKQITFDYLDTVTGEVRRGQIAPADRQHVRAWLARFAGQDDVAFAVEGCAGWRYVAEELAAAGIAAHLGEPADTAALRGRKRHAKTDKTDSRHLRALLAEGRLPECWIPPAQILEYRALLETYHDLRRAHTAWVQRIHAVFFHQGAPPLSEGALRTEPGLAGLRAAAAAHLSAAGQQQIATALDMLAATEAQLGPLRHQLRDAARHLTGAKVLAERLYGVGPLTALALTCWLGGADRFSSSRKAVRFTGLDITVHSSDRKGPPGRLSRQGPPVLRWAVYEAGKTHARTTAPDHGYYTAVADRKNTKRAALSEARKIVRQACHILTELGDDALTVT

SEQ ID NO: 373663 - protein, 421 aa, unidentified
MSKRRYATVNCKQVDWTAMAGEVAGQRAVFAVDVAKVKFVAALQVEAGRTLVRMHWEHPLETADLLAGLEVLAQAGALEVVMESSGVYGDALRWQLHTRGIVVYRVSAKRVHDSAEVYDGVPSLHDAKASELIAKLHWEDCSERWEILPDARRDLLAQVRRLRQAKAQAQAERNRLESLLARHWPELGHLLGLGSASLLRLVATYGGPAPLVLLARQARQLLREVGGRLLAEEKIDAVLASARSTLGMPCTPGECAQLRWQAEQVIDAQREKRQAERQLAHALAPEAALAPMRKLLGEVTSAVLLATQGDPKGYPSAASYCKSIGLNLKEHSSGKHQGQLSITKRGPSLTRFYLYFAALRLIRRDPVIKRWFEIKTARPGAVKQKQVIELMRKLAKAFWHQAHGHDFDVNRLVNLKALAGA

SEQ ID NO: 373664 - protein, 321 aa, unidentified
MKKLEKHYVGVDCHKDTIACYINGNFKEFNTDFKGFTKALEWVKKIQPNSAWAIEGAYSYGLTLSKFLLASGCEVYEFNALVTAKARKALSISGEKNDSGDAKVISIFAKQVKMQEVSLKTIELKRLITTRKLLVKQRTEIILSIKNYCVKEGIILPFNSLTTKKAISYLLNSEDLNLKILANSLKVQFESIKQLEKQIEELTPEKVKKLKEITGIETLTASIFYTETKGKKMNKAEFANYCGVAPVECSSGLSTRFRNNKRGNRTLNSLLYSISIFQSRFDEEGSRYFQKKLAEGKSKRLARKCLARQVANIIWKTLFQD

SEQ ID NO: 373665 - protein, 338 aa, unidentified
MKLYGGIDLHSNNSVVALLDEEDRVVYRKRLGNDAALVLESLAPYREAITGLVVESTYNWYWLVDALMDAGYRVHLANTAAIAQYSGLKYSDDDSDAAWLAKLLRLGLLPEGYIYPKAQRAVRDLLRRRSRLVQQHTANVLAVQNLFSRNRGHSLSANAIRRLTPETVGELLPDVHLALAVQSTLLAMRGQEAAIDLLEREACAQVRGRPAYRHLLGTSGIGQVLGLTILLETGPIERFARVGNYASYCRLVGSERLSNGKRKGRGNTKSGNKYLAWAYLEAANFAVRYNPAIKRYYQRKRAKTHGVVAIKTVAHKLARACYYMLSEGTDFDVDRAFA

SEQ ID NO: 373666 - protein, 341 aa, unidentified
MEKATIIGIDLAKRVFQVHAAAKDGRPVLRKKVSRAQLLGLLAKQPRAIVAMEACATAHEWGRAISGLGHDVRLIPPIYVKPFVRRQKNDAADAEAIAEAASRPTMRFVALKTEEQQARSMIFRTRDLLVRQRTQLVNALRGHLAEHGIVAAQGLAQVKVLATAMQDTGSLHPLVRELGQRYLDHIARLDVEIAELDKRLRRSSKDNETAKRLQSMPGMGPITAAAIEAFAPPMATFKRGRDFAAWLGLVPRQHTTGGKPRLGRTSKMGQRDIRRLLIIGAMTVVRWAVRKGAAKGSWLARMLAKKPRLVVAVALANKMARSVWAMLSKGEDYRGSALAPA

SEQ ID NO: 373667 - protein, 315 aa, unidentified
MTTEPIYVGIDVAKATLDVCTTDGDAWQVANDDRAMQGLCARLAKLEPALVVLEATGRYELRAAATLAAAGLPVAVVNPRQVRSYARSTGQLAKTDRLDARAIARFAAAVRPEPRPLPDADTRELEALIVRRRQLVGMIAAEDARLATAPPVTRKQIQAHVGWLHTQLTKIEGEIDGAVRRSPVWRAKDDLLRSIPGVGPTTSRTLLALLPELGTLKEKEITALVGLAPFNQDSGTMRGRRRIFGGRARVRTALYMAALVGCRWNPVLKAFYTRLRAAGKPAKVAIIACMHKLLIILNAMVRDGRAWDPTHAADA

SEQ ID NO: 373668 - protein, 343 aa, unidentified
MTKVTTVGLDLAKSVFQVHGADAQGRPIMRKKLRRAQVIPFFADLPPCLIGMEACASAHYWARELRALGHEVRLIPPQYVKPFVKTNKNDAVDAEAICEALLRPTMRFAAVKSAEQQSVLMLHRARELLVRQRTMLINALRGHCGEFGLVAAQGASKVAELIEVIEDPEDERLPALAREALGSLVEQLRVVQAQILGLEKKLLVWHRANEASRRLETIPGVGVITATALVATIGDASQFHSGRQLAAWLGLVPRQHSSGGKERLGRISKRGDGYIRRLLVHGARADLRWSRHRKEQRSLWQQSLLARRPTNVVLVAMANKTARVVWAMLSRGEAFRTEPLASV

SEQ ID NO: 373669 - protein, 348 aa, unidentified
MSFKGEAVTYAGIDVGKRTLDLALLDPASGEVRRRRFRNSERGRSDLLHLLSLLQPAAERPHRPAAVHPAAARLAAVVLEASGVYHIPLLRRLLDAGLPVALANPYQVAAFRKASGVRNKTDRQDALLLARYAAVYSGQLTRYAAPPRVLAELKEVLRYREQLLTRLQQVDSRIEAARWRSGQGHGSVTLAWLEEERAQLRDLLEKAEAEAQRLLQLLPEYRVLLTQKGVGSQVAAAVLAFLPQELWGKAKQASAYAGLIPEQQHSGSSVRKSHLSRKGPALLRKKLYLAALVASRHDPEMKDFYHRLLANHKSKKQALVAVAHKLLRRLMGKLKAYYREQGREGLVA

SEQ ID NO: 373670 - protein, 361 aa, unidentified
MNFYIGLDISQRKTAICVVDGKGKIVAEGSSLTLPSDIYNWLIGKNLDLTAVQNVCLEAGAMTSFIYKGLEALGLPVVCVEAFQAHQFLKAQRNKTDKNDARGLAQYVRMGGDYIRPVIVKDTVTQEDRMLLTLRQKYVTQKIAIENSITGVLKPFGILVPRRRGSADSFCNAFTETVAKAEHLGPTLREAVLESIEAYRAVNLMLEKVTKTITRIAREQPVCRRLMTAPGVGPIVALSFVTAIDTPHRFRRSEDVGSYLGLTPKRYQSGDVDNPGRISKFGSTMTRTHLVQAATTLLYASKKWSSLRVWGVKIAKRRGYQIARIAVARKLAIILHRMWIQERDFCWSTATVGAEAPRKAA

SEQ ID NO: 373671 - protein, 384 aa, unidentified
MNKHNILFIGFDTHKVFTEVAYIEDQRGARPVHYGRIPSAKGAIKKLVRQFESKYPQATLHFVYEAGPCGYWIYRLITSLGHCCYVVAPSLIPKKPGDKIKTDKRDALRLAKLLKTEDLTPIYVPEPEDESIRDLSRARETAMKDLNDARFQLKALLLRNNINYQGTANWSKKHLRWLCELVLAHPAQQIVLQEYLQTVNERIARLERLDNELQHQVHQWRYYPVVKALQAMRGVRLIVAAGVTAELGDLTRFDHPRKLMSYLGLVPGEHSSGGKRRLGAITKCGNNRARRLLIEGAHSYRYTANISTEMQKRQEGLPKDIVDIAWKAQLRLCQRYQRLMHRGKHYNLVVAAIAREMIAYIWAIAKEVLLTPVDPKLRLSRVPA

SEQ ID NO: 373672 - protein, 340 aa, unidentified
MLKYIRIGVDIAKNSFQVHALESEDCSATKRKLSRSGIVKFLAEVEPCAIGMEACGSAHYWARRFRAMGHEVKLTPPIYVKAYVKRGKNDAADAAAICEAMSRPNMRFVAVKSEDQQATLMAHKTRELLIKQRTMSVNALRGHLAEFGVIAAKGISHVEELVERAAAADLPAMVQATLGVLLAQLRSLDAAIDELERAIAADHRRDPVSRLAASVPGVGALAASAILASAPDPHVFKSGRDFAAWLGVTPKQNSTGGKEKLGSITKQGNRYIRRLLVLGAISVLRAAPKRKGALCDWLAALRARKPAKVVAVALANKLARIVWAIITTGEAFRSSIYAKA

SEQ ID NO: 373673 - protein, 341 aa, unidentified
MEKNVVIGIDFSKLTLDVTFFNTNNPNEKHYQQFENTEEGCVKTIKWIKRAFKDCSDWLICCEFTGLYSMTAAVAFNDRGIDLWLDNPRQIKLSSGIHREKSDKVDSEQIALYAARFMDSVKLYKPQGKVLLKVRELVRYKDRLTKIKSQLMVPAKELKRVRKNWEESSYVYDESKEISENLDLKIKEIERKMLFLLTSDPDLKRLYKLINTVVGVGMLTAIYLLIHTWGVTSFDNPRQLACYCGIVPFSKRSGTSVKGKAQVSHIANKKLKTLLHMCALNAIKYDPLIKAYYERKTQEGKHKMNVLNNVKNKLTHRFFTVVSTGQEYDKYYHLNLVNREI

SEQ ID NO: 373674 - protein, 343 aa, unidentified
MQTITTVGLDIAKSVFQVHCVDAGGEVVLRRQLKRRYVLAFFQKLPPCLVGIEACASSHHWSRELQALGHTVRLMPPAYVKPYVKRHKNDAADAEAICEAVTRPNMRFVPTKTPEQQSCLTLHRTRHLFIRQQTAIINSIRACLAEFGIVAPVGRKGVEELLEVVANVEDTRLPEVARACVAALGAQLVALKVQILAFDRRIAAWHRSNETSKRLDAIPGVGPALATALVASIADPRAFRSGRDFAAWIGLVPKQNSSGGKEKLGSITKRGDRYLRSLFTTGALAVIRYAKLHGTQHRPWLTALLVRRPTKVAAIALANKIARMAWAMMAKGERYKEPAALAA

SEQ ID NO: 373675 - protein, 418 aa, unidentified
MNQHIAEPGLLIGMDWADQKHDIYVIDRNGKGFHQQLEHSAESIDAWVGEMLKLAGGRPIAIMLEQSRGALIYSLMFRENVLLYPVNPKQLARYRESYPGGGKNDPTDAKYLARMLHERITTLKAWQPDDENTRLIAHLSQQRRKIVDGQTKLRQQLKALLKSYFPVVLELFGKQCQLPLLLSVLCRWPDPRQLRRADRRLIRRVLSDHSLRSEQQQEIIERVRAAQLLTRDDALITPSAMAVKLLANQIQQAQQTIEEFEAAIDEAMQQHPDAHLFMNLRGAGKALAPRLLCAFGSQRDRWEDAESLASFSGIAPVTFKSGKSRGVYRRFACSKYLRQTFHEFVECARRFCPWSKARYRLLRDRGMKHHAALRKIARSWIRILFRVWKTRVPFDCDRYIANLRQRCPEIIPYLAQEN

SEQ ID NO: 373676 - protein, 465 aa, unidentified
MSKAKKRASKKPGKKNKKKDVLEGLPPLNLNAAGIDVGNAEHTVAVPPGRDPQPVRTFGSFTADVHRMGRWLKACGVDTVVMQATGVYWVGLYQILEMYGLEVKVVNARYTKTLPGRKTDVQECQWLQKLHTFGLLNNSFLPDEQTRVLRTYLRQRENLVAAAGTCMQHIQKALTEMNVQLANVISDLSGVTGMAILRALVGGERNPQRLAELKNERIQASRKEIARSLEGNWREELLFVVEQSLQMYDTYHQKIVACDGRIEAHLKSMGAKVDVVGQPIPEPRRVKWPRKHQPQYDLRGELYRVTGVDLTQTDGLDVGTVQTVISEVGVDMSPWKTEHHFSSWLGLSPDNRISGGKVLKRGTRKVVNRAATALRLAAWSLLRSQSALGANFRRLRARLGAPKAITAMAHKLARLIYRMLKYGKEYVDKGMAYYEEKYRQQQLKWLTKQAAALNLQLVPATAVVP

SEQ ID NO: 373677 - protein, 343 aa, unidentified
MQVTTIGLDLAKHWFQIHGIDARGVVAVRRKLRRGELLTFFQSLQPCLIGMEACATAHHWARELSALGHEVKLMPPAYVKAYVKRNKNDAADAEAICEAVTRPSMRFVPIKDAEQQSVLMLHRARSLLVRQRTMLVNALRAHMAEFGIVAPQGLRHVEMLTKTITHQQERLPELARSILQTIADQLNGTMARIQEIEGRLVRWHRQSRVSRLVATVPGVGIMGASAIAATVPNPSLFRSGREFAAWLGMTPRQNSSGGKERLGRTSKRGNKYIRSLLTAGAVAVLRHARNRPTRDGAWVRALLARKPTKVAAVALANKTARIVWAVMVREAGYQPHEVFRQPA

SEQ ID NO: 373678 - protein, 369 aa, unidentified
MKKTIKYIGLDVHKKSISIGIADEGRDGEVRYYGKIDNDMNQLDKVIRKLISKGAVLKFVYEAGPCGYAIYRYLTNNDIDCVVIAPSKIPQQSGDRLKNDKRDCLSLARLHRAGELTVVYVPTEDDEALRDLVRAREDAIHALRVAKQQLGAFLLRHDIVYSGKSKWSKAHFNWLTEIAMPHPAQQIVFQEYIDTVADCSNRVQRLTEQVRQQSKQSKQHELIQSLQSMRGISLIVAATIAAELGDLTRFENPGKLMAFLGLIPSEHSSGERVSKGSITKTGNRHVRKALIAAAHAYRFPARKSRAISKRQENLSKEVTDISWKAQCRLCTRYQFLIAKGKNSNVTKTAIAREIAGFSWAIAQELSKAA

SEQ ID NO: 373679 - protein, 344 aa, unidentified
MNVTPFVVGVDIAKRVFQVHEVNGATGEIHRLQLKRPQFLEYFANHVRCVVGMEACGGAHHWARQLVAMGHAVKLLPPHKVRPFAVGNKNDVADAQAIWTATQQPGMRTVAIKTESQQAVLALHRVREQCVKWRTAQINALRGLLNEFGEVMPTGRLSAMKAIPDVLGRLQERLPSALIDTLREQYQRLGDLDGEVRVIEQRLKQYYDIEPECARIGAMPGIGLLTATAIVATMGDPMAFRSGRAFAAWLGLVPRQVGTGGKVKLLGISKRGDTYLRALLIQGARAVLIRTKTPSTWLTQLRQRRPSNVVAVALANKMARTLWALMAHQRTYQKDYANPPPAGA

SEQ ID NO: 373680 - protein, 416 aa, unidentified
MKKHNNSGKKSEPTSKGTKSGGPVQRDTKEVLAELVGKLKAKLDPTKVAATSAGEKHQRGELRPNLDRLTVGVDLGDQWSHYCILGLEGERLAEGQLRTTQEDLATFFQGLNEARVVVEVGTHSAWVQEVIRGCGHEVLVANPRLMDGSKRRKRKNDRIDANKLARLGRVDPESLYPIQHRSREVRQDLVMLRARDALVAARTEIINTTRGLVKSMGTRLPKCSSRSFAQKGEEAVAVEMREALLPLVRLAATLSADIKEYDKKIEELGREKYGHTALLRQVKGVGPITALAYVLTLENPQRFTKSRDVGPYLGLVPKQEDSGESQPQLGISKAGDTMVRKLLVGSAQYILGPFGPDTDLRRYGLRLCERGGKNAKKRAAVAVARKLAVLLHRLWVSGEVYEPLHYAMSAPIVAAA

SEQ ID NO: 373681 - protein, 309 aa, unidentified
MNTEVTVYCGIDVSKEHLDARINGKTIRFSNTVKGAGRIMDRAGEVHFVFESTGGYERMAAWMMMAAGKRVSIVNPGRVRHFALSMGQLAKTDSIDARIITEFAGEAKPEPAQKPSKLQRTLTALVDRRQQLVDMRTAETNRLDTAGDPIYRKLINRHLKWMEKEISHLEKEIQTTIAQDEKMTEKVQSIRRIKGLGTVCTSTLLAHLPEIGTLSRQEIAALAGVAPYNRDSGKTSFRRHICGGRKRLRACLYMAAVCAIRHNDHMKKFYTRLVEENHRPPKVALVAVMRKLLIAANSAAKNPEFVLVV

SEQ ID NO: 373682 - protein, 420 aa, unidentified
MKVVYQTCCGVDVHKSFLVATIIKTISGVEPSYQKKRFSTFNNSILQFKNWLIENQCRDVCMESTGKYWVPVFNLLEDDINVTIANPKWVKAVKGNKDDTKDSKWIGDLFRLGLVPGSYIPCKPIRILREFTRYRYKLTSCRTSEKNRYQNALTVCNVALDSVVSDIFGKSATSVIDYLIERSDNSINHEEIASRLLRSLKKKSGSVIESIEGYQMTDSQKYRMRLVRAHLDYITSTINDIDTMLDSLIAPYENAVQLLCTIPGVDRNSAITVISEIGTDMTPFSNSKRLCCWAGLTPGNNESAGKKKSVRITRAGVYLKPALVQVAHAAVKSDKSPYYKQKYERIMKRRGKKRAIIAIARMILTAIYQMLSTGEAWNPTDLYKIDIPEPLKEKQKEKAIKQAKKLLIREGILSESQLAS

SEQ ID NO: 373683 - protein, 344 aa, unidentified
MPIITVGIDLAKAVFAVHGVDEAGKASLVKPKVARDQLVPLIAQLPPCLIGMEACSGAHHWARVFAEHGHTVKLMAPKLVSPYRMSGKRGKNDAADAAAICEAVTRPSMRFVPVKDEHQQATLCLHRTRQGFIEERTSTYNRLRGLLSEFGVVMPQSPERLRKEIGPCLDSLPGWARRCMSELLEHTSHIEDRLVELDRAINQIAREDDRSRRLLQLRGVGSTTASALVASIGDGHDFRNGRQVAAWLGLTPSQYSSGGKQRLGSITKAGDAYLRSLLVLGARSVMANLGNKQDPLSRWIRNLMERRGYWRAAVAIAAKNARMAWAVLHYGDTFKPEQAEPTGA

SEQ ID NO: 373684 - protein, 420 aa, unidentified
MEQRITYVGLDVHKDTIAVALAEAGKRGEVREYGKIANTASALQSLVSKLARGGHRLRFCYEAGPCGYGIQRQLNTAEQECVVVAPSLIPRKPGERIKTDRRDAVKLARSHRAGELTPVWIPDQAHEAMRDLVRSRTAAVRALRQARQQLSSFLLRHGHHYRRTPWTQPHRRWLAGIKFEQTVHYIVLEDLIATVEAATTRRDRLEQHIEATLPDWSLAPVVHALQSLRGLRLVAAAVLVAELGDITRFDSPRQLMAYLGLVPSEASSGSKRRQGGITKAGNGAARRVLIEAAWTYRFPARISRELLLRQERLAKPIRDIAWKAQESAVPAVPQAHLGPEGNLRCDSGDRPRTGGLRLGDRTTGAAERQLIGRQSSGSYITTREPEQPRDDIQSWAGLAARSRSENPRGYYQPELSDAGH

SEQ ID NO: 373685 - protein, 355 aa, unidentified
MATSGDFSMATDILATPHGEVVDDGEFPATSAGMARAIEWAGRRTGGDLEVLWVIECAATYGAQLARAVSAAGYQVVEAARMNAKANRGIGKSDPLDARRIAAAVLPVQVDRQRHLRKDDGVRAGLRILMAARDHMTSERTATINALTALLRVLDLGIDARKPLTGKQIAEIAKWRTRTEDIQAVMARAEAVRLAKRTLDLDDELAANVKTTTALLKDSPARVLLDKPGIGPVTAAVALTAWSHVGRLHSEAAFASLAGVSPIPASSGNTVRHRLNRGGDRRLNKALHMAVIVRMTHDAGTKAYVERRVAEGLTKREIRRVLKRYLARQIHRALTAASRADDIAEDTIAGTPLSD

SEQ ID NO: 373686 - protein, 376 aa, unidentified
MQDSTFIGLDVHKATISVAVAQGERGGEVRHWGTVPHRPDHVRKLVEKLSASGARLHLCYEAGPCGYGLYRQLVEMGHDCIVVAPSLIPMKTGDRVKTDRRDAVMLAKLHRAGELTAVWVPDAAHEAMRDLVRARATAMRVTGKARQHLQGFLLRHGRIYPGKKGWTGAYRRWLAMVRFMHPAQQIVLQDYIDAVADAEARVERLTGQIADLLPTWSLAPVVDAVQAMRGVGFIVAVTVVAEVGDFQRFDNPRQLMAYLGLTPSEHSSGASVRRGGITKAGSGLARRALIEGAWSYRMQARVSPKLHARLEALPKSARDIAWKGQLRMCQRYRHLVAAGKAKVVVVTAIAREMVGFLWAIAKAVAVPPGNTEVREG

SEQ ID NO: 373687 - protein, 391 aa, unidentified
MIYVGIDVAKDKHDCFITNSDGEVLFKSFTIPNNREGFETLFQKVQSVSDDLTKVKVGLEATGHYSYNLLGFLLDKGLPTYVINPLHTNLYRKSLSLRKTKTDKVDAHTIASMIMSDVNLKSYSDTSYHNETLKSLTRYRFNKVQERAKLKVSVSRLVCILFPELEKLVSHLHLASVYALLSEFPSAHAIASAHLTKLTHLLSENSHGRYGKDTAVMFREAARNSIGSNMPTKSLELKHTIKLIHELTSEIDEIETEIKKIMDEINSPILSIPGISYSMGAMIIAEIGDFNRFGSSDKILAYSGFSPSIYQSGQLDGAYSHMEKRGSKYLRYALYNATKYVCHWDPTFAGYLAKKRSEGKHYNVAISHAVKKLVRVIYHLEKTNQQYIKAT

SEQ ID NO: 373688 - protein, 423 aa, unidentified
MRFIGLDVHRDFCEVAIAEEGGVRLAGRVQTEPAALTLFAQSLGSDDEVALEATGNALGIARLIEPHVGRVVLANPKAVKGITRAGAKTDKIDARTLAMLLAGGFLPAVWLPDEQTRILRRRISARAQLVRQRTRAKNQVHATLIRNLKGKPPVSDLFGARGRRWLAAQALPPDEQETIAACLRQIEFLDGEIALIERVLAKQVLASAEMRRLLTLPGVNFVTAAALLAAIGDIGRFPTARRLVSYLGLDPRVRQSGTEPARHGRISKQGPGETRHVLVEAAWHATRTPGPLRAFHQRIAARRGGNIATVAVARKLAVIAWHMLSRGEDYAFARPSLTREKIRKLELATGAERQKGKRIGVFATREQHQLDKELAAQAELAYRRLVQDWQPAIKGTGAAPGRASRRPSSGQAARQETAPPPAL

SEQ ID NO: 373689 - protein, 410 aa, unidentified
MEPILMSCAGMDVHEKKVDVCIAHGPFDKPPKFEIRTFSTMTSDLEDLMAWLKKYDVTTIGMESTGIYWKPIFNVMEGQFEIVLANAQRLKAIPRKKTDIMDCKRIANLLRYGLLPNSFIPPKEIRELRDLNRTRRKLVGMMTSEKNRLVKVLESANIKLSSVVTKIYGVSSLALIRSLLEKNKLSREDISKMAKGKLKKKVDLLEKAVNGKLTDHHRFLLEMHLQNIDHLAKQIKKLDEEIEKKMVPFQKESNLIQTIPGISEVSASAILAEIGADMSQFPDEAHLSSWAGVCPGNNESAGKKKSRKTQKGSSFLKGALNEAAWAASKTKNTSYNAFYHNLVRRKGKKKALVALAHRMLIDIYFVIKTGEPYQDIGAEAIHERTSKRKERSMIKSLEKAGYSVTKAATA

SEQ ID NO: 373690 - protein, 388 aa, unidentified
MQVVADQAAAPTAIQTDLRAIFVSLELSRSTWLITSLSPGGGEKLSKHSVRGSDVAGLLKRFADLKEKARARMGEVFPLIVIQEAGLDGFWIHRVLQSEGIESHVVDPASIATSRRRRRAKTDRIDGEALVRALLAYKRGEPRVCAMVKAPTPEEEDSRRLCRERKVLTAERVLHVNRIKGLLFCQGIPGYEPLRRDRHDRLEELQTGDGRLLPQHLKAQVNRELDRLELLLKQIKAVEAERDALLVAAHTPAAAAAAMLLNIRGIGPEFAAVLWSEALFRHFDNRRQVAAYAGLAPTPWQSGAVDREQGVSKAGNPRLRTTLIQLAWLWLRNQPHSALTLWFHERVSRNGGRLRKTTIVALARKLLVALWKYVTAGVVIEGAAMTAA

SEQ ID NO: 373691 - protein, 342 aa, unidentified
MEKVSIIGLDLAKRSFQAHGARAEGGVAFRKKLSREKVLTFLAEQPRCVVAMEACGSAHHWGRTIRDLGHEVRLIPPAYVKPFVKRQKNDAADAEAIVEAASRPTMRFVAVKTEEQQARAMLFRTRDLLVRQRTQLINALRGHLSEHGVVAAQGPANVKVLEEAVEDQGTSLPLLVMELARVFLDQIEGLSKRISGLEKVTAHEAACGETTRRLQTMPGVGPITALAVETFAPPMDVFKCGRDFAAWLGLVPRQHSTGGKQVLGKISKMGQRDIRRLLIIGAMAVVRSVLRKGSPEGSWLQRMLARKPRMLVAIALANKMARSIWAMLAKAEDYRVPMAAAA

SEQ ID NO: 373692 - protein, 338 aa, unidentified
MGSYVGIDLHRRRSVVVVLNEDGDRVSWCRIDNTAANLAAEIVSAGGSEAEVAMEACWGWYWAADVIAECGARLHLAHPLGIAGYENRRVKNDIRDATLLADLLRLGRLPEAWVAPPEVRELREAVRYRAKLSRLRSGLKQQVHQTLGKEGVIPEVDSIWRGGGQRWLDELRLGDVYVDPIESLRDLIELYDREIRQCDGRIHRRLKGHPGYEAIQALRGVGPVLAAVFVAEIGDVGRFDNPRRLCSWAGLTPRLRESDAHSHRGHITKMECGGAGLARRFCLSFGGDCDDRWRYRHPSGPADLRLCRSGHGRGPRRAGDAGAPRPVARLVGAVPRGR

SEQ ID NO: 373693 - protein, 356 aa, unidentified
MEKSITSDTGITIGLDVSDRFSEAYAIDDRGAWVESWRMATKQEALRGSLARYPGARVVLEVGCHSPWISRQLKAEGFEVIVANSRRVRLIAESDKKSDRCDAEQLARLGRLDPGLLSPIVHRGERAQRDRVLLRARDGLVRARTLLINQVRGFAKSLGRRIPSSSCETFPKRVRDAVGEDLFPGLGTMLAMIEQLTGEIRSMDRAVERLCQEGYAETGALRQIPGIGPLTALAFVLTLEDPRRFGKSRDVGAYLGLRPRLRDSGGQHPQLRITKTGDALLRRLLVTSAQYILGPFGPDTDLRRFGLRLAERGGKSAKKRAVVAVARKLAVLLHRLWITGEEYQRLGYRAAGRHAA

SEQ ID NO: 373694 - protein, 344 aa, unidentified
MKITRVGVDLAKNVFQVHGVNAHGKCVWKRRLKRATWLRVFTETVEPGCEVGMEACGGAHHWARELRARGYEVKLIPPQFVKPYVKSQKDDAADAAAICEAMSRPDMRFVPVKTLEQHDIQAVHRVRSSVMGQRTAASNQIRGLVAEYGLVAPKQVGPLRTAIPCWLEDAENGLTDRFRALLQGLWHELLMLDERIKVLDVEIEQLCNTHAVASRLKKQLRGVGPLVATGLIARIGDGRQFKRGRQASASIGVTPRHHGTGGKNRIYGISKVGDRYLRCILIHGARAVVAQAKHRDDPLSLWVTDIAERTHPNVAAVALANKTVRIAWAMIRNGTDYDPEFAMN

SEQ ID NO: 373695 - protein, 403 aa, unidentified
MARYHVGIDVGKYKHHACVHDTVEDRYTKVFSFAVDRQGFERLVLFLERRGRKEELLAGVEASGPYALTIGHFLLEQGYTVVEVNPFQASQFRKAQGRKAKTDRVDARSLAAFLAVGSYKPLALGDPLRENLQELTRFRADLVKDRTCQVNRLQETLAVAFPELGSHLASLDSPTALALLVAYPGPQALAEAGVKAVSASLREASHGRIGSAQAEAIVTAAATTVGLLQRQRALALKLEVLAEGILSVYAQLQRVEAAIEELFRQLPYDPSDFPVGSVQSLASILAEIDDIHRFSTLKQFLSHFGWCPQTFQTGGFRMDHPRMSHAGNRYVRRMVWMLAVLAVKTVPAYRDYLQRRTAAGKKKMHSIVAVGRKLLSVIYAVLKTRRPYTLNQEVPRTLAPARP

SEQ ID NO: 373696 - protein, 346 aa, unidentified
MEHYVGLDISLKLTAICIVDRTGKIEREGVVASDPEAIAVFIKSHAPHVARIGLETGPTSTWLWTELNKMGLPVICIDARHAKAALKLQINKSDRNDAVGIARIMQCGWYKEVRVKDLDSHAIKALLVSRALLVKIKRDLENQIRGLLKNLGLVIGQAKMNVFSVRAAELAEARPELAAAVEPLLKAREAVGRQIADLDRKVMRLARNDVQVRRFMTAPGVGPITALCFLATIDDPTRFKRSRSVGAYAGLTTRRYASGEIDWTGRISKCGDKMLRSYLYEAANVLLTRVAKWSALKAWGVRLAKRSGLRKAKVAVARKLAVILHRMWIEGTEFNWSSKEAANQPA

SEQ ID NO: 373697 - protein, 394 aa, unidentified
MILVGIDIGKNKHTFSIIDKNSGEILLSPSDFSNNLKGFLFLIQKLSSYTKSKLLIGMEDTGHYHFALLKYLLDRRYTVALINPTTTDLTRKLQGGITKNDPLDSLTICDVISSNHRNKPYRVTTLNRFDLYEQKQLTRHHHNLKEELNTYKNRLQKCIDIVFPEFNSLFHSKYGIVYMNILKIFSSAKAIANADIRSIRKCFEFKGQGKRISLSAEQLKLTAKSSIGIPSVAEEIQIRHLVSQIELLEKQLSEIDKRIEEFSLKNNSPILTIPGISHFSGTSIISELGDICNYTKASQIIKFAGVAPYHYESSQFTAQHTAITKKGSKYLRKTLYQIILPVISNNEVFYAYYTKKLNEGKGHRCAQGHCIRKLLRVIYHLLSTRQPFNPKLLV

SEQ ID NO: 373698 - protein, 336 aa, unidentified
MSERENKKACIGIDVSKGSSHFQAFYSAGVPASEPTYIEHTKRGFSHLYSIVSDLEKELGYAPYVIFENTGTYSKPVEVFCQRNNLRHYIIAPLLSAKMRKSEIRPTKTDKIDCATIANVYYLKRLRVAGKDNELYSELKYLCSYYNYITGIMVSMKVKYREYLDLVYPRIDTLFGVYTESFLKLMTRYPNPHKLNRKSKKDLASFFHKSDYCGLRKAERLAILVKSYFKETEIPVLENDILITLFSKHLKDLIKVMNENQEILDQIILLGMKTKEYPYLISIPGIQKNTAARIAAEIQGIERFESASKLCAYAGIDPTIHSSGKYDGQHLSITKK

SEQ ID NO: 373699 - protein, 341 aa, unidentified
MQVTTIGLDIAKNVFQVHGIDAAEKVVIRKQLRRAQVLKFFAALPPCLVGMEACATAHYWARELTRLGHQVRLMPAKDVKAYVKRNKNDAADAEAICEAVRRPTMRFVGAKSAAQQGRLMQHRARDLLMRQRTQVINALRAHLAELGIVAAQGREGLKQLLVIIADEKDDRLPIDARASLIVLAAQLQALQTMIGAIEKRLHVQHRANEASQRLESVPGIGIIGASAIAATVTDPNAFRSGRDFAAWIGLVPRQDSTGGKQKLGPISKQGDRYLRRILVVGAHSMLRRAKQNPEKYPWLTQLLARRPFKVVAIALANKMARIAWALLARGGTYRAPLLAAA

SEQ ID NO: 373700 - protein, 425 aa, unidentified
MKVSQIKQEINSEKVLDVAFDVGKDKLNPVFEMGQLRYADDCGNRSNPINTKLKEIMQIAREHGYETLRILCEPSGGYEKVLLRIAHQLHCRTAYVSGEASSKFRMVVHGDPGKSDERDSQPLLAIASQGKLLTHRVLPAEYELLRELNREYNWVSNSRVAVRCEIHTLLVRLFPDLPVGSDFLYEPSGRALAREYGWNPRRIVDAGPGQLEQCLKTACRFVRRQTIAKIWQAAWQSTQYHEDESGILDYVTERLQRRYEEIERLDQQRQALCSRLEEVYLRLREKDPKLPRAVAGVVKLYMLARIVGETGPLSDFQSIRQLYRFAGLNLCERKSGKYEGKTKISRKGRVSLRRILGRAVLPLIHKGGLYDAWYHLPEGKTKKGKSLAALMRKFLKLLFGWSRSGGEFDFKRVFTSASEYGVHAA

SEQ ID NO: 373701 - protein, 407 aa, unidentified
MDVIYPRCAGLDVHKQTVVACARIAGDGPLAQQVRTFETTTSGLLALGDWLESLGVEHVAMEATGVYWKPVWHILEGRFELILANAAHVKNVPGRKTDVNDATWLADLLAHGLIRASFVPPVAVQELRTLTRTRKQFVRERASHVQRIEKVLEDANLKLSVVLSDILGKAGRAVLQAIIDGHSKPEQLAACVTTRVKASPEELLEALRGRIRKHHRFMLKLHLGHIDALDKAITDIEKEVGLGLEPFRAAARLLTTMPGISHVAADALIAEIGIDMSRFATPGHLLSWACLCPRNDESAGKRRSTRLRRGGKWLKTTLVQAAWAAVRVQGGYLQAQFHRIRARRGAKKAIIAVAASMLTAAWHMLKDGTEWQDLGAAHFDKADAAKTANRLIRRLQQIGYQVTAVPG

SEQ ID NO: 373702 - protein, 316 aa, unidentified
MSDALYVGIDVAKDSFDVASDPAGLTLSLPNDPTGRQQLLKALRNHTVALIVMEATGGYERALVADLLGAGHKVVVANPRQVRDFARGIGQLAKTDRIDARVLARFASMVKPEPRQKASEQAVILAELVTRRRQLSNLMTQESNRLPHARHPDVRRSLKKSLRALERQIDNLDKIIRQNIDSDDGLRRKDEIVQSFKGVGPGTSAMLLSHLPELGRINRQQIAALAGLAPWDFKSGKWAGQSKIWGGRMPVRNMLYMAALSAIRWNKVISKFYQRLESQGKKFKVAITACMRKILVILNTLVRNDCLWSPPLQENA

SEQ ID NO: 373703 - protein, 371 aa, unidentified
MKKSSMFIGLDVHKNSIEIAIAEEGRTGEIRHYGKIDGSLVALDKVVRKLVSRGCELHFVYEAGPCGYDVYRHLTFQGFDCVVVAPSKIPKKSGDRIKNDRRDAQMLARLHRAGELSPVFVPLTEDEAMRDLTRSREDAKASEKKAKQHILAFLLRHGHRFSGRTPWSQAHMRWIAGIKMPHPAQQITLQEYVGALTESTRRVERLTEQIQQLLPQWRMFPVAKAYQSLRGVSLIVAATTVAEIGDLKRFKSPVELMSYLGLVPSEHSSGETTKRGSITKAGNGHVRRVLVEASWAYRLPARVSRELRRRQEGLSQAICDISWKAQLRLCARYKRMLAKGKSKQVIVTAIARELCAFMWAIAHEVEIPAMA

SEQ ID NO: 373704 - protein, 312 aa, unidentified
MTQYTIGVDISKAHLDAHRFPDGLARQFTNDRSGFNAMVKWLSKLDIERIVYEPTGAYHRCFEDALAQADLPLAKVNPLQARRFAQARGTRAKTDEVDAEVLAHMGVALQPRICAVPSKTSRDLKELQITRQALIKERTAAKNRSKSLQVPMLIKQNSAQLSQIAKNLKAIEQAMLALINEHKKTAQAFVILCSIPGISKITAASLLVEIPELGTLEQKAVASLAGLAPFARESGKFKGKRFIGAGRKFLRDALYMPALVACKFNPDMKVVYERLKANGKPPKVAITAVMRKLIILANTLIKDNREWVQIRP

SEQ ID NO: 373705 - protein, 346 aa, unidentified
MTIVEDTRAITGGVDTDSEVHVAAALDPVGGLLGTREFPATAAGYAGLPGWLGEFGDVALVGVEGTGSYGAGLARYLAARGVRVVEAARAGRQDRHRKGKSDPLDAVSAARAAQSGRASGVPKGRDGAVEAIRALMADGRSARGERTQAVNQARALILTGPDELRARFAGKRAAALAEAVAALRPRPGDAAGYAVRTALRELGRRVEFPGAQIERLDDLIVPLVTVRAPGLLSLYGVGPDTAAMLLITAGDHPERLRSEAAWAHMCAVAPIPASSGKTRRHRLNRGGNREANHALRRIVITRMSAHPATRAYIQRRTAEGLSKKDIIRCLKRYVAREVYPCPRAGS

SEQ ID NO: 373706 - protein, 402 aa, unidentified
MKEFNSEAVRYETSSALKTVMQAQAGHQYPAYIGLDVHKETIAVAVARAGREAPESRGEIANKPQAVAKLVDRLNREFTGEVLLFCYEAGPCGYGLYRQLLELGQDCQVVAPSLIPKKPGEHIKTDRRDACKLAQALRSGDLTAVWVPGEEQEAMRDLTRARDDLKAQERKARQQLNAYVLRHGHAWPSNKTRWTKTHYHWLESLRFSHDWQQVVLQEYIDAAKAASQRVADITAQMERVLPQWSLAPVVDSLVALRGIDKLAAMVLLAELGDISRFDSPKQLMAYLGLVPSEHSSGGRRRLGAITKTGNRHARRMLVESAWSYRFPARQTAHLKRKAANASDEAKVIAWRAQKRLCGRYRTLLQAGKNTKQTTVAIARELTGFIWDIVCHEMPKIQPQVAR

SEQ ID NO: 373707 - protein, 412 aa, unidentified
MEVVYPCCCGLDVHKKSITACVLWAQGKGKSRKEKKRFGTFTHDLLQLADWLGQCGVTHVAMESTGVYWKPVWNILAEQFEVLLVNAQHIKAVPGRKTDQKDSEWIADLLQHGLLRGSFVPPRPTRELRDLTRYRVSLVQEINRIANRIQKVLEDANIKVASVATDALGASGRAMLEAMLAGEQDAARLAELSKGLLRNKIPELKLALQGRMTEHHRFLLRQLFDHLCFTESKLHEIEQEIDRRMLPFADEVIRLCTIPGVDRVTAWGMLAEMGMNMNQFPSSGHLASWACLCPGSFESAGKRLSGKMRKGNVSLRRCLSQAAWAISMMKNNYLSALYRRIAARRGAKRAVMAVAHALLVIAFHMLKRKENYHELGADHFDRIDISRVQRSLVRRLERLGHKVTLEPLAQTA

SEQ ID NO: 373708 - protein, 357 aa, unidentified
MRLKGGTVQTIYIGVDFHARQQTICYLTTDSGELLFHQLKHEDKALVRAFYAQFSGHVIVGLEASGYSPWFERLLEELGCEVWLGHATEIRRRARWRHKNDRRDAELILDLMVHDEFPRLYLPPLQSREVLRMLRYRQKLIKMRTIGKNSLQALALQSGLAKGPHLFTKAGLQELRSATMSPAMQWQREQWLQLLEPLNERLLETMRWLQQQSQADQRISRLRTHPGVGLLTALCLVHSLEPVRRFANTRKVTAYAGLDPVERSSAERQRFLGISKGGSRVLRFLLVEAAHTAIRKDADLKRFYQRLAQRHGRPKAKVAVSRKLLIRAYIMLRDEIDYAEFQRRAVAARPVLPAHGL

SEQ ID NO: 373709 - protein, 367 aa, unidentified
MKKLYIGLDTHKENIVIAVARAGRDAPEIYGKVSADLERFTTALRKLLKKYDVKKEDVSICYEAGPTGFVLARRLLQLKFECHVIVPTSIPKNGDRIKTDRRDAKNMARLLRSGDLKFVHIPSSLDEVMRDVSRARTDIVNARKQAKQQLGGFLLRNGYHYTGRSRWSVAHMRYLRKLILPSPAQNLVLEESLQRIDMLVDQEKRISDKMEELTQDWYRKPLLDALMGFRGFRLISATSVISELGDLRRFSHPRQLMSYIGVVPSENSTGTKRRQGGITKCGNTHVRWMLVEIINSYRLPPKISRELDKRQEGLSREVKGISWRAQNRLCKKYHHLLRRGLPQNKIKVAIARELLGFIWELGQVVEV

SEQ ID NO: 373710 - protein, 327 aa, unidentified
MTQAAIGIDISKDTFDVVFLVEGKGDHEIFENKQPGFRSLSRWLEKHKAGQAHACMEATGQYGDGLAEYLYQEGYLVSVVNPARIKAYGNSKLRRNKTDKADAALIAEYCLREQPALWSPPPASFKELQELVRRLDDLQANIQAENNRLKSGVTSLVVLEELRNHIAYLSQQIQHIKQAIQEHIQAYPELKQRQKLLMSIPGIGQLTASKILGEIRDVCDFDSARQLAAYAGVTPRNIISGTSVHKKARLSKTGNANLRKALYMPAISAKNHNPIVIVFCQRLLKAGLRPMEVIGAVMHKLLHLVYGILKSGLPFDPDFLKKRTFAT

SEQ ID NO: 373711 - protein, 421 aa, unidentified
MRKRVYKATAINQVNWKRLSNLVLGKRIVFGIDVAKEDFFGVFKDESQSILMVIKWKSPRDVPQLLNCLSSLPAKGVEIAMEPSGTYGDALVHHLTKEGFSVNLVSPKRCKDACEVYDGVPSSHDAKSAAIIAKLHLDGKSGPWPQKGKDEKKLAASVELMAMHRESLSRNTNRLEAKLAKYWPEVTRLLDLDSATLLKTLIAFGGPEKIAKKPDEARKVIRKVGGIWLSKDKCEAVIASAEHTIGVPMIEEELKAMQMFAEEIYRNRQNVRKFNAAVEKLVEKDERLGHLSKAVGKATAAVLMVKLGHSSNYDSASAYQKAAGLNLKEKSSGKHKGQLKITKRGSGDVRRYLYLTAIRLPQTDPVIKSWYMKKVDSHPGRSRNVAVVAVMRKLIKALWHVGKGAEFDSSLLFDVKQLDPA

SEQ ID NO: 373712 - protein, 408 aa, unidentified
MEVVHPRCAGLDVHKRIIVACRLTQGPRGHPVREVESFRTTTRGLLELSDWLAAVGISVVAMESTGSFWKPVYNVLEGSFELLVVNAQRLKVVPGRKTDVRDAEWIADLLRHGLLRPSFIPERPERELRELTRYRTTLLQQRTAEVNRIQKVLEGANIKLASVASDVVGTSGRAMLEALVGGEADPEMMAALARGRLRDKHDALLEALEGRIGPHQRFLLAALLRHLDAIDGLVAEVSAEVEARLRPFEAEIVRLQTIPGVGRRTAETILSEVGPDMSRFPSSRHLASWAGLCPGSHESAGKSRSGRARKGSPWLRSMLVEAAKAAGRSQTYLGAVHQRLAARRGAKRATFAVAHNLLVIAYYVLSRGTTFRDLGPTHFDERDRERTIHRLTRRLEALGYQVAMTSVG

SEQ ID NO: 373713 - protein, 365 aa, unidentified
MEYYTAIGIDVSDKTSKICVMAKIAGERRIVEETTVATTKEAFSEYLATKDRKAAVTFETGAHCRWMAQLIRSMGFKVNVANPAKLRALTHSNSKNDRNDARELARYTLADVEMLHPVFFRPETHQQMIRLLEARLALVTTRTKLINEMRGFAKSMGFRIPKKDAAYFHLIDRTGWPRDLEAVCWPLMGVLKTIHMKIAAIEKQMRELADTPEFAADVERVRQVVGVGFLCSVAYVAVLGGNYARFAKARDVGPYLGLVPRQDQSGDIDKQLPITKAGSTLLRALLTEAAQVALRDGIRMTDLKLKGLRIAERGGKNARKRAVTATVRGLAVTMMALLKHPEREYMPLSDANQKVVEQMAAFKAE

SEQ ID NO: 373714 - protein, 353 aa, unidentified
MDTMTTVAIDLAKDVFEVALANRAGRIVERKRMTRRPFEQFLEALTPGTEVVMEACGTAHYWGRRCQGRGLSVRLLPPHYVRPYVRRNKTDRTDTEALLEADRCGALKPVAVKTVEQQTLLALHRVRSQWQAARVAQINMVRGLLREQGLPIPLGASTVLKRVAGILDDAETTLPALLRSTVRLLVEEIRALEDRIALIDQQLAQVARTNAVAVRLQQIPGVGVLTATAMLGAVPHIHAFRRGREFASWLGLTPREHSTGGRRLLGGISKRGDGYLRCLLTHGARVVLYTAQKRVRVAPERATAFQRWAAALAARRGPNKAAIAVANKLARIIWAVWHHDEDFRHAPGGAVAA

SEQ ID NO: 373715 - protein, 426 aa, unidentified
MAYRIAAVDVHKKMLAVVADVAEEGEYRFERRKFGATPDQLHLLAQWLVQREVEEVVMESTAQYWKPVWGALELYWRPARQQRDGATKMCGTLHLCQAKSNRGARGRKNDFADGERMIRRLVAQELVLSFVPDPEQRLWRAVTRRKYQLTRDKVRFTGQLESLLEQAHIKLSSLVSDLLGVSARRMLKALAEGETDPSALAALADHRLHATPEQLRDALGACAQLHAVYRRLPKMALEELQLMQDQIEKLEREAADLLRQHQDAVERVAEVPGFGADSALQMIAEVGPEAAAFASAKDLSSWVGVIPGDEESAGKPHSTRSPKGNKHMRRLLNQAAQAAVKTKGSIFEVTFRRLLPRLGYKQAIWAIAHRLCRLLWLIPHKRVHYQERGPAVSAKSRRTRTARMIKELRKLGYRIEGGLLPEGTPA

SEQ ID NO: 373716 - protein, 342 aa, unidentified
MQITTIGLDIAKNVFQVHGIDAKEKVVVRKQLRRNKVMGFFKALSPCLIGMEACATAHYWARELTKLGHEVRLMPPKDVKAYLKRNKNDAADAAAICEAVRRPTMRFVRVKSEEQQGQLMQHRTRDLLMRQRTQLINALRGHLAEFGIVAAKGDGGLKELLAIVADDRDERLTSDARASVIVLAAQLEAAQTMLRSLDKRIMKQHRANEASRRLESIPGIGIIGASAIAATVSDPMVFRSGRDFAAWIGLVPRQDSTGGKQKLGAISKQGDRYLRRIIIIGAHAVLRRAKENPHKYPWLTRLLARRPFKVVAVALANKMARTAWALLAHGDTYRAPELVAAA

SEQ ID NO: 373717 - protein, 430 aa, unidentified
MLRTELTSTFTQYADGRTRLSKVFCGIDWAENHHDIALVDQDGTQLAKVRISDDSAGFHALLELLARHGDTPEHPIPVAIETPRGLLVACLRATGRKIYAINPLAAARYRDRSSVARAKSDAADARVLANILRTDMAAHRPLPADSELAQAVAVLARAHQDAIWDKTQMANRLRSHLREYYPAALASFHGNGTLGLDSAHARAVLAAAPTPAAAARLTRSQLQALLKRAGRLRRGIEAEAERLREVFRKKHLHQLPQVEQAMGKQTQALVQQLDAACRSVDDLAAATEAAFLTHPDAEIITSFPGLSVMSGARVLAEVGDDRDRFADARALKAYAGAAPVTRASGRSHVVVARAVKNQRLASVGYMWAFAALRSAEPREHYDRRRAGSERHTAALRNLFNKLLGCLYHCLQNRTIYDPERAFPPPVTLAA

SEQ ID NO: 373718 - protein, 430 aa, unidentified
MSSIVQMSRRRQAVPDPVRGLVVGIDVSKGRIDWRACSLGLWGSPHRVAQGEPGFLRLEQHLLTAAEAGQEVWVALEPTGPYGLCLQQWLLERGWMVVLVNPFHVKRTREVHDHHPGKDDCKDPGVIADLVWQGSSRRVRRIGGPYAELRVGFGEWCSLAKRRTALRNEAQALLEVWFPELGRLFADPLSKSVQALIGRYDSPAALLQAGQRSLHATLTAGTHGQGGRYAEAIWRGAQASVAVRDGQESRVRALRDLLEQLTCVERQQECLRGDLARWLEQTEEGALLRRVPGVGLLTASGLLGECGPLAEFHSGRALEKFVGLNLYRISSGKRHGQVHLAKRGRAAVRALLLQLAVAQTRTGRLGHAWAQQRKAQGHSSRQTQVALARKMLALLYALARDRACFDVSRWSAEAKTADGEPTLQGAPPEA

SEQ ID NO: 373719 - protein, 438 aa, unidentified
MSNKVIFNLDELFISVGIDVGADFSWMSIALPNQQFVGKPYKILHNSIDSLTTAVSKIKEAEELYSLESRIFLETTGIYHYPLFCYLRDKGFNCSVINPIITKNSTNINIRKVHNDRFDSKKAALVGLKPDLKVSLMPSDLALNCRNLCREYYDLMDNRSAYVNKLQGELCMAFPQYLDIFSKVTINTSLTLLETYTSPSAFLEADRQEIIDIIRSTARFGLTYAQNKYNAIVQAATDANQFGYIINSNIKRIRLYISFIRKYDEEINRILESLHELVDANEDADFVKQIHLIETFKGAGFLSAVSIMGEIGDFSAFSKPKQLFAYFGLDPAVKQSGKFEGTKVQMSKRGSAIARRVIHTLTLQSISISRNGEAKNPVLREYYLKKCDSKPKLVAMGAVSHKVCNMIFAILRDNKPFKIIAPQEHIKQYNSAKCDIAA

SEQ ID NO: 373720 - protein, 387 aa, unidentified
MEARIVNTPSAALDNEPARCFFAIELSKTNWLVAAQGPAGNVSRYQLPGCDANALLELIERIRARVKRETGRPVEMVSCYEAGYDGFWLHRFLVARGVRNCVIDPASLQVDRRARRAKTDRIDAERMLRALIRYLRGEPDACSVVRVPSVEEEDAKRPHRERHRLVAERVQHVNRIKSLCALQGIYDYQPLRPDRMERLDHLRTGNGQALPVRLKAEIERELERLQLVLEMIVSLEAERNAITKDKAPTAHLHADKIRKLVRLKAIGLEFSTALVGEVFYRQFANRRQIGSYVGLTPSPFSSGAIARDQGISKAGNPKARTMMIELAWMWRRHQPGSALTVWFNERVGNLKGRPRRIAIVAMARKLLVALWRYLETGLVPTGAILKA

SEQ ID NO: 373721 - protein, 444 aa, unidentified
MKNKQVIALLNSSAYLSVGFDVAADFSWMSIALPNQTFVGKPFKVVHSDPQSRNLAIQKIKEAQEMYSLESRCFLESTGIYHIPLLCFLRDNGFDCNTINPIITKSSTNMNVRKLHNDRFDSKKIALVGLKADLKVSLLPEDDVIDLRNLVRDYYYFKDLQSAIVLKLTAELKMSFPEYCKVFSKVTTKCSLKLLETYPLASEILDAPKDEIIDLIHSTARFGEKYAIEKYNCLISAANDALVFGRSLPSNATRITTYVKMFKEYQTHLDEIMNSLHDCVDAMESSNKTVYDRIELLQSLRGIGFLSSVVLLAEMGSFDLFDSPKKLYAYFGMDPGVNDSGKLKGDRVHMSKRGSSLARRILHMVALNNLKVSKGSKIPVNPVIHEFYTLKCKTKKKNVAIGAVMHKVCNIIFAMLRDNKPYEMITPEEHRKQFDLLNRTTKAA

SEQ ID NO: 373722 - protein, 422 aa, unidentified
MKKRIYKATKVKKLNLGKLKKEVEGQNIIFSVDVAKEDFMATILGQDREVIITISWKHPFESQLILDVMLKELRWNSLEVAMEPSGTYGDSLRAQFQEQGISVFRVSPKRCHDASEVFDGVPSSHDAKAAAIIGWLHLQGSSEEWPMHGDDQRELAAAIKIMELHDDTYYRYVNRLEALTMRYWPELTQYLKLQSATLLELLMKYACPDDVVQDIEQAKLLMIKIGGSSLKVTKVEAVLESAKVSLGVKGIEAEKEQVKVLCCEIRRLQRLRRQAKDKIEELTHNIDSVREMAPVIGKVTAAILYTTLGNVKEYDNAGSVVKSLGLNLKERSSGKHKGLLRITKRGSGSARRFLYMAVLRLIHRNSIIKAWYQKKVIRDGGIKKKAIVAIMRKLASALWHVGKGSKFDAAKLFDVNRLVFER

SEQ ID NO: 373723 - protein, 418 aa, unidentified
MKKHSKSSQRSEPRLERTKARGPVQRDAKEVLAEVLGKLTGKLDMPAVSTSAKENRRGNTVGPNRDRLTVGVDLGDRWSQYCILGLAGETLAEGQLRTTQEDVREFFQALTVVRVVIEVGTHSAWVQDVITEWGHEVLVANPRLMESSKRRKRKSDRIDANKLARLGRVDPQSLYPIRHRSREVRQDLVVLRARDALVSVRTELINTARGLVKSMGTRLPQCSSPSFAEKVKDAIPIEVREALLPLVELVERVNDCISKYDQKIEELGREKYGHTTMLRQVKGVGPITSLAYVLTLEDPQRFASSREVGPYLGLVPKQEDSGDSQPQLGISKTGDRMLRRLLVGSSQYMLGAFGPDTDLRRYGLRLCERGGRNAKKRAVVAVARKLAVLLHHLWVTGDVYEPLHHTGAETKTAQATAA

SEQ ID NO: 373724 - protein, 382 aa, unidentified
MKKAITGVRRFVGLDVHADTISAAVAEKEAAVRDLGAIANREESVRKLAKRLTEGGPWAACYEAGPTGYALYWQLTKLGIPCMVIAPSLVPSRAGDRVKTDRRDAQRLACSFRAGELTPVWVPDAAHEALRDLVRAREAAKQDQLRARHRLGKFLLRHGKRPPQQMRAWTESYLQWIKGKVAFNQRAQQVTLEDYLNEVDHVGERISRLEKAIDEAVEQAPASMRELIQALQALRGVAKVGAVTIVAEVGSLTRFEHPRQLMGYSGAVSSENSSGAKIRRGGITKTGNAHLRRVIVEAAWSQRYKPVLSVAMRKRQEGLSAEVQELAAKARHRLHLRYVHLLGRGKTKQEVVTAVAREMLGFIWAIGVSVERAQVQRAKSAA

SEQ ID NO: 373725 - protein, 349 aa, unidentified
MPEPRLSYTGERVYVGIDVHKATYAVVCVCQQRIVKTATVPADPAQFAASVLRWFPGATLASAYEAGFSGFVLHRVLAAAGITNIVVHPASVAVAANDRVKTDRRDAKKLAVDLADGRLRGISIPTEAEELARLLPRTRAQIVEHRATIARQIKAKLYQFGLIPPASRRRISSRYLRELAACSLPAELHASLALLADQWRCATRQLLEVRRLLRDQATAQAELETVYRSAPGIGAVVARTLATELGDMSRFANERALFSYTGLTPSEYSSGASIRRGHISRQGASRLRHVLVETAWRALPRDPILQAIFDRIAATRGKQRAIVAIARRLIGRIRACFRHGTTYAVGTAG

SEQ ID NO: 373726 - protein, 356 aa, unidentified
MEEFSKNYFSEIDIFIGLDVHKKSWDASIYVEKIFFKSISISPPSTKILVDILQKNFPLGKYHVVYEAGFSGYWIYDQLTEAGIDCVVVSPADIPMSNKDKKFKTDRNDSKQLAQKLRAGLLEGIYIPGKIQREHRILLRYRDKLVRDRTRTKNYIKSNLMFFGKTLGIDYEDSKSWSNKFIQGLSKIEYLTTQGKDVIEKLIKMIKVYNEEIKKIDKEILELSKTEQYKHDVKILISVPGISILSAMIILIEIGDFKRFEDTNKLKSYVGLIPKEHSSGEKEIKTGITRRGNKFLKKIMIEVSWVAMRKDITLLSRYTKLTKRMKGSKAIIVIAGILLNRIRSIMRKGEQYNIAA

SEQ ID NO: 373727 - protein, 366 aa, unidentified
MGKSSTTFFGMDVHKESIELAIADEGEARHYARIGGDAVSVDRAVRKLRSVHRDLVFVYEAGPCGFWIYRRLRAQGLSCIVVSPSMTPRRAGDRVKTDRRDCLMLARLARAGELEPIYVPDARDEAMRDLVRAREDAVSMQRQARQRLQALLLRNEIRYVGKTTWTAAHRRWIAHLKLPYPAQQIAFEEYVQAVQEAGERLERLAASIAAELEHWRWRPVVQALQALRGIQVIHAVRLLAEIGDFARFEAPRKLMGYLGMIPSEDSSGSRRRQGSITKAGNSSARRALVEAAHAYAHPARVSWVIARRQTKLSKSVCDMAWKAQLRLCARFRRLAARGLNRNKIVVAIARELCGFVWAIAREIQPA

SEQ ID NO: 373728 - protein, 411 aa, unidentified
MKTLHKRCAGLDVHKTEVVACLRVANRGKASYELRRFPTTTRALIELGDWLEQAGCTHVAMEATGVYWKPVWYILEGRFQQILANAAHIKAVPGRKSDTHDATWISDLLAHGLIRASFVPPQPIQEVRDLTRTRKQFTREIVQHTQRTQAVLEEANIKLTSVITDILGTSGRRILKAIVAGETDPLKLAELGGPRLAATKSQLADALLGRVRPHHRFLIDQHLKTIEQLEETITAFDGRIEAALEPFRDAIKRLKEVPGLSETSAQILLAEIGTDMSRFPTAGHLLSWAGLIPRLDESAGKRRSTRVKKGAPWLKPVLVQCAHAAAKKKHSYFEAQYLRLKARRGPKKAVIAVAASILNTAYHMLADGTCYQDLGADYFARRDPRRVVAKLASRIRSLGYHVVVEVAEVPA

SEQ ID NO: 373729 - protein, 412 aa, unidentified
MEVLYTCCCGIDVHAKMLVACLIKDQKKETRTFSTMTDDLLRLLDWLVVEGCTHVAIESTGVYWRPVFNIVEGSLAVMLVNARDAKGFKARKTDVLDAEWLADLLRHGLLKPSFIPPLHIRELRELTRYRESLVREQTALANRIQKLIESGNIKLSQVVSDALGVSGKQMLRALAAGETDVAKMSEMARRRMKRKQPELKRALAGRLTEAQRWVLRELLDQYEQVEEAVKRVEDKIREEVEQSPDPFVPEAVKLLDTIPGIAERVAETIVAEIGVEMSRFPTDGHLASWAGMCPGNHESAGKRKTGKTTKGNRYVRAALVQAAWAASHQKGTYLAAQYQRLVKRMGKKKALVAVGHSILVIVYHVLNNKTNYHELGGDYFDQRHVMQHRARLIRQLEGTGLKVTVEELPVAA

SEQ ID NO: 373730 - protein, 429 aa, unidentified
MEVLHPRCCGLDVHKETVVACVRLVINGKPVKEVRTFSTTTVSLIELSEWLTETKCTHVAMEATGVYWKPVWHILADDGFQLVLANAAHIKNVPGRKSDVKDSDWISDLLSHGLIRPSFVPDGSTQEMRTFLRTRKQFVHEKGSHILRIQKTLEDANIKLDSVITDIIGVSGRNMIEALIAGERDPAKLAALADRRLKASQQTLRQVLRGRVTAQHRFLLRLHLDQIDALDAAIARIDREVEASIAPFRTAVEQVRTVPGIKSLAAQTILSEIGIDMTRFPSSGHLISWACICPRSDESAGKRRSTRIRKGSPWLKTTLVQCAWAATRKKGSYLQAQYYRIRARRGPKKAIVAVAASILTAIYHMLKDGTMYQDLGPNHFDANAKERQKNRLLKRLADLGYDVELTPFPTGVAPAEALAAEALAAEALA

SEQ ID NO: 373731 - protein, 412 aa, unidentified
MSNPLLVGVDVHRKSNTVCLMDRQGREVAPRFSVDNNRPGTETFIQNVARQVVAGHFDAILIAAEATGWYWWHFFQTLDRDPFLNQWPLHLYPLNPRLTANFKKTYVDLDHTDPIDAFVVADRLRLGRDLPPPFHYEERYFPLRLLTRYRFHLVHNLAREKAYCLSILYLKASEYSRIQPFSNLFGAASRAVLQEFASIDEIAAIPFDDLVEFIDLKGKRRFPDPTENARKLRRVARHSYPLPPSLHQPVNLILNMSLQYITFLERRVKRLDTAIAHQLEPIPHTLDTIPGLGPVFSASIIAEIGNLARFDYNQAKVAKYAGFKWRKHQSADFQAQETRLTRTGNRYLRYTFCEAANRVRMCDPVYAAYYERKFHEVPKHQHKRAIVLTARKLVRLVVRLLTTHQPYRPRRT

SEQ ID NO: 373732 - protein, 411 aa, unidentified
MKRVYDNCCGIDVHKKLIVACFRKGNEQELREFGATTRELLELADWLKSGNCEMIAMESTASYWKPLYNVLEASELNTIVVNAHHMKAVPGRKTDAKDAEWIADLLQHGLLKASYIPSKDQRELRELVRYRKSLVGERTRELNRLQKMLEGANIKLSGTVSDINGKSARSILEYLITGESIDSEKYDEMYEKKVIAHNLKASKEQIIDDLNGIMTPLQRRMMKELLTHLDELNIHIKNLDDEIDDFMKPEEKQAAKDIQEITGIGNSSAQAIISVIGADMERFPTDRHLSSWAGLCPGDHESAKKRKYGKTRKGNALLRSTLVICAHSAVKNKKSYFYAQFMRISAHRGKKRAYVAFAHSMLIAIYHILKEGAAFKDLGAGYYNQFNRERKINAYLKKLKALGWEAQAVAA

SEQ ID NO: 373733 - protein, 415 aa, unidentified
MLKIVYQTCCGLDVHKSFVFACIASTDEKGITKYKNCRFSTFTKGLRELSEWLRSNSCKDVCMESTGKYWIPIYNILESTCEIVLAHPKYVRAIRGKKTDKKDAKWIADLFKHDLVAGSFIPPKDIRQLRDLMRYRVKLTNFNTGEKNRAQNCLTVSNIQLASVVSDVFGKSATAITKHLLDNPNDKDFDYKPLLKKSLKAKSEEIGLAIDGEITSEQAAKMKIILSHMDSIKLCKADLESQILNIAEKYLTEINLVSTVPGIKSFSAIAIISEIGVDMSVFSTAKHLCSWAGLTPQNNESAGKKKSVRISRAGAYLKPLLVQIAHAIVKSDKHPEIKNRYLSIKKRRGGKRAIIAIARMLLTAIYQILKKSEPYNAELYRKSDVIPTNRDVSVEQAIFILQRQGYQISKADNVS

SEQ ID NO: 373734 - protein, 344 aa, unidentified
MSMVRSVVGGVDTHADAHVAAAIDSNGGVLGVEAFPADEAGFEDLLGWLIGFGAVTVVGVEGTGSWGVGLTRFLTAADVEVVEVDRPNRQARRKVGKSDPTDAVAAARGALSGAASGIPKTRNGPVEQMRVLLVAKRSARAQRIQTLNQLRHLVFTGPESIRVRFKNRYKTGLISEAAAMRPRPGSDPVLFTTNMVIRGLARRIQGLNDEMATIDAMLGELVAEVAPSLLELYGVGVDAAATLLVTAGDNPDRLRSERAWAHLCGVTPVPASSGKTIRHRLNRGGDRQANSALYRIVLTRTSSHDETRRYMQRRRAEGLSSLEVIRCLKRYVARQVFKELPRTA

SEQ ID NO: 373735 - protein, 426 aa, unidentified
MKNREVLSTLFVGIDVSSKANVVCAIDFGEELYLQDSFTNNQPGAVALAEKLAAIMTKHPSFTRLVVAMESTSCYSTHTATFLSSSGILMPHKPYVYCLNPNAVAQYKKSYVSVGKTDPIDAFIIADFARVGRIKTEPWRGSQFLALQRLTRHRLHLVEAITREKTYMLTNIFLKFSELAVATRDNKPFSNNYGATAAAVLTEFLSPEEIVSMSSSELVEFICKKSRDSFEDPAKVASLLKKAASDSYKLDKCLYEPLTISIASSFNCINAFESEVKKLNKAIEKAIKGFNTNEYQSLISIPGIGPVYASAILAEIGSIKAFRSQDAVAKYAGLVWYPNQSGDFTAEDTNMSKAGNRYLRYYLIEAANSVKNHSAAYKAFYDKKVAEVKTHQHKRALALTSRKLIRLIFGLLDKNQLYSKSVEQKT

SEQ ID NO: 373736 - protein, 338 aa, unidentified
MNYVGIDHHRQYSHMTLMDQEGQVLRSGRVANLRSEIERFLEGGEAMEAVIETGRSSYTMVDVLEEMGVAVKIAHPNEVKAIARAKIKTDKRDSEVLAHLLRMNMVPEVYRRSTENRQAQRVLRQRSFYVSAMTALKNRVLAFLAQQREEIREEVARETNIFSDKGQKALLGLDLAPGEKRLPEALLKTYRHLETRIHESTELVEKLYEKSREAQLVRTIPGFGKFLSVLVTVEIADLARFADAAHLHAYAGVIPSTHSSGDRTHHGKIIRAGNRRLRWAAVEAVWPAIRADFDLRCFYERLARGKGANKAKVATARRLLTIIYKVLKEGRNYIAYPR

SEQ ID NO: 373737 - protein, 389 aa, unidentified
MNRIIKIGMDVHSTNYTLCAMEPTIGAEDRVFGELQVAPDYREVIAFIANLQLKLGLNDDYSIECGYEAGCLGYTLYHQLTNAGIKCVILAPTTMLTQQGQRIKTDKRDARLIAQCLCYGGYHPVYVPTGEDDSVKEYLRMRDDHKLALKKLKQQINAYVLRHGHQYAGTKWTVKHVTWLKKLELDPMYRETLNEYMASYEEQEAKIDRFDKRSEEIAAEARYQENAKKLGCFLGIRTHTALSLIVETGDFSRFAKGNTYAAFLGLAPGERSSSTNVNRLGISKAGNTHLRRLLIEAAKGICKGAIGHKSRELRSRQNGHSADIIAYADKANTRLRSKYYKMIRHGRKKSVAVAAVARELACFVWGMMTGNISITSSGTGTSALAVSQG

SEQ ID NO: 373738 - protein, 374 aa, unidentified
MDTIYIGVDFHARQQTICYLKTETGELVTCELKHLDKHAVRAFYAQFHGRVIVGLEASGYSPWFERLLEELGCEVWLGHATEIRRRARWRQKNDRRDAELILDLMLHDEFPRLHRPAVQSREVLRMLRYRQKLIKIRTMSKNSLQALALQSGLAKGSRLFTQAGQQELSAAVMTPVMHWQREHWLQLMQPLNQQLLETMVWFKEQSKGDVCIKRLRTHPGIGLLTSLCIVHSLQPVSRFRNTRKVAAYAGFDPVERSSAERKCFLGISKAGSRVLRFLLVEAAHTAIRKDEDLKRFYKRLAERRGRPKAKVAAARKLLIRAFIMLRDEIDYAEFRRRAVAARLARRGQGPNVPEVLIGQPASADHRDELTSENQ

SEQ ID NO: 373739 - protein, 432 aa, unidentified
MTTSSRVLTSSPVTTSSSVQLTPVACPLYMAIELSTVGWKLAFVDRFGRPPRVRSISAGSFAQLQHEIEAAKKAFQLDAETPVVSCYEAGRDGFWVHRCLTAMGIRNWVMEPSSLQVNRKKRRAKTDRLDAQKIVAALVRFLAGDKWACRMIRIPHAEAEDARYLQRELQTLKIEKTAHVNRLKGLLAAQGIWDVTIDWRLPALLEGAQTADGRPLCPQLKTRLLREFERLALAVEQIRGLQKQQAEWFRQAAERCAACEATERQATERHAEKVARIAHQLAQLGGIGQVSSWTLAAEVFSWRDIQNRRQLGALAGLTPTPHASGSEAKEQGISQSGRGELRALLIEIAWGWLKFQPESELAQWYQRRFADGTSRNRKRGIVALARKLLVALGKFVRGGEVPAGAKLSDEVQVRYTPSLRPRPPRPPGCAAA

SEQ ID NO: 373740 - protein, 461 aa, unidentified
MKKNRAKAGRRRAVSTESSIINIDTHPDAAGIDVGAEEFVAAVPRGRGEQTVRSFASFTSGVYALRDWLLACGIKTVAMESTGNYWITLYDVLTAAGLDVYLVNARHVKGVPGKKTDVCDAQWLQQLHAAGLLRKSFRPALDIVPLRFLLRHRSELVGDAAKQLQLMQKVLTEMNLKLQHVFSDIDGASAQAIIAAILDGQRDPEVLAGLRDPRCRSPKQAVLEALRGDYRPEYLFVLGQCRQIYLKLRETVAECDRQIGELAARVQCEVAVGQLPAAPKDQHKRSKNCPQFEIFQSAWRFYGVDLSTVPGVSAAVLCALMSEVGNREQLLAAFPTPERFASWMGLCPDNRISGGRLLKAKTRKVKSRLAGTLRLGAFGLQKSQSAMGGYLRRMKSRLGKAEGTTATAHKLARIIHGMIKSGKPYDEKEAFKPTPQNQARRRRSLEKQAAALGLTLQPMAA

SEQ ID NO: 373741 - protein, 360 aa, unidentified
MTATMTYVGLDVHARSTHAAAIDVASGELCRARFGGGSEEVIGWLAALPQPLRGCYEAGPTGFALYRACSSVGLRVDVIAPSKTPRAPGDRIKSDRKDAELLARLLLAGQLKIVTVPSPSVEAARHLCRAREQVRSDLMRCRHRVSKLLLLHGRVYPEPSTWTQRHRQWLARQQFDEPASELAYLDTLAAVDGLVARKSALDERLSRLALEGEWWPTVARLRCFRGIDTLTALALSLEICDFARFESPRKLSSWLGLVPTLDQSGESRRQGAITKTGSSYARRLLVEAAWHYLREPRIGATVANRQQGQPAHVLQIAWRAQHRLHRLHTRLRAHGKPPNVATVAVARELTCFLWAAAMAE

SEQ ID NO: 373742 - protein, 350 aa, unidentified
MIIGVDYHPSFQTIAFFVEETAECGEQELNHSDGQAEKFYRDLKQRGICVRVGMEATGYSRWFERLLAELGFELWMGDPAEIKAKRVKKQKTDRKDAQLLLRLMREDNFPQIWVPSPENRDLRQLLWHRHRLVQMRTRIMNQLQALAMNEGYRWKKKLFSEQGRAQLEKLTLAPWASRRRQELLELLDRMNPTIEELTAAVEGEAKKRPEAMRLMTHPGVGPLTALAYVLIIGTPTRFQRGKQIGTYVGMIPCEESSARKQRLGHISKQGNSLLRFLLVEAAQAAARNHPDWRRRYIHLAMRRHKSIAKVAMGRRLAVRLYWMWRNGCEYSPSLEFGSYAGQLGTGHGVK

SEQ ID NO: 373743 - protein, 411 aa, unidentified
MYYVGIDIAKKTNVSSIINDKDVFIKKSFKFNNDEKGFKEFTNLLSSIDKNIDNFIIAMEATGLLFENLYLYLKGKGYNVILLNPYQTSKFREMDTMKKVKNDNIDAIMIASLIKSGRYSKAYVSEEVYASLRALHRHRASLEEELKKHKRQVSSLLAVVFPEFEQVVKNPFSVSGLALLEKYPTAKHYKHASAQRILNVFRKIKGNNFNIQKAEKLLALAKSSIYSGNAYDERAFVIQSHIRAIKFLQKEIESIDNEMLKLFNVSPSFTKEEEQEVIDIIDNLRTIPGVSDKTLFTIMGECGNLDRFKNINAFIGYLGLYPTLEQSGNKTSYGKLAKRGSKLAKKALYQAAVAAIRHNDEMKKLYCDKVSQGKAKKEALVIVARKLAAIILAIYKNNTPYNPARVFNQNT

SEQ ID NO: 373744 - protein, 354 aa, unidentified
MRKVINHIVKNKEVYIGLEDSKTSWKLCVRSGGMEVRLTSMPASYPVLRAFLKNNFPGCKIHLIYEASFRGFNLYDRLTEEGVECVVIPPHLVTEPKINRVKTDKRDARRLAKILENSDYRACHIPDKERREDRQISRTLIGIQKDIVAVKNRIRKLLAFHGIEEGIPDRTWTKQSFVDLKNLKLSVSLRFSLDILIEELEHLCEMKDRLLQALKELTKKQRYATTYQLIKSMPGIGWLTAIRLVLEWGEDLSRFKRSNRIANFVGLTSSEYSSGEVVHRGRITGQGRSFVRAWLIECAWRAIRKDPALLDKFNRVWRNSGSKKKAIVAVARMMVVRLRSCVLNESPYVVGVVQ

SEQ ID NO: 373745 - protein, 429 aa, unidentified
MTFAGLDLHKKEVEAALIDEQGNILHRSRFPATRQSLEAFAKSHLADDVSVAVEATTNTWPVAAILRPLVHTLVVSNPLRTKAIASAKIKTDKVDALTLAQLLRTGYLPDVWIPDDQTRLMRQRSTERAMLSADRTRIKNRIHSVLHQRLIEAPSGDLFSRKNLAWLKALALDPFGRDSLDRHLRQLDRIEQEIAALTEQIAVHAHQTPQVKLLMTLPGVDFTVAETILAALGDTARFETPDKAAAYLGLVPSTRQSGDHCYHGPITKQGARHARWLLVQAAQHAALHPGPIGAFFRRIAKKKNRNVAVVAVAHKLVVLAWHMLKNNEPYRYAQPKTIQAKLSRLRILATKQKRKGGNIKGQPRSAQYGKGCTKAIPSLDQLYAAEGLPSLAAELKPGEIKMLEQHGASAHARAVRMARRIPRGKPAGQ

SEQ ID NO: 373746 - protein, 401 aa, unidentified
MSINGAPAATVVAVDVGKNTAVLSVTDSARHRLLGPVEFAMTAPAVAAAVGRVCAVLPGAAVKVGVEAAGHYHRPLLESTLWPAGWELLELSPARVSEQRRVQGRRRVKTDAIDLEAITELVLAGHGVPVTARSATITELSGWAMHRSRRIWTRTATKNQLLAQLDRCFAGVTLALPDVLGTQIGRLVAAEFADPHRLAALGVTRFVRFAANRGLRVRRSAAERLVAAARTALPAPEAVVARQVLADDLGLLACLDGQIAAAEAKIAKLLPDTPFAVLLTVPGWGTIRAGNYGAAVGDPRRWPGASQLYRASGLSPAQYESAGKRRDGSISREGSVQLRRALIDLGIGLWRSDPAARRYGQQLRARGKKGRVIGCAMAHRANKIAYALVRDQSGYDPNRWA

SEQ ID NO: 373747 - protein, 440 aa, unidentified
MSKRAYRATRVNDVNWDQLAQGKDGLDITLGVDVGKYSLWAVCRWADGRFERPWRVQNPGEIPTLLTLLKRVSAGRKLVVAMESSGTYGDALRQALADNQIEVQRVGGKAAHDYAEVFDGVPSQHDGKDAAVVAELAALGKAMPWEYQPADPWEQELAYWVEWMVAHRQMLTIWQGRLEGLLARHWPEATQVLKLSSGTLLRVLKRYGTPQALAADGEAAKLLARWGGAFLAPEKIEQLLAGAGASVGVRLGEWQQRQIQNYAQQALAARQEANRAQRRLRSLAAGHAVLQAQGKVVGVPTACVLWVSTGDPRKYHAAGAYRKAMGLNLVERSSGTYQGRLRISKRGSPRTRQWLYFAVLRLVQKCGVRPWYEAKKAHDEADARRVVVAVMRKLAVALYYVGVHNEEFQPGRLFGRIRRRRDSPGEQKSRTKRRSRAEQI

SEQ ID NO: 373748 - protein, 310 aa, unidentified
MEKFVGIDICKDSLDLCIDPDEELLHLAYDDKGIAQVVKRLRQVAPTLIVMEATGGLEMRLASELVAKGLPVAVINPRQARDFAKATGQLAKTDLVDAAVLARFARAIRPAARPLKDADTRELDELLTRRRQLIDMRVQETLRLGTASKAQRKSLVAHIAWLDKRIVKLDDDLSKRLRASEAWRTKDDLLQGIPGVGAVTTLTLLAKCPELGALNRRQIAALVGVAPRANDSGKHRGKRFVWGGRADVRAVLYMATVSAIRCNKDINAFAQRLRQAGKPAKVVIVACMRKLLTIMNAMVKNNAQWTPKTA

SEQ ID NO: 373749 - protein, 347 aa, unidentified
MDKISVVGLDLAKNVFQVHAVNAQGRVVERKQLRRSEVLSWFAKIEPCRIGLEACGGMHYWARKLSELGHTVRPMAARFIKPYLKSNKSDMLDAEAICEAVQRPGMRFVSVKSAQQQAVLHLHHSRRLLVEQRTALINHIRGMLLEFGIVIAVGPSALRKRLPELLEDTGDELPPMCRDLAAVLRDQLSALDERIALLEHKIQQWHVSNEASQRLAGIPGVGVISATAITAAIGDARAFTNGRQFAAWLGLVPRQASSGGRQRLLGISKRGDRYLRTLMIHGARAVIRHLRARQQAGKPPGNAWIAQLLARCHPNVATVALANHNARVAWALLAKNETYRARYAAEA

SEQ ID NO: 373750 - protein, 417 aa, unidentified
MMHPKMQYTYVGIDSHKDTHTAVFLDCFFEKLGEVTFENLPSKFGTFLAKAEKLKVDGTTLLFGLEDVSMYGRLLAVFFRDNSQKMKHVNALLVAKERKNQNATIKTDAIDAECAARVLLSKFNDLPDAQPDDKYWILQSLVTRREFIVRNNISLKNHLHSLITQHYPNYSHWFPKISTHASLAFLMRYPSPSTLVGVTSESLAEFIREASNNRVGAGMNPTARAQRILDTLQDTTVPFQEIRNRSVQSTLRQIEVNTQEIKQLEQDIKNFMENFDCTLTSMSGIDIVAAAQLLALVGDIRRFPTAAKLARYAGIAPVTYASGQSDKQYADKRGNRELNSIIYLLAVRLISTAANKILNPIIHDYYHRKLSEGKTKRQSLKCVQRRLINIIWRMLMYNEVYINPPMTHKIIDPDAKN

SEQ ID NO: 373751 - protein, 337 aa, unidentified
MKTTSIPTDTPAFFLGIDVGKADLFCHLLGPGEPCSERFDNTSAGIRLLGKWVVKAAPSGQLHACLEQTGHYGDAIAQALHEMPGTAVHLVNPHRIKAFGMQKLRRNKSDTADAKLIARFLKSEHLELRPWQPKSPVQQEVTALSRYADSLTQDTARLKTMLEAQPDKIVSVSLKRRIKSQEKELNSVRAKIAQLVKWEPVLHAKSKLLRSIPGLGEIATQIVLAELPDLEQFADARQLAAWAGLTPQHHSSGTSGKTRTPITKIGSVHLRRGLFMPAMTARVFNPLLKTFADRLLENGKKPKQIIIAVMRKLLHQIYGILKSGQPYNPEKRGFAGS

SEQ ID NO: 373752 - protein, 345 aa, unidentified
MEITTVGIDLAKNVFQVHGVDERGKVVLRKQLRREQMAEFFAKLPPCLIGMEACGSAHHWARVLQAQGHSVRLIASQFVKPYVKSNKHDAADAEAICEAVARPSMRFVPVKSVEQQSVLAVHRARQGFVKARTAQANQIRGLLAEFGLVVPRGLWHVHQRVPALLERAADALPLALRHLIERLLVHLRELDRQVAELEVQIQAWHRSSEMSRRLEKIPGIGPLTASALVASIADARSFDSGRQLAAWVGLVPRQSSSGGKPQLLGMSKRGDVYLRTLLIHGARSAILAAQRKVGAADTWLGHLLRRRHLNVAAVALANKNARTVWALLAHEREFRPDYRPRLAAA

SEQ ID NO: 373753 - protein, 345 aa, unidentified
MHIASIGIDLGKTTFHLVALGERNKILVRKKFSRAQLLAYTANLPAALIGLEACAGAHFVGSALREQGHQVRLIPAQFVKPYRKSNKNDFIDAEAIAEAVTKQNMRFAQLKTQEQLDWQAMHRVRDRLVRRRTALINEIRGFLLERGITFAAQPIHLRKNLPVVIEDAEQNLSPRLRWLLDRMWQEWKQTESEIEAITDEIERISNEDARCRQLRQIPGFGPLVSTATVAAIGNGSAFRRGRDFAAWVGVVPRQYSTGGKQKLYGISKRGNIYLRRMLIHGARAVLFRVKYDTGGFGQWVHRLAQRAPSNKVVVAIANKLARIAWAVLSSGKDYRHQPLQQLAAA

SEQ ID NO: 373754 - protein, 459 aa, unidentified
MAQRKQKQARSKTTLPPQLAAVNLHAAGIDIGAEAHWVAVPPSDDPQPVRSFGACTADLEALADWLATCRITTIALESTGVYWIPLFELLETRGFEVLLVDPQQVQKIKGRPKSDRHDCQWIQRLHTFGLLAGAFRPADQICVLRSYLRQRAMLLTHAGQHIQHMQKALTQMNIKLQHVVSDLTGVTGLAIIRAILAGERDPEKLAQLRDYRCKHDEATIARALQGNWRDEHLFALAQAVALYEVYHQKITECDQHIEAYLQTFADRSDGEPLPPPSRPRKRGGNHPAFAVREPLHRISGVDLTQIEGIDETTSLVILSEIGLDMTRWPTVKHFTSWLGLCPHHRVSGGKVLSRRTKPCANRAATALRLAAACLHHSQSALGAFFRRMKARLGAPKAITATAHKLARLIYTMLKHGTAYVRQGMDEYEQQYHERAVKQMTRRAKALGYMLVKAPEGALV

SEQ ID NO: 373755 - protein, 358 aa, unidentified
MQIIGIDVSKDTLHVALADSRDARNDKVLASHRFTNNDAGFKSFADWMEKKKAEAGTVCLMEATGVYHERLADWLHRHGVAVAIELPNKIKYYAKCLNVKTKNDKVDAEIIARYGLHNVCTPWHPMTENLYQMRSLLRQVQSMTKERTRCKNQLHALEHSAHTPETVVVNLRGLIENYDRLIDSYHDEVVRLAKEDEAFYAKVEMVCTIKGVREMTALTVLCETDGFQLCRSARQAVSYAGLDVSEYQSGTILKDKRISKKGNARIRHALYLPAVVAGTTGGPASLMNLYKRVAQKHPSAKKVAIIAVERKLLMLIYTLWKKQEPFDPDKDGKPPVHNAYKRTQAVGSQNTEGSIPCR

SEQ ID NO: 373756 - protein, 359 aa, unidentified
MSKCSTENKKVYVGFDVSEKTIEIFAVCGTETSKGSCKIDNNHDAIKKFLSTFKDPSRVCVVMETGTHSLWMSELIKGLGFEVIVAHARDLALIYRSERKNDQLDAEKLARLAQADRKLLHPVKHMTLERQTDLTVLKARDLVVRQRTQLINTIRGLLRAAGHKLIEEEYSTRTIKKCCSALPEYMRPAIMPLLQQICYLDLAIKEYDRLVRKLCKKYPATKILQQITGVGELTSLAFVLIVGDPHRFDNAARLCAYLGVVPKQDQSGDTDKQLGITKKGNKLGRKLLIQAAHYILGPFGPDSELRSYGFRIQARGGKIAKKKSYVAVARKLVTVMLALWKNPDIEYDPNFKATRKLHK

SEQ ID NO: 373757 - protein, 403 aa, unidentified
MDRTAGIDLASEEHRLVVVEADGRRLEERRFVHDEEGVAALVRRLVALEVARIAIEQPNGLVVDRLLEAGITVVAVHPNQLAASRDRYRSGGGKSDGFDAYVLAELARTDMHRLRVLEPDSDQTRALRSLTRAREDLVEQRVALANQLRAQLEAFWPGAARIFSEIDSPIALAFLERYPSPSDAHTLGEKRLAAFLARNGYCGRRSAAQLLDRLRAAPQGRTGELESEARRQVVLALAAALRPLVEQIRLLTSEIRGLLDNHPDGAIFRSLFRDPKSVVTAAELLAEIGDRRDRHPASSSLEAIAGQAPVAVQSGKKKVACFRWACNKTLRSAVSVLADSSRKHNPWANDIYERARARGHDHPHALRILGRAWLRVIWRLWQDGVPYDPTRHGSLNRLLAAEG

SEQ ID NO: 373758 - protein, 346 aa, unidentified
MNATTYGMDIAKNVFQVHWVDGNTGEICRKKLPRGKVTEFFAVRPAGRIAMEACGGAHHWGRTLGPLGHQIELLPTHQVRPFISGNKDDAADARGIWLAAQHGDIRRVAVKSSEQQAMLSLHRMRSHWVSVRTATVNALRGLLYEFGVTLPQGRQAGLRQLAQQRAEINDAVPAVMVRLVDDQLLALADIERHVQAMEEEISLMLKSQESARRLRDTPGIGVLGATALAATLGDGTSWRNGREFACCLGLAPGHRGTGGKVRMGGISKRGNAYLRTLLINGARSLASREHPAPWIVALRERRPFNVVVVAIAHKLARIAWALVAHGRAYEASWKATAPPEASAGSV

SEQ ID NO: 373759 - protein, 421 aa, unidentified
MTQPYGNTGGDVLVAIDVSKKQNAVLIRLPDGARKKLTVINNLAGYRELSSYLKKLEVPCKIGFEATGNYHRALAYYLQQRGFTLELISSVAASRTREAMFNSWDKNDPKDAQVILHMLQTGLTQTYHDPLVHRINDIQELSKTYCQVSLRKTRVQHSIMTHYLPLYFPEAAKYYHTSRAAWFTSLLMTFPNPAAVLRYSREDFIKAAQAVSGRKVNKAAWLRDFYETARESISLPVPEDSEAIRMFRLVLQEHQDLCRMRRAIEERAELYLKDNADYLRLRTIPGIGAVIALIILAEAGDLRRFSHYKKFLKYCGLNLSTQQSGAFRGLSKLSKYGNSRLRYAFWIAGTSAIRMRENTFRKKYENYVKSDPQNPDLKRKAYTAVAAKIARVAYGLVKSGREYRCYHESSVPSGIILSTGR

SEQ ID NO: 373760 - protein, 478 aa, unidentified
MPQHAAGRSARHSTINERHIMSVLRKVKIKSATNKANVQLPTLHPHAAGIDIGATQIQVAVPCDAEPKPVRTFTTFTDDLLKLRDWLQQCGVRTVAMESTGVYWIPLYQILEAAGIEVCLVNARHCKNLPGRKTDVSDCQWLQYLHSVGLLRASFRPPEQICVVRSFLRQRANLVRCASQQVMQLHKALTQMNVQIHNVISDIVGVTGLAILDAVLAGERDGQQLAKLKDHRIKASADVIARSLVGDWRAEHLFALRQALATWRHYQQLLTECDAATAQALAGFESRVDVAANPPPPSTLRHKKPHANEPRFEARTELYRITGVELTQVPGLQVSTALVLFGELGPDFVQRFPTAKCFASWLGLCPDNRITGGRVISVKTRDVKSRSAEALRLAAQALWQSKTYLGDCFRRWKARLGTPKAITAMAHKLARILWHLLKYREAYDPTVWMAAEEQMRKKKIKRLEQNATALGYKLITVS

SEQ ID NO: 373761 - protein, 354 aa, unidentified
MANYYIGADVDSKMTELAIEKNEKIIRRYRVPTSIPALREVLGSISGTKFLTFEEGPMAGWLYRNLKDDVDELIVCDPRRNKLIACDGDKDDSIDSGKFAGLLRGGYLKAVHQSDDIGRVVLKQWVSLYHDKVREAVRQINKIRGRCRMYGIRIPRRVLRDQLVRSQWMAKLKEKVLAEQLAVLWMGYDTANKQSKMAKKQLIRHIKGYEIVRYWSELPGIALIRSTTMLAYLDTPWRFSSEKKLWKYCGVGLQRTASGTDRYGRPNRGKLKLAWAVNRRLKDVVLGGTMSAINQKQNIFSYEYERMIRNGLSESNARHAVARKLLSVMWAMWKTMSRFDGSLVCCSSETVRAS

SEQ ID NO: 373762 - protein, 353 aa, unidentified
MRAVFGIDVSKASSEVVILVNGEKGHGYPITKDVIGFNQLLGDLKTVHHPKTTGVYSRRPQAFLDDHGYAYTRLNPLEAKKQLDSLRVRKTDKIDAEKLAQPQFVLNRKTTYVQEEVYQNLRDLSRFYQNLTEDIVCTKNRLHKVLQVTFPELENILSASTGEQYWSLVMAFLFKELVLRLTQSELMAIIFRFTSKRISDKRATYLADKLRELAKQSYCAVKKTSPILEEVRYYAQELLRLSERRQAVLNEMVFLAQPLPEYNILLSIPGIAETTATSLIGELGDIRRFQSANQINAFIGIDLRHYESGHFLAKERISKRGNPYARKILFKCIHNIASASHTKPCHIADFYEK

SEQ ID NO: 373763 - protein, 315 aa, unidentified
MTQARVLVGIDVSKARLDVHLHPRGEAFVLANDRAGWRALVVRLRKLGSIAVGIEASGGYEKGPAHHLVRAAIVVYVFDPAQVRSFARGLRRHAKTDPIDAAMIARCLEATIEDAIPYQPDPLAQRLAALVGHRAKLVAEGTALKGYQDTLEEPLVRRMVEARRVGLKLVIARLDKAIADLIASTAVLARRYRLLVSVPGVGPVLASTLLALLPELGRIGAKAIAALVGVAPFSRQSGNTDRGGRCRGGRGAVRAVLYMAALSAIRCGNPALARFYDRLRRAGKPAKPAIVATMRKLITILNAIARDQRPWAPQP

SEQ ID NO: 373764 - protein, 343 aa, unidentified
MNATTKTVVGVDTAKQVFQLHWVDTATGEVFSKQLKRARFLEHFVNKAPCLIGMEACGGSQHWARRLQEMGHQVKLMPGKVVKAFVTGNKNDIADARAIWLAVQQPGVHAVAVKSEAQQAMLALHRMRQQLVKFRTMQSNSLRGLLGEYGEVMPVGRAALNRGMKEALERLAERLPAVLIETLREQWEMLARLDEQVVRIEQRLLAWMRQDRSCKTIAAIPGVGLLTATAAVATLGDAKAFRSGREFAAWLGLVPAQTGTGGKVRLLGMSKRGDTYLRTLLIHGARAVLMHAKEPGKWLQEIGKRRPPNVVIVALANKMARTIWALLAHSREYDKEHVSVRPI

SEQ ID NO: 373765 - protein, 380 aa, unidentified
MRLPTVVIGVALSWPAVSPGTAGRFATDKPGYDGMLAVGRRFQDRVWAVEGCNGIGKHIAHRLVHDGETVVDVPPKLSAQVRVFATGNGRKTDPVDAHSVAMAALRSPGLVRVQVDDDLVVMGMLADRRDELGRARTQVANRLHRLLLELFPGGAKRFLSAQQARAMIATIRPRDLPGKTRRRLAVELTGELEAIDKKIKAIKKELTELVTARGSTLLELHGIGPSSAARLLADTGDIHRFADRDKFASWNGTAPLDASSGSQVRHRLSRAGNRRINRALHIMAVVQLRNQTQGRAYYNMRKAGGMPSMMAMRALKRRLSNVVFARMLADQKRREAAGPGGHSGTTPDSSVTNLTPDIGSSDKPRPGPATQSRTPVSTAS

SEQ ID NO: 373766 - protein, 425 aa, unidentified
MKKTDYLSTLFVGIDIGSRTNVVSAIDFNQDFFIRMKPVPNAKEGAETLESLLVDVLSVHHEFNHVIIGLESTGFYGVHIANYLSASGLLAPFGTEVYCLNPKEVAKYKESFNSLDKNDGIDSFVIADFARVGRISIKPWRGAQYLALQRLTRHRLHITECIAREKTYVLNNIFLKFSEFAMLKKEDHPFSNKYGATAEAILEQYVTNDDIIGASIEELVELIESKSRGRITDPEETARILKAAANGSYRLDKVVAEPITLSISSSFNCIRAFEKELKAIEKAIEHTVQGLNPVEYQVLKSIPGIGHVYAAGILAEIGTIKAFTDNGALAKYCGIVWKENQSGNFRAEDTKMSKAGNRYLRYYVIEATGSVINNCPEYKDFYDKKFAETTTHQHKRALALTSRKFLRMLFGLLDKSQLYSLERSR

SEQ ID NO: 373767 - protein, 310 aa, unidentified
MKQLIVYIGIDVAKAHLDVAWAEQSRRFNNDKVGRATLVKWIKQKQSGPVQVICEASGGYEQELLDALAEAALAVSLVQATRVRQYARAAGILAKTDKVDARVLARFGAAMRPEPTSPRSAAQKLLRELESQRRHLSDLLVAEQNRIEQLHDEKLRGLARTLLGTIKKQIARIDARIATVITQDQGLCQKAQKLTGVKGVGERTAALLLAQMPELGTLNRREAAALAGLAPFNRDSGTMRGKRTIFAGRRAVRRGLYMAALVASRRNPILADFYRRLRTKDKPHKVALTAVMRKLLLALNQALAPTQSFA

SEQ ID NO: 373768 - protein, 345 aa, unidentified
MEEKMKHFVGLDVSMKETAICVVDDAGQRVWEGSVPSSADAIAAIVREKAPDLVRAGMETGPQAVWLWHALREKGIAVDCIHARRAAAALKLQANKTDRNDAFGLARLVHSGWYEPVAIKSFDRYRMRAVLTARERIVRMCTTMINQIRGLAKTFGLRLSTGKGQVFEQSVRRALPVDAVLRDLFESLLPVLSGLKDQRRAFDRQLARFAREDEACRIVSSAPGVGSLTAIAFVTAVDDPTRFRSACDVGAYLGLTPKRYQSGEVDIGGRISKTGDRLTRKLLFEAATVILYRTSPSIGLKQWGLRLSARSGSWKARVALARKLAVTLLTMWKTNTMFENRSFAT

SEQ ID NO: 373769 - protein, 369 aa, unidentified
MKIKKYVGLDVHKDKTTVAIAEGDRGGEVRLYGEISSDLVTTERALRKIRGAQGELHVAYEAGPTGFVLHRHLTRLEIDCIVVAPSRTPQPKGGRQKTNRRDALQLARLHRAGELTGIHVPDAVDESLRDLTRARSDASRDLKRAKQQLKSFLLRQGFHYQGKANWSEAHQRYLRELVLPLPALKSVLEEHLLAITQATERLTRHEELIAAQVPQWCMYPAVQALMCFRGFDLVAASMLVAELSDVRRFAHPRGLMAFLGLVPREDSTGDTRHLGAITKAGNAQARWILIEAVQSAFNPPKVSAPLSLRQKDQPLVYRTIAWKAQVRLHKRGWHLLSRGVMKAKVNVALARELAGFVWDLLRQVPAEKN

SEQ ID NO: 373770 - protein, 344 aa, unidentified
MIIIGCDFHTRFQKIAMVDTEIGEITKRRLEHGNGEARTFYVTLPGPARVGMEATMNAQWFERLLQEYHHELWVGDAAQIRAAAVRKQKTDDRDALHILDLLVREKFPRIWIPSPENRDLRQMLRHRDKLVRIRTSVQNQLHALAMSQGLCRKAKLWTKAGRKELEGLPLDPWASRRRWELLQLFDQLDPQIDELDKVVIQEADKRPAAVHLMTQQSVGPVTALAFVLTVGPVERFPTSKHLVSYLGLNPSEDSIGGRQRLGAISKQGNSMMRHLLSEAAQTAVKFDPELRRDYLRLKFRRGISGVAKVAIARTLAVRLYWKLREAAQPNTAARMQGSPTSLSR

SEQ ID NO: 373771 - protein, 346 aa, unidentified
MMIIGCDYHPSWQQICWVDTATGETEEKKLDHASGEAERFYRRLQGPVLIGMESTGNCQWFVELLTSLGHDVWIGDASKIRACDPRSQKHDRRDAALILKLLLEGRFPRIWIPSGQEKDLRQLLIHRYKLVRIRAQVKTELQHLAMNQGVTKKRKLWSKVGERVLRELPPKPWASRRREDLFKVREMLNGQIALLDQAVVEAAEKNEKARLLMTQPGVGPITSLAFVLTMGDVNRFQRGKQVASYLGLIPREYSSGGHQRLGSISKQGNRFMRMLLVEAAQGAVRCDPGFRNEYLHRCHKKAKGVAKVAAARKLAVRLYWMLRTNTGYPEVVRVESSSRVPLVSAS

SEQ ID NO: 373772 - protein, 410 aa, unidentified
MDILYLRCAGLDIHRDTIVACVRLAEAGGVIRFVETFATTTTELERLSEWLTGHGVTAVAMEATGVYWKPVWAVLAGDFELVLANAHHVKAVPGRKTDVNDATWLADLLAHGLIRPSFVPSMSEQALRDLTRARKQLTREKASHVQRIDKTLQAANIKLGSVFSNIMGQSGRALLEALAAGESNPEQLAGLVRTKIRASHAQVVEAVRGRLAAHQRLLLRLYLTQVDALDAAIAAIDHELGERLKPVQETVQRLTTMPGLSPLSAAVVISEIGLDMSRFPSAAHLISWAGLCPKNDESAGKRRSTRLRPGAPWLKTVLVQSAWCAVRVKASYLHALFQRLKARRGPRKAIVAVAAAMLTAIYHMLKRGAAYHDLGPDHFQRTERSRLAARLARKLGELGFDVTLTQRAAA

SEQ ID NO: 373773 - protein, 407 aa, unidentified
MDLLKTVFGIDVSSRKSNVCIMVNGQKVNDYAISNDMVGFNQLLGDLKQVTNPQIIFEATGVYSRRLQAFLDMHELRYVMMNPLEAKRKTKDDLHQNKTDKLDALYLAKLQSEHPQRLAYVQSEEYQELMANNRIYEQASHDLITNRNRLHKAIQLTFPEIEHLMVNPRGKNYWSIVLRFPHPDIVLETKEADIIDFLKGLTGIGKKRANDIAQSLIRLAKVACPAVKKNSAHIRGLKMAINNILSAEEECQTALQEMAKLAPKRDLEILTSIPGIGENTALRIISELGDIRRFNNPNQLNAFVGVDPQVYESGNLTAHLSISKRGTAIGRKVLYLAINQIQSAKKVGNPCHIADYYEKRKRSSETASHKKAAIASIHKLLRTIFALIKNDQLYSYDVAKHNQRLLS

SEQ ID NO: 373774 - protein, 343 aa, unidentified
MKLHALGIDLGKTVFHLVGLDSTGRVVIRKRCSRTQLLAFTANLQVQLIGMEACSGAHFLGRALREQGHEVRLMPAQYVKPYVQTNKSDYLDAEAIGEAVQRPRMRFVPIKTEEQLDLQALHRVRERWVMRRTAVVNQIRSLLLERGLTLPKGRSHLDEQLPRILEDAELNLSDSFRVLLAQLKLELEQLAARIEEMDRVIQKTARENEACQRLTEIPGVGPVTATALIAAVGNASAFGKGRNLSAWMGIVPGEYTTGGKQKLLGISKRGNKYLRRLFVQGARSVLQQRHKQAPGLSSWLAQLLGRTHQNVVVVALANKLVRMAWAVLCKNERYRAPVFVGTT

SEQ ID NO: 373775 - protein, 366 aa, unidentified
MKKIITMAAAGIGKLQAQGLTIGLDLGDRSSCYCVLNQDGKIVSEEKVATTPKAMRERFAEMPACRIVLETGTHSPWVSRLLGELGHEVIVAHAQKVRLIAKSRRKNDRRDAQTLARLGRIDPELLSPIQHRSAEAQAQLTVIRARAGLVRARTALVNTVRGVTKSLGERLGSCNPRKVQERASELSPELQHALGPVLAEIDSLSEQIREYDERIQAIAETSYPQVKLLRQVHGVGTLVALTFMLTLEDPHRFAKSRDAGCYAGLQPGKRDSGDSEPQLHISKEGNRYLRTLLVQSAHHIMGPFGADSDLRRWGLRLSQRGGKSAKKRAIIAVARKLAVLLHHLWVSGEVYEPLRNSLRTMAAAAA

SEQ ID NO: 373776 - protein, 387 aa, unidentified
MMYCGIDVAKLKHAVSLMDDKGQTLKSVFTITNTRSGFDQLLAELHNLTGEVTVGLEATGHYWLALYDELTRKNYPVIVLNPMQVAAYRKSGIRKIKSDVTDAVWIADYIRIANLPASEQNLPIFLQLRELSRFRFRLTEQVGNLKRKLLTILDRVFPEYERLFSNVFLQASRSVLQEAVSAQEFADFNLQELTDILAKASRGRFGQEKAEKIQEQARKSVGVGFLTNAVHLEMRCLLAQLDLLNDQRDQIDLAINELMNKIPQHITSIPGIGPVTGAAILAEVGDIQRFDTVDKLVAYAGIDPSVYQTGQFEASEAHMSKRGSPYLRHALWLAATAALLHDPLLKEYYQKKRNEGKHHGTALGAVCHKLLARIFVVLKEQRAYVIR

SEQ ID NO: 373777 - protein, 452 aa, unidentified
MAKQSHRRCDQLPVLHPDAAGIDVGASELFVAVGADRDPQPVRRFPTFTRDLHVLADWLQQCGVRSVAMESTSVYWIPIHQILEARGLEVCLVNAQHVKNVPGRKTDVSDCQWLQYLHSVGLLRASFRPPGAICAVRALWRHRGSLVQMAAEHIMHIQKALDQMNLQVHRVLTEITGLSGLRILDAILGGERDPLTLARLCHKRVKSSESTVAKSLEGDYRPEHIFALRQSLAAYRYYQQLVLETDQEIQRQMVELEAADNALAKMPKRTKRLPYQRQGHEPRVFDLRSELYRIFGVDLTNVPGISAMTSQTILCEAGTDVSRFRNASAFASWLGLCPEKKISGGKVLFTKSRRVRSRVAIALRLAARSLHHAKDYMGEFFRRICRKLGKPQAITATAHKLARIVYYLLSTREAYDQSVFHKCEEEALKRAEMRLRRQAAHLGFRIIPAAEG

SEQ ID NO: 373778 - protein, 351 aa, unidentified
MSHKTAATVAHTIGIDTGKNTLHLIGLDDKGAIVLREKIARGRIAARFANVPRCLIGIEAGMATHYVARELIALGHDVRQVPPAYAKPFRQGHKNDFRDAHAIAEAVQRPSTRCVPVKTDDQLDLQALHRVRSRLVGQRTAVINQIRGFLLEHGIAVRQGLRFLRQQLPDILAKRGDVLSPRMIRIIEDLSGDWRRLDERIKHITEEIEVLAHSSESCRQLMTAPGIGPLIACAMVAAIGNGTAFAKGRDFAAWLGLVPKQMSTGDRTILGRISKRGNRYLRTLIMQGARVILLRPANWAKHSFGLWLTAAAQRLHHNVLATALANKLARIAWTVLAQGRSYEARVVPKVA

SEQ ID NO: 373779 - protein, 408 aa, unidentified
MDVVYPRCAGLDVHQKTVVVCARVADGARVQREVHTFATTTGELLTLAEWLAARAITHVAMESTGVYWKPVWHVLEGQCELVLANAMHIRNIPGRKSDVNDATWIADLLAHGLIRGSFVPPAPVQELRDLTRTRKQLVREIGRHTLRLQKTLEDANLKLTGLLSDVLGKSGRAILAALVAGESDPARLAALAGGRLKASRAELVAALHGRVTAHHRFMLQLHLTQIAALEAAVQELDARLEAALAPFRAIVDRLITIPGVSQVVARVLVAEIGPDLSRFPTAGHLVSWAGLCPRLHESAGKRLSTRVRPGTPWLKTTLVQAAWAAVRTKGSYLQAQFLRLKSRRGPKKAIIAVAASMLTAVYYMLTRAVPYHDLGAAHFERRDHAKLAQRLVRRLRDLGFTVLLQPAA

SEQ ID NO: 373780 - protein, 388 aa, unidentified
MIYVGIDIAKLNHFASAISSDGEILMEPFQFSNDADGFHMLVSRLDSLESDNIIIALESTAHYGDNLVRYLVASSFNVCVLNPIKTSSMRKNNIRKTKTDKVDTYIIAKTLMMQDSYRFVTFYDLDLMDLKQLGRFRQKAIKQRTRLKIQLTSYVDQAFPELQYFFKSGLHHKAVYALLKEAPSPQDIASMHMTHLSHLLTTASHGHFKKEQANELRVLARKSVGANDSALSIQITQTIAQIELLDSQLKKVETEMTEIMTFHDSVIMTIPGIGYINGGIILGEIGDIHRFSTPSKLLAFAGLDPSVYQSGNFQAKRTRMSKRGSRVLRYALINAAHNVVKNNATFKAYYDKKMAEGRTHYNALGHCAGKLVRVIWKMLTDEVEFNLD

SEQ ID NO: 373781 - protein, 355 aa, unidentified
MTSTKYIGLDVHKESISIAVMNSVGKFVMERVIETKASTILQFIDGLRGDVRVTFEEGTWAAWLYDLLKPHVTEVLVCNPRKAALLKDGSKGDRIDARKLAELLYMNKLATVYHGEHGLRTMKELARSYLTITKDLTRVMNRLKALYRSWGIPCAGNEVYDPRHRAEWLGKISEAGVRRRAEHYYQQLDVLRLLRQEVRRDLLVEAKKHKPWKLLRQIPGIGPIRAALLIALLQTPHRFRTKRQLWTYSGLGLETHDSAQYRAVEGQLQRSKKPVTLRGLNKNHNHDLKAIFKGAALRASSAAGPLRDYYEALLAKGRKPTMAQLTLARKIAAITLIVWKKEVRFDANYLKQQAA

SEQ ID NO: 373782 - protein, 372 aa, unidentified
MSEHAITYVGLDVHKSSIAVALLPAGGGEPVEWQERNEIPAIHRLVRKLQREGGTEISCCYEAGPTGYALWRQLTALGVRCAVIAPSLIPVKPGARIKTDRRDARKLAELWRAGLLTEVQPPSESDEALRDLCRCRDDVRDDLLRARHRMSKFLLRRHCMFTGSKHHWGTRHMHWLEQLRFDDGASQATFDSYFLAIQQNGERMARLDARLAEFGAEEPYREPVAWLRCFRGIDTVTAVSLVAELHDFRRFRSARALMAYLGLVPSEHSSGESEKRGSITKAGNRHVRRLLVEAAWHNRHRPALSLPLRRRREGQPDRVLAIADRAQERLSRRWVRMSARGKPQPKIVVAAARELVGYLWATLAPEQAPLPA

SEQ ID NO: 373783 - protein, 433 aa, unidentified
MSNYYHLPVVGIDIAANFSIVTALKPDGDIYQKNLRIEHTLCGFNKLLTFLQKIEEELGDSPKVFCESTGIYHLTLLHFLVNNQVDIRVINPLITNSNKNSNIRKVKNDKLDSLSIAKICKFDNVKTSSFTCEEFLHLKFLVREYYKVVDLKANLKKTFSNNIYIHYPGLQDAFADLTGKTPLMFITKYPTPQHLLDACENEVINMLVTSSKRGVKWATKKFKQLMDIAKSADVIGINSLLFQSKVNRFYESFTFYSHQLQSITKEIFEYLDGCSFANIFKYNLELLKTFKGIGDISAITLLVEIGNIDKFCKPQQLVAFFGVDPGINQSGNFSSDCNKMSKRGTKVGRRALYAIALASIRTNKNKVPINQVIYEYYHISLGKKKKKVKLVAVMNKLLRYIFSVLKNQKPYEIRNPKIHKRMFLESKPSLQSA

SEQ ID NO: 373784 - protein, 331 aa, unidentified
MNNDLCRNDIAMEKVIFDQVVKVGCGIDVHKDNIVATVRKSEKEYETREFSSFTSSLTELREWCKLEGVTHIAMESTGVYWKPVFNILEEGDFEIILVNARHVRNVPGHKTDKKDSQWLSKLLLSGLLKASFIPPVEIRDLRDLVRYKKKVVAQASSEKNRIIRILEDANIKLSSVLTNVDGAVGSRIIDDLIAGKTNIDGLMQHYHGQIKASKEEFRKALQGRLSKHHQFMLRVLKESITDKEKLIEKLDKQIDELAKQYAVEIELLQTIPGVAYDSAVGIISEIGADMKQFSSEQHLSSWAGMSPGNNESGGKKKAQKPSTGTNTCKPS

SEQ ID NO: 373785 - protein, 403 aa, unidentified
MPTMSRPTGPVAGVDTHADTHTLAVVTAQGAVEFTEQFTADRRGNVALLRRLAEVEALDRVGVEGTSSYGAELTRTLLAAGLTVLEVLRPTRQVRRMDGKSDPVDAIAAARQVLTGDGTSTPKHTDSPVEALRYLLTARRNLVRAASRMITAIKSLLVTAPDPVRAPLRGLTDRTLIARLAACRPGSDMADPATAAKHTLRLLARDYQRLHAEADGLEDRMAELVTSINPALLEVFGSGTITSAQLLVTAGGNPDRIATEAQFAHLCGAAPIPASSGKTRRFRLNRGGDRQANAALHRIALVRMNHDPRTRVYVERRTNENRSKKEILRCLKRAIAREIHHVLLDPDIAAPVDLRALRIQKGITLTRAAEALQTRTARLSDIEARRRPLPDLTNRYQQWLTAA

SEQ ID NO: 373786 - protein, 339 aa, unidentified
MSLYAGLDLHSSNTYIGVLDQQFKRIFKKRVANDLDLILETLEPFRGQLQGLVVESTYNWYWLVDGIMDAGYSCVHLANPSAIKQYEGLKHSDDQHDAFFLAQLLILGILPQGYIYPKEARPVRDLARKRMFLVQQRTAHILSLQSLLARCCGQKVSSSQLRKATGQDLKRWLKEEHLVLSAQANLDNIVFLKQQIGRIEAAIQKQVKLSEAFNCLLTVPGIGKILAMTIMLETGDIHRFANVGNFASYCRCVSTQRLSDGKSKGSGNRKNGNRYLSWAFTEAAQMARRFNSRFRSYYDRKAAQTNSILATRALSNKLARVCYYIMRDQVEFREESVSN

SEQ ID NO: 373787 - protein, 328 aa, unidentified
MVRFTRQGSKKMTQTITTTAGIDTSKLKLDIAVHGRTERWQVANAPPGWRGLAANLAKAGVTRVGIEATGGYERGVVEHLRAAGFVVLVLQPIQVKAYAQVHLRRAKNDMLDAVLIAACAAAIDQPRTAPDPRLAELARHLTFLEQIEEDIARFKIRLEHIDDQRLRRLVINDIARLKARRAAQMLFIARRLRAHDDLAMRLDLVLSIPGIGERTALALLIRMPELGQLSREEASALAGLAPFDNDSGMHKGQRHIAGGRDRLRRSLFAAALPAAFRWNKALIALYARLTARGKAHNVALIACARKLLIYANTVVQRGTPWTETAAGL

SEQ ID NO: 373788 - protein, 351 aa, unidentified
MKIVALDLGQQKSVACIYETATGLHRLMTVPSTPAALTAMFQQHAPQRVVIEIGPLAGWVADVVRALGVEPQVAKTNEAAWQWKNVKRKTDRDDALKLAQLSALNQIKPVHVPELKVRQWRGLIAGRHSLVGQQTAVKNRIRALLTAQGPSLLPTGDKAWSQAARETLQTLARPLAACGAEDLWRGELDLQLNLLAFLEKQVAAITAQLNDLAHQNKRVQLVQTIPGVGPRLAETVVAILDNPERFTSGKQVGSYAGLTPRQYQSGGTDRRGRISKHGHRLLRALLVEVSWAALRWNEWARDTFRRVCRGSKTRRKIAIVAVARRLLVICWAMLRDNKPWQGRARPVATAA

SEQ ID NO: 373789 - protein, 412 aa, unidentified
MDVLYPRCCGIDIHKKSITVCVLIREPGRQEQKHIRGFGTTTAAILSCGDWLRDLGVTHVAMESTGVYWRPIWNLLEGQFELLLANATHVKNVPGRKTDVKDSEWIAQLLQHGLLKPSFVPDTVLRDLREFSRDRTSLVAERSRLKNRIQKILEDANIKLGSVASDILGKSGRAMLTAMVRGKENPEELADLAQGQLRLKIPQLVEALRGRVRAVHRFRLQQQLERIDFIDGQIAELEAEIENQNAPMEEAVCLLAEIPGFDRTTAWSVIAEIGVDMSQFPSADDLASWAGVCPGNNESAGKRLSGKTRKGSRWLRQKLCQSAWCASRCKTSYFASYFQRVPAHRGKKRAIVAVSHSLLVVCYYLLQRKCHFNDLGVNYFDQLHHEKLTRYFVKRLTRLGHKVTLEPCSAAA

SEQ ID NO: 373790 - protein, 349 aa, unidentified
MTMLTELVEVVIGVDTHKHTHTAAVVQAATGAVLAEVTVSADPDGYAELRALAEQHPGVRAWALEGSGGYGAGLARHLADHGELVIELDRPVRPKRRGGAKSDPIDAVRAARDALARTQLAQPKTGAERAALQMHLTARRAAVEAAADAQRQLHALVVTAPERVRGKFRDQSTRVMISTAQGLRTPRTGDAELTAASTVLRALARRIRHLEVEALEHEQAIRALVRSWRPDLLALPGVGPIVAATVLTSWSHAGRCPNEAAFAMLAGTAPIPASSGQTVRYRLNRAGDRQLNRALHVITLSRLRHDPATRDYAERRRAEGRTNPEIRRCLKRYISRQLYRHLEAGPIAA

SEQ ID NO: 373791 - protein, 368 aa, unidentified
MADRITYVGLDVHKEAIVVAVAEGGLRGEVREHGRIANTPAALDRLLRKLGGDGMALRFCYEAGPCGYGIQRRLAARGHECVVVAPSLIPKRAGDRVKTDRRDAASLAKLHRAGELTAVWVPDCRHEAMRDLVRARLDAVHSLRRARQQLSGFLLRQGCHYGRPAWTKLHRRWLAGLKFEQAVHHIVLEDYVAAVEAAEARRDRLTGQIEAMLPDWTLAPVVAALQTMRGMALVNAATLIAELGDLARFANPRQLMAYLGLVPSEHSSGASVRRGGITKAGNRAARRLLIEAAWSYRFPARLSRELLLRQERQPKPIREIAWKAQLRLCARYRRLARTGKPANVVTTAIARELAGFVWAIARHVMAAG

SEQ ID NO: 373792 - protein, 329 aa, unidentified
MQIYGIDLASEKFDVSFVDRDGKPCHLVVKNTKPQIEKFLDKLPENCQLVAEHTGVYGDLLLMLADLRSIPVSYVSGYEIKHRMGLTRGKSDPVDAARIREYGERYPDKLEITHFPSPAIYELKELYATRRLLVQQRKQIQTMLKGDQKRPAQSKTAQQVKQQLIDQLNSQISSLEKRMAELIDSDDDLSRNSEIAQSIPGIGPVTATELIIKTDNFDRVSTAKKCATLAGISPFPNSTGKSDKGAHVSHMGDKQLKSLLFMCARSAVVHFEKMRVYKMKKYEIEHKHIYVVLNNVANRLLKILYALVKKGQMYDPKYLPRDPRLKLCN

SEQ ID NO: 373793 - protein, 344 aa, unidentified
MYFIGVDHHKQVSVMTVLEEDGQEWKTGRMPNLRSYVERFLEDCRPFTAVLEAGRSSYVMADLLRDLGGEVKIANALQVKAIAHARIKTDKRDSRTLAHLLRANLIPEVYQRGEWNRRAQRVMRMRAYWVHKQTEVKNKVRALLAQQREDVRLEVEKRESGLFSSKGLEFLAKLPLESKEKEVLEDLLQGYKEIQAHIKKSDGMVDALYGEMEEASRIDTVPGFAKTLSVLVAVEIADVKRFARAADLHSYAGVIPSTHSSGERTYHGHITKQGSRWLRWAALEAVYPAIKKDLVLRTLYSRLARRKGPNVAKIAVARRLLTIIYRILTEKREYIPGLMKQTAA

SEQ ID NO: 373794 - protein, 388 aa, unidentified
MFFLGIDIGKNTHVASLLDEKAKIIFKAYSFANTLDAAEALLVKLEPYKDSLEIGMEATGHYWLSLYSFLAEHKFIIHVLNPIQTDGWRKGIEIRKRKTDVIDSVLIADLIRYGNFLETSLADEDILSLRNLSRFRVYLVNSVSDLKRKAIAVLDQIFPEYASVFSNVFGQTSKELLKSLSLPSDYENLSATKIEEVLSNITQKKKASKTISTLSDKASRSFGISFCKDSFAFQLKLIIEQICFIEEQIASVELEIDQLMSKLGTNIKTIPGVGSVIGAVILGEIGDIERFDNPSKLVAYAGLDASVSQSGEYEASSGKLSKRGSPYLRKALYMAAQRAEFCDPVFHAYYEKKRNEGKHHLVATNAVARKLCHTIYAILKKDVPYEVQ

SEQ ID NO: 373795 - protein, 334 aa, unidentified
MDFKHFIGIDISKGTFDYALIKDGNLSAPISGKTTNNPAGLVKFEEFLKNQGVNAKEALFCMEHTGIYCRLLSQYLVENNCYVWLEMPVQIIRSQGVLRGKDDRVDAIRIAMYACEKKDKAVLWQPPREVVLQINDLLTLRDRLIESRKSLKQPIKEFQDAGFKDTARLIESRCSGTLKALDKEIEQIEKELDKLINKDSNLKKLQDLATSVPGIGKITFLTLLFFTNEFTLYTNAKQLACYCGVAPFAHTSGTSVKGRTRVSNFANKRLKKLLHLVAMATISCDRELSSYYQRKVGEGKNRMLVINAVRNKVLHRLCAVIRRGTPYQFEYQTA

SEQ ID NO: 373796 - protein, 346 aa, unidentified
MEHYVGLDVSLKLTAICIVDRTGKIEREGVVASDPETIAAFINSHAPHVARVGLETGATSTWLWTELNKMGLPAICIDARHAKAALKLQINKSDRNDAVGIARIMQCGWYKEVRVKDFDSHAIKALLVSRALLVKIKRDIENQIRGLLKNLGLVIGQAKMNVFSVRAAELAGARPELTAAVEPLLRAREAVGRQIADLDGKVMRLARNDAQVRRFMTAPGVGPITALCFLATIDDPTRFRRSRSVGAYVGLTTRRYASGETDWTGRISKCGDKMLRTYLYEAANVLLTRVAKWSALKAWGIRLAKRSGLRKAKVAVARKLAVILHRMWIEGSEFKWSSKEAANQPA

SEQ ID NO: 373797 - protein, 390 aa, unidentified
MDVLYQSCAGIDVHQATVVVCILHGPLTSTRPKREMAQFDTTTKGLKACHDFLSQFHVEAVGMESTGVYWRPVWHELCDDFELILAQPAHMKSIPGQKTDKKDAHWIAQLTRIGLLPRSFVPDETIQELRELTRQRKHYVESRNRETNRIHKILQSGGIKLTTYIEDIMGASGRNLLQLLIDETPATPRMIHQSVYTSLKRKVPQLLEALDGYFSAHHRFMLGQSLEIYDFYQKQIDCLEERMNGYLNLYERPVEILDSIPGMDLITASVIIAEIGVDMSQFPTAGHLASWAGLCPGNNESAGKKRSTKIRHGNSYLKRCLCQAVFAAKRQKGSPLAERYYQIQNRRGPQKATIALAHQLLKLAYILLKENLTYQEFVLQKKATRDEPVA

SEQ ID NO: 373798 - protein, 342 aa, unidentified
MAGIDLHGNNLVIGVINQDGKRITHRKLDCDLKQVTEFLEPLKPKLQSMAVESTFNWYWLVDGLNAQGYKIDLANPAKIEQYSGLKHADDKHDAFHLAELQRLNILPKAHIYDVQLRPVRDLLRRRTNLVHQRTALFLSFKSLYARTTGQVMPLKVLKITQPKEAKDLYAHPANQLIAQVQLEHIEALNKSIARMEKAVLHCAREIPLYEKLLTMPGVGRILGMTITMEVGDIKRFKTDGDFASYCRAVDSRRLSNGKQKGENNQKCGNKYLSWAFVEAANFAKRYDLNCRRWYDRKKARTSTVIAVKALACKLAKAAWHITAKGTDYDATRMFPELALKRN

SEQ ID NO: 373799 - protein, 362 aa, unidentified
MQKHIFVGIDLGDKNSVARIAVDREKSERFGFVNTRAGRARLMAEVKRRREQAGGAVIVMAYEASSCGFVLRDLAWAEGIDCKVLAPTKMEKSVQLKKNKNDDRDADDVLEKLRGHVLAGNRLPTVWVPDLETRDDREVLRTRLALSERQTQVKAQIQMLLKRHGLEKPSDLGSSRSKQYRHWLESLSECETVGWGTRQSLASLLRQLKGIEGEMENLDKLVKHLGGQPRHKPIVEALMKETGVGLLTALVYRTEIGQASRFHRGRHVGKFVGLTPTSHESGQQSDRKGHISRQGPPRLRKVLCQASWVHVRYDPQSREVYQRLVAKNPKKKKIALVAAMRRLAVRLWHRMREAELQQQTQP

SEQ ID NO: 373800 - protein, 390 aa, unidentified
MTKRKTETVNDLSRCLDPLDMDATLIAVIEMSQSSWLVAGIVPGVERQPLKKIAIDEHALLKLLSSWRKEAEKKGHKITRVTVAFEAGHDGFWLARWLAAFGIEVHVIHAASVAVTREHRRAKTDRLDTELLKRGFLGWLRGERGHCKMVLVPTLAEEDAKRPSREREALVGEASRIITRLKAAFVRLGIRRFNPKLKAAAERLATLRTPEGEPIPPNTLAALKRDLERNNIIKRQIREIEQTRLDHLAQAPAKGPHRMVLLLARVVGVGVETADMLVHEVLSRKMRDRRAVARYAGLTGSPDESGAKRREKGLARSGNARVRRGMIQLAWRFLWLQKDSALAEWYRQRTLAAPATRKTLIVALARKLLIALWHLAYDGIVPEGVQMRPA

SEQ ID NO: 373801 - protein, 344 aa, unidentified
MDHFGGLDVSVKETSICIVDDTGRIVKEVKVASEPEALLKVLGNPTYRFKRIGLEAGPLSQWLFSALAEAELPVICVETRHMQAVLQAQINKTDRNDARGMTQMMRAGLYRPVHVKTLRSQKLRMLLTHRKLLQSKAIAIENDLRGTLRNFGLKVGMVGKVRFEARIQELVENLPDLAVLVEPLLIVRRALREQIVILHRRLLAIVREDEVCRRLMTTPGVGPVVALTYRATVDVPARFRKSKSVGAVFGLTCSRYQSGEVDWSGKISRCGDEMMRTMLYEAAQSMMHSKKWSWLKAWAMQIARRRGMKKAIVALARRLAVIMHRIWVDGTEFRWTREQVAAAA

SEQ ID NO: 373802 - protein, 482 aa, unidentified
MTLIRSVGIDLSRTGSHQVRCLDEQARPCDSFSFDSTLEGLENFEKRVFSNGDTPTIIFEPTGLAWIPIAVYLRARHPECQMVKARLQKVAALRRYLRSYTKSDRVDGLTLAKMPFIDAEQLDEAYLPPSEYHSLQRLTRQRERLMKSITIRKNRIGSIINGYLPGLRKTFSNEWSDRARLFYRQRLNPFTVVRDGKSALETFLVSVKGKCAVTESHRVYQVCQKLAEFYEKSKAAGMINEDFFDDLQDEIACELRLMETEEAEVERVSVRIEELYGHLHPCDYLRSIPGIGVRTAQVFLSIIGDPHRFRSQSAFANWTGVVPGARQSADTEGKGLRMTKAGPSMMKRALFQAGDIARRYDPQLAHLYYREMVHHGKTHLQAMGAVMSHLGARIMAVLREDRPYELRDTQGRLITKKEAMELIRSAYKVPEETRQARRHHKSNVGRLTGRRTREAAKAPQSGLIIPPQKTVYCAEELQSIVN

SEQ ID NO: 373803 - protein, 353 aa, unidentified
MNNRKYIGMDVHQASISIAVSDAAGKVLMECIIETKAATVLEFIQGLRGSLWVTFEEGTSAAWLYDLLKPHVAKVVVCDPRKNALLKAGNKNDRVDARKLGELLRAELLTPVYHGESGVRTLRELSRGYLAVSKDLTRVMNRLKAIYRSWAIPCAGQQVYSPRHRAAWLEKLREAGVRRRAEQTYQQLDFLMEIRKETRKELLAESRKHPARKLLEQIPRLGPIRVALLIALIQTPHRFRTKRQLWNYCGLGLRTRSSGEYRYTGGQLQHARKPPALRGLNVNHNHDLKHLFKSAATQAGNDPLGAFYQNLLAGGMEPPMARLTLARKIAAIALKIWKKGERFDPAKLKQQAA

SEQ ID NO: 373804 - protein, 360 aa, unidentified
MFTERTSVGLDVHARSVVAAAIDGVTGELVQTTLTPSHEQIRLWLAGLPRPVAVAYEAGPTGFGLSRALTAAGIRCEVVAPSKLQRPAGDRVKTDAKDAVHLARLLRLDEFTAVSIPTVDQENARDLVRAREDCRGDLMRARHRLSKLLLRHGIVYSGGQAWTGTHEEWLRRQRFASAATQMTFDSDYDAVLNVKARRDRLDDAIVTMAASGEFSPLVRRLGCLRGVSTLTGFALAVEIGDWSRFTGNTIGSFVGLVPTEYSSGQSRMQGGITKTGNTHVRRLLIEAAWHHRARYVVGKTMRDRWELASPAARARGDAGNQRLHQRWVRFNDRHKRQVVANVAVARELAGWCWSLAVLEE

SEQ ID NO: 373805 - protein, 415 aa, unidentified
MEVVHPRCAGIDVSKRDAKLCIRIQGSSGRKTSSTVTTWGAMTNQILALRDHLAAQQVTVVIMESTSDYWRPFYYVLEADFEVMLVNAHEVKNVPGRKSDVSDAAWLADLGAHGLLRASFVPPEPIRQLRDLTRARTHITAERTREVQRLEKLLESAGIKLSSVASDITGVSGRLMLQALIDSHGAADPAVLADLAKRRMRSKIPVLTEALNGYFTEHHAFMTRLFLDRIDAHTRDIELLSQRIDGLMTPFLPARALLESIPGFSQTVAEIFIAETGGDMTQFPTPEQLASWAGVSPGSNESAGRVKSTKTRPGNRYLKGALGVAALNQAKSKKTYFSAKFRHLAPTRGPMKAIVAVEHAMLIAAWHMLTNSEFYRDPGADYYTRRDPARTKTRAVKQLEALGYTVTLQPLPQAG

SEQ ID NO: 373806 - protein, 369 aa, unidentified
MEKNTIYIALDDSKRKLVVAMLRPGATEPEEREIPKDPSHIQRLFRRLQREGPVQACYEAGVSGYDLYRQLTAGGVTCQVIAPALTPRRPGQRIKTDRRDARKLVRLFRAGELTPIHVPDEAEEAARDLVRCREAVRRDVVRWRHRLLKLLDRHGRLWVAEKNWTQRHWSWLRAQHFALPALQRAFEATVFALEQALARQAALDHEIEALAQTAPYRDPVGWLRCFRGIGTLSAMVLLAEIVDFQRFRRPRELMAYLGLVPSEYSSGETQRRGALTKAGNTHARRVLIEAAWHYRHRPTVGRALARRSQGQPEEVVGQAWRAQQRLHRRYRHLIGHGKRPPVAVAAIARELVGFLWAAMTRRETRAPVA

SEQ ID NO: 373807 - protein, 337 aa, unidentified
MTADGTIKLRRKLSCDFSQFLKVIEPFRASLAVGLESTFNWYWFVDSCVSFNINVYLGHAYYMKAIHCDKKKNDRLDAHKIANLLRAGLFPLSYSCPASIRSTRDLTRRRNKLVNQRSKLLAYRTLSFYQQGLTHIDKSKKGRKAGLSTISDEAIRFGATEELSVVESLDSAIKNIESHILKQAYIDFCEELPLLQQIPGIGPTISTTILYETSEINRFKKRQDYSSFCRLALPEHSSNGKVLGHGKRKCGNPHLKWAYMQIVTNASQKSESIGRLYAELKEVHHPLKARAIMANKFATAVYYILRDKVTFNVKQFCAEVDSQTPEAGDFSSDVKVA

SEQ ID NO: 373808 - protein, 356 aa, unidentified
MNKISKLDFKGQQIYVGMDIHKKSWSISILTERFEHKTFTQPPDVGVLVKYLKRNFPGGSYKSVYEAGYSGFWIHDRLQEHGVQCHVVNPADVPTKDKERRSKTDRVDCRKLARSLRNGEIESIYVPSRPKVEDRSLIRTRHNMVRKQTRCKNQIKSILHFYGIQMPEELGDRYWSKRFITSIETIRMERASGNFTLKVHLEELNNMRKIITDLTRGIRSLADSEDYRQNVRLLKTLPGISTLTAMTLLTELYEINRFRNLDKLCSYVGLIPDTDSSGETERKTGITKRRNAQLRGILIESSWIAVRKDPALMMTFILLCKKMPKTNAIVRIARKLLNRIRYVLKAQQEYVPAVVQ

SEQ ID NO: 373809 - protein, 331 aa, unidentified
MSRSAGIDVAARTAVLTILHEDRVETTKIIEQTAKGHQQAVALLSKCNPDRVVLEATGIYYLDLALALAEAGLPVSVINPKSSHHFAKGMLEHNKTDQVDARLLAQYGERMRPRLWTPPTATQLSLRTLGRHANRLVAARTRAKNQLHAYTASKEQVDLIVEDLKDEITAFDRRIERIRKAAIEQIESDQRLQHVAKAILAAPGIAEVSLISILAELTTLPDTLKSSQVSRHAGLDVRLTQSGTSVNKPGRLGKAGNIYLRSALFMPAMSAVRFDPYAKGFYDVLLGRGKKKMQAIAAVMRKYLTGIWACMRSGEPFDTAKLFSEKHLLKA

SEQ ID NO: 373810 - protein, 359 aa, unidentified
MPDVSSNAPADVRLWVCLDVHKFSIVAATLPAAGGTPQVQRIETTERAIRRFIDRLGGPVGLAVAYEAGPGGFDLLRLLGRLGVACDVIAPSLVPVRAGDRVKTDRRDATKLVRLYRAGELVFVGAPDEQTEGLRDLMRCRDDLRGARTAARHRVAKQLLRHGRIYRDGKKQWTQRHQAWVRRQRLNDPLAQTALEQMLLYLDALDLQLERLDGDLEQVAQSERWRAQVKALCAFRGISTRTALGLIAEIGDFRRFAHPRELASWLGITPTEYSSGDQQHRGHITKTGNRHARRLLIETAWHYRHRPRRPQQDRRHLIAHGRRRSVCTAAITTSSDAASAPPSQTSRSPASSSRSCGPR

SEQ ID NO: 373811 - protein, 430 aa, unidentified
MKSNTQNAKIEAITEKTLVLGIDVGSETHYARAFDYRGIEYSKKPFKFSNTEAGFVTFKEWILDLKERHEKDKVVPGMEPTGHYWFNLGKFLQDNEMKPVLVNPHHVKKSKELDDNNPTKNDRKDPKVIAGLVREGRYMIPYLPDGVYADLRTASNIRFQLQAELTRIQNRISRWFNIYFPEYKTVYGKPDAKSGMLILKAAPLPEDILTLGIDGVNQIWRDAKLRAVGKARAKTLIEAAERSVGSKEGAVSARMEIRMLLEDYESRNTRLQEVMVLIEELVKGIPMAEKLLEIKGVGIRTVSGFLAEVGDISRFNNPKELQKLAGLALVENSSGKHKGGTTISRRGRKRLRYLLFEVAMSLVAKNPEFRELHNYYTTRRLNPLKKMQSLMAIAAKLIRVFYVMLTKGVNYDPKKMVNDIKRPAVYLQTA

SEQ ID NO: 373812 - protein, 414 aa, unidentified
MEDILECCCGLDVHKESIAACLLKGPLEGGAKPQREIREFGTLAKDLAALRDWLEAEDCRHVAMESTGIYWQPVYAVLEQAFDAEMHLLVVNARHMKQVPGRKTDMRDAEWIATLLRAGLLKGSFVPERDIRDLRQFTRYRKALVRDITSQKNRIEKLLQASGFRLSSFLSDIFGASGVAIMHVLVEEGSISRQNLDHCLKGRARQKASEILSSLNGTLSLPQRQLLKMQLAHLVDLRENLQEVEEQVSDGFTGFEIQVDLLDTIPGIDQTAAYAILAEIGQDMSAFPTAQHICSWAGLAPGSNQSAKKKKRQGVTHGNNYLKTMLCEVAWVIAGQKKQYLSGWYWRLKQRRGAKRAIVALARKLLVIIYAMLKSNQPYNEEKFLERKQASEQRRVGRMVSELKRLGFTVTLAS

SEQ ID NO: 373813 - protein, 405 aa, unidentified
MVRYIGMDVHREFAQLAVVEDGLVRDAGRIGVTPEALRAWAEGLRGDDQVALEATGNSDAIANLLMPLVGRVVVSNPSKTRAIAEAKVKTDKVDARILAQLLAADFLPPVWLPGERTRCLRRQVSRRAHIVRQRTRIKNQVHAILTRNLAPTPPVSDLFGTTGRRWLSRQDLPADERAAVQALLRQLDFHASELTAVDRDLAVEAFGDPVVARLMTIPGIDSIAAISIVAAVGDFSRFDNPDKLVAYVGLNPKVRQSGNSAPVHGRISKAGRAQVRGVLVEAAWSATRAPGPLRAFYQRIQARRGFQIAVVATARKMTVLAWHLVTKDQDYAFARPGLVAHKRRKLELAAGAPSQRGNHRQPGAAYNDKQRRHEEALAAERAERAYQVLVAHWQPTKPNSTPARA

SEQ ID NO: 373814 - protein, 433 aa, unidentified
MKVLYERVAGIDVHKDMIKVAIRSPGDKPWTRKTEILEFRTFYGVLQQMARELRKRGVTHVVMEASGVYTEPVYYALCEQDFEQVAVINPAHAKALRGHKTDAKDCARLAELFECGLLRGSYIPAPELKEVRDLTRYRMKTVQARTSEIQRLGKALESAGIKLGSVASSITGASATAMIEALIDGERREQVLADLAKGRMRAAGKLADLSMALTGRFTEHHALLCRLHQDRIAGFDGAVAGLDERIAGKVTRWQREQGLLTSVPGFGDVVAWAWLAEIGPAPHRHFATHEKLASWVTLCPGNNISARKRKHGRTGDAGTYIKPMLVQAAWAAIRVRGRLQARYNRLVRRFGGDKNPAAKKKAITAIAHTLLKIAYQVLKSGTPYQDLGTDFYTRRESPGHKQAWLERQLQKLHPGCAVTITISPLEAALTPVA

SEQ ID NO: 373815 - protein, 316 aa, unidentified
MKSWQVVGIDVSKETFDVSRGVGEHKWFNNDEEGFAQLMSWLPEDAHVVMEATGTYYLRLANYLYDRQIRVSVVNPAVVSYFARMKLKRAKTDPMDAGVIRLYGEYDDVAPWQPVEKIFIELNQLDSHLVGLQKDLNRVVGRLEALNHCVTINEFTLTDLHTQQADLEQRIKACEKELANRTREHFSDLYDLLMSIRGIGSKTAVMFIVLTRGFTKFPSAKLFAAYLGLSSFLSQSGTSVKGRGGITKMGNSRLRQLLYMAALTAKHHNRACKEFADRLKENGKPPKVIRIAIANKLIRQAFAVCLKEEKYSEAFA

SEQ ID NO: 373816 - protein, 361 aa, unidentified
MEVGKESVEHRVVGGGVDTHKDLHVASVVNEQDQVLGTQCFATTRQGYRLMLAWMRSFGQVQRIGIESTGTYGAGLLRFMQKAGIEILEVTAPDKQDRRKRGKSDDLDAQNAAHAAFAGKRTVTPKSRDGMIESLRVLKACRKTAVTARRIALQMIQNTIVCAPDSLRETLRKMTRMQLIRTLAAWRPDLTDYRTMETAYRISLKSLGRRYLELHDEIADLDAMIGAIVDELAPNLVARNSIGHASAAQLLLTAGDNPERLRSEASFAALCGVSPVPASSGKTTRHRLNRGGDRAANSALHIIAIGRLRTDQKTQAYMARRITEGHSKLEVIRCLKRYIAREVFTLIGQRYKEINQARIAA

SEQ ID NO: 373817 - protein, 396 aa, unidentified
MGTVGIDIGGRVHVAAHCREGQSRADRSVLKISQSRAGFTALDAWLDAGPEPVELVVMESSGHYWMPLAAHLKRRGVPVAVVNPLAARYFAKSRLGRTKSDPADARSLAEMAMRDTPPARDPLIGVELRQAARFAMTLVTEQAKVCQRLYRLGELGFPELRELFDDPTCRTARAVLRLAPTARQATRRQTETLANANKGPGQRRLGQTKAERLRAAAAETIAVPELDAETAFEIGHLLDQYDLLERQIEAADRRVAGLLDGEIAHRLLTIPGVGPATAATLMAEIGDIGRFTDFDQLLAYAGVHPAERSSGTKGARPGTSWHMSKAGNSHLRAAAYRMAVVGVQHNPVIAAHYARKRAAGKSPMNALGHCMRKALSLVWGVWRNGRDFDPTWGVES

SEQ ID NO: 373818 - protein, 364 aa, unidentified
MHYVDNTTELSSPEETRCQFNGSKADIKLGIDVHQDFYVVVEQVGGSNPKPAQRFRKEAFLPWAAKRKGQGNQVHAVYEACGFGFGLQRQLSALEIQCYVVCPQKLDERNRRVKTDGLDAKALCLRLDRFVQGNRAALALVRVPSEAEEQLRAIHRQREQLVKARKQLEAQGRSLMVNHGIEPVQGWWKPRTFAALQVPQWMKALLSNSQPILVALQEKIRALTVQLQAAARAKQPCGLGALTSVVIDREIGNWNRFRNRRQVASYTGLCPGEYSSGNTRLQSCVTKHGNPRLRAALVELAWRLVRFQPNYKPVLKWRETLRKGALATGAARKKAIVAVARQLAVDLWRIRSGRLSAESLGLSN

SEQ ID NO: 373819 - protein, 392 aa, unidentified
MIIVGIDVASQKHDYFMLQKETGVVFSSSSITIPNTLNGYKKLHKDIQSFCGATSDYTVRIGLESTGIYSTNITTFLVSEGYEVMMINPILTNMVRKASKVHCPKNDNLDSQTICKYLVDNMGSFSPYTSTLYHTLALKSLSRKRFYIVDELRKAKLNVYKLVHLMFPEFESFFSNIYVLSALSILKEYPSPQKLAKAHANKVSALIHGRCKCSALELIDAAKNTAGIKSDYDSFQLIDAIEELEHIQKRVEKYDVQIENYVKQHFPNLLTIPGVGYITAGLIAGEIGDINRFHSADSLVSFAGIDCTVYESGNYKAKHTIPSKKGSKYLRYALFQVARIVWQWDPVFKDYYLKKQSEGKHFYVILGHIQKKLLRVIYSLMKSGLNYKVISA

SEQ ID NO: 373820 - protein, 377 aa, unidentified
MKRIKFVGLDVHAETISVAVAEQGGEIRSLGVIPNREESIRKLVKKLGPVEDLRFCYEAGPTGYVLYWQLTRMGDQCEVVAPTLVPVKAGDRVKTDRRDALKLARNYRSGELTPVWVPDAAHEALRDSVRAREAAQQDELRARHRLSKFLLRHGRRPPMGVKAWSMKYLEWLKREVHFEQLAQEATLLDYLHEVEHGAARIARLDGAITEAVKSAPPQMGAVIEALQALRGIALVSAVTVVAELGELSRFTRATQLMAYGGIVPSEDSRGERSRRGNITKTGNAHLRRVVVEAAWAYRHRPSVGTKLRKRQEKVSEEVKEISWKAQHRLHGRYRKLLGKGKNKGVVMTAVGRELLGFIWAIGIQAETAYKEPLPRAA

SEQ ID NO: 373821 - protein, 387 aa, unidentified
MSRNARVPVPVTMLDQDSTLVVVLELSARSWLVGARVPGIGRMSRYALAPSAEALAAWLGTAKARAGATGRTVVRVVLAYEAGRDGFWLARYLEARGVEVYVIQPSSVLVDRRARRAKTDALDVEMLMRTLLAWLRGEPGVCSMVPIPEVAEEDGRRPVRERQGLIGERLALLNEIDGLLATLGITGYRPLRRDRRAQLAALRTPEGDPLATNAAARIGRILDRLELVMQQIAELEQVRDAVLAKEVASGEAETMIRGLARLKGIGAELATVLVWEAYVRSFPNRKALGAYAGLTGTPFASGSTTREQGISKAGNRRLRSSLVELAWLWLRYQPDSKLAAWFRSRTGSVGSRMRKVMIVALARKLLVALWRFCRDGVLPEGAALKAT

SEQ ID NO: 373822 - protein, 395 aa, unidentified
MGIDLHKETHTAVMLDCWNQKLGEITFDNKPSVFHKLTRKVSRFVTKEKTAVYGLENAYGYGRALAVWLLEKGCAVKDVNTALSYAQRKSVPMYQKNDSYDAEAVALVLINMLDKLPDAVPDDAYWTLGQLVNRRDNICSHQQRLKKQLHEQLCVAYPSYKGFFGDISRATALYFWLNYPSPEHLRGKTAEELASELRPISHNNCSIKRAEKILERVRTDGQTAREHQASRDAITRSIAGDLEHYREQLKIVESAIETMLPSFRCTLMTMPGVDVTTAANMLSEIGDIHRFPNADKLAKFTGICPINFSSAGKGKDMCPKQGNRRLQSIFYFMAIQMIQVSTNGTPRNKVFREYYLKRVAEGKNKQQVLICIARRLVNIVYGMLKNHTEYREPEQ

SEQ ID NO: 373823 - protein, 356 aa, unidentified
MPVYLGVDFHARSQTVCWCSTEDGVIRQRTLDHERDNVPAFYAQFAAPAIVGLESSGYALWFHRLLAEQGHHVLVGDAAAIRKFAKRRQKNDRRDAELLLDLLLHGDFPAVYVPPPASRDVLGLLRYRHRLVRMRTMLRNGLQAVALNHQLRLGPGLFTARGRQQLSALPLDGADATQRTHSLALLEALQKKILEVEEILDARAADDPRVTRLRTHPGVGLLTSLAVVHTLEPVTRFDRARRIAAYCGLDPKEHSSGETQRYGHISKQGNRLLRFLLIEAAQAAVRPGQDDDLRRFYYHLLVKKHAAVAAVAVARKLVLRLYRMLRDQIDYDEFRRRGRDARRAREISSLPIHRDG

SEQ ID NO: 373824 - protein, 430 aa, unidentified
MEIVYPRSCGVDVHKSFIVAVICISESVKPKYIKKRFSTFNNQLIQFRDWLVENNCQNVCMESTGKYYIPVYNALEGHISNVVVANPKWVKAIKGEKDDNKDAKWIADLFKFGIVRSSYIPEKDIRVLREFTRYQYKLVNMRSSEKNRFQNALTTGNCKLDIVFSDIFGKSASAIVDTILSNDPYTSEDILSKVHVGCKASHEDILSAVEGIQLNQFQKARIKIVQKHMEYLDSLLDEIQHHINLMVANYEEYIQILCTIPGINRKSAITIISEIGTDMSQWSSHRKLAAWAGLAPGCNESAGKKKSVKISKAGVYLKPCLVQVAHAAVKDKNCDYYADKFNKISKRRGKKRAIIAIARKILTAVYHLLKTGEVFNPTDMADVETTKKQRIEYVKNNLRNAFNQLSHTGLSEAEILQLIRKESTNSPQIE

SEQ ID NO: 373825 - protein, 332 aa, unidentified
METKETIGIDVSKKTLDVRIHNKKMHRVFENCPKDIAKMIKWVLKNTDFDREEMMFTFEHTGLYSLQLSATLSELGMRYVAIPGLEIKRSLGLSRGKDDKVDAAKIALYAYRLREELESCQMPSEDLQSLKRLLSLRDRLVKQRAGYKASLKEEKRVLKQKDNKILLNAQEEMIGHFSKKIKKVEKEMDRIIKENRELDKIYGLVTSIKGVGPQTALYMIAYTQGFTKFENWRKFASYCGTAPFPNSSGTSIRGKTKVSHLANKKIKSLLDQCSKTALQHNPEIRQYYRRRVDEQGKNEMSTINVIRNKLLARIFAVVKRGTPYVDTLKYAA

SEQ ID NO: 373826 - protein, 315 aa, unidentified
MEVVYERCAGLDVGKDEVVACIRVPDGAGGRRQEVHTYKTFSSGLVSLAEWLQDHGVTQVVLEATGQYWKPIWYVLEERGLELLLVNARHVKLLPGRKTDVGDAAWLCELLEHGLLRGSFVPPPAIRQLRDLTRYRKRLVQTHTAEGQRIHKTLEDASIRLGSVAADVLGVSGRAMLRALLAGERDPGVLAGLARGRLRNKLPELRQALHGRFSAHHALLLRLALEHVEQLERSIAELDAEVDRVIAPFAWARDRLDTITGVGKRAAETIIAEIGVDMSVFPTAAHLASWAGRCPGNNLTGASAARAGPPRATAG

SEQ ID NO: 373827 - protein, 315 aa, unidentified
MYLGIDVSKLTIDCCLISDGLFFERKFKNSQAGFQDLKDWLKENGATERLHCCCEATGKYYEAAAEYLSKYYRMSVENPRKIKGFGTAVLQRTKTDRQDAKTIAQYCKALEPRPWQKPTEAQTKLRELTRYQHRLKRQKAAEQTKLQTAPAYLLPLIQSTITHLQQQIKAVQNQLNQFHKDNPDYKIQKERLKTITGIGEAAANSLLSVLTQTDRFKTAAQFVAYLGLDPKENQSGTSLKGRPRISKLGNTHLRTTLFIPAMHAYRSSTFAKYVSRLQKNGKRPKVIIVALMRKLAVIAFTLLKNGQDFQVERYK

SEQ ID NO: 373828 - protein, 424 aa, unidentified
MNLTQNDRLKQVTSDTLIVGVDVGSQTHFCRAFDWRGFELSRRVFKFSNTGMGFLTFLRWTEELMNKTEMKKVIVGCEPTGCYWLTFQKFLQDHDVQLVTVNPFTVNRSMELDDNSPEKSDLKDPKTIALLVKDGRFSTSYLPSGVYAEIREASVCRDQIMKQHVRLSNQIQGWLQKFFPEYFECYADWDSTSGLMLLREAPLPQDILKIGAGGINQIWRDAKVRAAGIKRAQTLVEAAQNSVGLEAGEAARLEIWVLVNDYILKAEQLKRLDEYLEEKVKEVPNVEKLLAIKGVGMSTVIGFIAEVGDIGRFTDPKQIQKLAGLEIVKKSSGKKKGQPRISKRGRRKLRRTMYESARALMTWNPAFQDVFLYYRNRTKKPLGGMQAKIAVACKGIRIFYVVLKTGCDFDEEKFRKDIIRPEAA

SEQ ID NO: 373829 - protein, 376 aa, unidentified
MSNVRFIGLDVHAETIAVAMAEPDGEVRSVGVIPNRPESIRKLVKKLGPAEQLRVCYEAGPTGYVVYWELTALGVKCEVVAPTLVPVKAGDRVKTDRRDALKLARSYRAGDLTAVWVPDAAHEALRDLVRAREAAKKDQLRARHRLGKFLLRHGRRPPTAMNPWTQTHLTWVKTVHFAHAAQEATLLDYLHEVEHMADRIERLERAIDDAVQTAPERMRAVIEALQALRGIAQVSAVTIAAEVGELSRFTTPRQLMGYSGAVASEDSSGERIRRGGITKTGNAHLRRVVIEAAWAYRYRPAIGPALRKRQASVSPEVNAIAWKAQHRLHARYRHLTARGKCKQETVTAVGRELLGFIWAIGVTVEARGRGEQSAAA

SEQ ID NO: 373830 - protein, 343 aa, unidentified
MKKYFIGIDFSKKTFDVTMLREYDDHNEDLGYKQFDNNNKGYHDFYRWARDTAAKGTKSQWLLCGETTGCYSEGLAEWAYKKGLDIWIENAYSIKHSLGLTRGKNDKLDSKRIATYAQEKKRKARLYKPLEGTLKELRVLLRRIQDLDSCRKAMLNAIKEDKEMYGDDDAIKDIYEKIDEIAADIKDVEDQIQERMDTMERTEPEMANNYAIVRSTHGIGVINGIAFLVYTDNFTKFQTANEMATAWGVAPFNKNSGTTIHMPGYVSFFCNHWLKGLLTCAANRAIQYDNKISNYYNRLIKKGKKKGVAYNNVKNKMIHIVFTMVKEQTMYDENYDVNKKDKK

SEQ ID NO: 373831 - protein, 407 aa, unidentified
MRRYYLGVDWADQEHAVWVEDELGAKVTALAVQHTAAGLSEFGRWLYAQRAQEIELWAAIEKPEGRLVDFLLDHGVVVYPVNPKALDRARDRFRMSQAKSDPFDARVLAAFLRTDHAHLRPLVPNSEPAQELKLLTRDYRRLVRQQTRLVNQLTATLKEYYPRPLELFEDLTTAVVRAFLESFPTPEALRALSRKQWQRWARAHGLSEARTQALWEALTQPQLPVPPHVVRAKARLVRVLVEQLGAAVYAVEEYRKAVEDFFAAMPAAEWAQTLPGGKSGTTVPTLWAELGDAPGRWQSFQHLQAEAGGVPVTVRSGKSQLVQFRFACNSHLRSTSYWLAFISLQQSEWARAYYDRQRARGHSHARALRALGAKWLKIIFLMWKHHARYDENHHLATMARQQLRQAA

SEQ ID NO: 373832 - protein, 344 aa, unidentified
MTQVTTARVTTVGIDIAKNGVCIHGVDAHGHVVVKKRLARQKVLPFLTQLPPCLIGMEASGGAHYWAREFTQLGHTVQLMSPQFVKPYVQSQKNDPNDAAGICEAVERPRMRGVPVKSITQQDVQALHRIRERQIKARTALINQIRGLLMEYGIVIPQRASQVRHKLPIVLEDAENGLTATAREWLHALAEELQALDQRIAATDQQIERVCEADEACQRLAQLPGIGPLTATALVAAVGDATEFKNGRQFAAWLGLVPRQHSTGGKTTLLGMTKRGNCYLRTLLIHGARAVLRVVDRKTDARSRWLQGVKARRGMNCASVAQANKTARVAWALLAKGDRYRHAA

SEQ ID NO: 373833 - protein, 411 aa, unidentified
MKLFVGLDVSSFDIKVCFLDGEGEKLKSFTIQNDLPGATQLRDTILNTARGQSVDVLRIGLESTSVYSFHPSMFLHNDEFMRGLGAKVFVMNPKQIANFKKSYSDMDKTDEIDAFIIADYLRFGRLPMSVVKEEQYVALQQLTRARYQLVRQVTQEKQRFLQHLSFKCNTFTEEVESSVFGKAMMDLFLEQYSLEELAQMELEDLAAYLRFKGKNRFDDPEQVAKSIQKAVRSSYRLDKVMEDSIDTILATSITVIQTFQRQIKEIDKSIKRIMAGLQQTLQTVPGLGPVFTAGIIAEIGQIERFEDETKIAKYAGLYWRKKQSGHFTAEDTSMSRNGNQYLRYYLVEAANSIRKRVPEYSAYYTKKCKEVPKHQHKRALALTARKLVRLVDALLRNNQIYTPKGASIHEA

SEQ ID NO: 373834 - protein, 348 aa, unidentified
MARFVGIDIGKAKCRAAIMDPGGTILEEFTFANNHEGIEGLASRLTLDDRVVMESTGSVWTNLYNHLDERHIPVALANPLKTKAIASAKIKSDKVDARILAHLLRSNLVAESYVPPKHLREVRALVRHRVGIVKIRTMVKNEIHALIDKHGLGHEFSDLFGKHGLEWLRSLELPPLDRLILNNHLTHLESLDQQTERVDEEIHNKAVEDEDVRLLLSMTGIDVYSALLIRSEIGSIERFPDYKKLVSWAGLAPSLHQSGSVEYHGSITKQGSRMLRWIIVEAARVAVNHDTKMRSFHERVKHRRGDQKATIAVANKMLKIIWFMLTRREPYESRNEKRYQQKLNSIAA

SEQ ID NO: 373835 - protein, 350 aa, unidentified
MSLELQSLLPYPNSCLGASPHQQERDTKMAMRSFCGIDVSKDRLDVMVLPEQQCSSARNDAAGWFQLIEWLRGFSISAIGLEASGGYERGIMRALLAAGMSVRQINPFKLRQFAKASGVLAKNDRLDARMIASFVAVMPTNPVQRQGPAAERLAEMVTVRRQLSDAKIAAENASRMLENAMLQRLSRRRIARLAADIAEIDERLVEIVMSDAALARRYRLLTSMPGVGAVLACTLIALLPELGQLSRTKIAALVGVAPYDFDSGKLKGMRCIWGGRMPIRNVLYMAALSASNWNPRFKAFHDRLAATGKKPKVVIVAVMRKMITMLNAMVRDDMLWAERHSGRHSMPTAR

SEQ ID NO: 373836 - protein, 319 aa, unidentified
MLTITLGLDLGDRTSVFCQLDATGMVSERGKVPTSSAALQPFFARLPRCRIVLEVGTHSPWVSRLAAAAGHEVIVANPRRVRLIGAALRKNDDLDAETLARLGRIDPQLLAPIRHRGEQAQADLALIRGRDALVRTRTLLINHGHGVIKAFGARAPACTKRTFVRKVTPLVPAPLLPALQPALDAIDALSQQISGLDRTIVQVATARYPEVAALRQIPGVGPITALCFVLTLEDPDRFPQSRGVGAFLGLCPREDQSGERARQLGISKAGDPMLRRLLVTAGHYILGPFGPDCTLRRWGLRLAERGGANAKKRAVVAVA

SEQ ID NO: 373837 - protein, 356 aa, unidentified
MSRDIKYIGMDVHQEAIVIAVLNGSGKLVMETILETKASSILQFIHGLRGELHVTWEEGTWAAWLYDLLQPQVQQVLVCNPRRNALLKEGNKSDKVDARKLAELLRTGMLRAVYHGENGLRTLRELGRSYQTISKDLTRVMNRLKALYRGWGIPCAGTQVYAPRYREEWLSKIAQVGVRRRAELLYQQLDGLQALRRTLRPEFLAESRKHKAAKLLRQIPCIGPIRAARLIALMQTPHRFRSKRQLWTYSGLGIETRDSAQYRFVRGQLQRSKKPQQLRGLNQNHNHEMKEIFKSAATRASCGRGPLRDFYAALLAKGMKPEMARLTLARKIAAITLTLWKRGEGFDAEQLKTQAA

SEQ ID NO: 373838 - protein, 387 aa, unidentified
MDVLYQSCAGIDVHQANIVVCILHGPLTSTRPKREMATFDTTTKGLRACHDFLSQFHVEAVGMESTGVYWRPVWHALCDDFELILAQPAHMKAIPGQKTDKKDAHWIAKLTRIGLLPRSFVPDETIQELRELTRQRKHYVESRNRETNRIHKILQSGGIKLTTYIEDIMGLSGRNLLQLLVDGTPITPRIVHQSVYTSLKKKVPQLLEALDGYFSDHHRFMLKQSLEIYDFYQKQIELLEERITVYLSQYENHVETLDSIPGIDVITASVIISEVGVDMSQFPTFGHLASWAGLCPGNNESAGKKRSTKIRHGNSYLKKCLCQAAFAARNQKGSTLADRFYQIQSRRGSQKATIALAHQLLKIAYILLKEQMTYPEFLAQKRLLGTS

SEQ ID NO: 373839 - protein, 327 aa, unidentified
MIRLGQDFRRSVTAINEMVRRRVGLRLGSTNKEDHRNAHRICGHRFGKTAFHLVALGERSKILLRRKFSRSQLLTYTANLPSSLIGLEACAGAHFLGAMLRKQGHQVRLFPAQFVKPYRKSNKSDFIDAEAIAEAVTKQNMRFAQLKTQEQLDWQAMHRVRDRLVQRRTALINDIRGFLLERGITFAAQPIHLRKNLPTVIEDAEQNLSPRLRSLLDRLWQEWKQIETDVQTITDEIERISNEDTRCRQLRQIPGFGPLVSTATVAAIGNGAAFRRGRDFAAWVGVVPRQVLHRWQAETVRHQQARQRLSASHADPRCAGGTVSREA

SEQ ID NO: 373840 - protein, 343 aa, unidentified
MTEVITIGLDLAKNVFQVHGVDGLGEVAIRRQLRRSQMIPFFEKLPPCLIGVEACPTSHYWSRELQELGHEVRIMPAGYVKPYVKRNKNDAADAEAICEAVTRPTMRFVAVKTAEQQSLMMLHRTRSLLVRQRTMLVNAIRSHLAEFGIVAPVGLRGVQRLVSIVSDPTDERLPSLARICLTSLIATLTTVEWEASCNKRRILAWHRSSEASRRLETIPGIGPVIATALVASVSDPLIFKSGRELAAWIGLVPKQNSTGGKERMGRISKQGDKYLRWLLVAGAMSVIRHGRKTNFEKNPWLADLVRRKPTKVVAVALANKIARTAWAVLVTGETYRQPAPAEA

SEQ ID NO: 373841 - protein, 367 aa, unidentified
MSSVIYVGMDVHQDSFSLCALASSSGEIIRETRCSADVKNVVKFINHLPENESNQVTLGYEAGIWGYSLHNRLVELGYDCVILAPSTMYSNAKHQMVKNDHQDAQMIAHNLASGTYKVVYVPDQEDDEVKEFIRLIKAMKKELKQTKQRIRAFVLRNGFRFERTPWTGVYLEWLSQLQLPRIKKMVLDEYLIHYHELTDKIERLSRLLGDLSHQERYQEPISKLRCFKGIDTVAAMTIHVETSDFSRFPNARAYAAYLGLTPSEHSSGKNVSLGRITKQGNSTIRTTLVESAQGLVRGNPSKKSKKLKARQINQSGRVINYADRAVNRLHERYERMIHAGKPRNVAIIAVARELACFIWGMENNKIA

SEQ ID NO: 373842 - protein, 319 aa, unidentified
MAQNDLVVAGIDVAKDKVDVCVRSLSLKRTFASTAEGRRELTSWLRRRKVGKAVMEASGGYERDWAKALRGAKIEVRIVDPKRVRSFAQSAGRLAKNDTIDAEMIAWFAETFDEARSQAYDATREQLHQMVNARQALKGMQAKLESQGEHALPAAVQRMHARILKTITVELVKFEAAIAAMIQATPRFTELAEIIESVPGIGRTTSAALIAAMPELGQANNKIVAALLGVAPYDDDSGRRRGERHIKGGRRRTRNVFYMACLGAATQHNPVLKAFYDRLVAKGKEKKVALIACMRKLISILNIMIERRQKWDASRYALS

SEQ ID NO: 373843 - protein, 362 aa, unidentified
MFTERTSVGLDVHARSVAAAAIDGVTGELVQAKLTPSHEHIKSWIGDLPGPVAVAYEAGPTGFGLSRALNAAGIRCEVVAPSKLQRPSGDRVKTDAKDAVHLARLLRLDEITPVAVPTVEQEAARDLVRAREDARGDLMRARHRLSKLLLRQGIVYSGGQAWTGAHDVWLRRTGAQLGPAATRLTFESDYESVLTVKARRDRLDAAITTMAADCEFTPVVHRLGCLRGIGTLTGFALAVEVGDWDRFTGKTIGSFVGLVPSEYSSGQTRVQGPITKTGNSHLRRLLVEAAWHHRARYVVGKTMRDRWELAGPAARARGDEGNRRLHHRWNTMRARHKRHTVANIAIARELAGWCWSLAVLEE

SEQ ID NO: 373844 - protein, 429 aa, unidentified
MRTESTPGARGPVFCGVDTHADSHWLYVLDWRGRKVLSRQFPADAAGYEALAGAIAAAGEPACIAMEGTSSYGAGPTRHLASLGMPVREALSPARTQRRRPGQGKCDEADAERAARAAMSGSKLGTPKSQDGWVDGVRCMLAARSGAVKARTSAINTARSLLTTAPEGLRSRFRGMGGPRLMEELPSVRAEGALGAALGALADLWAAARDAGLDMERAIEASLEENCPALLAMYGCGPVSAAKLAVAAGDNPGRLRSEASFAAICGACPIPASSGKTVRHRLNRGGDRQANSALHEIARQRVMRDPETAEYAERARGRGKSDREVMRCLKRYVAREAYRALMHPHEIRRPEDASELVAARRAARVSQVRAASILGTSEKYISMLERGQRELKPIRRAYEAWVEAGLPLDWDRQAFEAERKMDSKKGLAI

SEQ ID NO: 373845 - protein, 401 aa, unidentified
MVSDFRKGRYNLMKIYVGIDIAKLNHFAAAISSDGEILIEPFKFTNDADGFQLLVSKLESFDKNSIIIGLESTAHYGDNLVRYLVAEFYQVCVLNPIKTCQMRKNNVRKTKTDKVDTFVIAKTLMMQDDLRFITFFDLDMMDLKALGRFRQKTIKQRTRLKIQLTTYVDQVFPEIQYFFKSGLHQNAVYALLKEAPSPKEIASMHMTHLANLLKVNSHGHFTKEQAKELRVLAQKSVGANDSAISIQITQTIQQIELLDSQLEKIEAEMTDIMKFNDSVIMTIPGIGYINGGMILGEIGDIHRFSNPNKLLAFAGLDPSVYQSGNFQAKTTRMSKRGSRVLRYALVNAAWNVVRNNATFKAYYDAKRAEGRSHYNALGHCAGKLVRVIWKMLTDEVEFNLE

SEQ ID NO: 373846 - protein, 340 aa, unidentified
MNATTYGLDVAKRVFQIYWVDAETGEIVNRRFGRDDLIQYLSRRPPGRVALEACGSAHWWARKIKALGHDVVLLHAKFIRPFVQTNKTDAADARAIWTAVQQPGMRTVAVKTQQQQAMLSLHRIRSLLVKFRTMQVNQLRGLLYEFGASFRAGRVAGLSEIRARMAELEESLPGTMMCCLQDQLKRIDELQKEIDQLEKRIGAWQKQDAACSAISAVPGIGKLTATALVATMGDARSFKSGREFAAFLGLVPRQSGTGGRVRLGSISKRGDPYLRTLLIHGARSVLCHTKVPTAWQSAIQARRPANVAAVAVASKMARTAWAILAHGQAYQRDYVSARPA

SEQ ID NO: 373847 - protein, 345 aa, unidentified
MNHISIVGIDLAKHVFQLHAIDAHGRKIFGKSVSRQQLRLTLSQMPPCQVAMEACGSAHYWAREIRAMGHDARLLPPQAVKPFVQGHKNDARDAAGIAEAAARPATPHVAIKTEAQQALQAVHRVRTRLVRERTAIGNELRGLMGEFGLVVAQGHAVLRQGVARELIDRHRERLGSALCALLDDLIAQWREVDERLKGYDKQLMGLAKASAEAERLMSVPGIGPINATLLLSHLGDPRRFPNGRQFSASIGLVPRQFSSGGKARLKGITKRGNGEVRRQLVHGARAALRQFQRQTAPDRLARWVCELAARVGQRKAIVALANKLARICWSVLAHGRPYQPQGQAI

SEQ ID NO: 373848 - protein, 346 aa, unidentified
MKCKVIGIDLAKRVFQACALSDTLQPLFNRSITRKKLAATVAQWPSTLIAMEACAGAHYWGRVFEGMGHRVMLIPPQHVKAFTRTHKSDVHDALAIAEASLRPRLHAVPIKTVDQQDAQLLNRLRQRLIQQRTRTLNQIRGFAGEYGVIFPMSRQQCLLQLPLALEDAENSLSFIAREQLALLRDEVIEITTKLETLQQQQRAKAEQDPAYARLSAIPGFGPIVTAGFLGSVGNGHQFQRGRDCSAWVGLVPKQDGTGGKIRLLGITKNGDRHLRYLLVHAARSIIRWIDKRDDAMSAWLKPLIERRGNNRATVAFANKLARIAWNVVAKNESFEMNKAFVPLQKT

SEQ ID NO: 373849 - protein, 346 aa, unidentified
MLYAGLDLSRKRLDFRLLDQAGETVEIGAAPPDADGLRGLAARIDRFAEPVRAAIESMNGARFVHDQLESAGWEVEIADAVRVKGLAPLACKTDRIDAWVLAELARRDLVPAIWLPDPQVRAERERARFRLHLVRHRSSLKQRVHAVLLAHGKPCPLSDLFGLAGRRLLERLALPEPWASTVAASLQLIDELESQISACESELQRLGADHRYVPLLLTVPGIGWVLAYTIAAEIGEISRFPSPTKLAGYTGLCPRVYQSGVSDRRGALSKQGPKYLRWALIEATMHASRHPLYRDRYQQTKQRLGKQRGAKVAQVELARRLAEAIWHMLSRNQPFAPAGAASPLAA

SEQ ID NO: 373850 - protein, 332 aa, unidentified
MKYKVFIGIDVSKLTIDAHLHGIGASKTFSNEEKGFALFLSWVKKYSKQSEPAEMIICFEHTGMYSIKLATYLNDIEIPFAMLPALQIKQSIGIRRGKNDQIDAQRIAEYAWLHRETIQETLLPAKSILKLQSLLTLRNRLVCDRGGYEATWKEQKKALEGKEHKEIFQVYKSLIMNLTVQVKKIEEQIKAVIESDEAVKLNYQLLTSIKCVGPVLAANMIAYTHNFTRFATWRKFACYVGTAPFEHQSGTSIKGKTRVSSLSNKQLKKLIHMVAICACAYNPEMKSYYKRRVSEGKNKMSTLNVIRNKIISRMFAVVNRGSGYVDLMKYAA

SEQ ID NO: 373851 - protein, 351 aa, unidentified
MLIIGVDYHPSFQTIAFLMEETGECGEQELKHSDGEAEKFYRDLKQRGVRVRVGLEATGYSRWFERLLAELGFEVWIGDAAKISRQRVRKQKTDREDARLLLRLLLENRFPRIWVPSPENRDLRQLLWHRHRLVQMRTRIMNQLQAVAMNEGYRWKKKLFSEQGRALLEKLSLAPWASRRRKELLELLDQLDPKIAELTAGVEQEARQRPEVLRLMTHPGVGPVTGLAYVQVIGTPERFPCGKQIGSYIGLIPCEDSSAGKQRLGHLSKQGHALLRYLLGEAAQAAVRCNPHWRRRYMHLAMRRHKNIAKAAMARKLAVRLYWMWRNGWDYSQLVSFGSHAGKLATGQGVK

SEQ ID NO: 373852 - protein, 457 aa, unidentified
MAKQRSKEKKTTAKADATQGLPPLNLHAAGIDVGSAEHYVAVPPDRDANPVQKFGSFTADLHRMARWLKDCRIQTVVMQSTGVYWTALYDVLESYGLEVNVANARHTKTLPGRKTDVQECQWLQKLHTFGLLNNSFRPAEEIRVLRGYLRQRENLVAAAATCIQPMQKALTEMNIQLANVISDISGTTGMAILRDIVKGERDPEKLAMHKHSRIRASRQEIAQSLEGTWRQELLFVLEQSLDLYQTYQNKIHTCDQRIDEQLRSMEAKIDPLSDPIPEPRRGKDARRHQSGFDLRSQLYRITGVDLTQIDGIEVQTAQAIVSEVGVDMSRWKTEKHFASWLGLCPDNRISGGKVLKRGTRQVVNRASTALRLAASALLRSQSALGAKFRRLRSKLGAPKAITAMAHVLARLVYRMLKFGHEYVDRGIQFYETKYRHQQLQWVAKQAAALSMQLVPTT

SEQ ID NO: 373853 - protein, 359 aa, unidentified
MASKVKNNKVNFKGKTVSVGIDMHKISWRVTALVEGDTVLAVTLARPSYDAFKKIISRFEGNHVRIVYEAGPGGFDLYDKLTEDGIECIVTPPSLIPTESGSRVKTDKKDSYKLARFLESGMLKEVWVLSPEERAHRQLTRTRRQIVNHRSDVMRQIKSLLLFNSIDVPFKSTQHWRGPFMNWLLKLDLGYETLNRSLKALVDLFNYLSAEKKRITEDVLELAKKEKYAKRVALLESIPGIGTLSAMEILVEIQDITRFKTADELAAYLGLTPSQYSSGEHIRMGHITHAGNTRARTTLVESSWTLIGKDPEMKGKYQRIKEKRGGKRAIVAVARNLSGRIRRMLLDHVPYELNFQKAA

SEQ ID NO: 373854 - protein, 337 aa, unidentified
MDTSKHIFQLHGVNAAEAPVLRKKLRRKEMVTFFEKLAPTVIGIEACSASNHWARLLQSFGHTVKLIAPQLVKPYVKRGKNDAADAEALCEAMSRPTMRFVPVKTAEQQAALMLVGVRDRLVRNRTQLINAIRGYASEFGYTAAKGKAHLGPLLERIYSDENLPALARELFVAQAKEYAQLQAQVDEVDARLMAWHHADECSRRLAKIPGVGPIGAVLLKMKTPQPEQFRSGRQFAAWIGLTPKDHSTAGKVRLGVITRAGDEGLRSVLVVGATAVIQHVRRGGRASPWLTELLKRKSPKLAAVALANKMARIAWKLMVTGENYAAKSAPAALAAAG

SEQ ID NO: 373855 - protein, 324 aa, unidentified
MSKEKLFVGLDVGKDEVVASMQGKKPKAFSHSSRGVNALVKWVRIVCEESSVHVCMEATGVYSRSVAVHLLSHEGVEVSIVNPAQIKLFSRSQLRRVKTDNVDAEVIRQFAQTQSPRTWQPRPKIEEQLNQLVCQRDHVLQTLLELENRNHSLSYDPDLPEEVKKSQSTLRHCYKRQIANLEEAITRLCAEDASLSHQIALLTTIPGVAQNIAVHLVAFAGEKLRNFSAKELTAHAGLVPSLRQSGTSLNSRGGIAKLGDCRLRKTLYMPAVCGMTHNPKLKAFYKRLTDAGKPNKVALVACMRKLLIIAQAIAKSKKPFNTNL

SEQ ID NO: 373856 - protein, 376 aa, unidentified
MRSLGIDCGQLQHRFCLLDETGRVLAEGAFGENRRGLAELRALVEAQQAPQVVVMEASGACWQNLCAELQGWGWPAHAVDPQRAAQFARLHNPRHKTDKADARSLARLGLQAPQASFTAGAQTTLAHALARAIEQRSALLNQLHSLVLVANPALLACRWVVGAARSLAVLRAYPTTRELRRARALAKVRFGPRHRVGEKAAAALRQAAQEALSGALNEAHAAQVRFLVSQIATWDAEITRLQEELRARLPEAQRLASITGVGERTALLVYACVPFDRLASAKQAAAYVGLHPHLFQSGASQWSRLSKRGDRIARTALYRVALPAVQCNPRLAAFYQRLLSAGKARKQALCAVAHKLIRICYALVKYQTTYSLNYQV

SEQ ID NO: 373857 - protein, 313 aa, unidentified
MIILHRYVGIDVSKHHLDIFDEAIGVPERIANTPQAITELVARWRCDALVVFEATGVYDLELREALRQAGIRFARVNPARARDFARASGQLAKTDPIDARMLAAFARAMQPATEQVSTAARNALARLAKRRDQLVLMRAQEKNRRSEAEDRIMAERIARLIEILDHEIAEIEAEISALIKAEPELSDDAQLIRSLPGVGPVACMQLISQMPELGHVGPKQAAALAGLAPFNVDSGAYRGKRKIGGGRKRVRDALYMAALNAVRRAAPFKAFYAKLRQAGKPAKLALIAVARKLLTILNAMIRDRKAYIPAQPT

SEQ ID NO: 373858 - protein, 356 aa, unidentified
MSEGSWVGLDVHARSVVAGVIDVGSGEVRSLRLPPGCDATVAWLTTLPAPVRVVYEAGPTGYRLARACAGAGISCVVAAPSRIRPAADRVKTDRRDAERLARLLRLGEITPVRIPTLEEEAARDLVRAREDARGDLMRARHRLSKLLLRHGLVYDATAWTRTHDAWLRRQRFQGGPLAIVFDECYGRMIDAKSRRDALDKAITELAATPPYVDVVSRLVCLRGVSTLTAFALTVELGDWHRFRPESLGPFLGLTPSEHSSGERHRQGAITKTGNSHVRRLLIEAAWHQRSPSRRSVTLERRRDGKPLAVQAQAERSARRLHERWHALEARGKPRSIVVVAVARELAGHCWALATME

SEQ ID NO: 373859 - protein, 345 aa, unidentified
MNVMIGIDPHKASHTAVAIGRDEDQIGCVKVRATLRQVDQLLTWAEPFEKRTWAIESVGGLGYLLARQLVARGEDVLDVPATLASRIRVLATKRSNKNDPNDAHSIAIAALRAPTLRQVEPADHTEVLRLLSKRNRDLGRQRSRVICRMHSLCAELAPGGIAKEMYVSDAEALLEKLNPESPAQQMRYDLALELLDDVRRLDAQIKDSHRRIRMAVKASGTSVTDIYGVGPVHAGTIIGYSGDIRRFANRDAYASYNGTAPIERCSGGRVVHRLSLRGNRKLNHALHMIAVTQTRNPGTEGRIYFERKVSENKTKKEALRSLKRQISNAVYRQLLIDTQRGPGGH

SEQ ID NO: 373860 - protein, 537 aa, unidentified
MSAKFRTNHRKAHSKSNPRKRENVQKPSGVIGPRVQKVGGERFALVCIDPAKHRSEWMMADYFGKVLIPPQTLTHQASFFKLAAVQICEAKEKHGIQDMIVVVERTGNLYLVPKRAFAKAGFEVRVVHPFATKQYRMPADPGNKTDETDLYAQHRAAVAGFGLCESELPSPYRELQLRVRHRRNLVEQASSIACQIREHLHLSMPGFSTLFDHLLDHRSAMAIARCCGSPQTAIELGHTGLSQYLRKEKIRYQPRTVDKVLAWASQAAGDSICNGPLHHAIWTDLEELHLHLQRQIRAIEQALANDVVKTPYIRLLAIPGINVTSAAELAGELGPICNYANANAITGRAGLFPSRHQSDRTDQSGPLVRQANRRLRCVLMRVADNLACHCAYYRGHADVDRARGLDVRASRVKIAKRFTRLSFACVAGDEPMKHPAFRKPDSILEKLREFHHAHKTPMDQLLADLKTTVEQLPYNTRCREAEVVTAVLQQNAKRRRGETEIGALLPAVLARLGVHTTEAIEPQETQPDTPGVKGDRS

SEQ ID NO: 373861 - protein, 386 aa, unidentified
MQKLNDLSRCLTPLEPDSTLIAVIEMSLSSWLVAGIVPGVERQPLKKLAVDESVLLKLLHRWREEAEKAGYMIKRIAVAFEAGRDGFWLARWLRARDIEVHVIHASSVAVSREHRRAKTDRLDTELLKRAFLGWLRGERDHCKMVAIPTIKDEDGKRPNRERESLVGEQSRVINRIKATLVRLGIRGFNPKLKKAPERLEGLRTPEGERIPPNTLSELHRDMERRRLLRDQIRQIESARRDRLEHAPGEGAHAMVRLLARVMGIGIETADMLVQEVLSRNLRDRRAVARYAGLTGSPDESGKKRREKGLARSGNPRVRRGMIQLAWRFLLFQKDSTLAQWFRARTENARGTRKTMIVALARKLLIALWRLVREGVVPDGVILRPAQ

SEQ ID NO: 373862 - protein, 370 aa, unidentified
MSQSSTLFIGMDVHKDTIAVAYVAQDHGAEVTYLGTIGTRQCDIDQLIRKMQSKAKHLIFVYEAGPCGYWLYRYLRQKDYDCWVVAPSLIPQKAGDRIKTDRRDAMQLARLARSGDLTAVYVPTVEDEAIRDLTRVREDTLSDLKAAKFRLKAFLLRHDIRYTGRANWSPAHLRWLSEVVCPTPAQQIVFQEYVRAVNEHTERLQRLEQELQDHVHAWRLHSVVEALQALRGVQFTVAVTMVAELGDLTRFDSPRELMKFLGLVPSEYSSGERRQQGSITKAVNTHARKALVEGAWAYRYPAKVSRHLQLRLEKQPKIIQDISWKAQVRLCKRSRRLVAQGKHANVVTVAIARELVGFMWAIAKEIPVTP

SEQ ID NO: 373863 - protein, 340 aa, unidentified
MDATTYGLDVAKRVFQMYWVDAQTGEIVNRRFGRDELIGFLSQRPVGRVALEACGSGHWWARKIEALGHEAVLLHAKFIRPFVQTNKTDAADARAIWTAVHQPGMRTVVAKTQDQQAILSAHRMRAQLVKFRTMQINQVRGLLYEFGVTFRSGRLAGLAQIRVRMAEFEEELPGIVLSGLQDQLKRIDALQSDIETLEKRIGAWNKQEAACRAIAEVPGIGRLTATALVATMGQPRAFKSGREFAAFLGLVPRQSGTGGKVRLGSISKRGDPYLRTLLIHGARSVMWHAKAPSAWQQQIRARRPANVAAVAMASKMARTAWAILAHGRAYQTHYVSLRPA

SEQ ID NO: 373864 - protein, 408 aa, unidentified
MGRAAEVVAPSSSIRTDGGCPVAQVNDLSRSLTAFDPISTLVVVVEMSKASWLVSGVVPGVERQPLKKLEPDATALLRLIERWRNEAVRAGRPISRIALAYEAGRDGFWLARWLIARGIEAHVIHSASVAVSRERKRAKTDRLDAAMLMRVFLGWLRGERGHCGMVAIPTMEEEDARRPSRERESLVDERSRITNRMKSALARLGIRGFKPHLRKAPERLAGLRTAEGTGLPANIIEEFRRDMARLALVREQISSIEKTRAERLERAPDTGPHAMVRLLARVIGIGIETADMLVQEILSRKLRDRRAVARYAGLTGSPDESGLKRREKGLAKAGNARVRRGLIQLAWRFLMFQKDSALAQWYRTRTEGPSGARKTTMIVALARKLLIALWRLVTTGEVPDGVELRPAA

SEQ ID NO: 373865 - protein, 341 aa, unidentified
MNIKRVGIDLAKSVFQVHGVDGQEKVVLRKQLRRAQMLDYFKKLPPCLIGMEACSSSHYWARELQKLGHTVKLMAPQFVKPYVKTNKNDANDAEAICEAVARPTMRFVAIKTIAQQDIQAVHRIRSELVQQRTAKVNQIRGLLAEYGIVVGRRVDVLQHALPLILEDAENSLTADFRVLLDGLQQDLATLNGRVDDLDKTIKMLASSNTDAKRLQQIPGIGPITATALVCAIGDGKQFKRGRDMAAWLGLTPSQHSSGGKDRLLGISKRGDAYLRTLLIHGARAVLKVAGNKDDPRSRWLQNLCSRRNKNIAAVALANKNARIAWALLSKKTDYLPEGEPA

SEQ ID NO: 373866 - protein, 321 aa, unidentified
MEVATQPSILAGVDVAKEELEACVMPGEHRMTVKRDDQGIAKMQEFFRQHGVQWVIVESTGGYDRIVTAACLDAGLQVSLVNPRQPRDYAKSHGRLAKNDRIDAKMLALFGLHIRPRAFEKPSEKQQQLNDLVTRRRQLIAMRTAELNRRDQATAKLAKKSIAASLTFLEKQIDTLDAEIAKLINADDEWRKLDGILQSVPGVGETTSAALIAELPELGNLNRKEIASLVGLAPFDHDSGKTKGQRTIWGGRKSVRTALYMAAMAAMRHNPTLKAFAARLKQAGKKFKVIITAVMRKLLVICNTIVKNNTPWNPALAPQIV

SEQ ID NO: 373867 - protein, 453 aa, unidentified
MKKAMKKAKKSKLEVMNPNAAGIDIGSAVHYVCVPEGRDEQRIQKFSCFTEDLHNIAKWLKKCKVTTIAMESTGVYWIPLFQVLETYGLEVKLANARHVKNVPGRKSDVQDCQWLQQLHSYGLIQGSFRPDDQMCVLRGYVRQRKNLIENASTHINRMQKALIQMNIQLHKVISDITGVTGMQIIKAIVEGERNPEKLAEFRSVNMKNDKATIAKALTGDYREEHLFVLKQEYETYNFFQEKIIECDKSIENYYKTLETKSDESKELGREKNKSRRGRPNFTLREELYRVTGTDFTKIPGFDVLTVQTIISEVGIDHSKWRSEKHFTSWLGLSPGNKITGEKVLGTKTRKVINRATNAFRMAAYSVGGSKSALGAYCRKLKKRLGPIKAITATARKLACIFYQMLKYGQEYVEKGMEYYETCYKERVVKNLVKKARELGYILIQQEELIEGVS

SEQ ID NO: 373868 - protein, 412 aa, unidentified
MDQIHDRVAGLDVHRDSVVACARHLGPRGGIVREKQQFAATTAGLRLLASWLGERQAELVAMEATGVYWKPVYYALEHDFTVWLCNARHVKKVPGRKTDLSDAEWLADVAAHGMVRSSFVPPPPIRELRELTRYRKTQIDVRVGEIQRLEKVLQDAGVKLTSVASKVLTQSGRAMIEAMIAGERDPAVVAELAKGKMRPKIPALTEVLEGHFGAHHAVAAQRILAHLDFLDTTIAALTEQIDARTGAFQPVYELLLPVPGLERPSIDVIVAETGADMTRFPTAGDLSSWAGVCPGNHESAGKRRRVATTPGNPWLRRTLIECARAAVRTKGSYFGAQYRQIAHRRGPNKAAVAVAHSLTKLVWHLLTTGEVFSDLGDDYFLARNDREHRARRLVTQLEQLGFTVTVATTTAA

SEQ ID NO: 373869 - protein, 328 aa, unidentified
MSKGTFYVGIDVGQEELVVCLQGAKPRSFSHNTKGIRTMLEWSRKAASGGELHFCLEATGVYGYSLATSLVNSFEVLISIVNPAQIAAFAKAQLRRTKTDSIDARVILAFAQSQHPPCWKPESKTQRQLYHLVTQADRLRRMLRQLSNRDHSFKYVPDLPEEIKRSQRSLHRSIEKQLANIEKAIEKLRTEDKELKEQVDLLCSIPGIASHSATKILAYSKNIIEERDPKALTAHAGLAPSQKQSGISIRGKSRIAKQGDRRLRNALFMPALVAAYHNPILKTFYQRLLDNGKPKMLAIVAVMKKLLLMIQAILKRKLPFKPDYLPLT

SEQ ID NO: 373870 - protein, 388 aa, unidentified
MFFLGIDIGKNTHVASLLDEKAKIIFKAYSFANTLDAAEALLVKLEPYKDSLEIGMEATGHYWLSLYSFLTEHKFIVHVLNPIQTDGWRKGIEIRKRKTDVIDSVLIADLIRYGDFLETSLADEDILSLRNLSRFRVYLVNSVSDLKRKAIAVLDQIFPEYASVFSNVFGQTSKELLKSLSLPSDYENLSATKIEEVLSNITQKKKASKTISTLSDKARRSFGIAFCKDSFAFQLKLIIEQICFIEEQISSVELEIEQLMSKLGTNIKTIPGVGSVIGAVILGEIGDIERFDNPSKLVAYAGLDASVSQSGEYESSSGKLSKRSSPYLRKALYMAAQRAEFCDPVFHAYYEKKRNEGKHHLVATNAVARKLCHTIYAILKKDIPYEVQ

SEQ ID NO: 373871 - protein, 406 aa, unidentified
MQQSNAKSVIIENSTALETIRRQQKGGNHYAAYIGMDVHKDTITYAVALPGRANGQYRGEIAHTRKAVNKLMGRLSAEFGGELLLFCYEAGPTGYHLYRQMMASGHDCQVVAPSQIPHKPGERIKTDRRDALKLAQYLRSGDLTAVWVPDQEQEAMRDLTRARGDMKGQELKARQQLNGFVLRHGHSWPSNKTRWTKTHYNWLESLAFPHPWQQVVLQEYIDAAKAATRRVADLMDQILQALPSWSLAPVVGSLVALRGIDKLAAITLLAELGDISRFDNPKQLMSFLGLVPSEHSTGKRRRQGAITLTGNGHARRMLIESSWSYRFQARQTMHLKRKAVNASDEAKTIAWRAQKRLCGRYRRLVEAGKNQKLVVVAIARELVGFIWDIVRIEMARLPVQQSAQAA

SEQ ID NO: 373872 - protein, 399 aa, unidentified
MERPIVSIDVSNGNSHYMCFIKNNKRFGKVKKIDHDIEGFKRLLEDIQKLEAETNEKVCAVFEATGIYTKPLERFLSKNSIKTYMINPLESARKRKEEIHNKKTDKLDPISISKVYYDKEEMMELKKKDETYNWLRKKNRLYEDQLNHLRKYKVTFQNQLSICFPGYLDLFKDGYSDIPMTILKKYPHPDLLKNKKTETVARYLEKNTCHTHKVSLEYALKIIEFAKMTYPGCEKDDVEVEIFKILLDKVIETLRECEKTLNEMITIASTLEEYRYISSIDGIGPNLAARIIAEIGDIEEFKSREALVAYAGLDPHIYQSGDQDGKHLKISKKGNKYLRCLLFLAVGCSIRGAKDNPVNRFYQKKKQQSNPLNSKAAKTACTAKLLKIIYGICKKKDHI

SEQ ID NO: 373873 - protein, 385 aa, unidentified
MALTGLSGNEGAAMSEESEAFVGLDTSKTKISVAVADGGRCGEVRFYGDIDSSPDAVNRLVKKLSARYQRLHFCYEAGPCGYGLYRQLTALGHQCDVVAPSMIPIRPGDRIKTNRRDAITLARLHRAGELTPVWVPDEAHEAVRDLVRACEGAMLDLRMKRQQLTAFLLRHDRIFPGRKTWSRAHVRWLCEQRFEHPAHQIVMQEYRHTIDDAETRLDRLEGQLAEVVPQWSMAPVVEAFQAMRGVGFLAAVIFVAEVGDVRRFESPSQLMGYLGLVPSERSTGDRVRRGGITKAGNRRARWVLIEGAWTYRLPARVGRTLQARLDGLPKAVRDIAWKAQTRLCGRYRRLTAAGKKPCLVTTAVAREMAAFLWAIGQQVAPRLAG

SEQ ID NO: 373874 - protein, 319 aa, unidentified
MSRTPIGVDIAKAKFDAAAYLNGKYKTKSFANTPAGITAFQAWLAAFTEPHVCLEATSIYGEALSERLADAGVQVSVVNPARVAAFAKTELARTKTDKGDAKLIARFCALHTPELWQPQPRSIRELRALVRRLENLLEMHQMEDNRLQTADLAVHDSLRTMMTALQVQIDLVRAQIVQHIDNDPDLRGRRDLLDTIPGLGKATIPVLLSVLAEPGRFASAKQCAAFAGLTPSERQSGKYRGQTRLSKTGDALLRKALYLPAMVAWRHNPVIRPFCERLKARGMNGKAIVCAAMRKLLHIAFGVLKSNRPFDPKIALARD

SEQ ID NO: 373875 - protein, 353 aa, unidentified
MKQKKFVGLDVHKETIAIVVIDEQGKTLVQSVVATDGETIRDFLKGLSGEIHVTFEVGTQSNWLYWQIKPLVEKAVVCNPRHNNLLMIGNKADLIDAEKLAQLLRLGAIKEVWQHSSEQAYLKELVRTHENLISDCTKVMNRIKAVYRSHAIKCAGTSVYQVSKRDEWLAKLTEPGLRFRAELLFQELDMLINLRKHASLAMLRQARKHNDFKRLCKIPGLGFVSVSRLLAQVGTPNRFETKRQFWKYCGLAVTTRSSADHQIIDGKLQKRIKQTNARGLSRHFCHRLKHIFKMAAQKSARREPFRQYYESLLDGGTRPALAQVSLARKIAAVALSVWKNQTDFDVRRSAAST

SEQ ID NO: 373876 - protein, 340 aa, unidentified
MSLYGGIDLHANNSVIVLLNEQDEVIYRKRLPNDLTTILGQLAPYHTEMKGLVVESTYNWYWLVDGLMDADYRVHLANPAAMQQYSGLKYTDDHSDARWLAHLLRLAVLPEGYIYPKAERAVRDLLRKRAHLVRQHTANVLSVQNIMARNTGTRFSVKRIQELTKQELTTLLAEETQVLAVTSSLVVLDCLKQQIKTLEQTVHKRLHHTPSYEQLLTVQGIGTILAQTITLETGAISRFPSVGNSASYCRCVDSTKISNGKRKGTGNVKNGHPYLAWAYMEAAQFAMRFQPEAQRFYQRKLAKSRNNTVLARKAVAHKLSRACYYLMRDLVPFEATKAFG

SEQ ID NO: 373877 - protein, 430 aa, unidentified
MEPKSNMEPESPSVVAWIGLDWADQEHHVCLQAVGSGRVETAVVTQRPEALQEWVRQLRTRFPEGRLALALEQSRGALIYALMSYDFLLLYPVPGKTLADYRKAFFGSGAKGDPTDAALLLEVLRCHQDRLHAWAPDDVPTRHLGLLNEQRRKLVDDRTALTNRLGTLLKESFPQALDWVGDLNRPAASEFLANWSSLAAVQQARPSHLRQFYDRHFRLPPEELEHRLAEIRRAQPLTSDPAVLETDALIVSLLAAQLQTLLPSIRRVEEVIAQLFSQHPDCDLWEILPGAANALAPRLLVAFGTDRKRYKNARELQTFSGIAPVTASSGKSRWIHWRWACPKFLRQTFHEFAAQSISRSDWARAFYYQQIHHGKHHHAAVRALAFKWIRILYRCWKDHKPYDEKFYLQALARRGSPLLAYLPSPPNQEV

SEQ ID NO: 373878 - protein, 340 aa, unidentified
MPLYGGIDLHANNRVVVLLNEQDQVVYEKRLPNHLPTVLDLLDPYRAEIMGFVVASTYNWYWLVDGLMEAGYRVHLANPAAMQQYSGLKDTDDHSDARWLAHLLRLGVFPEGYIYPKAERAVRDLLRKRAHLVRQHTANVLSVQNIIVRNTGTRLSIKRIRELTKQELEGLLPEVAQVLAVTSSLAVLACLSHQIKTLEQTVHKRLKHTPSYEQLLTVDGIGTILAQTIALETGTIGRFPTVGNYASYCRCVDSSKIRNGKRKGQGNVKNGNRYLGWASMEAAQFALRFHPSAQRFYQRKLAKSNNNTTLARKAVAHKLSRACYDIMRDRVPFDALKAFG

SEQ ID NO: 373879 - protein, 392 aa, unidentified
MEVRMVNTPSAGMNNEPVDCFIAIELSKSGWVVGFQTPLSDKTSRYQVKAGDANGLLELIERVRTRVARQLSRPIEMMSCYEAGYDGFWLHRVLEAHGIHNHVLDPGSLQVNRRARQPKTDRIDADRMVRALIRHLRGEPEACSVVRVPSIELEDAKRLHRERRRLIAERVQHVNRIKGLCATQGIYDYSPLRKDRLTRLDDLHTGDGRVLPPQLKAEIVRELKRLELVLEMIATVETERDAILTNPASTHVNAGKIKMLAKLKAIGPEFATTLVGEVYCREFVNRRKLGSYVGLGSSPFRSGSLDRDQGISKAGNPTARSVMIELAWTWLRYQPDSALSIWFRERVGTLKGRPRRIAIVAMARKLLVALWRYLETGLVPTGAVLKASSVNA

SEQ ID NO: 373880 - protein, 403 aa, unidentified
MGDGKRLGTGCRGKTTIISLRAKRRCYDGNKKLLVVKIKQTKTDKEEEKMNKKIVAQNERVTIGADVHMRTHVVTAMIGKEIVDRRILPSCRGGWRGYLEKFPGCELNVIYESGPQGYNLYDWLTEMEKQEGQTVRVYVAPPGNVPKAPGKKRVKTDRRDSLALIHAYQSGAFEPVVVPEKDTRAERELVRTKEQLSEDVTRCKNRIHSLLKFHEIEPDEGKAFSEGWRKEALNKAKSSDPTGEIAASLKLKFKMLKQTQEALDSVKARIRKLFSKGTRSHLAQKICKQVGIGIESAMVIATEVADFHAFRNSDSFASYVGLVPGAHNSGETFRPGPITKEGNPRLRHVFVECAWTWVRYDKEAARRYAALKARRGAGRAIVAMARRLAVIVYHLVAHPAPAC

SEQ ID NO: 373881 - protein, 393 aa, unidentified
MVCVGIDVAKDKHDCFIISSEGEILADVFTIPNNAEGFDTLLQAIRRSTRPEDKIKVGLEATGHYSYNILGFLLDKGLPTYVINPLHTNLYRKSLSLRKTKTDRVDARTIAAMLMSDVDLKSYTDTVYHNEELKSLTRYRFDKVRERAKLKQSVSRLATILFPELEKLVSSLHSASVYALLSEFPGAKQISSTHMTHLKAVLKNASQGRYGQEMAETIRNAARSSVGSVMPAKSLELQHTIRLIRELDAEIEDIETAIQAIVDEMQSPITTIPGMGVRMGAVILAEIGDFSRFDSPDKILAYAGMSPSTYQSGQLSLSGAYSHMEKRGSRYLRYALYNATKHVCHWDPTFAAYLAKKRAEGKHYNVALSHAAKKLVRLIFAMEKSQRPYCAAA

SEQ ID NO: 373882 - protein, 316 aa, unidentified
MSESTSFVGIDVSKNLLDVHVLPGGEHWQVSNDEAGCAQLIERLKPLGKTALVVMEATNVFWRMAAAALAGAGLACAVVNPRQVRDFAKAMGTLAKTDAIDAKVLADFAQRVNPPVRALPDAQCQVAAEMLGRRLQLMGMRVAEKNRLATASAKKVRKDIEATIAFLEKRLGALDHEIDTWLQSTPIDQSRANLLQSFTGIGQNTARSLLITLPELGRLSGKQIGALAGLAPFAKDSGNKRGQRHIAGGRSIVRAALYMPAITAIQHNPVIRALYQRLVQAGKHHYVAITACMRKMLVILNAMLRSNQPWKAPQNP

SEQ ID NO: 373883 - protein, 377 aa, unidentified
MQKPSTIDIDPVIYLAIELSASTWLVASKIPTSEKTGLHRMEAGDSQALLALVADLRKKVATKLGVEAAVVSCFEAGRDGFWLHRLLVEHRVINHVVEPTSILVNRRARRAKTDRLDAQGLLRILAAHAKGDHDVCSVVRVPTIEEEDAKRQHREREHLVQERVRIENRIAALLTTHGIRKRPSLRSWGNDMEEMRTGDGRPIPSLLRAEVNRLRRRLVMTLEMIRELEAEREQALQTQDDMASRMIRALCRIRGIGDNFAAVLTREVFYRPFQNRRQIASYLGLTPTPFQSGGMDRDRRISRAGNARARKTLIQLAWLWLRYQPDSSLACWFRERVGNLQGRTRRIAIVAMARKLLIAIWRYATHGIVPEGAQISI

SEQ ID NO: 373884 - protein, 334 aa, unidentified
MSTTSPSHDAQNAPQDHNETFVGIDVSQDNLVVHVRLTNESFTVPNSADGIKGLVKRFQKITPTLILFEATGGLERQLLMSLIAAEMAVVVLNPRQARRLADGLGQGAKTDRVDAKMLAEIASLKRFEPRPVPSEDAMKMNDLVTRKQQLIDMQTMEKNRLHAAKQKKLANKIIKSIEKMIDTFRKQIDEIDAEIQAMIKTNDDWNEKDKILRSVPGVGQKTAQTVIAAVSELGCLTRKQIARLMGLAPMKRQSGKWTGESHIEGGRAHVRCALYMAAMNAIKKPGVFKSLYDRIRAAGKPFKVAIVAVMRKLITILNAMIKTKTYWNEHGVRS

SEQ ID NO: 373885 - protein, 386 aa, unidentified
MSKPNDLSRSLTAFEQDSTLIVVIEMSQASWLVAGIVPGVDREPLKKLEPDGDALLRLLQRWRDEATKAGRMLKRVVVAYEAGRDGFWLARWLRARGVEAYVIHPTSVAVSREHRRAKTDRLDTALLKRVFLGWLRGEPNHCSMAAIPTLAEEDAKRPNREHESLVGERTRLVNRIKSGLVRLGIRTFKPMLRRAPEHLDALRTPEGAPLPVNTLAELRRDLARLHLIRAQIKAIEAARLEQLQQAPDQGPHAMVRLLARVIGIGVETADMLVQEVLSRNLRDRRAVARYAGLTGAPDESGARRREKGLARAGNGRVRRGMIQLAWRFLMFQGESALAQWFRSRTAQAPKMRKTMIVALARKLLIALWRLVRTGDLPEGLALRPAI

SEQ ID NO: 373886 - protein, 405 aa, unidentified
MISVGIDVSKGKSTVCILKPYGEIVSKPFNITHTQKDLSELSSMLFRLNDEVKIVMEATGIYHLPVLTYLQEKGFFVSVINPYLMKSYRNESLRKAKTDKIDSRIIANYGIDHWFKMKEFQISGVIYEELKLLGQQYRHYMKLHLLSLAELTHLLDLTMPGIKNLLASWNETNRKDKRSDFVERFWHYDVITSMSEQEFTEEYILWAKEKKYVPSQEKAKVIYTLAQESIPTLPSETSSVKMLVTEAVRVLKEVDATLGLILSRMQEIAKTLPEYSVVREMGGVGNTLAPKLIAEIGDVRRFRNGKALVAFAGIDPPPYESGQFVGCNRKISKRGSASLRKVGYETMRSLKMRSRPEDPVYRYVVKKESEGKSKKSAKIAGLNKFLRIYYARVTELYKNLSLIHI

SEQ ID NO: 373887 - protein, 351 aa, unidentified
MMIIGVDYHPSFQTIAFFVEETGECGEQELNHSDGQADKFYRDLKQRGISVRVGLEATGYSRWFERLLAELGFELWIGDPAEIKAKRVKKQKFDREDARLILRLMRENNFPQIWVPGPENRDLRQLLWHRHRLVQMRTRIMNQLHALAMNEGYRWKKKLFSEQGRAQLEKLTLAPWASRRRQELLELLDRMNPTIEELTAAVEREARKRPEAMRLMTHPGVGPLTALAYVLIIGTPTRFERGKQIGTYVGMIPCEESSARKQRLGHISKQGSSLLRFLLVEAAQAAARVHPDWRRRYIHLAMRRHKSIAKVAMGRKLAVRLYWMWRNGCEYSQSLEFGSYAGQLGIGNGVK

SEQ ID NO: 373888 - protein, 363 aa, unidentified
MFTERTSVGLDVHARSVAAAAIDGVTGELFQAKLTPSHEHIRSWVQALPGPVAVTYEAGPTGFDLCRGLTAAGIRCEVAAPSKLQKPAGERVKTDAKDAIHLAKLLRLDQITAVAIPSVEQESARDLVRAREDCRGDLMCARHRLSKLLLRHGIVYYGGKAWTGKHDTWLRHDALGQLSLRATRMAFDSDYETVLAVKARRDRLDAAIDQMAAESEFTPLVRRLGCLRGVRTLTGFALAVEIGDWHRFTGNTIGSFVGLVPSEHSSGSSRVQGSITKTGNTHVRRLLVEAAWHHRARYTVGKTMRDRWELAPAAARVRGDEGNRRLHHRWVKFIERRKRPTVANVAIARELAGWCWSLAMLEE

SEQ ID NO: 373889 - protein, 370 aa, unidentified
MKMAIGIDVHKETSTAYAVYAGDSEEKGKQKEYLDSFNREFGRFPSTPDEYKKLMAFVRGHECHILLENSTKTHEVYWILKNGGLSVTVAHSTDLVLITKSIKKTDHHDSVELAGYMRRRLRGEDREFAVSFIPSPEWMLKREMCRGVLAEKEYLANTKRRMRAHLLLHGISLSREYDNIAANTALIEMSIINDPYLRMLIRFADDAKKRVSMGENTIKRMFNGDKTCELIDSVTGFGHTSAAYMSALIVDVSRFRSRSEFTASFGVVPKMRSSGESNPRCATTHRGDDLMRKRLMDCTRAHIRFEPDSVVTVMYNRLVNNGKSKKEAQVAASRKLLTVVWSVLKSGKPYSSDSKVLKDAREMEELSAET

SEQ ID NO: 373890 - protein, 316 aa, unidentified
MANVFVGIDVSKDYFDVCVLPSKESRRFRATHVAEASAWICAQNPILIVMEATGGYERVLWRTLSERKLAVAVVNPKRTRDFAKAIGRLAKTDKIDAEVLALFGSRTDVRSTPPPTVDDEELEVLLGRHRQLTEMLTAEQNRLKQCPSEAVRARIDKHIAWLRSERGEVDGDLDKKLKQHTDKSDLLQLLDDVPGVGPLTCAALLIDLPELGRLNRREIAALVGVAPIAQDSGKRAGHRSIAGGRPAVRAALYMAALSASRWNPTIRDFYKRLVERGKPKKIALTACMRKLLTILNAMLRSRTEWQPLMLAKDSCC

SEQ ID NO: 373891 - protein, 352 aa, unidentified
MQAQIKKLDFTGQKFYCGIDMHKKSWAITIETEDVAMRTFVQDADPEVLVRHLESNFPGASITAGYEAGYFGFWAQRKLEEAGIECLVINPADIPTTHKEKDQKRDPSDSRKIARAIRNNDVKTIWVPPVSVQEDRQFLRTRKMLAKDLTRNKNRIKAMLQLNGIQYPAAFQASGSHWSRRFIIWLESIRLTEETGTESLQTLLRNLNFLRSELLVLSRKIRRLSQSDRYQPAYERLIKIPGIGLIVAMTILTEIGDIRRFSNTDHFRSYLGLIPTAHDSGEKEHQGKITNRANQQLRALLVEATWSAIRTDSGYLHFYRQYKNRMKENNALIRTAKKLANQIYYAIKMEKN

SEQ ID NO: 373892 - protein, 340 aa, unidentified
MTVYAGLDLHATNTYVAMIDQENKVLYKQRHRNELAAIIAALDPFKKDLQGVVVESTFNWYWLVDGLMAQGYAVHLANPSAIKQYEGLKQIDDKRSSLWLANLLRLGILPSGYIYPKEERPTRDLLRKRLQLVRHRTSHILSVKNILARNLGLRMPSVDVKKLLDAEVKQLFPDKEMRTAVLSSLGLIRHLAEEITKIETMIEKKVKVRKEFAKLMTIPGIGKILALTIMLEVGNIRRFPTVGDYSSYCRCVKSIRTSAGKVIGHGNRKNGNKYLSWAYVEAAQAARRFHETVRTYYEKKMARTNKIVAVKALSHKLTRASYYVMRDQVDYDPARLFGQG

SEQ ID NO: 373893 - protein, 418 aa, unidentified
MEQTEIFEPVLTSACGLDVHKDTIKACIMGQSIEKLIQGFGTTTDDLLELRSWLKANDIKQIAMESTGVFWKPVFNILGDEFEIILVNARHVKHVPGKKTDVLDCVWLCRLLRAGLLKGSFIPKEDIRQLRDLTRYQKKEQEEIAREKNRIQKILEDCNIKISGVLTDVFGKAGWAILEMLCAGVNDVEKLVVPFYADKRLRMKEEKARKALKGKINTTNRLMLQTQMEHIRFIQSQINKIEWQINQITNNYRMDIDNIVTMHGISQKAANVIIAEIGTNMEVFPSEKHITAWAGLCASNNESAGKNKSSHTRKGNTHLKSLMVECAWSAIKTKGSYFKAKYYSLVPRMGKKKAIVVIARKMLVYCYFILKNKVPYNDLGESYLLPVKQKEKIAKSLLKRLSNMGYQVTTTEFVPSPV

SEQ ID NO: 373894 - protein, 428 aa, unidentified
MKNRMKFDHLSTLCVGLDIGSRINFLTALNFDSDRLINMRPVPNASNGVEAMESMILAVLEANPQFRYLLIAMESTSFYGVHVANYLSTTDKLKPYGVKVFCLNPKTIANYRKSFTGLGKNDGIDSFIVADYVRAGRINIEPWRGAQYLALQRLTRQRRHINEAIAREKNYVLNNVFLKFSEFALLSGEESPVSDKFSATAEAILTEYKTTEDIANAPLKELIDFISASGHGRFSDPDQVASLLQKAARNSYRLDKALYEPITTSIACSFNCIRAFEKEQKALDKAIAATVAGLNPTEYQILKSIPGIGPVYAAGILAEIGSVRCFNSNNALAKYSGIIWRDNQSGEFDSEDTPMMKAGNRYLRYYLIQAAGSVVRYCPEYEDYYNKKFAEVPKHQHKRALALTARKLIRLIFGLLDKNQLYSPAKSR

SEQ ID NO: 373895 - protein, 350 aa, unidentified
MRILALDLGKYKSVACDYEAETGRHRFVTISTTPKALHDLMVDREPDRVVIEICSIAGWVSDLVRTLGIELQVANTNDERWHWRRVKTKNDRGDALKLAQLSAVNQLRLVHVPTVEMRQWRALIAYRQHLVERRTKIKNHIRELLLREGQVLPRYRSAWTQEGIAALEAISKPLSEVRLDELWRGELGVELAQFKAVQAQLAEVVAKLDELGAKNLNVRLLRTIGGVGPRLAEAVVTMFDDPNRFRTAGQVSSYIGMVPKQFDSGETERSGRITRHGNRLVRSLLVEVAWCALRHNSWARETYQRISGGKKSRKKIAVVAVGRKLLVRCWAMLRHGTAWRQEIKAAAAAT

SEQ ID NO: 373896 - protein, 460 aa, unidentified
MSKRKRQSRKRARAFQAGQPVLNHATHLDAAGIDIGSTELVAALPPDRDLQPVRTFSAFTSGVHALRDWLREHGIKTVAIESTGNYWITTYDVLADAGFDVWLVNARAVKGVPGKKTDVCDAQWLQQLHAAGLLKKSHRPEKEIVPLRYLMRHRADLVAQAGQQVQLMQKVLTEMNLHIHHVFSDVDGVSAQAIITAILAGERDPEKLADLRDKRCRSRLEDILEALRGDFRPAYLFVLRQLQQRWQQLQASMIECDAQIAEQLRAVQIEAPGPLPKGPWQQRRTHKNMPVAVPIYEEAWRFFGVDLSIVPGLGGGLLGVLMSEVGTGPQLKTHFRSAEAFASWLALCPENRITGGRVLKAKTRKVSHRLADAFRLAAQSLSRSDDAMGQYCRRMKGRLGKAEGIVAVAHKLARIVYAMITTGQAYDEKEAFKVTASAKAKRLQNLQKQANAMGLQLVPA

SEQ ID NO: 373897 - protein, 347 aa, unidentified
MVHAGLDLSRRKVDVCLIGGDGEVLGEFACPCDHDGLRQLVERVGLGLRVRAVIESMSGARFVHDSLEQLGWEVLIADAQKVKGLAPLTCKTDRIDAGVLAVLSHRDLVPAIWLPDPRVRGERELARFRMHLVKHRSMLKNRIHSALINWGKPCPVSDLFGVAGRRLLDELEIPQPWRGSIDASLLLIDDLDAQIAKAAAELKASGVDHPYVPLLMSAPGIGWVLGFTIAAEIGQIERFASAQKLVGYTGRCPRVYQSGDKDRRGQLTKAGPKYLRWAMLEATMHALRHRAYRDRYQHTKKRLGRQRGAKVAQIDIARRLTGAIWHMLTRNQPFNPAAGGAAFRLAA

SEQ ID NO: 373898 - protein, 397 aa, unidentified
MIAVGIDISNAKSTVAVIDSDGTVLASPFTMAHTQPEMEAFVTYLKGLGEPTTILMEYTGHYHYPVLKKLQDEGFPVCIVNPYQMKKYGDVEIHKAKTDKKDALRIAAYALEKSYKLVPYSSMEQKYEDLKFLSRQYSQRITYVAKLKVQLIALLDQTMPGITRILPLNSRNPEKCALLLFIKRFKSFDEIQRIGKARFLASYDVLAKKASERSASSKGLSIYELAVDSITTRGEDPYIWLSQNQCVDLLSATQNAADEIISQMRNIAETIPEYKVLRAMHGVGDRLGPIILAEIGDVHRFHSGKALNSYAGNDAPPYQSGQFESRNRHISKRGSSALRKACYEVMQALKLTKPQDDPVYLFMLKKEQEGKPFNVAKMAGVNKFLRIYYARAMKLYK

SEQ ID NO: 373899 - protein, 369 aa, unidentified
MAKSITYIGLDVHKDTIAVALAEASLRGEVRERGKIPNSPAALKALAVKLASTGRDLRFCYEAGPCGYGIQRQLAGMGHECAVVAPSLIPRKPGERIKTDRRDAINLAKLHRAGELTAVWVPDQAHEAIRDLVRARQAAVRTLRQARQQLSGFLLRHGYHYHRPAWTQLHRRWLASLKFEQPVHHIVLEDCIATVEAATARRDRLETHIEAALPEWSLAPVVQALQALRGVGLVAAATLVAELGDITRFTNPRQLMAYLGLVPSEHSSGGTRRQGGITKAGNGAARRMLIEAAWSYRFPARISREQLLRQERLAKPIRDIAWKAQERLCRRYRKLARAGKLPTVITVAVARELAGFIWAIAKQAQPTAP

SEQ ID NO: 373900 - protein, 437 aa, unidentified
MSNVAYLGLDISQADVSVCFLLADGGEPVPRWTVSNSQPGAERLSATGAQLCQAHQVTELRIGLEATGLLWWHLACALIAAPLLRPFQPHLYVLNPHLVATFRRNYGALPKTDRADAFLIAERVRFGRQLPPPFQVDVRYAPLQRLTRFRFHLAHNLAREKSYFLSFLFLTFSSFGQVQPFGDPFGATASAVLTELTTEELAQQSLEDLAAYLQTQGHGHFSDPAALAATLQQAARDAYRLDKVLAEPLRIVLSTTMANIRSLTAQLKALDKTIAAELPAIPQTLASVPGLGPVWSAGLIAELGDVSRFADDDAIAQFAGLTWPAHESGQFQAEDTPLSQRGNRYLRYYLVEAANSVRRHCPEYTDYYAAKYAQTPKHPHQRALVLTARKLVRLIDALLRTQTLYQPPEQRQTPAGSGPHAQRPQRQRHQRQADPVT

SEQ ID NO: 373901 - protein, 372 aa, unidentified
MVHHTEAFVGIDTSKSRNAIAIADGGRGGEVRYLGEFPATEAAIRKLVAKLAAKCRHLTFCYEAGPTGYGLYRLLKSLGHECLVVAPSLVPKKAGDRVKTNRRDAVSLAKLLRAGELTAVWVPDERHEAMRDLSRARQAAKKDLQGKRQQISSLMLRLGRIYPGKTTWGPAHMKWLMAQKLEHREQRIAFEELLDGIRQESERVERLENAIREAVPEWSLAEVVVALQAVRGIDLIAAVGVLAEIGDLSRFQNPRELMGYLGLVPSENSTGDKVKRGGITKAGNGRARRILVEAAWSYRYPPRVSRDKQPKVEAAPRHVREIAWKAQTRLCGRFRSLERKGKRRTVIATAIARELSAFIWAINRELMAHRQA

SEQ ID NO: 373902 - protein, 458 aa, unidentified
MGRTQKRREVNTVFEEQRRYVAGIDLAGHADHYVCGPRCEDGSPNIRHFGTTTGELEKMLAWLRQEKVVSVAMESTSVYWIPVCDLLESANIEVVLVDTREVHMVPGRKSDVQDCQWLQKLHSCGLLRGAFRPPENICAIRTLIREKASLVEERSTWIHRMQKSCDQMNIRIHHAVSDMDGVTGLAILHAIANGERDPLKLAALRDRRCKQSEGEIAEHLRGNWRPEHLFNLGQALLTYEFIAERIRDYERQILSLVETEKRQESGKTPGHPDEKKAGAMRRLGEEPMRDALFQMSGTDLTVINGIRPETASVVMSEIGLDFNRFPTEKHFVSYIGLAPKLGKSAGKNVRQKRRFKNTSRVGAALRMAASSQRYAQSELGAFFRNVARRQDAKTAIKATARRMAVLIYRLVRYGKAFIDRGSELYEAQFRAKKVRNLKKIVKSLGLSELELKTVLGAT

SEQ ID NO: 373903 - protein, 355 aa, unidentified
MSQEKYIGMDVHQATISVAVMDAQGKLIMECLLETKAATIVEFIQGLQGTLSLTFEEGTSAAWLHDLLKPHVSRLVVCDPRKNALLKDGSKSDRIDARKLAELLRTHQLRPVYHGEHGVRTLKELGRSYLTLTQDVTRVMNRIKALYRSWAIPCSGTAVYAPRHRAEWLAKIVEPGVWVRAQRLYQQLDLLQPLRQAARHDLLSESHQHPAVKLLRQIPSIGPIRAALLVALLQTPHRFRTKRQLWAYSGFAVETHDSGEYRNVRGKLQRNRERITVRGLSDNYNKDLKNLFKGAAISASTRPGPLHDFYVALVAKGMRPTMARLTLARKIVTLTLTMWKKGVGFDPQNLPRQAA

SEQ ID NO: 373904 - protein, 341 aa, unidentified
MQNVTLVGVDLGKHVFHLHGQDRQGKAVFRKKVSRKQLVEFFATFHSCTVVMEACAGAHHMARKLASFGHQVKLVSPQFVRPFVKGNKNDFVDAEAICEAASRPSMRFVTPKTESQQALSALHRVRESLIRDRTKTINQIHGFLLEFGISLPVGQAVIKRLPAVLAEHPLPPRLIGILERLHAHNKYLSEQIAEIDREMGRQLAEDDLGQRLLSIPGVGPVTASVLAAEMGDGKQYGSSRDFAASLGLVPRQYSTGGRANLLGISKRGDKNLRRLLVQCARAYMQRLERQSGCLADWVRNMLMRRHSNVVACALANKLARIAWALATRNATFKTDASAASA

SEQ ID NO: 373905 - protein, 421 aa, unidentified
MPPSEFSAYVAIDWADQKHHWQLADAEGMRREQGELLHQPEAIDTWVAGLLARFPEGSLALCLEQARGALVYQLGKYARLVLYPVHPTALNSFRKAFFPSGAKGDPGDAGLLLELLLHHRQHLRRLNPDTVETRQLRLFIELRRRLVDERTRQSNRLTAWLKMYFPHPLDWIDNIDSPLGCDFLERWPTLERLQRADAATIERFFREHNSRSEARIQQRIVAIRGAIPAVHDAALLQAGAAATTSLVAMLKALNGAIASLDQQIAEQVPRHPEVDLFVDLPGVGPVLLPRLIVAFGTQRDRYQSASELAAYSGIAPVTRQSGQSKSVHFRFVCPKFLRQTFQEFAAHSISNSEWARQYYQRQRDKGVRHHAAVRALAFKWIRILYRCWQDRTPYNEARYLQSLRLRHAPKDSPSPENPEAD

SEQ ID NO: 373906 - protein, 359 aa, unidentified
MQTQSNKIDFNGQNIYVGFDVHLKSWTVTIMTEKLTHKTFSQPPSPEVLHNYLVKNFPGGTYHSAYEAGFCGYWIHNKLKEYGIKSMVVNPADIPTTQKEKVQKDDPRDSRKIAKTLRSGDLQPIYVPSLKTLEDRGLVRTRSTLVKDMTRYKNRVKSFLYFHGIEIPEKFKASGTHWSNRFIKWLEDLEMSSLNGKASLSILLTQSLYLRSSILQVTKQIWNLAKTDSYVKQVHFLRSIPGIGILTAMIILTEIETIDRFVTFDQLCNFIGLVPSTHTSGDHEVIGDITPRGHSALRRAIIESAWVAARLDPALNKSFHDYCNRMEPNKAIIRIARKLTSRIRFVLKNKQDYVCSVIK

SEQ ID NO: 373907 - protein, 344 aa, unidentified
MIAIGLDVHTKTSTIAYLDTDTGETKHRKVRTDELPSELDEMDRELCRIAIEVSSTGVFVARQLLCYDFDVVVVDAFKAHRIIESQNTVKTDRRDAVALAKLIATGQADELAVWVPDEQTLQLRLLTRSREALVKVGTQLRNQLRALVRAEGSECRYDDLTGRSGREWMAQFIADLPELAGIACRHLFDALLDVKARVDELGREIVAVAKQCEQAQQLMTINGCGAVLALSIVAEIGDVSRFRSGGRLRSYSGLTPRLHQSAGRSYTGPITKRGNPHLRRAVVLLAHHVSRSRALKDTRLKRKHWQVLVKHGPQPARVDLGRRLLSVIYAMLRDGTDFDAEKAA

SEQ ID NO: 373908 - protein, 342 aa, unidentified
MDHFAGLDVSVKETSVCIVDDTGKIAREVKVASEPDALLAVLTNPAYCFKRVGLEAGPLSQWLYSALAEASLPVVCVETRHMQAVLKAQINKTDRNDARGIAQMMRVGLYRPVHVKTLRSQKLRMLLTHRKLLQSKAIAIENDLRGTLRNFGLKVGMVGTVKFEGRIKELVENLPDLAILVEPLLIVRRALREQIVILHRRLLVIVRDDEVCRRLMTTPGVGPVVALTYRATVDVPARFRKSKAVGAVFGLTCSKYQSGEIDRSGRISRCGDEMMRVMLYEAAQSMLRSKKWSWLKAWAMQIARRRGMKKAIVALARRLAVIMHRIWVDGTEFRWTREVAAT

SEQ ID NO: 373909 - protein, 347 aa, unidentified
MGDGIAGRQVVGIDLHLHRSVIARLDEAGHELGWVRIDNDPKTLVAECRKAGRGAPVAIEATYGWYWAVDALRAAGFDVHLAHPSGMKALRKRKRVKTDPRDAYELATLLRLGSLPEAYIAPPDLRELRELVRHRRQLVKLATSIKGGVRALLAKHNIRLAASNLDGDTAIALMDALELPGTYATRLASQRRLLMVLADEIASVEVDLHTRLRHHPGYCNLLKVKGIGPILAAVFVAEIGDVTRFPTAAALSCWAGLTPRHYESDKTVHRGHISKEGDTLIRWAAVEAIQRQTEPAVKAVKDGIIARRGKNVRNIAKVAAARKMLEVVYYVLRDGQARCLTAAVDAA

SEQ ID NO: 373910 - protein, 405 aa, unidentified
MDIQPIFRCAVGIDVHLALICVCLIVAQPGLEPEVHRREFGGFKRDRRAMAEWIASFRPEIVVMESTGIYWKSPYAALEKVGIQALVVNAQQVKKVPGRKTDTSDAEWLARLARAGLLRGSFIPPEQLRNLRQASRYHQKITAMRAMEKNRLLKVLGDAGIRITAVVSDAHGVAATAIIDCLLEGGTPEQALTHAGRLKAPPETLLASLQGELSAEHIFVAKTIRNHIHYLESQLADLEHHLLDALQPHEAALQLLMTMPGIDRLAAAKLVVEIGVDMAAFGTAGRLCKWAGVCPGNDESAGKRRRGDTAPGNRYVRALLCQIAWAAVRTTSQFKGRFQSLVSRRGTKKAIVAIGHKVLKTVFVLLSRQVPYQDATVDYEALVVKRNAPRWIRQLKKFGYLTRMA

SEQ ID NO: 373911 - protein, 323 aa, unidentified
MSSPSIYAGVDVSKAHLDLALTSSDERPRFRNTTSGITRLVAELKEVGPELVVLEATGGFEVPAAAALAAAGVPVVVANPRQVRDFARSTGQLAKTDALDAGILALFAERVRPAVRPLPDEATRALDALVGRRRQIIDMLTAEKNRLAFALPAVQKGINKHIRWLERQLSDVDQDLDDQIRRSPVWQAKSDLLREVPGVGPNLARTLIAELPELGRLSHKEIAALVGVAPFPRDSGNMRGKRMVWGGRAPVRSALYMSIWSASKWNPVIRVFYERLRGKGKPPKVAQVACMRKLLTILNAMVRDGRRWDPEVPLQQLQAQHSC

SEQ ID NO: 373912 - protein, 337 aa, unidentified
MYYVGHDGHKDISVFCITTASGNVKETFEVPATPEGMDVLIEKMKGKKFKVLAEASTYTIDLHDHLVSKGVESYLAHPHTLKLITESCRKTDRNDSKTLASYLRLWDKHELDISISFVVNGDNRSLRELCRLRESVSEMKGSTMQQIKSHMRINGQYVEFEDLTTIKARKHIRENFCEDLCLMMLLDIYVVFEDKGKILDSEIERMFGDRNEVQLLATIPGVGITTAAQLMSMIVDVHRFPTADKMRSYFGMAPTVRDSGGSLKHGHITRRGDPMMRKILSRVVAQMIKNAPSDNLAVYRESHRSAMRPGMLMVACMNRLLDIIYAVLVRGTPYIHM

SEQ ID NO: 373913 - protein, 418 aa, unidentified
MKSIKTKKVTKINDKTVIATLDIGKNIQYGYFRAPNGNDVKPFEFYNSKKSYDEFWQKLCQFKDQERLEQIVIGFESTGPYAEPLFHFLRKKPVRLVQVNPVHTKRVKELTGNSPNKTDKKDPRVIADVISLGHALTLVVPEGPAAQLRRLTQARQRAIKTRTSMINQLQHLIFVIFPEFLQVLKIATKTARYLIKHYTTAEKICALGLESVNQIFKKVSRGKLGQNRAKQLYEAAKNSIGISEGQQSIVFEIEHLIDRIEAEDQFIDSLEKQMCAYLQQIPYSQNILSIKGLGQVTVAGLIGEVADFNKFDTISEIMKLAGLDLYEISSGNRRGQRRISKRGRPLMRKLLFFAAINAVKSKGIMHAKYQQMLDRGMPKMKALIAISRKLLGLIFAIVRDKTKYVENYSDDHHYKLAA

SEQ ID NO: 373914 - protein, 301 aa, unidentified
MAIVGGFDLHRRQITFEYLDTFSGEVSRGRVAPADREHLRAWLRRLEGQDATFAVEACTGWRFVVEELEGAGAQAHLAEPADTAALRGPKRRAKTDRADARHLRELLMAARLPESWIPPAHVSDARAEIRLYKALVDERTAWLQRVHAILFQLGAPAVPGLARASGRGRLDLAALPLVARSAVEVGLRSVDRVNEELDTLRPQLARLSRAQRGCRALQAHYGIGPLTSVAIWAELGDCGRFSSSSDAVRHSGLDVTVHSSDSRRARGHLARQGPGVLRWACSRPPFAPPDPPPPTTPTTFK

SEQ ID NO: 373915 - protein, 305 aa, unidentified
MRFVGIDVSQEYLDVASEGEGVFRVRNDEPAFASLVQMWQRVGPELIVLEASGGYERLAAGLLQRAGLPVVNPRQVRDFARSTGQLAKTDAIDARVLAHFAEAIRPPVSRVSSETQERLRELALRRRQLVEMMTSEKHRLSKSPWTRGHIEKHLRWLGDELKQTEKDIKGVIESDPDLSAKAAILRSVPGVGSVMAATLLSSFSELGVLNRQEVAALAGVAPLNWDSGKLRGRRGTWGGRAQVRTVLYMAALVASRRNPVFRVLYERLCAAGKPKKVALVAVMRKLIVTLNSMIRTGTFWTTEAP

SEQ ID NO: 373916 - protein, 341 aa, unidentified
MTTALPRHYVGIDLHRWRSVVATMNEEGEQLGCERIDNSPLELVRAVTAYGGEIEVALESAYGYYWAADVLAAEGLKVHLVHPLGLHWESRRVKNDERDAAELANRLRRGDLPESWIAPPEVRELRELSRYRLKLTAYRTSAKAQIHAVMAKEGILPELSDMFTPAGQRLIDKMPLDGAYAIRVESLRDLLELVDREITMVEKELARRLKDDKGYQAIQALHGVGPILGAIFVAEIGDVTRFASARHLCSWAGLTPVHHESDTTVHRGHITKQGSTYVRWAAVEAVARYHGGSPIAPTYERIVKRRGAMIARVAAARKLLSLVYYGLRDGEIRCLADKEAG

SEQ ID NO: 373917 - protein, 401 aa, unidentified
MVSDFKKGRYNLMKIFVGIDIAKLNHFAAAISSDGEILLEPFKFTNDADGFQLLVSKLESFDKNSIIIGLESTAHYGDNLVRYLVAEFYQVCVLNPIKTCQMRKNNVRKTKTDKVDTFVIAKTLMMQDDLRFVSFYDLDMMDLKALGRFRQKTIKQRTRLKIQLTTYVDQVFPEIQYFFKSGLHQHAVYALLKEAPSPKEIASMHMTHLANLLKVNSHGHFTKELAKELRVLAQKSVGANDSAISIQITQTIQQIELLDSQLEKIEAEMTDIMKFNDSVIMTIPGIGYINGGMILGEIGDIHRFSNPNKLLAFAGLDPSVYQSGNFQAKTTRMSKRGSRVLRYALVNAAWNVVRNNATFKAYYDAKRAEGRSHYNALGHCAGKLVRVIWKMLTDEVEFNLE

SEQ ID NO: 373918 - protein, 346 aa, unidentified
MRFYTKPHKHYCGVDLHARTMFVCIIDGQGNTLLQKNIPTRPEEFRRLIEPYREDLVVSAECMFCWYWLSDFCAAEGITFVLGHALYMRAIHGAKAKNDRIDAFKIASLLRGGNMPVSYVYPAAMRATRDLLRRRLYLVRERGFLLAHVQNTHHQNNLPTPGASLQWRSNRAGVAEHFTDECVRRTVEVDLSVVSHLDTVIRELELYLTNTTKEQDAESFHLLRSIPGVGKVLAMSILYEVHDIARFPTVQDFASYARLIRCARESAGKRSGTSGSKIGNAHLKWAISEAAVLMLRHGDVEKLRNRLNRKHGKGKAMGVLTHKLGRTIYYMLLRKKPFDLERFLAA

SEQ ID NO: 373919 - protein, 431 aa, unidentified
MARSAPTAPLPPVAAYLGIDWADAHHDVALQAADAAAVEMGRVAHTPNALAAWLATLGARFGGRPVAVALETSRGPLVHALLEVPWLILYPINPRSLRRFREAFTPSGAKDDGPDARLLLEFLVKHRERLTAWRPDDAATRHLRALVEQRRTAVELRSQLVLQLQATLKGYFPQALTWAGADLARPLALAFLTRWPTLAALQRARPATVRRFYTSHGCRRAARLDARLAEMATALPLTHDAAIIAPSVLGVQLLVGQLEALGVSLATLDDAIAAAFAAHPEAPLFQALPGAGAALAPRLLVAFGTDRRRYATAADLQQETGIAPVTLRSGQTCVVRWRWAVPTFLRQTFHEFAHHSVLHVPWARAFYHAQRARGKSHHVAVRALAFKWIRVLWRCWQDRTPYDDARYTRALASRGSPIAAHLDCAAMEAVA

SEQ ID NO: 373920 - protein, 341 aa, unidentified
MSSIATIVGVDIAKNVFQLHWVEPSTGEIVNLRLKRAKFLDHFSNRRPCFVGMEACGGSQHWARRLIALGHRAVLLPAKQVKAFVHGNKNDAADARAIWTAMQQPGVKAVAIKTEGQQAILALHRMRQQLVKFRTAQINALRGLLTEYGEVMPKQRAGLNKHLPDALARLCDRLPGMLIETLRDQYARIRGLDVQVREIESRLKQWLRQDDACLRISEIPGVGMLTATAAIATMGNVQAFKSAREFSAWLGLVPRQVGTGGRVQLLGISKRGDTYVRTLLIHGARSLLFRQSETPTWAAKIAQRRPFNVAVVAIANKIARTIWALLAHARRYRSDYASQIA

SEQ ID NO: 373921 - protein, 350 aa, unidentified
MLAELVHHVIGVDPDRDWITLAVVDARTSGVVTEGRFPATGDGYRDAVELVDGHSVDTERAWIIEGSAGYGRGLAVMLSHLGEWVIEFDRPTRKTKDGAKSDALDAIRAARETLGRDRLSIPRAHDGVREAMRVHAVTRAAAVRARTGAINELKAIIVTADETIRAPLRGLRTAQQVTVCARFRDRAATTVEQRCTRACLRALARRIEHLNAEVDDHDRVLKELLDQTAPQLIAERGIGYVTAAAFYIAWSHPGRCHSEAAFARLGGTSPIEATSGQNQTRHRLNRGGDRQLNRALYHVAITKQRCDPATKAYIARRTAAGKTEREAIRCIKRFIARRVWRLLEHPPIAT

SEQ ID NO: 373922 - protein, 355 aa, unidentified
MMNDKQVKVYGGIDTHADTHHLAVIDQAGRRLADAQIPTTATGYQAALRFLGSWPGLVSVGIECTGSYGAAVTRAVREAGITVFEVNRPNRFDRRLHGKSDPFDAYSAAEAVLGGRASAAPKGGDGLVESLRVLRTSRSSALQARTATINQIKGMLITAPEDLRTRYKGLSTPKLIAALAASRPTPTPVTAAEATAYSLRLLARRWQALTGQIEDLAGHLQRLLDDHAPDLMRVFGCGQDTIAQLLITAGDNPDRLRSEAAFAALAGVCPIPASSGKTKRHRLNRAGDRQANSALYHIVMVRLRYNQETRDYVARRTAEGKTKMEIIRCLKRYLVRQLYPLIVETLHPRKEVAVA

SEQ ID NO: 373923 - protein, 428 aa, unidentified
MMACSTTTQNGTFVAIDVAKLVHEVLVEPPTGRRQRWRIRNCQPDYETLRDRLRAFETPVLIGFEATGNYHRPLAYYLGQCGFELRLISSLAVARTRDALYNSWDKNDPKDTQVLLHLLKTGVSQRYHDPLVHAMNDLQELAQTHYQVSLRKVQVQHSIMIHYLPLYFPEAERYYTNSRAQWFTQLLHRFPCPAAITRYSQEVFAHEAWTVVGRKVNKRGFLADLYATARQSIGLAVAEDSEAIQMFRVMLAEHQHLCALRAAIEHQADQVLQSHPDYHRLRTLPGVGPILALTILAEAGDLRRFPHHRQFLKFCGFDLSTQQSGQFRGISRLSKHGNARLRYAFWMAANGAVRMRQNTFREKYARYIKADPQNPDRKRKALCAVAAKVARVAHGLMKTGTDYRPYFEALPPSGALRSRGPSRQALTS

SEQ ID NO: 373924 - protein, 408 aa, unidentified
MDVVYPVCCGIDVHQAHLTACLRRVQEDGHVTKDVQEFDTTYPALLILLDWLIAQHCPVVALESTGVYWKPVYHVLAGSLEVLVGNAQDMQQRPGRKTDKADARWIAELLAHGLIRPSFVPPPAISALRDLTRTRVALVQTRSQAKNRVHKVLEDTNVKVASVVTDLFGVSGRRMLAALIAGERDPQALAGLALGRLRRKLPQLEVALTGQFTHQHATIIQASLELVDLLNRQIADLDSQIGELVTPLEPQITQLDSLPGVDKIAARDILAEIGTEMSRFGSAARLASWAGVCPGNNESAGKRRRGKSRKGNRYIRRVLVQCAWAARKTPTYLGRTFRRLEVRLGGKKAAVAVAHKILVIVYHLLAEGTLYDAERYDRLQPRQEAQQRQRAIKVLERLGYHVNLERVA

SEQ ID NO: 373925 - protein, 364 aa, unidentified
MEEPTHIGLDVHKETIAVAVLRPGTVECDERVIPNTPEALRRLLSRYPDGAALRTCYEAGPTGYDTQRLITSLGISCDVIAPSLIPRRSGVRVKTDRADARNLARLHRAGELVAVRVPTPAEEALRDLVRAREDLKNDRRIARQRIRSFLLRYGKRYPARGSRWSFRFEVWLRALRFSEPASQAAFEHLLGAYFMRDSQLGAVDKQIAELALAEPLAGAVARLRAFRGIDTLTAVTLLTETCDFRRFGSAGSFMAFTGLVPSEHSSGQSRHQGSITKTGNAHLRRVLVEAAWAYRYAPAVRGKLRGRQIGQPPEVVAYSWAAQCRLHGTYRRLAAKKGPNKAVVAVARELSGFVWGAMSDRMAV

SEQ ID NO: 373926 - protein, 363 aa, unidentified
MEHVNNTELSSHEGTRCQFNGSSGVIKLGIDVHQQFYTVVMQEGGSNPKPPQRFSKQGLVHWAARIKNQGGEMHAVYEACGFGFGLQRALSGLGIKCYVVCPQKLDEHNRRVKTDSLDAKALCLKLDRFVQGNRDALALVRVPSEKEEQLRAIHRQREQLVKARKQLEAQGRSLMVNHGVEPVKSWWKSRTFAALQVASWLKELLRNSQPILVALQEKIRALTVELQNAADPDQARGLGAMSSVIIDREIGNWHRFNNRRQVASYTGLCPGEYSSGNTRLQSCVTKHGNPRLRAALVELAWRLVRFQPNYKPVLKWRETLRQGALSTGAARKKAIVAVARQLAVDLWRIRTGRVSAESLGLSN

SEQ ID NO: 373927 - protein, 330 aa, unidentified
MGCFDPATGEIHDLGSVSNDASALKEALEGLPCPKTVVLEAGRSSYHMAGLLESMAEEVWIVDPGEVRRLQHTISKTDQRDAAALAWWAAKGVLKPQWRPDGQTMDLRELTRGKAALTRMSTQVRTMIRMLLARHGHECPHRDSMSERGQLWLDEVELEGHAGQLLAGLREILVVVQAKVDDFERMVEHTSAKHPMARRLRTIPGIVPFLSLALAAEIGDINRFPSPPHLRGYSGLVPAVYQSGDKDARGPLTKTGNAWLRYGAVLAAQRIGQMKEPDPRLKRIFLSVAFRHGRNPGKIAVARRLLDLIYILLKKGQDYRAPKPRVVTTA

SEQ ID NO: 373928 - protein, 433 aa, unidentified
MASTQGRLNLLPMSPAQVPEGGDMEIILRCCAGLDVHKDGVEVCVRQLGEKGTLHQQVRHWATMTRDLMAMADWLAAAGVTHVAMESTGVYWKPVFNLLEEHFEILLVNARHLKNVPGRKTDIKDCQWIAQLLQPGLLKGSFIPPRPQPELRDLTRQRAQMMEERSRICNRLQKVLEDANIKLASVASDVVGVSGRLMLQAMVGGEDDPGKLADLAKCQLRGKIPQLEQARYGKLTEHHRWRLRLLWDQLTSTEALVARLDERIAQCTRPQQPVLERLDEIPGIDVRVAQVLLAEIGADMKPFPSDAPLASWAGLCPGNNESAGKKRSGKTTKGSRWLRQALVQAAWAASHKKDSYFQVHARNLMHRRGRKRGLVAVAHSLLIVIYHMLKEETHYRDLGPQFLDRLRAKHLVRFHVRRLQQLGLEVALRPVAA

SEQ ID NO: 373929 - protein, 401 aa, unidentified
MAVAVGIDVSKEFHWAEIKVAETGKVLLSRRFDNAPGAIGELIEHITVAQAEHGPATVGIDVLGGIAGLLEAMLLHAGLAVVHVPGMAVNRARRATVGGERKSDPKDARVIADQVRMRDDLRPVQPGRELDAELRLLVGRRAELVTDATRRAARLRDLLTSIHPGLERVVDVTGKLGLHLLTRFVTPAEIRDAGLEDVLAHLRQVRHVKASMVRALAEAAIDAAAAQHIAVPGQTVAADIIRDLAAEALAGRERLAQLDARIQEVLARHPDAALILSLPGMGATLTAEFLAETGGIARFASPDQLASAAGLAPVLKQSGKVRYLQRATAGNKALKRVFYQSAFIAISCDPASRAFYDRKRAAGKRHHQALIALARRRVNVLHAILRHRRPYDPSHVRAAVA

SEQ ID NO: 373930 - protein, 474 aa, unidentified
MARTRNKPASPPVPGDAGAEVTDEPVQVISRAAAIDVAKGSGMVCLRLPHESRAGRRTQKVREVTATFAAVVALMDHLVCQGVERLVLESTSDYWRIWCYLAEAAGLEVWLVNARDVKHLPGRSKSGRLDCVWLCKLNEWGMLRRSFVPPEPVRDLRALTRLRANLTHDRVRHQNRIEKILEDALLKVSSVISDLMGGSGRRFLQALADGERSPAALAALGDYRLHASKAELQEALTGRFRDIHGFEIGMLLELIDDLSAKITELDERIEAQLENVPGLGGVCTSCGQPGPDGPCTGCGEPVLGVIARLDEITGIGRGAAQVIVAELGTDMTQFPTPGHAASWAKLTPRAIQSGATSKAGRTGKGNPYLRGATGVAVMTAARTETFPGARYRRHARRRGKQKAIVAGCRTIIEIAWRVIADPGFRYIELGPDYHDQLDPGRKTRDKIRQLEKLNPGMTVTLTPRPEPGGQAPAA

SEQ ID NO: 373931 - protein, 311 aa, unidentified
MDILHYLGVDFHPYQQTIAFVDKFGEIKTRCFYHTDKVSLRKFYQQFPTGSVVGVEASGSFQWFEKMLFELNFELKIGNPWLIRKMALAVHKSDQRDAEHILDLLITNRFPEVKQRSEKSQIILAWLNYRDSLVRQRTAIANQLQAMARSFGLTRFQTKAKSAKARIVSSNTSDELLFLINSRFTMFENLTAEITSFEEKLHLEALLDERAKLLQTHSGIGDLTALCLVHTLGDVARFARKQQVTAFVGLAPVNHSSGEKTRIGHISKHGSRRLRFLLGQAAQSSKDEQLRMFYSQGESSSGNAESKSCCG

SEQ ID NO: 373932 - protein, 430 aa, unidentified
MDQVNRNRLEEFRQLRKEVRHSEEYLIVGIDIAKDRHYAFFGTATGKTLLKRIVFSNDHEGFRKLLDQAEALRVWHGLKKVVYGMEPTANYHKPLGEYLINLGRTVVLVSGVTVARNRESLDGRWDKHDGKDSANVADLISQGKCLYYEHPSAELRGLRGLLSLKRRLKKQEHGYRVRIRNHLLAQYFPEMDRDYERLGAEGLSIVRWCLPASQIAQLDIDPFIERVTSRRIRMEKRRRLEEVWEKAGESIGCEEVPGVNHEAKIMVEGLKQIREMIKETEDQIKELCEQFPEYHYILTIPGFGPDVSAKVLGAVGDPDRFQNGKQVLKMGGLDLSADRSGKNSDKAIPEISKRGKADLRYALYQAALVASLQNRDVMIYYTNKIRGREREKGIHIKMRVKLAAKLLVIAWTLMKKKEPFNPACLSAELN

SEQ ID NO: 373933 - protein, 429 aa, unidentified
MICAAVERCAGIDVGKKWLSVCVMIGALNGEPRTERRRYGVNVAELQRLRQWLIGEAVTHVVMESTGSYWKPIFNVLEEWVKVYLANPYEVKNRKGHKTDDKDGWWLAHLLRHAMIHPSFIPPRPIRELRDLTRRRARLNGVGTAEKNRVQKILEDANVKLGNVLSDIFGASGQMMLEALLEGQAQPEQIAKFAKGRARKKIPEIVAALEGHQMSDHHRKMIRYSLAHMQFVEEQIAELDEDIIAKIHEAGLDRQWQNLQTVPGIQERSAASILAETGGDMSQFPSQRKICSWAGVCPGNNRSAGKNLSSRPTGGNPWLRATLTESAWSAAVKKHCFIKEKFWRITTKSGGKKNSALIAVAHTIMQLSYDVLRTGEPYRERAAEALPEPQKERLIRHHVRRLGKLGVRVYSHRPGPPAPPPCETNLGSH

SEQ ID NO: 373934 - protein, 342 aa, unidentified
MQKNSYFVGLDIAADSFVASVYEAPGKPVTTKEAVENNLDGFSALISWLKEQGIDNSNSIICMEATGVYSELIAHYLLSCSFKVCVEPPLKVKRAFDPVGHKTDPVDSRQIAEYAYRFKDELKFWQPKHEIVEKIKQLLTAREQFTKQSVAMQNSIKAYERHVIKVPLIINAHRETLKELKKHISNIDKELDKLVRQNPTIFKISNQLKSIPGVGLLLAAELIVTTNAFSDISNYKTLSAFLGICPYQHSSGTSVYKRARIRNFGPSYARKLLMLAARSVVAAHNKTFIKYYERKLAEGKAKRLVLNNISNKIIKIACSLVKNNMQYSEGYRSVNPICFNLA

SEQ ID NO: 373935 - protein, 375 aa, unidentified
MNTDGYDRIIGMDLSKRTFKACILTKGNNFEDRKIASGHMSPEGRAEWLAALTEKDTVAIEGGTSSNDFARELMATGANVVVLNPGKLHIIFQSQRKTDKNDAVKIAQYVRDTHSSSICSIEVPTEGESLLRQIINSYDFAKRSRTQYINKLHSIFNMNGFPFLKRSGLKGNEARTDAISKHLTGMAFEDAVQAERVITEIETGIERYLEMMRGYVLDHAQAALPWLSLPGVGLITCVSLLAYVGNGYRFYSPAQLRNYVGLVPRIDQSGDKCHIGGISSYGCKTIRKNIVQGGWSFDHRKADCPLAEEWLKLVGRGKRKQTAAIHIANKLLTIGWTLQRKKELYNGFGNYSYLTTKLRREKIGAINLSGFPELA

SEQ ID NO: 373936 - protein, 417 aa, unidentified
MNSKIVYKICCGIDVHKTFVVACIASTNKQGVTAYKHHCFTTFTQGLKELLQWLLDKHCKDVCMESTGKYWIPVYNVLERDCTIVLAHPKYVKAIRGKKTDKKEAKWIADLCKHDLVAGSFMPVADIRQLRDLMRYSFKLTCFISNEQNYLQNGLTLSNIQLASVVSDTFGKSSQRILDKILENPEDTSFDIVSLIHSSMEKKLPELELAIDGFITSEQAGKLKIIKKHFEDLESRKAELEELILAFASPYQRELELDLILTATSFKNTFTAIGIIYEIGVNMEAFPSEKHFFSWVGITPTNNESAGKKKSVRVSKAGCYIKPLLVQCANAVIKSTKHPEMRNRYLRLKKRRGHKKAIIAIARMLLTALYHMLKNGENYNPELYRKTDLPPAGREITIEQALMLIRNQGYKIKSATT

SEQ ID NO: 373937 - protein, 340 aa, unidentified
MRFIGVDLHKKTISLCVVMVVEGKRKVVTRRQFSCRNTASIREFFESQTPFQVVVEATASYEWFLLLVDDLADRCVLAHPKKLRVIAESKHKSDRIDARILAEFLAMDMIPEAYRPSPRIQQYRALVRHRRWLQGRITSLKCKLRHKAANYNADVAELFTAKGQKHLADIAMNAADCFEVQNLLEQMQLSEKQLRKANNELAKFAETAPAAEREAREVLDTMPQVGCVTIDVVLSELGDWRRFRSIKRVASYAGLDPGVRESAGKSHRLAITKEGSRLLRWAMVETAWRLVGKYRRWRSIFDKLKKNTGSKKRAIVGVARRVLCVMFAMLRDGKGYRMAG

SEQ ID NO: 373938 - protein, 371 aa, unidentified
MSNDAIGFSRLLGDLKTVHKPEIIFEATGVYSRRLQSFLDEHGYAYTRLNPLEAKKQLDSLRVRKTDQIDAEKLAQSQFVLNRKTTYVQEEIYQNLRDLSRFYQNLTEDIVRAKNRLHKALQVTFPELENILSTPSGEQYWNLVIAFPCKDFVLDLSKDELSESIRQSTSKRISDKRVAYLAEKLIALANQSYCAVKKTSPMLEEVRYYAKELFRLSEQRQTILDEMVELAQPLPEYDILLSIPGIAETTATSIIGELGDIRRFQSANQINAFIGIDLRHYESGNFLAKEHITKRGNPYARKILFKCIHNIASASNTNPCHIADFYEKRKRQSQTTSTKPHTIASIHRLIRTMYYLIMHNKLYDYASTQNR

SEQ ID NO: 373939 - protein, 401 aa, unidentified
MPFHGGLDWGGASHAVCVIDGAGQLVTRIEVSHDAAGLADMLACLKRVAPPAELPIAIERPSGLIVDALVEAGHPVIPIHPNVVKACRPRYRAAGGKSDPGDAFMLADILRTDGHRFRPLMPVSDDIKALRALVRGRDDLVAQRIALANQLRSLLEGFWPGAAAIFAAIDSPIALAFVSRYPTPDSANRLGEKRLASFLAQHAYCGRRSAAELLARLRAAPTGLAEDAEADARGELARALAAILERLVAEIAKLSSRIEHAVAELPDGRIVMSFPRAGRICAAGILAELGNIRERFPTEDQLAAEAGVCPVTHASGKSRGVVFRWACNKNLRLAVTRFADNSRHASAWAADIYAKAKARGCKHPHAIRILARAWVRVLWRAWKDGNTYDPSQHASAVKIAA

SEQ ID NO: 373940 - protein, 390 aa, unidentified
MDVLYQSCAGIDVHQANIVVCILHGPLTSTRPKRETATFDTTTKGLRACHDFLSQFHVEAVGMESTGVYWRPVWHALCDDFELILAQPAHMKAIPGQKTDKKDAHWIAKLTRIGLLPRSFVPDETIQELRELTRQRKHYVESRNRETNRIHKILQSGGIKLTTYIEDIMGLSGRNLLQLLVDGTPITPRIVHQSVYTSLKKKVPQLLEALDGYFSDHHRFMLKQSLEIYDFYQKQIELLEERITVYLSQYEKHVEILDSIPGIDVITASVIISEVGVDMSQFPTSGHLASWAGLCPGNNESAGKKRSTKIRHGNSYLKKCLCQAAFAVKRQKGSPLAERYYQIQSRRGSQKATIALAHQLLKIAYILLKEQMTYPEFLAQKKTTRDELVA

SEQ ID NO: 373941 - protein, 316 aa, unidentified
MPAFLGLDIAKHSFDAVLLTEDRQRHHVFDNDQTGFDALLTWLGATTADLRACMEATGGYGDDLALFLHQQGITISIINPLQIKAFGQCEMVRTKTDKVDAGVIARFCRSQLPAPWQPPSPQTRDLRALVRRCAALKEARAAELQRRAQEATSPAAVASINRHIAFLDAEIAGVSADVERLIGGDAVLKENHDLLISIPGIGPQSAAVLLAEIPDFRLFRHNKQITAFVGLNPQERQSGSSVRGRTHISKVGNPRIRAILYMCALSARRHNPTLKTFADRLKDAGKPPKAVLVAVARKLLVIAYGIMKTRKPFHPS

SEQ ID NO: 373942 - protein, 369 aa, unidentified
MEKASTFVGLDVHKESIDVTVAEAGPSGEVRHFGTIGGDLEAVAKLLRRLRRKGRELKFVYEAGPCGFEIYRFLREQEIACAVVSPSQIPRRSGDRIKTDRRDSETLARLHRAGELAALYVPAPEDESIRDLARTREDIRRARHKARQQVQALLLRHGRRYSGKCAWTLAHRRWLSDLKLDHPAQRFALEEYLAVVDEATARLERIEGALIEQVASWRFAAVVGALQAMRGIDTIAAITLVTELGDLTRFESPRELMAFLGLVPSEHSSGSRRRLGAITKCGNSHARRTLVEAAWAYRHPARIGRRLLLRSEKLPPTIRAIAWKAQVRLAARYRRLAARGKPHQVVVTAIARELTGFLWAIARAHAATR

SEQ ID NO: 373943 - protein, 349 aa, unidentified
MVTLGIDAHKRTHTVVVIDDVGRELGSKTTTATTTLDHLDMLRWAARFGGERTWAVEDCRHLSRRLEADLLAAGERIVRVPPKLMAHARDAARTYGKSDPIDALAVARAALAHPDLPAAQLDGPARELRLLVDHREDLVAERTRCINRLRWHLHELDPSWDPIARSMTSYKTIDGVMGRLAHLEGMVARVAGEIAVHVRDLTVKERALQREITDRVKVLAPALLAMVGVGALTAAKIVAEVADIRRFKSKDAFARHNGTAPLPVWSGNRERHRLSRTGNRQLNAAVHRIAITQMRCHDDAIAYLARRIENGNTKTEALRALKRRLSDVVYRTLLEDAQPVTATCLPQAA

SEQ ID NO: 373944 - protein, 328 aa, unidentified
MFYLGMDVAKAKLDCCLLLDEASGKRKTKVVSNSRSGIVDLLAWVAKQNASPEVLHVVMEGTGVYHEQAALALADTGVTVSIVNPAQVKDFGRGLAVRTKTDGVDSFVLARYGALLKPKAWLPPAPEARILQALLARRAAIAQDLQRECNRQEKADATDTPERIQQSLTDSIEFLVKQLDQLQQVIDQHIDKHSSLQKDMALLQSIPAVGPQVGGNMLSVMHSHNFNSAEQLAAYLGLVPVERQSGSSVLGRAKLSKAGPARIRAVLYMAAIVATRCNPHVKAVYERLLARGKSKMSALGAAMRKLVHLCFGVLKTQQPYKHDHTKNA

SEQ ID NO: 373945 - protein, 460 aa, unidentified
MKKSQKTRKKASHSELSSINPNAAGIDIGADRHWVSVPEGRDHENVRSFSCFTGDLYQMADWLTQCKVETVAMESTGVYWLPVFQVLESRGFEVRLVNAHHVKTVPGRKSDVLDCQWLQQLHSYGLLAGSFRPEDEICILRSYIRQRDNLIKSSCIHIQRMQKALTEMNLQLHRVISDITGKTGMAIIKAILAGERDSQKLASLKDGRIKASCSDIAAALTGNYRPELLFILSQELQLYESYQAQITAIDAQIEQCLANFAPRVDVAAQPLPKPKRRGKKQPGNAPQFDLRTYLYRLSGVDFTQVDGIGALTTLVLLSELGLDPSRFPTVKHFTSWLGLCPGSRITGGKVKSSQTRHVVNRAANAFRMAAQTLSRSHSALGAYYRRMRSRLGGPQAITATAHKLARIFYHLWTTGDTYIDPGVDAYEQRYRQRTLSYLEQKAQALGFELVPHSSPSECVS

SEQ ID NO: 373946 - protein, 405 aa, unidentified
MDAATPSRVAGLDWASRLHAVCVLDPDGQVRARFDVPHTGTELRGLTRRLVKLGVGQVAIERPDGPVVQALLAAGLGVVVIPGRQVKALRGRYGTAGNKDDRFDAYVLADALRTDGHRLVPLVPDAPETAALRVVSRARKSLVATRVALANELRANLEIAFPGAATLFSDVDSPIALAFLRRFPSVTQAAWLTEARLAAFLRRMGYPGRKAAGELLGRLADAPAGLTGPEGEARAMVTLGLVAALDTVRAQIEELEGEVVERLGTHADAAIFTALPRSGRVRAAALLAEIGDCRARFPDAESLTCLAGAAPSTRRSGKHKKVVFRFACDKKLRAAVMDFAGDSRHDNPWAAHVYQQARARGHGHAHAVRILARAWLRVIWRCWQDHTPYDPARHGSYQRLIAQQA

SEQ ID NO: 373947 - protein, 407 aa, unidentified
MWFAGMDWADTHHDAVVIDAAGQRVGSIRVSHNAAGLAKLVVFLRGIGDGDSVADPDWLACIVETSHGLLITALLEAGLPVYPVNPTTVDRHRKPAGAKTDAIDAYLLARTGRSDLADLRRLTPDSPLIAELKALTRDQDTLIQSQTRLVNQLTACLKAYYPVALELFGKLQQPTTLAFLRAFPTPAQAQAATTKQIARTLRAAGYAPADTKAAEIRQTLREPQLHAAPPLVRAKARLMLALVAQLRPVIDDIAAYDSEIDRLFRQHPDSTAFMSLPRAGERLAPRLLAEWGDDRGRYADASSVQALAGTAPVAVQSGNYARVRKRSACTKPLRNVLYQFAWQSTLAEEWAAEYYQRKRQAGKSHPMAVRALANQWVRIIYALWTTRTAYDREVFHAAQQAHAPHAA

SEQ ID NO: 373948 - protein, 402 aa, unidentified
MQVDDIDVFIGIDVGKSEHWATALTTAGARLHDRPLPNDEGKLRDLYHRLSSHGSLLVVVDQPATIGALAVAVAQDMGITVGYLPGLSMRRIADLAPGNAKTDRRDAAVIADAARTMPHTLRAIDTGDQDAAALSMLTGFDLDLARQVNQVSNRIRGLYTQIHPALEGVLGPWLEHDSVLEVIATWSTPAALRKAGRARIDAKLKANGCRRHATWAQDIIDALAKQTVVVAGTDAAGVVLPHLARQLIALHTQRADIAAQVEALVEAHPLYPVLTSMPGIGVPAAAVFLAETLGKTFETGAQLASYAGLAPVTRRSGSSIRGEHVSHAGNKRLKRAMFLSAFASLRSDSVSRAYYERKVAQGKRHNQAVIALAHRRVLTLHAMIRNGTLYDPQPAQPLATAA

SEQ ID NO: 373949 - protein, 345 aa, unidentified
MEMRTIGIDLGKTVFHLVGVNARGEVVVRKKYSRTQLLRFTSNLRECLIGMEACGGSHFLGRALREQGHDVRLMPAQYVKPYVKTNKNDYIDAEAIAEAVTRPTMRFVPIKTDDQLDLQSLHRVRERWVVRRTAVINQIRGLLLERGITIRKGRQHLEASLPRILEDADNKLSGALRVLLTQLQIEMQYLHRQIEESDKLIVRIASELEPCRRLVAIPGIGPLIATATIAAIGNGAAFKKGRGFAAWLGVVPGEHSTGGKQQLTGTSRRGNKYLRKLFVLGAHTVLLQRTKQSIGLSTWLASLTARKRKQVATVALANKMARMVWAVLFKGEAYRPPLLPQTVAV

SEQ ID NO: 373950 - protein, 566 aa, unidentified
MNTIGVGIDTARYGHRVTFLDEHRQPAAPALSIQETRDGYAALEAAFRRLQGKFPEATFRIRIDAAGQYAANLESFLRQLPERLEISFGQPKQNKDYRQVHFPKRKSDDTDSQAAARYAVVETPPAEAGCPPELLALREVASWLQSQAVDCTRAKNQLHNLLARVFPELATLTKSIASARILRLLSKYPTPALLARARLATVQRIPHLPSDLAERLQQAARGSVASLRGEVAAQLVQHQVRQLQLRLRAKRQLEQFLQETFLKIPGSACRQVATIPGIGLPTAAALVAKIVEIDRFASPAQLVGYFGCFPEERSSGVDQAGRPLPSKSCRMSRKGNDLVRHYLWMAAQCACLHNPAIRALYRRQRQAGKRGAVALGHCVRKLLHLVYAVWKTDRPFDPQHHAWEAAPAPQSPAVAESPKAERAAETEVTPATTLTVPPASPTSKLLPSPIRPRQRRGKSIDYRYLREQLSIAQVLELLHYPHSLQGTGDQVRGPCPLHAEERRRSTFSVNLKRGVFRCFASECGAHGNALDLYVKATGLSLHDAALELADKLHLQLQRNREEEPVT

SEQ ID NO: 373951 - protein, 387 aa, unidentified
MIYVGIDIAKQKHFAAAMTADGEVLVPPFSFTNDAEGFNTFLAKIKSFDKSDTLIGLESTAHYGENLICFLFDRSYQISVINPIQTSTLRKTNIRKTKTDKVDCMLIIKSLIVNKTRLYSKSDIDSLRLKSLCRFREKLKKSKAKLKIQLVTYVDVVFPELQYFFKSGIHINTCYMLLMKHSSPDEIAALHLTYLANLLRKASQGHFGKEEAIALKSLAKSSVGTGNTAVSIQITQSITQIELLEQQLNVIDENIKSIMIEMDSVIMTIPGIGFLNGAMILGEIGDISRFSNPAKLLAYAGLDPTVNQSGKFTAKSTKMSKRGSTLLRYALINAAWNASLNNKTFDDYYKLKRSQGNNHYGALGHVAHKLVRVIFKILKDNVAFNLD

SEQ ID NO: 373952 - protein, 385 aa, unidentified
MNGGKQELREFGTNTSEIKTLANWLTESGCEMIAMESTGVFWKPLYNLFELMDLDAMIVNAAHMKALPGRKTDVKDAEWIADLLRHGLLKASYIPNREQRELREITRYRKSLTEERCREVNRLQKILEGANIKLDSVVKDITGKSARKLLQRIIDDDIPDSDEVSKLVHGRMRPKLDQIVASIEGITTPLQRKLLAQIIDHIDDLNRRIGELDKLVQEYMAEYEAAIEAIDEIPGIARRSAEVILAEIGLDMGRFPSAAHLCSWAGVCPGNYQSAGRRKHGKTTKGNKALKTILTQCAKSAKTVKSSYFFAQYQRISARRGKNRATLAVAHSMLIAIYHILKNKTAFHDLGSDYYDSFNRDRKINSYLKRLKALGWEPDAIPSSA

SEQ ID NO: 373953 - protein, 403 aa, unidentified
MYKYFLGVDISKDSFDFCFTDETEKVLYKDHYQMDIDDFTKLNEYLSPFSKDEILIVMEATGIYHLTLLSYLLEQGLNVSVVNPLFIHAFTKSMTIRKTKTDAKDAHIISIFAKRNGATLRLSSSDDLETIKPIVREKEKLTNQMSAIKTDIKSIVNQLFPEMLKNTNIFLKSSLNLLLQAPGKRIIRNLKEKKIASYLSQDSTRGAKPKLSAKDILLLAKNSIGINNQSLEKILVSKIKQLEFLQIQLDEYNEIIEQFVDEHHNNDIDLLTSISGVGKPSAASFLVELGNINNFATHKQLTAFIGTDPTIYQSGTSVNVKGSISKRGNSHLRRTLWHMARAATVWNTTLKAYYDKKRSEGKTFKQSVIAVANKLIRIIFSMLKNNTKFDENFSNLAIKSVSC

SEQ ID NO: 373954 - protein, 407 aa, unidentified
METRFAVVIGLDVGKTGHHACALDPGGSRLFDKPLPQDEAQLRELFTELQKHGNVLMVVDQPNTIGALPIAVARDAGCAVAYLPGLAMRKAADLYPGRSKTDARDAFIIADTARTMPHTLRAVDRDNEVLSALKVLAGFDEDLAHETTRALNRIRSLLTQIHPALERVFAGGSLANSLTLELLIKYGGPTGLKTAGRGKVLRFARAHSRRDPEALIDQIFAALGEQTVVVPATAAVELVIPRVAGQVKELKEQRATVAREVEGMLEDFPLASVLRSMPGIGLKTAAQILLNIGDGSAFETPGHLAAYAGIAPVTRRSGTSIRGEFPARSGNKRLKNALFYSAWVASNHDPISKTYYDRKRAEGKRHNAAVICLARRRCNVIFAMLRDGTYYQSPTPVPTPEPPTLAA

SEQ ID NO: 373955 - protein, 410 aa, unidentified
MRTLVERCCGLDVHQATIVACLLVGKAGGEVRREVRSFPTTTAGLLQLRDWLAEEKCTHVGMESTGVYWRPVYALLEDDFIVVVGNAQRIKNVPGRKTDVKDCEWIADLLRHGLIPPSFVPERPIRALRDLMRYRRSLVEARTNCRNRILQVLESANIKLAGVATDVFGVSGMAMLKALVAGIMTPTEMANLAKGLLRKKLAQLELALQGSMTDDHRFMLSELLQSLAQDEQRIKAAEERVGERLKPYIEEHTLLTTIPGVDWERAAAMIGEHGVDMSRFGTAERFSAWSGSAPGNNQSGKRSRHAPARKGNIHLKTTLYGAAISAGHAKTGYLREKFHRIKARSGPRNAAGAVAHKISIAVFHILSTRQPYRDLGANYLDKRSERRTAKNLIHRLERMGYAVTLTPKTA

SEQ ID NO: 373956 - protein, 336 aa, unidentified
MDVHKNIIVATIGITNKKTRITEYIQETFSTLNSDLLNLKQWLINHKCFDACMESTGKYWIPIFNILEDEINIYLTHPKYVKAIKGKKTDKKDSKWICDLFKHDLIKFSFIPPKEIRALREISRYRYKLVGMRSSERNRYQNCMTVSNIGIGSVFSDPFGKSAQAIMKEVLESDIIEDEKILKCIHRSCKNKDKILDSIKHCNIETDQRFKMNESMTHMEELQVHIDNCEIEMMKRAAPMFDQFMHITQLPGISTLSAILIISEIGVDMKQFESDKQLTCWAGLAPANNESANKKKSVRISKAGQYLKPLLVQCALGAIKDKEGYFFISDFYKHIT

SEQ ID NO: 373957 - protein, 315 aa, unidentified
MVEQVVVGIDVSKAKLDVALLPGGEQFTVSNDRHGIGELLRRVSPLAPSRVVLEATGKLEQLAVSELAAAGLPVVVINPAQVRHYAKARGKWAKTDPIDARLIAEFARDLEPELRPLPDAETQALAALCQRRNQLLEMEQMEKSRLQRAPGANQKSIKAMLRFVRRQVEQVEKQIEHSIRHSPLWQAKRELLESMPAIGKVNSSTLLARLPELGQFTRQKICALVGVAPYNDDSGQWHGRRHIAGGRGGVRQVLYMATLSAVRCNPALRDYYQRLLGRGVEPKAALIAVLRKMLTILNAMVRDNTPWRPPCPIPA

SEQ ID NO: 373958 - protein, 353 aa, unidentified
MNRELLKYGIGVDMGSKKFHGCITSQWSDGHIKVEATKQFNNTEAGHRNFFQWVEKHRKNKSVAYQILVEVTGVYHEKLVYYLYDQGAAICLEMPKRVKRYLQSIGQYSKTDKLDSKGISKMACERKFKKWKPASKHIRQLRTVLRHRKALIKSKNQFTNQLHALGHSTSELGKVKRSLEKMIKLLDIQIIAIEKEALRISRKDEAQHKKAEMIAASIPGLGILTMLITLSETNGFEEMKSQKQLQSYAGFDIVENSSGSFSGATRISKRGNVHLRTAMYMPVVSMVRMKPPVFYPLYERLVKRNGGLKKKAMVAVQRKLLVMIYTLWNKNEAFNPDYESERNPELEKQVAPI

SEQ ID NO: 373959 - protein, 429 aa, unidentified
MRTESTPGARGPVFCGVDTHADSHWLCVLDWRGRKVLSRQFPADAAGYEALAGAIAAAGEPACVAMEGTSSYGAGLTRHLASLGMPVREALSPARMQRRRPGQGKCDEADAERAARAAMSGSKLGTPKSQDGWVDGVRCMLAARSGAVKARTSAINTARSLLTTAPEGLRSRFRGMGGPRLMEELPSVRAEGALGAALGALADLWEAARDAALDMERAIEASLEENCPALLAMYGCGPVSAAKLAVAAGDNPGRLRSEASFAAICGACPIPASSGKTVRHRLNRGGDRQANSALHEIARQRVMRDPETAEYAERARGRGKSDREVMRCLKRYVAREAYRALMHPHEIRRPEDASELVASRRAAKVSQVRAASILGTSEKYISMLERGQRELRPIRRAYEAWVEAGLPLDWDRQAFEAERKMDSKKHLAK

SEQ ID NO: 373960 - protein, 388 aa, unidentified
MLLDYPSDGPAAIRTQIGAIFVSLELSRSTWLVTSLSPGKGEKMSKRSVKAGELAELLKLFAELKRKAQARTGESYPIIAIQEAGLDGFWLHRALQQEGVESHVVDPASIATPRRRRRAKTDRLDGETLLRALLAYKRGEVRVCAMVVAPSPEEEDRRRLCRERRTLIAERIEHVNRIKGLLFAQGIFGYAPLRRDRRKRLEALRSGDGRALLPHLKAQISRELDRLELLLDQIAAVEREQDALLAASKAAGEKAAPDPVTMLLELKSLGPNFAAVLWTEAFYRQFANRRQIASYAGLAATPWRSGGIEREQGVSKAGNPRLRTTMIQLAWLWVRHQPQSALTQWFKVHSQRGRKRAIVALARKLLVALWKYVTAGVAIEGAEMKTAA

SEQ ID NO: 373961 - protein, 355 aa, unidentified
MESVKYLGFDVHQSTISVAVVNADGKLVMQSVIATHAATILDFIHGLRGTLHLTFEEGTHSAWLYDLLARRVARVVVCNPRQNALLKAGNKSDTGDARKLAELLRAGLLAPVYHGEGSTRTLQELVRSYAALTEDTTRVMGRVKALYRSQAIACAGKKPYGRRHRREWLSKLSEAGLHRRAERLYEELDALQGLRRAAKRELGLESRKHAAAKLLRTVPLLGAIRAALLIGRVQTPHRFRSKRQFWAYCGLALETRSSADYRFEDGQLVRAKKPVFIRGLNRNHNHDLKNLFKSAATTASALHGPFREFYEGLLAKGMQPAMARLTLARKIAAITLSVWKKGESFDAEQLKPQAA

SEQ ID NO: 373962 - protein, 342 aa, unidentified
MSKIITVGLDLAKNVFQVHGADGAGRAVLRKKIRRAQVLEFFSQLPSCVVAMEACGGAHFWGREIGKLGHDVRLIPPAYVKPFVKRQKNDAADAEAICEAALRPTMRFVPVKSEEVQGAAMLFRVRELLIRQRTQAINALRGHLTEFGQIVPQGAANAARLVAIVEDPEGALPADAVPTLKALITALAHLEAEIAKLDAEITRRAKENDLARRLMTVPGIGPLIATAIAVLAPPPETFRKARDFAAWLGLVPRQHSTGGKQHLGATTKMGERSLRRLLILGANSVIIKRHVHAAARPGTWLAGMLSRKPPMLVRVALANKMARIVWALMVKGQDYRAPAATA

SEQ ID NO: 373963 - protein, 423 aa, unidentified
MRFIGLDVHRDFCEVAIADGGKVRLAGRVQTEPAALALFAQSLAVDDEVALEATGNALGIARIVEPHVGRVVLANPKAVKGITQAGAKTDKIDARTLATLLAGGFLPAVWLPDEKTRILRRRISARAQLVRQRTRAKNQVHATLIRNLKGKPPVSDLFGVRGRRWLAEQVLPADEQETVAACLREIEFLDGEIALLERTLAEQVLASAQMRRLLTLPGVNFVTAAALIAAVGEIGRFPTARQLVSYLGLDPRVSQSGTEPARHGRISKQGSGETRHVLVEAAWHATRTPGPLRAFHQRIASRRGGNVATVAVARKLAVIAWHMLSRREDYAFARPSPTREKIRKLELATGAERQKGKRNGVFATREQHDLDKQLAAQAELAYRRLVQDWQPAIKGTGAAPGRASRRPSSGQAARQETAPPPAL

SEQ ID NO: 373964 - protein, 380 aa, unidentified
MSKIRFVGLDVHAETIAVAVAEAGGEVRSLGTIPNKPESVRKLVGKLAPAATLKCCYEAGPTGYVLYWQLTQLGVACEVIAPSLVPSKAGDRVKTDRRDAEKLARCYRAGELTAVWVPDAAHEALRDLVRAREAAKKDQLRHRHRLGKFLLRHGKRPADAGQAWTQKYVNWIRIHASFEEAALNATVAHYLEEIDHIAERIAKLEVAIDEAVKQAAPEIRAVIEALQALRGIAQTTAATVVSELGSLSRFQNPRQLMGYSGLVPREHSSGNKTQRGAITKSGNAHLRRVLVEAAWTYQHRPNVQGRVLRRQKALALSDEAKKIAWKAQQRLHKRFTVLAARGKNHYQIVTALARELLGFLWAIAVDAEAHCKPAKPAKAA

SEQ ID NO: 373965 - protein, 414 aa, unidentified
MEVLHPRCAGLDVHRDSVVACARIADHGGAERLVETFGTTTSELERLSRWLAGRGVTHVAMEATGVYWKPVWAVLAGAFELVLANAMHVKNVPGRKTDTNDAAWLADLLAHGLIRASFVPPMAIQALRDLTRTRKQLTREKVSHVERIDKLLQAANLKLGSVLSAIMGASGRAVLDALAAGETDPERLAGRVRTRIRASHAEVVEALRGRMSDHQRLLLRIHLGQADAIDAAVAEIDAELGGRLEPFRDATTRLTTIPGVGALSAAVIVAEVGADMSRFPTAAHLISWAGLCPRSDESAGKRRSTRLRKGAPWLKTLLVQAAWCAVRVRGTYLRALFGRLKARRGPRKAIVAVAAAILTAVYWMLRRGVAYADLGADHFDRTGRTRLAARLARKLDELGFDVTLTRKDGAMVSS

SEQ ID NO: 373966 - protein, 340 aa, unidentified
MIDVLGIDLGKNLCSLVGFDDAGHVVLKKTIRRNRTLVEIGKHRPRIVAMEACCGAHFLSTPIKELGCEVRLMSPEYVKPYVKAMKNDLRDAEAIAEAATRPTMRFVTPKPMAQLDMQTLHRVRERLMAERTRLINQTRAILFERNITVPQGACRLANQLPGILADDSNGLSPRMRILLQDLHDERVGIEKRIAAYDAEFERVSRSEAPCAKLRTIPGIGALTATALVAAVGDASAMAKGRDLSAWIGLVPKQNSTGGKSRLGRITKRGNSYLRKMLIHGARSICKHHRDRDTPLANWIRGLSSRMAMNKVYVAVANKLARIAWSVLRSGREFDMGELAR

SEQ ID NO: 373967 - protein, 340 aa, unidentified
MTITTVGIDLAKNVFAVHCIDQNGKAVLVKPKVSRAALSELIAGLPPCVIGMEACSGAHYWARLFRQYGHDVRLMAPKFVSPYRMAGKTGKNDAADAIAICEAVQRPHMRFVPVKDESQQAMQCLHRTRQGFIQERTATYNRLRGLISEFGVIAPQSTDALRHVVSDQKETLPVQVRLCIDDLLTHFTNIEEKIAEYDRVLSRVAKTDHRSQQLMELKGVGPTTASALVASIGNAHDFKNGRQLAAWLGLTPSQYSSGGKSKLGRITKAGDAYLRTLLVQGARSVMVGAENRTDPFSRWVCSLIGRRGYWRAVVAIAAKNARLCWASLHYGDDFRLYSTT

SEQ ID NO: 373968 - protein, 405 aa, unidentified
MDIQPIFRCSVGIDVHLALLCVCVIVAEPGCEPAVHRREFGGFKRDRHAMAEWIAGFKPDIVVMESTGIYWKSPYAALEKAGIRAMVVNAQHVKKVPGRKTDTGDAEWLAMLARAGLLRGSFIPPEELRTLRQVSRHHQKLTAMRAMEKNRLVKVLGDAGIRITAVASDAHGVAASAMIDCLLGGGTPEQALAHAGQLHAKREDLLASLQGELSEEHIFVAKVIRDHLAFLNTQLADLECHLLDALQPHEAALQLLMTLPGVDRLSAAKLAVEIGLDMAAFGTSGRLCKWAGVCPGNDESAGKRKRGDTAPGNRYVRAVLCEIAWAAVRTASQFKGRYQSLVSRRGTKKAIVAIGHKLLRIVFVLLSRKVPYKDPTVDYGALLVKRNAPRWIRQLKKFGYLPQAA

SEQ ID NO: 373969 - protein, 364 aa, unidentified
MQLYIGLDVHSKKTVYCCQDQDGKVLKRGSVPTSVKGFEQLIAQAQLPMGTIIGLETGTQSNWVSRLLAGMGMSPVVIEAREVRAKARRIGQKSDGRDAFEICDGLRCGIYHSLVYVPDPEVQRLRTILSRRRHFVNKATGQINAAKFLLRSVGLSDQARTLTSEAAWEKLLSNPTLSELRRYLEMHARMWILCTELVAILDLELRQALGPFKEPVALLTSVPGVGPITAATFVAVLGTPHRFPDSSRLASYIGLVPSSYDSGETIRRGRITKRGSSELRTMLCEAAHHTSKPTHPLNPYFRRVCAKSGYRKAVVCVARRLSGILYQMWRNNEVFDETKLNVVRSVKVKQRTCYYELRQQVANL

SEQ ID NO: 373970 - protein, 312 aa, unidentified
MYYIGIDVSKKDLSVFDGKKDLKFINKEGLKSFKKYLKKKYNLSEIAIIFEPTGIYSFYLKEFCAENSIKAYIINPKQSHNFARALGIRPKNDKIDARTLYKFRKLIGLNDIKVPVIDQQVKTLSGYLVSYQFALKQRISLSNHLESLQDKRLIALIKKDLKRAKKLEDNLFNDILEYVSKNQNLKEDYQRFLTISGVGDKMAIALLTLFKTYQGTNRAQITALAGLDPVRRESGTSVKYREKISKNGKGIYRKIFYLPTICATVHNQKIRVFYQRLLANHKTKKLAIIASMRKLLLIAHAIYRDKTEYIAV

SEQ ID NO: 373971 - protein, 370 aa, unidentified
MTHPNTLYIGLDVHKESIAVAYGTQDPGAEVTYLGTIGTRQCDIDQLLRKLQSKSKHLVFVYEAGPCGYWLYRYLSKKGYACWVVAPSLIPQKAGDRVKTDRRDAVQLARLRRSGDLTPVYVPQVEDEAIRDLSRAREDTIRDLKAAKFRLKAFLLRHDIRYTGQATWGPAHLRWLAEVVCATPAQQIVFQEYVRAVNEHTERLLRLEQTLHEQVHTWRLQPVVEALQALRGVQFTVAVTIIAELGDLTRFDNPRQLMSYLGLTPSEYSSGERRRQGSITKTGNTHARHALVEGAWAYRYPAKVSRHLQLRLEKLPKAVQDISWKAQVRLCTRYRQLSARGKHANQVVVAIARELIAFMWAIAKEVPVTP

SEQ ID NO: 373972 - protein, 371 aa, unidentified
MNRILYVGMDVHKENYTLCTYDIGEDKQKYCQQLPPDYRLILSYMEWLREQYASGTEIICGYEAGSLGYSLYHQLTNHGVKCVILAPTTMATTNNRRVKTDKRDAGNIARCLAFRTYSEVYVPTEDDEAVKEYIRMRDDHKKALKIIKQQILALVLRHGYHFDDGKSYWTIKHLKWLKSLKPGGILQESLTEYMVTYVYLEDKIGHMDCRIEEIAKNEKYIEKVKRLRCLIGVETHTAMSVIVEIGDFKRFSKAEKLASYIGLIPSEDSSGGKQRRGGITKAGNTHVRRLLVESAQSYTRGMAGHKSIKLKRRQSGNDPLIIAYADKANERLRRKFYRMTLTKKLNRNTATTAIARELACFIWGLMTENIA

SEQ ID NO: 373973 - protein, 323 aa, unidentified
MSTKATKKRRSFIGIDVSKKLLEVGVHQSDYHFRCPNDPKNFPALITELISLRPARILLEATGGLERALLQALHAVALPVVVVNPRQVRDFAKALGLLAKTDRLDARVLAHFAAAIQPALRPVKAQQETELDALMGRRTQLSDMLAQEKNRRGSAATKDTRDDIEEHIEWLEERIQELDEKLKEQLKCSAVWQQKDKILQSVKGIGFVTSLSLLADCPELGQLNRHQIAKLVGVAPLNRDSGQQRGARHIWGGRAQVRRKLYMATLAATRFNPVLKSFYQRLLVKNKLKKVAIVACMRKLLTIINVMVRENKLWNVKAQPVSA

SEQ ID NO: 373974 - protein, 483 aa, unidentified
MKATRVKTSGSLKKSPPQPGPIRPAAKLPLVNAHAAGIDVGSIEHYVCVPEDAIAEGQSNVRSFGAFTAELDKLVEWLQLCGVKTAAMESTGVFWIALAQKLEDAGIEVVLVNAKHLRYVPGRKSDIKDCQWLQQLHSYGLLNGSFRPSQDICALRSLMRHRENLGHSCGREVQHMQQALQQMNVHLHHAVSDLDGQTGLRILDAILAGERDPKKLVELRDDKCHKSTPEELAAALQGDWRPEHLFVLQQALETYRHLADQISKCDLEIEQALAQVIIAPRPEPQEGPPPNPPAAEKPRKKKRFKTGKAGTSLKKDLSEELKRICGVDLTQVIGLNVLGVLIIISEIGLDMSRWRSAKAFASWLGLCPGNKISGGKVLNSRTAHVINRVAILLRAVAPAIGRSDTWLGSFHRRMRARLGPAGANTATAHKLACLIYHLLKYKEEYIDVDRLVYESKLHRLRVARILKQATELGYELVKKEPTE

SEQ ID NO: 373975 - protein, 347 aa, unidentified
MNFYNRQHQFYCGIDLHANSMYACVVDASGTKLLHRNFKTRNPNQLFDRLEPYQNDLVVGCESTFNWYWLADLCVEKEIPFVLGHALYLKAIHGGKTKNDKIDAEKLALLLRGGNFATAYVYPKQMRSTRDLLRRRSHLVRRRGETLTHIQIVNHQQNLPAFEKKLSYKANRVGVAERFEDRSVRAAIELDLELLGYYDDLIRRLELYLERTAKIDDPQAFFRLQTIPGIGRVLAMTILYEVHQIRRFPDVGDFLSYARLVRGSHTSAGKRYPSTGKKIGNPHLKWAFSEAVPLLKRQCPEAKALADRIEKKHTKARAQSYLAIKLGRAVFFMLKRRQAFEIGTLMH

SEQ ID NO: 373976 - protein, 298 aa, unidentified
MHGLEDQYENANTSAGISVLIAWLKAREVGRVGLEASGGYERQVMAALQAAGFEVVLHQPLEVRLFARMKRLKAKNDRIDARLIAMATAQVEAVKAAQDPRLRDLAERLTAYEQVTDQAAELKTFLEHVTLKDVARAIKTQIGSLERLKQKLMGDILKRIRTQPDLARRLDLLGSLPGVGPVVAAALVVRMPELGSMSRGQAASLLGVAPFDRDSGQFKGMRFIAGGRKRPRRLVYLAALAAKRCDPGFKAFAQRLLSCGKPPKVVVVAVMRKLIEAANLVIARDRPWEQVAPNPAKP

SEQ ID NO: 373977 - protein, 402 aa, unidentified
MNPCITIDVSKESSHVQGFWDINKQISKPKEIEHTKVGFSYINEIFNLIKEKSDIEPLIFFEYTGVYHQPLMNYLQEQKLKFIPIPPLDAAKVRKSDLRSKKTDKRDCKSISYVYYENKLKIYYEPTPEEKYLRELQKHYCQLEDIYQVITVHLHELLDSIYPYYKRIFSEFDCYNSLYFLKEYPHPKFVTSHRVQKVANKYQSLSNHSANYCLKFANKLFAYIDEIVPGCNQNDYSVSMFKDLVEQTIFYKQRLDETIKTICQIISGSDKKELLESIVSVPGVGHNTAARFIAEIMNIDRFNSHKALVAFTGTDPHIEQSGDVDGKHLSITKLGNKRLRTILFQMVRSMIRKRIPDNHIKDFYKKKTQQGLKPKVALIACVNKLLGIIYQLNKTKTRFIYK

SEQ ID NO: 373978 - protein, 429 aa, unidentified
MTNQPIAGFDVSKRFSDMCILGPDNKVFARMRVHHNVSDIRKACGLLKSAEKEFAMIPTIIMEATGHYHRLLFHFLKNAGYEVTIVNPIQTNSIKNFSVRKVKNDKIDAYRIAILYRLKELRPTNMPVEAILDIRNLCRQYFDISDDCTAYINKLIAITDELFPGFSDIFGNIASKTALEILSRYPTPEDILDAPRDTLVEIISKTGRKGLKWALDKYNKLIEIATEVKPLFIKHSSSTILLNTTITFIKTLQHHMKFIEDEIYKVIADNPGYISKAIEILDSIPGVDVISAAAILGEIGDFSAFKSPKQLVAFFGIDPSQKDSGQFKSTKNKISKRGSKILRRVLYTITMANVRKKCNKELLNPVLYEYYKKKLISKPKKVALVVVMHKLVYIIFAVLRDQKPFELRTPEEHKKLLALKASQHQRKSA

SEQ ID NO: 373979 - protein, 423 aa, unidentified
MMKLKYSICCGLDVHKNVIVATIVTTNKDGISEYKQKSFSTINSDIQRFHNWLIENNCYHVCMESTGKYWIPIFNYLENDIDVCLTHPKYVKAIKGKKTDKKDSKWIADLYKFDLVRCSFIPPKDFRQLRELSRYRFKLVCMKSSEKNRIQNCMTVSNVGIASVLSDPFGKTATEIISYLLEHTADSMDEKAVRKFIKKGAKSKSDEIIEAIKGYTIETDQAKKLELARGHLEYLDDMITQTEVELYVRIKPYYKFVEFVSTMPGMTELSSTIVLAETGVDMDIFDDAKHLCSWCGLSPANNESAGKKKSVRIAKAGDYLKPMMVQCALAAIKSKKQPYFAIKYGRIKKRRGHKKAIIAIARMMMVCIYHMVSEKKPFTPTDYEELMNPQNHVERVVLNENNMFAYLESLGYDSSKLVKRNDN

SEQ ID NO: 373980 - protein, 355 aa, unidentified
MSQTPNIAIAVIGIDIGKNSFHVVGHNARGAIVLRQKWSRGQVEARLANIPPCLIGMEACVGAHHLSRKLASLGHDARLMPAKYVRPYSKGQKNDFNDAEAIAEAVQRPTMKFVATKTAEQLDLQALHRVRERLVSQRTGIINQIRAFMLERGIAVRQGIGFLRTELPTILATRTDALSPRMLRIIEELAGDWRRLDQRIDGLSGEIEALARQDQACSRLMTVPGIGPIISSAMVAAIGTGDVFSKGRDFGAWLGLVPKQISTGDRTILGKISRRGNRYLRVLFVQAAWVVLVRIKNWERYGLKSWIEAAKRRLHHNVLAIALANKLARIAWAVLAKGRAFELTRTDDAGVVQPA

SEQ ID NO: 373981 - protein, 523 aa, unidentified
MVTKTRKRKFAGSKKRFVGKPTGQIQERVQAVGPEHFGIVAVDCAKRRSKWMLCNFYGKVLVEPTSVEHTTGGLRAMTQSIAAACQAEGLTDTIVAVEMTGIYHKPVQRAFRKAGFDTRIVHPFASNHYRRPLHPDAKTDDHDLEAIFHAAVKGYGLATLPVGEIYQSLQAVSRHRHNLVKQRARLMVQIRRLLHQTLPGFADLFEDDKLFRKSIGLAIVLKFSSAEAIRRAGVDGIARHLSQTKVRFQSRTIERIVAWATSAAEPAELAAMYTRQWQQLNDVRRLFDEQIAATEREMAGFLVKTPYVLLLSVTGINVVSAARLAGEAGPIEHYASARAINGRAGLYPSRYQSDEVDHADGSLVRQCNRQLRGAAMLVAENLIKCHPYYRGLSALWMQQKVDPRDRRCRIANRAMRMVYQLVGGRQLWRGKGVDREYLLAKLQEFHRVHETPLDQAIRDLHEAFAWLPKSAYAEEAKPLAELARKSRRGLQRIGDLMIPLLMRLGVGVPDEVKSNLSEARSSD

SEQ ID NO: 373982 - protein, 346 aa, unidentified
MNGMNYIGLDIHKKSISCCVRQADGTIIQESTITATRQALDEWVRRLPQPWMAGMEATLFTGWIYDHLVSCEAVVKVAHPAMLQAIAAGKKKNDRVDARKIADLLRCDYFPECHMASREIRDRRRVLRYRNLLVRQAVQMKNKVSGLLMEAGVPYNQQKVHQKKYFAELLQKQKKEMPPSMPELLRLSRSTVVALTGMQRQLIQALERDELLAARVERLASIPGVGRVVALTWALEIGDISRFASVKKAVSYCGLCGAEKSSGGKKERTPISKQRNKHLQTILVEAAKLAPRWNAELALVYEREKQKGNRNRATLAVARKLVAYLMAVDREARPFDTHLRVADNAA

SEQ ID NO: 373983 - protein, 342 aa, unidentified
MEISTIGIDLSKTTFHLIGLSPRGDIVLGKKLSRKQLLTYTATRMPMLIGMEACADAHYLARALRDQGHDARLMPAQYVKPYVKTNKNDYLDAEAIAEAVQRPTMRFVSIKNDEQLDLQALHRVRDRWVARRTAVMNQIRGFLLERGIAIRKGPSYLAAQLQVIFTEGDSSFSGRLLHLIRELKHEWDELERKIEEASAELARIAKKDDGCHRLMEVPGFGPIVSTALVAAIGNGISFRKGRDLAAWLGLVPRQHSTGGKTRLLGISKLGNEYLRRMMLHGARSVVMQMERKPSALGEWLTSLSARRHRNVTVVALANKMARIAWAILSKGTHYSAPAFVAA

SEQ ID NO: 373984 - protein, 438 aa, unidentified
MRRVIGIDVHRTFGEVVFWENGRLRHAGRIDMTRTALEGFGKTLLASDEVVVEATANSMAVSRVLAPFAARVIIANPLQVKAIAQAHVKTDKIDAGTLASLHAAGYLPQIWTPDAETERKRRLVARRYQVVRHRTRLKNEVHSILHTHLIPKCPHADLFNVRGRAWLAAQALLNDERAAIDRHVRELDRLAEDLALLDREIAQDAIDDPAVNRLMTITGVNLAVAAGIVAAIGDISRFNSPQKLVSYFGLNPRVRQSGLGPAHHGRISKIGRSHARAMLVEAAWTAAKTPGPLHAFFVRIRARRGHQIAAVAVARKLTVLCWHLLTKGEDYQWARPALVANKTRAMQLQAGHPQQKGSRRGPAYAYNIKALRDREMLIAAQAERSYERFVSQWKPRRPKNRRAGASARQDKIGSPVTLAADASRFATRSPARDDHNRR

SEQ ID NO: 373985 - protein, 405 aa, unidentified
MAVRERIWVGIDVGKTAHHACAVDGTGKVVFSQRVDNGQAAIEQLIARAGKAAVEVRWAVDLTSGAAGLLVVLLLTTGQPVAYVSGQTVNRMAGAFGGEGKTDAKDARVIAQTCRMRADLPELSVPDPVVTDLAVLTARRSDLMNDWVRDVNRLRELLSSVFPVLEKALDCTTRAALSPLTGFQTPAAVRDAGEPGLTRHLHDLGVRPGPAHTVTAKALAAAAGQTVALPAEAVTAPLIARLARQLLDLDREAKDLTTQIGDTFRAHPQAAIIESLPGLGPVPGAEFLVGTGGDLTTFRGPDKLAAFAGLAPMPRDSGRISGNLRKPRRHHRGLRRVFSMAALVSAMREGPSRTFYQRKRTEGKHHIQALIALARRLVDVLWALLRDNRPFTSTIANAAATPTVA

SEQ ID NO: 373986 - protein, 419 aa, unidentified
MKDIETKKVRVINKETLIVTVDISKVTNVGYCRCPNGKDIKPFNFMNNAQGFNTFCDRIMKTKNIHGLKDIVVGFEPTGPYGEPLTHFMAKKKVKLIQINPMHTKRVKELEGNSPNKTDQKDPKVIADIIELGHALTVVQPEGPAAELRRLTHTRERAMQRRTAIFNQLQDLVFVIFPEFSQVFKDVKTRSAIFILENCPAPEDIIKYKLKNLTTTLRKISRGQLGKERAGELYSAAKTSVGIREGRQSILFEIKEILSVIKTTEHFVTAIEKEISSHLEKIPYSRFILSIKGVGDITAAGLIGEVGDFREYNTTSEMLKFSGLDLFEISSGRYKGQRRISKRGRPFMRKLLFFAAINTVRKGGIMHEYYQGCLARGMLKMKALTAVSRKLLGVIFALVRDHSEYIENYAAEQELKKAA

SEQ ID NO: 373987 - protein, 334 aa, unidentified
MEQVTTVGIDLAKSVFSLHGVDGVGHVVFRRTVRRDQLVGVVAGLSPCLIGMEACSGAHEWGRRFQEHGHTVRLMAPKFVAPYRKSGKNDGNDAEAICEAVTRPSMRFVPVKSVEQQALLAMHRVRQGFVVERTATINRLRGLLTEFGVVLPLRSITVRRQAAVAAEGLPDLARRAISDLLEQLRMLDERIGGYDQEIEAQAKLCEPAQRLMKIRGIGPTTALAIVATVGNAREFKNGRQFAAWIGLTPSQYSTGGKARLGHISKRGDAYLRNLLVQGARSVLNSAGMHQDRMSRWILELQPRRGYYRTLVAIANKNARIAWALLAKNETLRPA

SEQ ID NO: 373988 - protein, 432 aa, unidentified
MKFNQSSKQNQRISRISETTLVIGTDIAKHNHVARAFTYRGIELGKRCLFQNDENGLLDLLAWAESIQQEHGLTDVLLGVEPTGHYWFPLFHFLKQRSIEVVLVNPHHVKKSKELDDNSPTKNDIKDAKVVAKLVIDGRYTQPQLPEGVYADLRVLMNQRDRLCGDLNRVKGRIHNWLDRFFPEYRQVFKDWEGKASLITLQHFPLPQDVVSAGETTVVATWKKNDVKRAVGPKRAGLLYRKAQTSIGLTEGATAAKHELAMYLEQYAMLCRQIEQLMEHVADLVEQIPGATHMMSIPCIGLITVAGFLAEVGDLSGYDHSRQIVRHAGLSLRENSSGLHKGETTISKRGRCRLRALLYRAAWTLVAKNPEFRALHLYFTTRLDNPLKKKQSMIAISSKLIRVMFELGRKQKNYDVSKVLGPHREAQLQAAA

SEQ ID NO: 373989 - protein, 431 aa, unidentified
MEDVMQSESERLATYRQLRAEIRGSNKHLIVGIDIAKEKHYAFMGTANGTTLCKQLIFQHNKEGFDLLIARVELLRLKHQCEHVVFGVEPTANYHKPLAEYLIRQGLHLVQVSGNAVKQNRELLDNRWDKHDRKDAANVADLIAQGKCQFYDYPPESIRDLRELLSLKKRFKKEEQGLKARIRNNLLALYFPEMDQYINTCQRDSLSVIGNCCDPLMIAEMEYDTFYNTVVCARRTQKQEEHLYQIWQSAKGSIGCNAGVAAVYEGTVLIKQLLDIREAIQELDKVILNLCSGIEEYPYLLSIPGIGPDTASKILAYVSDPNRFDHAKQVLKLAGFDLSASRSGKPAANATPVISKKGQADLRFALCQAALVASHSNSLFSTWFASKLQGREREKGIYMVVRVKLAAKMLVIAWTLMKKKEMFAYDQLNNS

SEQ ID NO: 373990 - protein, 313 aa, unidentified
MLFIGIDVAKAQLEFACRPSGETGTVPNGEDGIRDLVTRCQALTPALIVLEATGGYEAAVVAALATAGLAVVVANPRQVRDFAKATGQLAKTDALDAQVLALFAERVHPAPRLLPDAAIQALDALLTRRRQLVEMLTAERNRLLIARSAVRRDLQQHIRFLERRLREADDDLHTAVKASPAWRVKDDLLQSVPGVGRVVSLTLLAELPELGRLSHKEIAALVGVAPLNRDSGTLRGKRLVYGGRAPVRAVLYMAALVASKCNPVIRAFYLRLRVAGKPAKVALTACMRKLLIILNAMARSGTPWRTESLLART

SEQ ID NO: 373991 - protein, 331 aa, unidentified
MKFTWFIGIDVSKKTLDIAIRKKDSILKTVKIENSVSVLKSFINELRTEGIALSDCLFCMEHTGVYCTPMMIHAEKLKLNLWLENATQIKLSIGMQRGKNDQIDAIRIAEYAARFTDKARLFEAPREVMKKLRALTVLRKRIQLSLIELQTLNKEKDFYTDKNLYSSITKKSVNALKENLLDIEKKIRLLIKSDNKLNDLFKIVTSVRGIGEVVGVQMIITTNEFKDITCPKKFACYAGVAPFEHTSGTSIKGRPKLSRRANMNMKSLLHMAALVSMQCNEELKTFYERRVREGKSKMSVLNMLRNKLIHRVFACVRDNRKYEYIYTNSLA

SEQ ID NO: 373992 - protein, 361 aa, unidentified
MTQAKTWVGLDVHVSGTIAVVLDGDSGELRRRRLSGRGEEIAAFVAGLPGPVRATYEAGPTGFALARRLAFAGVDCLVCAPGLIPRGPSDRVKTDQRDAERLVRLLVAGELHRVAVPTVEEEALRDLVRTREDLRGDLMRARHRLAKLLLRHDVRFDGPERNWTHAHLRWLTTVRFDRPGSQRAFADYLGGVEALLVRRGQLEADIAELLPGSPWAQTARRLMCLRGIDTLTAAGLCAEIGDFARFHHPEQVMSYLGVTPSEHSSGSHRRLGPITKSGSQHARRLLVEAAWHYRRAPGVSTNLRRRQADADPRIVALSWKAQRRLHHVWSRMEQRGKRRTIIAVACARELAGFCWAVATTD

SEQ ID NO: 373993 - protein, 370 aa, unidentified
MVSLPALMQYHNDTELSSLEETRCQFNGGKCVIKLGIDVHQEFYVVVEQVGGNNPKPPQRFGKGVFLGWAAKLKRPAAEVHAVYEACGFGFTLQRQLVALGIKCYVVCPQKLNERNKRVKTDSLDAKALCLKLDRFVEGNRDALALVRVPAEKEEQLRAIHRQREQLVKARKQLEAQGRSLMVNHAIEPVQQWWKRRAFAQLQVPQWMRTLLLNSQPILLVLEEKIRALTVQLQSAATPNQPRGLGQMTSVVIDREIGNWHRFNNRRQVGSYTGLCPGEYSSGNTRLQSCVTKHGNPRLRAALVELAWRMVRFQPNYKPILKWRALLAKGRLASGAARKKAIVAVARQLAIDLWRFRTGRGTPEQLGLTI

SEQ ID NO: 373994 - protein, 424 aa, unidentified
MEEKELEKPIRAWIGIDWADEKHDVSLYDAATEKQETLTVRQSPEALQEWLGQLRSRYEGGYVAVVLEQGRGGLLNALMGCEFLVLYIINPKSLSSFREAFYGSGATSDPVDAELMRDMVRQNPSRFRAWRPDDVMTRSLRLLTEGRRHLVNQSTALTNQLTALLKGYYPQALAWVGTLDTAWACDFLEHWPTLQSLQARSRRQILRFYEKHPRASLDLNEQLKQIQEARALTQDEAVLESSALMVQALVSQLRPLLASIAEFDRKIAMIFRKHPDRPIFESFPGAGAALAPRLTAAFGTDRDRFQAAKEMQELAGIAPVTEKSGKKSFVHWRYACPKFMRQTFQEFADHSRRWCKWAKAHYDLLRQRGKSHNAAVRALAYKWIRILFRCWKDRQPYQDEVYTKSLFKHGSPLSALLATSVENS

SEQ ID NO: 373995 - protein, 523 aa, unidentified
MASTRSSKRSRAAAEFLQKPRGIIHPRVQQVGPDHFGIVSVDCAKARCKWMLTDFYGTILVPPTEVANNRVELDAAVARCRAAMIQHALGDAIVAIERTGRYHHPVKNAFARAGFETRIVHPYATKQFRQPANPDNKTDDTDLAAIARAAVNGFALVENPLPEAWRQLQLCIRHRRDLVRKTSALACQIREHLDAAMPGYAACFADKLWDSNVAFCLVRQFGSATVLLQQRSTGLCHYLRQQKVRFQQRTLDTVLAWAQSAAAPDPAAELHRQIALAYHDDRQRKTEEILVLERNIAHRLAQTPYILLLSFPGINVVSAADYAGEMGPIENYANPRSITGRAGLFPSRYQSDRVDHADGPLVRRANRALRAVIMGIADNLILCNQRFRMLAAAWKAAGKDPRLSHVKVACRFCRMSFHMVAGRQVFRHPSLRERGYILDKLLAFHLEHQTPYQQSLRDLNLAFTQIPAKEHAAEAQPLIDRQRTARRGRARGPQHIGEILAIVLARLGVGALPSTPSGDQDLP

SEQ ID NO: 373996 - protein, 369 aa, unidentified
MLDSMFIGLDVHKATISVAVAEGERGGDVRHWGTIPHRPDHVRKLVEKLDADGVRLHFCYEAGPCGYGLHRQLVEMGHDCIVVAPSLIPVKAGDRVKTDRRDAVMLAKLHRAGELTAVWVPDAAHEAMRDLVRARATAMRVLGKARQHLQGFLLRHGRIYPGKKGWTVAYRRWLTTVRFQHPAQQIVFQDYVDAVADAEARVARLTGQIADLLPSWSLAPVVEAVQAMRGVAFIVAVTVVAEVGDFHRFDSPRQLMAYLGLTPSEHSSGTSVRRGGITKAGSGLARRALIEGAWSYRMQARVSRKLHDRLQGLPRTVRDIAWKGQLRMCQRYRHLVAAGKAKVVVTTAIAREMVGFIWAIARAVTAAPA

SEQ ID NO: 373997 - protein, 407 aa, unidentified
MRLFAGDDWAEDHHDIEVMDEAGKVLAKRRLPEGAAGMTQLHALIGRFLPEDAEDAEVVIGIETDRGPWVAALVAAGYTVFPVNPLQASRYRERHGVSGAKSDGGDAHMLADMVRTDSHQLRPAAGDSPEGQGIKVVARAHKTMIWDRTRATQRLRSQLREYFPAALAAFEDLDAPDVLELLGKAPDPDRARRLTRAQVAAALKRARRRDIAGKTDAILAALRGEHLGQPAALTAAYAATARSLIAVITTLNAQVKILEDQVRDHFGRHPDAEIYLSQPGIGAILGARVPGEFGDDPCRYVSAKARKNYGGTSPITRASGKKKVVAARFIHNDRLIDALMSWAFASLNASPGARAFYDEQRAKGLDHNDALRRLANRLVGILHGCLKTRTPYDEATAWSHRESSLAA

SEQ ID NO: 373998 - protein, 355 aa, unidentified
MLYSGIDLHKDNCFISTVNQDGKMIKQSKLPNHNNSIIRYFSGMGKHHKAVVESTANWYWLSDLLKENGIEILLAHAKYLKAISYAKVKTDKVDSQILADLLRMNMIPQAHQISVEKRPLRDLMRARLRLVAKKVSCLNSIHRLLGKYNIAIPEDRNLHDLSTLDILVNLPLDQDAHFQLELLKQQIRLLHQQITKLEKSLHPRLLANEDIQRLLWIPGIGKILSFTIYLEVDGIDRFADVNRFYSYCRLVPGADNSNRKQRHKSGNKDGSRYLKIAFMEAGIKARQYYKEIRQYYQSKASKKHKNIARNLIALELARITYYVLKNKTSFNNSFKGKTLSRQKIKQWPRLTSPDA

SEQ ID NO: 373999 - protein, 416 aa, unidentified
MFKIFRKNCCGLDVHKTWIYACIGITDDNARTEYKQARFSSFSKGLRELDEWLTLYSCDEVCMESAGKYWIPVFNVLEKNHSVTLAHPKYTKPQKGNKTDRKDAKWICDLFMCDMIRPSFIPSPVIRHLRDLVRYLRKLTNTETGEKNRAQNCLTVSNLKLDDVFSDVFGKSALSITRHILEHPGEAFDVAPFVDRRCKTPVEEIQAAVDGAISQEQAVKLRECLDHIEELEAHKENIVTEITRLVEPFSDTLSLLRTIPGFDSNPMTAVTVLSEIGSDMGVFPSAKHLCSWAGCCPRNDQSGGKVKSTRISKAGTYLKPLLVQVANALVKSKKHTEFGERYRRIKARRGHKKAIIAICRMLLTAIWNILKKHVPYTPDGFIQHKPANPNKVVTVSQLIHIAKLRGYTIKNEQAAV

SEQ ID NO: 374000 - protein, 429 aa, unidentified
MNYTQNEKIEQVTDATLVVGIDIGSQTHYARAFDNRGRELTKRVFSFQNDIEGFNSFYAWAQKLQKENNKTDALIGCEPTGHYWFAFSKYVSDHQMTLVMVNPFSVKKIKELDDNSPKKTDAKDPKTIAKLVVDGRYSIPYMPEGIYAEIRDLVYSRDRIMKQHNISANRIQRWLSIHFPEYLGIYTRFDAASGLAVLEKAPLPKEIIALGVSGVRKIWHDKKLRGRGVTEDRAKILVEAAHNSVGLDGGYGTKSELYMLLEEHRLWTSQLENINKVLEETIYQVQYVDKLLNIKGIGTVTIAGFVAEVGDIRRFKSPKQIQKYAGLELVENSSGKHKGRSKISKRGRRKLRKILYQVMIPLLARNKEFREIYDYYVTRVKNPLKRRQAMMAVSCKLIRVFYAVLTKGQDYDRLKMMSDIHRESDLKAA

SEQ ID NO: 374001 - protein, 391 aa, unidentified
MLYIGIDIAKNKHEASIIDSNGKLVSDSFSFSNSIKGLEKFQKLISSFSIDSNNCIIGMEATGHYWLSLYSFLIDLGFSCIVINPIQSDAFRKMYIRQTKNDSVDSFVIAQILRFGEFSVSHFSDEDTFALRNLSRFRFALVDETSDWKRKLVAILDQVFPEYSSLFSNIYSVTSKELLSKYPLPKDMISIPANDLAILLSKCSKGRFGIDKAKEIQDKATNSFGIKFALKSFSFQIKQIIAQISFLEDQIFEIEDEISSMINSLCPVITSITGIGDVLGATIFSEIGNISRFERANQLVAYAGLDVAVKQSGNFNATDTKISKRGSPYLRRAIWLAASVAAFKDPALSIYYQKLRQRGKAHGTAIGAVARKLTNIIFAVLRDNKAYVPNI

SEQ ID NO: 374002 - protein, 379 aa, unidentified
MEQSSTLYVGLDVHKDSIDIAVADAPRDAEVRHLGSVAGGVTAVSKSMRRLVSAGHRLHIVYEAGPCGFVLQRHFTALGWRCDVVAPSSIPHPGGERIKTDRRDAMKLARLARSNDLAVVRVPDGADEAIRDLVRARDDAVREQRNGRHRLKALLLRNGTPYAGKCSWTAAHLRWLATVKLEHAAQQISFQEYLHSITESGARIGRLEQAMRDALPEWSLRPLVQALQALRGVQLIAAMTLVAELQDFLRFDNARKLMAYVGLVPGEHASGPKRRQGSITKAGNSAARRMLVEIAWHYQQGARVSASIATRQADLPAAVTAIAWAAQLRLSAKFKRLVARRVMKTKVVVAIARELAGFVWAIGREVQISGWQGVKPATA

SEQ ID NO: 374003 - protein, 355 aa, unidentified
MGTTRQALINDTSVVVMLYMALELSASKWKVALADGQRAASQHTLEAGDVGGLLKLIEKAKKRCGLQGTLKVMSCYEAGRDGFWLHRWLLEQGIHNVVVDSSSIEVNRRARRAKSDGLDAVKLYEMLVRYVGGDKRMWRVVRVPSVQQEDERRVHRELERLKRERTAHVNRMRSLAVLHNVRLQRVGGRGWSERLEQLKGQLPGALWAEIERESVREKLVCEQIVALEQERKEQLQAMLEQGGPLVALLKLRAIGLQTAWVLVRELFGWRHFNNRRELAACVGLNPSPYDSGASQREQGISKAGNRRVRSLVVEIGWYWLRYQPHSALSEWFNRRFGAGGKRMRRIGIVGSRAGC

SEQ ID NO: 374004 - protein, 364 aa, unidentified
MNEIIKQCVGIDISKDTFTVCVCRRDLSGKEYLSETVDFKNLKTGFNQLVKWSRKITDPSIETLFVMEATGVYYENLAYHLHRLNLPVSVLLPNKVKHFAKSLNVKTKTDQVDARIIARLGAERKLLLWKPPQEIFKLLKDLTREYAELIRERTAFKNRLHAMSSGYKPHPAIIRSNKAIIKKLTENAEKIKEEIEKLIYSEEWLGSKVNKVLTAKGVGLMTAATILAETQGFEFVSNIRQLCSYAGYDVVQRESGTSVMGKTRISKKGNGRIRAALHFPALQSARHSPRMKSIYDKINQNKPSKMVGATAIQRKMLVLIYTLWKKDEEYVEDYENKAGRGLSNLPAQDELPTSSQKLSFVCEI

SEQ ID NO: 374005 - protein, 352 aa, unidentified
MRRPKEQVAEGEDLFVGIDLHKIRWHVTIRTFDVELFSASIPGTWEALHRVLARYPGHPLQAVYEAGYFGFRLHDRLVAHNIPCIVTPPSLVPQEYGNRVKTDRRDSSKLAHLLAKGMLKRVWVPSEEELYHRQVIRRRRQLVRDRVRTQSRIKAELSFFGIRLEEPRGRWTLIYFETLQSIRFGNRWMQESFNRLLEQYEFLSAQIDKQTQLLRELSESELYQERVKILQSTPGVGLISAMELLLELQDVSRFRRAEQLAAYVGLTPSQYSSADKVRMGRITGIGKNTLRAILVEASWKLITKDQVMREKYERIKIRSGGKRAIVAIARTLLLRMRRMLLDGRAYALPLAA

SEQ ID NO: 374006 - protein, 402 aa, unidentified
MITIEYFGIDVGKGKSFIAHYSNNDFVKEFELIHNEKGFNSLLSYINNYSGIYFLFEATGIYSKVIELFCKDNHVPYYMINPLEAKFLTTTLRTWKTDKSDAHKLALLAKDLNKKPSRNFSENIYIKVRELTRWYEELNDQQSYLKNSIVQILDMTFPEIQNLFKSRYSKFTLQIVKKFPHPSYVHHFDKVSLIEIIGECTDKKISMNKKVKYADMLLNFARESYPALSEDSFYIDKLICIIDDLLSFMKRQEEIKEKLMKLSTELDEFKVLVSIPGIGDLTAMLIIGELGDIKSFPSHKKLNAYIGIDIKRYQSGKTQYKDKINKRGNKRARALFYIVVMNIIRGKRHYSNHIVDYYYKLRRQPNGKGHKTAVIACVNKLLKTIQYLVVNNKEYNYLMSPH

SEQ ID NO: 374007 - protein, 417 aa, unidentified
MNPLDEFAAIIGIDWADRKHDLCLKPFDSEALEFSVLEHKSEAIEEWANALRLRFDGRPVAICIESRKVPLIHALLKYDFLVLFPVNPQTLCRYRRALVPSRAKDDPSDARLLLELVWRHPDQFHPWQPQSAQMRTLAQLVEHRRTLVADRVRVTNRLTAALKLYFPQVLDWFEDKATLVFCEFLKQWPTLQTAKRARKTTLERFFHEHNSRHAEVIEKRIQSIRSAIPLTNDPGVIKPNQVMVVALVHQLALLLRQIDHFDEKIAECFADFEDANLFRNLPGAGKQLAPRLLVAFGEDRGRFVSANELCCYAGIAPVTERSGNKSWVHWRYSCPKFLRQSFIEWANQTVRFSFWARAFYKAQREKGKTHQMAIRALAYKWIRILWRCWQDRKPYDEARYLLALKEQGSPLVKELAS

SEQ ID NO: 374008 - protein, 332 aa, unidentified
MVLLHRWRDEAVRAGKEVTRIALAFEAGRDGFWLARWLEARGVEAHVIHPSSVAVSREHRRAKTDRLDTELLKRGFLGWLRGERGHCTMARVPTIAEEDAKRPNRERECLVAERTRIVNRMKATLARLGVRNFKPTLRKAAERLATIHTPEGMPLPPNVLAELQRDMARLGFVVSQIRDIEKARQKRLEQEPETGSHAMVRQLARVVGVGIETADMLVHEVLSRPMRDRKAVARYAGLTGSPDESGAKRREQGLARAGNARVRRGMVQLAWRFLLFQKESALALWYRARTADSRVGPRKTMIVALARKLLIALWRFVTTGEALEGVILRPAG

SEQ ID NO: 374009 - protein, 393 aa, unidentified
MANLTPIGLRRSLLSYDFWWFLRQKGATARHVIYDGQWRGSDRSPLGHRGPFPSVVAPVLSYDLNGYLGFGPARQDKVRKRQMNYIIGIDISKDTLDVHRLADGQHMQVLNGIRGFAELFRWIEPHPTALIIFEATGPYHRQLEQALCVKGIPFVKVNPKQARRFAQASGKLAKTDRVDCEMFAKMGTALQLMPKPISAENLYDLRDLLAARRALIKDRTAAKARNATVTHALVKRQLEKRLRQIKCDIAKIDAAILEMARQDLCMTERLDILSSIPGVGVTTALIILVDRPEIGELDGKQVASLAGLAPMSQSSGKWQGKARIQGGRPNLRHAIFMPALVAIRFNADLKAKYDQLVAAGKEKKVAITAVMRKLLVLANALLRDQRMWSENQG

SEQ ID NO: 374010 - protein, 356 aa, unidentified
MTRIAQLEPTRVTVGVDTHRDAHVAVALDQLGRRLGQLEIATTRAGYAQLLAWAESFGEVVVFAVEGCGCYGAGLARHLGAQHVRVVEVMRANRQTRRRKGKSDPTDAEAAGRAVLAGEAATAPKSGDDVVEMIRVLRVVRVTAMKARTQAINALRSLLVTAPPELRDQLRALSSVKLVRSASRFRPGAQDSPLAASKLALRLLACRYQALDDEIAALDSQLEQLTAQASPHLIESFGVGPEAAAALLIAAGDNPGRLHSEAAFSMLCGSSPVAASSGKTVRYRLNRGGNRQANAALYRIVLVRMRYHQPTKDYVDRRTSEGKSKPEIIRCLKRYVAREVYTALKQTGEANLARAV

SEQ ID NO: 374011 - protein, 324 aa, unidentified
MSDSIVGIDVSKDTLDANCARGQRKQGRTFANSPDGWKLMQTWLKAMGSKQAHVCMEATGRHSLGVALALHDAGHVVSVVNPAQIRDFARTKLGRNKTDKIDAALIREYGELFKPEPWRPPSPAMRRLCELQTMRAGIIRSRAEWKNRMGSGLGDSIAIELAAATIDHFTTQLEAIDRAISETIDQDAELHDRRDLLVSVIGVGDTLAALLMAKMPEPGVLRRSVEIVAYAGLNPSHHRSGTSIDRPTRISKIGNAELRSALYMPALSAMRFNPAVAALVSRLKSAGRLKPKQIVVAAMRKLLVLCFGVLKTGKRFDPAIAMPA

SEQ ID NO: 374012 - protein, 347 aa, unidentified
MRKINTIGVDLAKNVIQVSVVSWSRRELSNKTYTRKTFAAFLARQKPSVVAFEACGTAHYWARYAQAQDHEVLIIPAKVVAPYRQGQKTDANDALAVVEATRRSDLKLAPLKSVEQQGLQSIQRSRELLVQNRVGLSNHVRGLLMEFGVIIPQGWAALHRRIPEILEDGDNELPDMYRPTLHLLWRRLCELRDDIEQLDAEVKQLVKQHAVCKELLALEGIGPIGAILLYASLGTGEAFTNARQFAAYLGLTPKQHSSAGKVKLIGISKKAANKRLRSILIQGARAYVHHMKEPKTAKDRWLKDLIERAGTGKAAVALAHKNARTAWAMLTRGESYEKHYQPELLAA

SEQ ID NO: 374013 - protein, 390 aa, unidentified
MLRKNIVQTLDAATSWKVFGLDLAKHDLAVVAIPADGSEVQYVKRYSYADFLEFTAQIPSATMVFEPGNGANHFALRLQAQGHTPKMVSGASVKSWITLHMSGQKTDLNDAYALARLSEDPDLKTVRIKSVDQNRLQSLQAMRKQLVEQRTKTIVSIKGIFQCWGILFKKDSRSLKKFKEAANNNKELLGEEVVEAMILQIDRIADLDKDIKHVEELLKKVTMQDPRAQPMLDIPCVGLQTVSRLCAIMGDIKDFETPRSFVAFIGLVPKNMISGNKTTTPSGYEQVGQGKVNRRGDKMARSLIIQCASSMYMNFHKDNFPECALKDWIQKQKDAHKPYGKIMVSLAAKLLRIIYAVLKHGEAFSYEKAGISRSALAALKAAQPAEVGNA

SEQ ID NO: 374014 - protein, 312 aa, unidentified
MKIICGVDVSKTRLDACIEPGAIFASFDNDAAGIAELAAFCRRHQAGLAVMEATGGYERPAFLLLWEAGIPCAMTNPRSVRRYAEAMGILEKTDKIDASVIARFAHAKNLQPTPAPTPAQQRLKALVARLRQVTDDLTVQKQRRASLLDNAEMLASIDEVIALLKRQSRTLEGEIASMIDDDPLWAQLAEAWRSVKGVAGRTVARLMADLPEIGTYSNKAIAKLAGLAPLADDSGKRNGKRSIRGGRASVRSILFLVARTAAKYDRSLAAFRERLLAAGKHKMAVRIALAHKLLVRLNAKARDARAQYANAT

SEQ ID NO: 374015 - protein, 340 aa, unidentified
MKNTVVKQVTGIDIGKNEFFVCYKALNNNGDVKIFGTKKFKNNNSGINDYYSWVKKHNKTIEAPLFHVMEATGIYYENLAYFLFEKGNKVSVQLAQKVKYFAKSTNVKTKNDKSDSKVIADFGIEKNLNNSLWKPPSQKFKMIRDLTREHTSLKNNITAAKSQLHAYEHAHNIDSNVLLFKKKQIDFYNSQITELEGIIKSLVESDKKFHSKVEKIVTIKGIRLMTALKVLSETNGFILFKNIRQLISYAGLDVIENESGTYTGRTKISKKGNAKLRTALYLPAMSAARYNIGLKKFYDRINDGKKVKKQGVIAVMRKLLILIYTLWKKEEEYVEDYNVT

SEQ ID NO: 374016 - protein, 343 aa, unidentified
MQTITTIGFDIAKSVFQVHCVDAAGQVVIRRQLKRRYVLAFFQKLPPCLIGIEACASSHHWSRELQALGHTVRLMPPAYVKPYVKRHKNDATDAEAICEAVTRANMRFVATKTAEQQSCLVLHRTRHLFIRQQTAVINAIRAHLAEFGIVAPVGRHGVEELLNVVADPNDKRVPEIARVCLSALAAQLRKIKEQILGFDRMITAWHRSSETSRRLDDCPGVGPALATALVASVADPKAFRSGRNFSAWIGLVPKQHSSGGKDRFGSISKQGDRYLRGLFVAGALAVIRYAKIHGTKHRPWLAALLARRPTKVAAIALANKIARMAWAMMAKGERYKEPVALAA

SEQ ID NO: 374017 - protein, 411 aa, unidentified
MAHNYDLYVGIDWATEAHQVCLLDATGGLLDEQPVAHTGSALAALADALTRRVPDVSRIAVAIEIPRGAVVDTLLERGLHVFALNPKQLDRFRDRFTVAGAKDDRRDARVAADALRTDRAAFRRVHAEDPRLIQLREVSRMHEELAQEHVRLSNRLRDQLLRFYPQALGLCPAADEAWLWTLLDQAPTPAAAQRLSPAALRALLRTHRIRRFTADALHTALQAAPLRVAPGTAEAASEHLALLVPRLRLVHEQHARCGRRLEALLAALAAPAPGDPREHRDVEILRSLPGVGSVVTATMLAEASQPLAAREYQTVRAQTGVAPVTRQSGKRASVLMRYACNHRLRNAMYHWALNSLRGDAACRAHYDRLRQRHSHARALRSVADRLLRILIAMLRAGTLYDPMRHAAKIPA

SEQ ID NO: 374018 - protein, 395 aa, unidentified
METTFASSQSTASSESTNLFVSIELSRAKWLVTSLSPGSSKISRHGVAGGDAAGLLQLLTDLRVKAERHIGMEVKIVTIQEIGFDGFWIHRVLAANSIESHVVESASIAVPRRRRRAKTDAIDGELLLRTLMAFKRGEPRICAMVVVPSPEDEDRRRLSRERKTLVRERIEHINRIKGIMACQGISDFEPMRANARQRLAELRTGDGRPIPERMKAEIGRELDRLALLRSQIAEVEAERNALLSAGTKAELGTEAEERETDSPGAQLMKLRGIGPEFAMVLWQEGLYRRFANRRQLAAYAGLAPSPWQSGDVNREQGISKSGNARLRTTMIEAAWLWLRHQPESALSRWFHERVKADRGRLRRITIVALARKLLIALWRFTIDGEIPEGASLKAA

SEQ ID NO: 374019 - protein, 402 aa, unidentified
MNAVGIDVSKGKSMVAIMRPFGEIVSTPFEIKHTSSDINSLVKLIKSIEGESRIVMEHTGRYYEVLAHQLSEANLFVSAINPKLIKDFDNDSLRKVKTDKADSVKIARYALDKWQNLKQYSVMDELRNQLKTMNRQFGFYMKHKTAMKNNLIGILDQTYPGVNTYFDSPARSDGSQKWVDFASTYWHVDCVRKMSINAFIDHYENWCKRKKYNFSKSKAEEIYGKAKELVPVLPKDDITKLIIKQAVDQLNSASITVESLRTLMNETASKLPEYPVVMAMKGVGTSLGPQLMAEIGDVSRFTHKGAITAFAGVDPGVNESGSYEQKSVPTSKRGSSNLRKTLFQVMDVLIKTHPQDDPVYQFLDKKRAQKKPYYVYMTAGANKFLRIYYGRVKEYLASLPES

SEQ ID NO: 374020 - protein, 449 aa, unidentified
MKNQRQTEPLGIVNEHAAGLDIGAEEVFACVPIGADREGKSIRRFPTYTPDLHEMAVWLAACGVDTVAMESTGVYWIPVHEILEAHGIKSHIVNARHLKNVPGRKSDVKDCQWIQQLHSYGLLRGSFRPEEDMAVLRSYRRHRDDMIEHRSAHILHMQKALTLMNLRLTEVVSDITGVTGMSIIRAIVEGERDTEVLLRARRKGCKHSPEDFMKALTGNYRTEHMFALKQALSLYDSYTQVIAECDAQIELQFSAMRPACEEDDQPPLGPDRKSNSHSKNASAFDARAQMYRITGVDLTAVDGLNESTAQTILSEIGTDMSKWPTVKHFGSWLGLSPHNSISGGKILKSRTYKGSARAAQAFRLAAQSLSKSFTALGASYRRMRARLGSQQANVATAYRIARIVYYMLRDRKPYIPMSVEQYDEAQKRRELKSLSRRAALLGYTLSPTA

SEQ ID NO: 374021 - protein, 349 aa, unidentified
MLPRSVIVVSAFIGPGWLPEQLGSLHKAGSTKMTQVITTTAGIDTCKAKLDIAVHGRTERWQFDNTPIGWRLLAAELSKAGVMRVGIEASGGYERGVVGHLREKAFAVLVLQPIQVKAYARVHLRRAKNDKLDAVLIAACAATIEQPRIEPDERLAKLAQHLTFVEQIEEDIARIKVRLEHVGDPRLRRMVMADIARLKARRSAELLRIVEALRVHNDLARRLDLVLSVPGIGERTALALIIRMPEIGQVSREEAAALAGLAPFDDDSGKHKGQRHIAGGRGRLRRSLYAAALPAAFRWNKALVALYARLTARGKAHNAALIACARKLLVYANTVVQRGTPWTERPLVS

SEQ ID NO: 374022 - protein, 315 aa, unidentified
MTNHLPHHAGIDISKDHLDVHILPGDHAQRFSNTASGWQALAQWLTDFAPERIVYESTGPYHRGMERALASLTLPIVRLNARRVRSFADALGILAKTDQIDARILARFAAVMMPDVTKLNSDAVEELKELESARRALIKSKTALTNRSKTLATALLKRQARVTCRQIDTHIAQIDQAATDIIAAHEDLKRRFEIVCSIPGIGPATALALIVLMPELGTLDEKQAASLAGLAPVACDSGTWRGQRFCQGGRAKLRQALYMPALVAARHNADLRAKYDDLIGRGKPPKVAITALMRKLIILANALVRDDRTWTSATT

SEQ ID NO: 374023 - protein, 450 aa, unidentified
MGRPQVIDDEERERVYEKVAAVDVAKDSGMVCTRLPHPSRAGTRQSTVWTVQARMGAIRELGRQLARGGIETVTLESTSDYWRIWFFVLEGCGLAVQLVNSSQAKNLPGRPKTDKLDAMWLARLTEMGLLRASFVPPAPIRALRDYTRARTRLTQERTRCWQRLEKLLESALIKLSSVASKLTTLSAQDMVRALIAGERDPQVLAALARGKMKAKHDDLVEALDGMFGDHHGELAQLLLDQIAFLDSKIAELTARIQEQAAAQPGAWGVNADGTTGPGAGTSPGDPVLPVVQRLAQVPGISEDLARSIIAETGLDMSRFPDAAHLVSWAGLCPRAHQSGPRARNGKKGRGNGYLRGYLGQAAIGAAATATFLGERYHRIARRRGKAKAQVAVARSILVIIWHLLASPEARFTDLGYGYYQARTDKDKKIKNHIRQIEALLGHPVTIAKAA

SEQ ID NO: 374024 - protein, 364 aa, unidentified
MHSINNIELSSLEETRCQFNGGTGAIKLGIDVHQDFYVVVEQVGGSNPKPPQRFAKEAFLHWAARLKQKSSAEVYAVYEACGFGFSLQRKLSALWINCYVVCPQKLDEQNRRVKTDGLDAKALCLKLDRFVQGNRDALAMVRVPTEEEEQLRAIHRQREQLVKARKQLEAQGRSLMVNHGVEPVQNWWKPRTFAALPAPQWMKELLANSQPILVALQQKISALTVQLQSAASPDQPRGLGKMTSVLIDREIGDWNRFNNRRQIASYTGLCPGEYSSGNTRLQSCVTKHGNPRLRAALVELAWRLVRFQRDCKAVRKWRQILAKGALATGAARKKAIVAVARQLAVDLWRIKTGRLSAEELGLIN

SEQ ID NO: 374025 - protein, 453 aa, unidentified
MTKSKTGDHPDLKMVNPQAAAIDIGSTMHMTAVNPDADTMPVRAFGTFTQDLHELADWFQSCGVTSVAMESTGVYWIPAFEILEAHGFEVILVNARYAKNVPGRKTDVSDAGWLRQLHSYGLLRGSFRPEAEIATLRAYMRQRERLTEYAAAHIQHMQKALMEMNLQLHHVVSDITGATGMRIIRAIVGGERDPEVLAAFRDVRCKSSMDTIKAALVGNDREEHVFALTQSLELYDFYKAQIETCDRRLEAAVGALTVRADDDLAPLPKARIKGKQHNAPSFDVRAALYGVLGTDLTQIHGLGPSLALKLVAECGTDLRAWKSAKHFTSWLCLAPGNKISGGKLLSSRTRRSSSRAAALLRLAAVTIGRSDTALGAFYRRLSSRIGKQKAVTATARKIAVLFYNAIRHGMTYQDQGAAAYDERHRQRVLSNLQRRAKTLGYALAPMPEQQAVS

SEQ ID NO: 374026 - protein, 428 aa, unidentified
MSYKIAGIDVHKKVLAVVVSDVEIESEFQFERRMFGSNPEQLRSLAAWLLEQEAEEVVMESTAQYWKPVWGALERYWKPIREKREGARRKSGTLHLAQAQSNRGRRGRKRDFPDAERLVKRLVARELTLSFVPDAEQRLWRTVTRRKYQLRRDRVRLHNQLESLLEEAHIKLSSLVSDLLGASARRMLKALADGETNPAALAALAHERLRATPEQLCDALDACTDLKPVYRRLLKMALEQLQFLEQQIGQLDQELATLLHPHQDAVQRLAEVPGLGVDSAQQIIAEVGPTAATFPSGEQLSSWVGACPGDEESAGVNYSHRSPKGNRQMRRLLNQAANAAVKVKGSIFEIIYRRCVPRLGHNQAIGVIAHRQCRLIWLILHKGTLYEERGPAVTKRSKYQRTWRIIRQLQRLGYRIESPNPQPSQALA

SEQ ID NO: 374027 - protein, 370 aa, unidentified
MLDTTTFIGLDVHARSIKAVSLDVMTGEVRAATFGYDAGAVAEWVRSVDPRARCVYESGVTGFDLQKRLSGLGVGCAVGAVSKMIKPSADRRRKNDRNDAEFLARMLSVGNVVEVWVPDDECEAARDLTRALEDARDDLSRSKQRLSKFLLRHGLVFDERTPTGRRKGNWTRAHWSWIESIRFAERADNDVLAYYVDAVRRAAEEKARLEGLVEAEARKPRWRKRVDSLRCLKGVDTASAADLVFEAGEFSRFRNARSFAAWVGLTPSEHSSGESDRRGAITKAGNKHLRKTLVEAAWHYLTCSGRPKGLAKGQAPDRGARRHAAKGVRRLVERREALLARGVHGNKANVATARELACWVWAVGLMAEEA

SEQ ID NO: 374028 - protein, 414 aa, unidentified
MLYIGIDWATASHTVTFIAPSGEVLESVVIENRLTGFLTLLEAIRKHLRKLEPAATPDAVSFAIEDQNQRLTDFLLAQGFQGYLIEPSRVKGYRLRYRSSGNKTDPDDSFMLADVLCRDRDQLPRIAPDSDVVRTLKTLLRDRESFVHDQTRLTNRLTACLRQYYPEALDFFEDVAGKTALDFIAAFPDFAAASQLSRREVKRFLVEHHCHHETRLERILEVLGISPTPVPAVVVRTKRQQALAIIQQLRTVQTAVASYDAEIERLGKENDEVKRFRSMPGGGPIIGAGLTSLFGDDRTRFKSAMAVQSLAGTAPKTIQSGQFRTACFRFGCNRFYRAMLQQMALGALRSSVWAKQYYRGKRKEGKTHQHALRCLANLLLKIAYAIWRDRTEYSEDHHLAQIMRHHLRPTSNSV

SEQ ID NO: 374029 - protein, 360 aa, unidentified
MQTQKTGLDFKGQNIFVGIDVHLKSWAVTILTDNLVHKTFTQPACADTLSNYLNRNFPCGDYYSVYEAGFSGFWTHYKLKEMGINNIVINPADVPTTQKEHLQKDDPTDSRKLARSLRAGDLKAIYIPEPSTLEDRSLIRLRATLVKDMVRFKQRIKSFLHFYGISIPAEFEKSGTHWSKRFMKWLNQGVSLQHESGTQTLKILVQEAGQQRILLLEVLRKIRVLSRNEKYATNMELLRTIPGVGFITAMTFLTEIENIERFENTDHFAGFVGLIPNRHSSGNKENNGDMTFRGQTALRKSLIESSWFAARLDPALSMSFNVYVRRMEPNKAIIRIARKVLNRIYYVLKNKSEYVSGVVK

SEQ ID NO: 374030 - protein, 357 aa, unidentified
MMQRLGSDTATRIQAWLGVDIASESFVACLLLVRKIKNKYKNKNSSNIVEDRESVRSFPNTAAGYAQLLRWIESLAPGLVQAKAIHFCMDATGAYSDGLAMFLVEAGQLVSVLNPAWLKHAGLSTGAVNKTDPSDGRLAARYARKEQPAPWRMAAPEVRTLTAMVRRLQSLTEHLVQEKNRLAVPGIVDPVKRSIKTSIRFLESQVAELETQIRTHIDQHPGLKEDKDLLLSIPAIGETLAHWIMAELPDVSVFEAAKSAAAYAGLNPRLHDSGKSVHKPARISRRGNRNLRRALYMPALVAIRYNPIVKQLFDRLVAKGMARKAAVCAAMRKLLMIAYGVLKSRQTFTFTPAEQAA

SEQ ID NO: 374031 - protein, 337 aa, unidentified
MAKEKAVRWVGVDVSARWVDGSRAAADEPVSARQFANTPAGHGELASWLTQGGRRARVVLEATGLYSLDLALRLQRTARIEVMVINPRASKEFAGAWGQRARTDASAAQGLREYAARMPFMPWTPPGPQALALRTIMRRVVALIEARVQERNRLHALSATEALPAVVRTDIRQHIRTLERRIARLEHEARALVEPAPALRAGFRHLCSVKGIGRRSALMILAEVAVLPGELTARQWVAHAGLDPRPIRSGTSVHPPVRMSKHGNVYMRRSLFMPALVAVRRNPAVQRFATELTARGKAPLQVLVAVMRKLLHAIYGMLKTDTDFDGEKFRRSAHAEG

SEQ ID NO: 374032 - protein, 367 aa, unidentified
MSSIAHRGFVHLGMDVSKDSIAVAVLSPDRDTAEVDKIFHDTDSVRRLVKRLGKPKGIWACYEAGPTGYDLQRLLTSMGVRCDVVAPSLIPKGSGDRVKTDRRDARRLAGLHRAGELTPVAIPTPAQEGVRDLCRTRGDMVQDLTRARNRLSGFLLRHSVVWRGGSPWTERHRRWLATLSFDDPAIATTYSHYLATVKLRDTALESVEADLVPWCTQGPFGEQVPRLAAYRGVSRIGALCLAAEVFDWRRFPRARGFMSFTGLVPGENSTGLTQRRGSITRAGNAHLRGQLCEAAWAYQHSPNVGAGIRERQQGVPLETVARSWAAQVRLSRRFRQLAAHKNVRSVVAAAIARELAGFLWAEMVAEV

SEQ ID NO: 374033 - protein, 317 aa, unidentified
MEEVSFRQVVSRGCGIDVHQKVAVATISGESLRTQTREFGTTTSSLTEMKEWLLGNGITHVAMESTGVYWKPVYNILEPSGIKVWIVNARHIKYVPGHKTDKKDSAWICKLLLAGLLKPSYVPPKAQRNLRDLTRYRNKLVQNVASEKNRIIRILEDCNIKLSSVMSSTSGVTATKLIDKLCDGKVVTREDIDEVYHGKLQCSKDDLYEACQGFITDHHIFLLQTINRDIESTESLISELDSRIKESLSEYDNAMEVLRGIPGLNRKTVEDLIAEIGLDMSVFPTEKHLASWAGMCPGNNESAGKKKAEESPTGTNR

SEQ ID NO: 374034 - protein, 333 aa, unidentified
MYHIGLDIHKKHTQACVKDENGKILLNERFLSDVVAMNAFLDRLGSAEARIVMEATGFYQFLYETIEARGFDVILAHPLKLKALTAGRAKTDKNDAEMLAELLRINAVPTSYVPSKGIRELRDLTRHRSSLIAESTTLKNKIHAELARRGTRPPAEARSAFSKKFVGWLRSLNLMMINDLLDVLEVVQEKIKRVDDRIKDEAKNDEDMRLLETIPGVGHVVAMTIKAEVGDFGRFDSADHLASYAGLAPAVRQSGESKAHTGGMSRQGNPRLRYMLTEAVHVHVMYCEESRLTSFFRRKKEEKGSKKATVATAKKLLEVMYLMIVRRRQFQAH

SEQ ID NO: 374035 - protein, 319 aa, unidentified
MLGIDVSKDTLACTLFDPQTQKPLWSRTVPNTWSGINRLLRQTPAESPWALEPTGRYSLLAATTASQSGRQVLLAQPKKARHFLRSIQTRAKTDALDSHGIGLFALCRPLPPYPLKSAAVEQLDQLLSVRKSLSASLASFGLQARELPHAALALEPVVAALQVQKEAVDQQIAALTTSHQEFAIAAELEKVPGIGKVTAATLASRLAGRTFGHSDQFVAYCGLDVGVRQSGKKHGQTGLTKQGDGELRRLLYLAAQSNLRSKNSPFKAQYEKERAKGLSSTAALCAVARKLARLAWSLHKHGTPYDPSRVHQQNPSHSP

SEQ ID NO: 374036 - protein, 314 aa, unidentified
MLGIDVSKETLTATFVTAETRHCAWEMTVPNTAQGMRRLLARTAPTDAWVVEPTGVSSQAVVRAGQAADRAVLLAQPKRAKAFLAAVQPQAKTDRVDSRGLALSGLSAALRPFPVKSEAMERIAQLLTARKGISASLARLRQQREALPHAAAPLAAAITALAEQQRAVDRQLAQARTALPVVTALQEVPGIGPVTTTAVAACLTTKRFDHPDQFVASIGLDTRVRESGQQRSRRALSKQGDAERRRLLYLCAQANLRSRDPENPFKRQYEGEKAKGLTTTGALCAVTRKLARTCWSLERHGTRRRGSITNQRWE

SEQ ID NO: 374037 - protein, 321 aa, unidentified
MSRIFIGVDVCKDFLDAHVRPAGLQKRFDNSPAGIEQLVAWVRSFAPERIIFESTGPYQKAAVGALLAAGLPAVVVNARQVRDFAKGTGQLAKTDVIDAGILAHFGEVVDTVVRPLPTQEILEFRDLCDRRGQLVRILAAEKNHRHAAQGSSPKVLKNIAKVIAFLERQIEDLEDRMDRLVADSETFKAKDELLQSITGIGPQVARTLLVHMPELGQGTRQAITALAGLAPFADDSGTISRIRHIRGGRGKVRIALYQAAVSAIRYCPTMKAFYACLKGRGKATKVALIAVARKILVLANALLRTGSPYQPPTNSVCPKNA

SEQ ID NO: 374038 - protein, 398 aa, unidentified
MKTSGLDVHKDKIFCAIYDGKSYSEVKEFSTTTLSIYSMCEYLQSENVKEVAMESTSTYWVPVWDILYEMNFELKLVNPLHIKQMPGRKSDIKDAQWIAKLLYQRMLNGSLVPSPLIQELRSYTREYRHLTQEVTKVLTKIDSVLVMCGIRLSSCISNMNSKSAIQIVEALIRGETNPDKLVTLVYGNRKNKESGKLKECLTGHIKEHHRLKLMTCKQQYDLFEQQIAFYLGKMQEICDEHFSQDITNLTSIPGVSIISAMIIIAETGGDMQAFENSGKFTGWTGLRPRNDESAGKFKSTATTKGNKHLRAIIVQVGWGAARNKGSYFMDKFQKLSMRKSRKKALVAIGRKILVIIWHVLKEKTQYNPNLVHIYDPVKVEHKIKYHEKEIEKAKKLMV

SEQ ID NO: 374039 - protein, 355 aa, unidentified
MNQSKYIGMDVHQATISVAVLDSSGKLIMECILETKAATILEFIQGLRGSLSVAFEEGTSAAWLHDLLKPHVSHLVVCDPRKSALMKDGSKSDRIDARKLAELLRGNQLKPVYHGEHGLRTLKELGRSYLTITKDLTRVMSRIKALYRSWAIPCSGTTVYAPRHRAEWLAKIVEPGVRLRAERLYQQLDLLQPVRQQARHDLVGESHRHYAVKLLRQIPAIGPIRAALLVALLQTPHRFRTKRQLWAYSGFALETHDSGEYRMVGGKVRRNRERLTVLGLNDNHNHDLKSLFKSAAISASTRPGPLYDFYVGLLQKGMRPTMARLTLARKIATITLTMWKKGVGFDAQQLNRQAA

SEQ ID NO: 374040 - protein, 413 aa, unidentified
MDVFCGIDWAEDHHDIALVHRDGQLLARRRISDDAAGLAVLLELLAGHGDSAEDPVPVAIETPRGLLTACLRATGRKVYPINPMAVARYRDRHSIAGRKSDHGDAVVLAGILRTDMHAHRPLPADSELAQAIAVLARAQQDAVWARTAAHNKLRSHLHEYFPAFLAVFADARGGIMRPDARLILAAAATPAAAAKLTLAQLRSLLRKAGRARGIDAEAARLREAFGAPQMRQLPLVEEAMGRQALALLRQLDTACTNAGDLEQAAVESFNQHPDAGIITSFPGLGPLTGARVLAETGDDRSRFTDAKGLKAYAGAAPITRASGKTLAVLHRRVKNQRLAAAGYIWAFSALTASPGARAHYDRRKTAGDRHTAAQRNLFGRLLGCLHHCLATRQHYDEHTAFPAADETTRTVAA

SEQ ID NO: 374041 - protein, 319 aa, unidentified
MTTACAAGIDAGKSYLDVGLAPSRRHFRVANKREGIEHIVDRLHEAGIAKVVLEAIGPYAQPLVTRLVAAGFEVGVVNPRRIKAFREAEGRTAKTDRLDAALIARFAVKMIDALRPVPSADQQLLKAIATRRRQLVEMIAMEKTRLKQCVEPFLCESHRMTIATLTTERRRIEADLEGRLAADPKQLRQRAILQSLPGFGAAVSTTLITDMPELGTLDRRAAASLAGVAPHPSQSGTGPSRNEIAGGRPCVRTAVYMAALSAIRCDRRFKAEYQAMREAGKPAKVAIIAIARKLIVLANALLKSDALYDPKHDGAIHAP

SEQ ID NO: 374042 - protein, 403 aa, unidentified
MNAVGIDVSKGKSMVAIMRPFGEIVSTPFEIKHTSNDINSLIELINSIEGESRIVMEHTGRYYEALVHELSAANLFVSAVNPKLIKDFDNDSLRKVKSDKADSVKIARYALDKWQNLKQYSVMDELRIQLKTMNRQFGFYMKHKTAMKNNLIGILDQTYPGVNSYFDSPARSDGSQKWVDFASTYWHVDCVRKMSLNAFIDHYQKWCKRKKYNFSQSKAEEIYGKAKELVPVLPKDEITKLIIKQAVDQLNSASTTVEELRTLMNETASKLPEYSIVMNMKGVGPSLGPQLMAEIGDVSRFTHKGAITAFAGVDPGVNESGTYEQRSVSTSKRGSADLRKTLFQVMDILIKTMPQDDPVYQFLDKKRAQGKPYYVYMTAGANKFLRIYYGRVKEYLATLPESN

SEQ ID NO: 374043 - protein, 352 aa, unidentified
MQGVATVGLDIAKQVFQAHGADASGETLFNIGIKREELLDFFRNLHPCRIGIETCATSYFWGRQLSDIGHEVRLINSSYVKPFVKRGKTDANDAEAINIALNQKNMRFVPVKTLDQQAAVTIFRTRSLFVSQRTQLVNALRGHLAEAGLIAARGIRNAHKLVKLMDSATDTVLPVVTKQALADVSEQILRLDDLVMKLDKEIERRAAGDQDARRLLTIPGVGPKTAMCVVATVPDIRRFPSARHFSSWLGLTPRTHSSGGRSVLGRITKMGNFELRSMLYLGASALLARTSKTPLGLWAARLRARRPHKIAAIAVANRIARIIWALLTKGEIYDHIDVHSAVSIPDNQSGFG

SEQ ID NO: 374044 - protein, 404 aa, unidentified
MEYNAVGIDVSKGKSTICIGRPMGEVVAFPFEIKHTKADVDNLIRRINGLDGDTKIVMESTGRYPLPLLTRLSDAGLYVSMVNAKLIKDYNPDNSLRNVKSDKADSKKIMAYTLDKWLLLKQYGAMDKIREQLKIVNRQFDFYMQQRISLQNNLIAILDLTFPGINDCFSSPIRPDGHCKWADFAYTYWHTECVCGKSLNAFTEHYQNWCKKHGYIFKKEKASDLYQFSKELIPVLPKNDTTKQLIRQTIDVFMSMSAAVESLRKQLDQIASQLPEYPVVMAMNGVGPTLGPQLMAEIGDVERFTKRSAITAFAGVDPGVDQSGTRNKKSVHASKHGSPELRKTLFQIMQILIQLAPDDDPVYDFMIKKRSEGKQYFVYMTAGANKFLRIYYGKVKEYLAKQKL

SEQ ID NO: 374045 - protein, 437 aa, unidentified
MQAAGEDDYGWFVGIDWATDAHEVCILTPSREPVTQRKVEHNGPAIAGFIDQLMRLCEGKAVRVAIAIEIPRGAVVESLVERGFHVYAINPKQLDRFRDRHTVAGAKDDRRDAFVLADSLRTDRPCFRQVRVDDPLVIQLREMSRVDDDLAEDMNRLTNRLREQLHRFYPALLRLSPSADEPWLWALLELAPTPAAGARLKPKQIEKLLAEHRIRRLDAEAVRAALAEDPLHVAPGATEAAVAHIRTLLPRLRVTVQQRATCQREMGRLLDELAAGGDASGQKNEHRDVQILRSLVGVGKKVAATLLAEASQPLGDRDYHALRAHAGVAPVTKQSGRRLVVVMRQACNGRLRNAVYHWARVAVTRDPRSTEIYASLRARGQSHGRALRGIADRLLRLLIAMLKSGTLFDPSRWVREAPVAPAIETPDALATATPEPA

SEQ ID NO: 374046 - protein, 424 aa, unidentified
MSQRTLTERVMMVKPGMLLVGIDLGRDDNVAVVLSDTAQRLARFKFPHTRAGYDFFYRQLEQLRAQHPGQGLLIGMEPTNHYWKWLAADLEAHQPPLPYRLVNAYTVRKHREGEQLERAKDDLRDAFQIAELLRTGKFTETQLLQGAYAQLRQYATLHMRLRHDAAQLQNVLTTAVDLGFPELRQVFKDLSGETALALLRTASCASTIRKLPLSEFLAQVREQLQGHRLSVSKLKQAHALAQTSVGLVDTGALHFTIQVYSEQLAHAHESLKRTETALVELFLTLPEAPYLLSLPAISPLFAALLLAELGDPRDFSCASQWVKLAGVQPVADSSGHRTRSPTPMSHKGRSRLRELLYWLVLRWVQHDPYFKAEYERLQTRPQHPLTKMEALGALMNKALHVIWAVLRDRTFYDPQYRQAGAGAL

SEQ ID NO: 374047 - protein, 353 aa, unidentified
MKLDKYIGCDLHQATTVVAVLDAEGKVVMETIVATEAAAMIRFLKSLSGPLHITFEETTQARWMYDVVRGYVSEAIVCDPRRNKLLGEGSKADKPDARKLAELLRAGLLRPVYHGHEATRQLKELVRGYETLSVDTQRMMVRIKSIYRAHGIRTSGSAVYQQKQREQWLQLLSEPGTRQRVSWLYEELDHLRPLRKQAKMAMVAEGRKHQAFRLLRTIPQLGPIRCAMLVATVDTPYRFRTKRQLWAYSGLAIVTYMSSEYEIKAGRVVRNRKPVATRGLNRNCNRRLKDLFIGAAVAGSRSEPYRSYVEGLQQKGIRAEMARLSLARKIAAVALRVWKKGETFDPKKLNSTT

SEQ ID NO: 374048 - protein, 351 aa, unidentified
MMIIGVDYHPSFQTIAFLMEETGECGEQELNHSDGQAEKFYRDLKQRGICVRVGMEATGYSRWFERLLAELGFEVWMGDPAEIKAKRVKKQKFDREDARLLLRLMRENNFPQIWVPGPENRDLRQLLWHRHRLVQMRTRIMNQLQALAMNEGYRWKKKLFSEQGRAQLEKLALAPWASRRRQELLELLDRMNPTIEELTAAVEREARKRPEALRLMTHPGVGPLTALAYVLIIGTPTRFQRGKQIGTYVGMIPCEDSSARKQRLGHISKQGNSLLRFLLVEAAQAATRIHPDWRRRYMHLAMRRHKSIAKVAMGRRLAVRLYWMWRNGCEYSRSLEFGSYAGQLGTGHGVK

SEQ ID NO: 374049 - protein, 347 aa, unidentified
MRFYTQQHQFYCGIDLHARKMYVCIFNNLGKIILHKNIKTDPEIFFETIFPFLPEIVVGVECMFSWYWIADLCHEHRIPFILGHALYMKAIHGGKTKNDKIDSRKIAALIRGGNFPLAYAYPKRMRATRDLLRRRMHLMRKRSELLAHIHNTNTQYNLPTIDQQIRYKANRKGVAERFADPSVRKSVEVDLAMINTYDKLLQDVELFILKHAKAHDANTLYLLQTVPGVGKILALVMLYEIHDIGRFPLVQDFSSYSRLIRPEKESNGKKAGKGNKKIGNPHLKWAFSEATILLLRESEQAKKLHKKLVKKNGEGKALGILSNKLGRAVYYMLKNKKAFDMNKFFSH

SEQ ID NO: 374050 - protein, 347 aa, unidentified
MAIVGGFDIHRRQVTFDYLDTVTGQVRRGRISPACRETLRHWLERFAGREDVTFAVEGCTGWQFVVEELQRAGITALLAEPAETAHLRGPKRHAKTDKTDSRHLRMLAADGRVPLSWIPPWQVCELRVLLQLYRDLAGEHTAWTQRIHATLFHQGVPSLAGRLGDPQVRARLADGAGMGLSPAGAQAVAVALRRMDDLEAELGPVHARITAFARRQAGCKTLARELFGVGPLVAAIVWAFLGDARRFSSSAQAVRHTGLDVTVRSSDGKGPPGYLSHQGPPILRWALFEAGHQSSRTASPDHRYYADVAGRIDANRAALSVARKLARRSHHILRRLGDQAYAPVPDW

SEQ ID NO: 374051 - protein, 370 aa, unidentified
MQEGITFVGMDAHKKNIQVAMLTPDMGVTEWTVSNEPAAIRRMVKKIQREAKGEVESCYEAGPCGYELQRRIRAQGMECTVIAPSLIPVRPGDRIKTDRRDALKLAELHRAGLLTEVVPPTEDEEAVRDLCRCREDVRQDLLRSRHRLSKFLTRRGYRFTQGKKNWTKLHRKWLRSLCIERPADQATFDAYLLAVEQLEERRRTLDVQMDAFAIQEPYREPVAWLRCFRGIDTVTALTIVAELHGFSRFNSPRQLMGYLGLVPSEYSSGEKRRQGAITKTGNVHVRRVVVEAAHHYRRKPAVGQRLQKRREGQPGWVIAHADRAMERLYRRFMHMIMGGKHYNKTVVATARELVGFIWAVLYVRVEEGKC

SEQ ID NO: 374052 - protein, 421 aa, unidentified
MLKIHRFNCAGLDVHKNLIVATIGITDKKTRVTEYIQKDFSSLNYDLYNLKNWLIEHKCFDVCMESTGKYWIPVFNVLETEAKMNIVLVHPKYVKAIKGKKTDKKDSKWICDLFKHDLLKSSFIPSKDIRELRGLSRYRFKLICMRTSERNRYQNSMTVSNIALASVVSDPFGKTAKAIMNEVLSTEAIDEAKITKLIHGSCRNKDKIIESLKNSKIEPDQRFKMTEIQSHMNELDKHIEAVEIEIIKRASRYFDDFIHITEIDGIQLMSAILIISEIGVDMTQFETDKQLCCWAGVSPANNESAGKKRSVRISKAGQYLKPVLVQCALAAIRKKNSYFGQKYTRIKKRRGHKKAIIAIARMMLVSIYHMILTGEKFNPSDYESFKDPKPQREKNNYTVETALAFLKSQGFDVSSIQEIPK

SEQ ID NO: 374053 - protein, 419 aa, unidentified
MSFKIFRFNCCGLDVHKTWIYACIGITDSNGRTDYKQARFSSFSKGLKELCDWLAKYNCSEVCMESTGKYWIPVFNVLEKANNSVILAHPKYTKPQKGNKTDRKDAKWICDLFMCEMIKPSFIPPADIRHLRDLVRYRFKLTCMITGEKNRAQNCLTVSNLKLDDVFSDVFGKSSRSITEYMLAHPGEIFDVAPFVDSRCKTPMEEIQAAVDGAISPEQAIKLRQCLNHIDELEKHLEEIEREILRLSDKYQAALDLIRTVPGFDKNPMTAIQILSEIGGDMSVFPSAKHLVSWAGCCPRNDQSNKRIKSTRISRAGNYIKPILVQVANGLLRSKKHPEITGRYKRIKSHRSHKKAIIAICRMLLTAIWHILTDLKPYTPEGFLDSRPVNKEKVLTTSQALNLLKQRGYFIKDDPLSVS

SEQ ID NO: 374054 - protein, 355 aa, unidentified
MTSTKYIGMDVHKESISIAVRNSVGKVVMESVIETKASMILQFIDGLRGDLQVTFEEGTSAAWLYDLLKPHVTKLVVCDPRKNKSMREGNQNDKIDARRLAELLRLDHLTPVYHGEHGLRTLKELVRSYLTITKDLARVMSRVKAIYRSWAIPCTGKQVYAARHRAEWLGKINEPGVHRRAEFYYQQLDALRVLRQEVRRDLLAESKKQKAWKRLCEIPSIGPIRAAVLLGILQTPHRFRTKRPLWNYGGLAIEMHSSADHRRVHGQLERSTKNILVRGLNRNCNHDLKNLFKGAAVVASSKPGPFQEFYTALVAKGMRPEMARLTLARKIATIVLMVWKKGVDFDAQHLKPQTA

SEQ ID NO: 374055 - protein, 373 aa, unidentified
MRVVGMDVHVRNSFLCVTDADGQPLGRRRVGNSLEEISKFLGGLPGGDQPLRVVLESTTNSRAIQRMMLDYGKGAGVEVQADVLDARKLRVIAESVSKCDKLDAAVLNELARSNLKLPACYVPDDDMFALREHLRARSDLVKMRTMLKNRIHSILHRRGILNPLKDLFTKAGRQWLSQMKLDEAGRLILDGYLNTMDQLGATIDESTAALTQLSRSQRWCKPVALLKTMPGVGPITSLTILAELGDFHRFKNRAAVSNYAGLVPVVRSSNEKSFSGHITHRGPAHLRSVLVESAWTAVSRVPQYAAIYNRVAARKAKQIAIVAVARRMLEDAWTMLIRDEVFRLMTVTTNVTDVRISVSAADEAAVADPSAAG

SEQ ID NO: 374056 - protein, 415 aa, unidentified
MALKIVYKVCCGIDVHKTFVVACIVSTDKQGVTSYERHRFSTYTKGLKDLLQWLLDRNYKDVCMESTGKYWIPIYNILEKDCSIVLAHPKYVKAIRGKKTDKKDARWIADLFKHDLVAGSFMPPADIRQLRDLMRYRFKLTCFKSSEKNRLQNCLTVSNIQLGNVVSDTFGRSAQAILDQILENPEDTSFDLEPLVFKSLKKKLPELRDAIDGYITPEQAGKLKVIKAHYESLESRKAELEELILALAAPCQQELAILQTAPGISSDFTAIGIISEIGTNMEAFPSAKHLCSWAGLTPTNNESAGKKKSVRVSKAGCYIKSLLVQCANAVVKSSKHPEVHNRYLRLKKRRGHKKAIITIARMLLSALYHMLKNGENYNSELYRKSDLPPVDREITVEQAILIARNQGYKIKSATA

SEQ ID NO: 374057 - protein, 361 aa, unidentified
MPETNPAEVIIGVDTHKHTHAAVALTALGARLGTITVPASRRGYQELEAWAGSFGPVRAYGVEGSGSYGAGLSRFLQAGGHTVLEVNRPNRQLRYQHGKSDPLDAEGAARAVLSGQADARAKPGTHAVEMIRHLKVARDTAVKSRTQAMITLKALIVSAPAASAPAALREQLEGLAGKMALIRHLAALRPGTLTSPTASAKAALRALAQRWLALDAEIKAHEAHLDALTAACTPILRTAYGMSTGTAAEMLILVGDHPDRIRSEAAFAKLCGACPIPASSGKIIRHRLNRGGNRQANAALYRVVIVRMRSHPPTLAYVRRRMGEGKTKLEIIRCLKRFVAREIFGYLCGAKTLPTAPMTAS

SEQ ID NO: 374058 - protein, 351 aa, unidentified
MIIVGVDYHPSVQQVAFLDTETGETGERRLNHSDGEAERFYRDLQRRQVKVRVGIEATGHARWFERLLAELKFELWIGDPARIKAARVRKQKTDRQDAQLLLRLLIEGRFPQIWVPSPENRDLRQLIWHRHRLVQMRTRAMNQIQAAAMNEGVRRKKTLWSKTGRRQLEALPLAPWATRRRQDLLELVDRLNTTIDELTAAAEQEARKRSEVLRLMTHPGVGPITALAFVLVLGSPDRFGCGHQIGSYLGLIPCEDSSADRQRLGHITKQGSSLLRFLLVEAAQAAVRWDPDWRRRFVHLAMRRDRRIAKVAMARKLAVSLYWMWRKGFDYPQTLQFGSHAGEPGYVHGVK

SEQ ID NO: 374059 - protein, 315 aa, unidentified
MVEQVVVGIDVSKAKLDVALLPGGEQFTVSNYRHGIGELLRRVSPLAPSRVVLEATGKLEQLAVSELAAAGLPVVVINPAQVRHYAKARGKWAKTDPIDARLIAEFARDLEPELRPLPDAETQALAALCQRRNQLLEMEQMEKSRLQRAPRANQKSIKAMLRFVRRQVEQVEKQIEHSIRHSPLWQAKRELLESMPAIGKVNSSTLLARLPELGQFTRQKICALVGVAPYNDDSGQWHGRRHIAGGRAGVRQVLYMATLSAVRCNPALRDYYQRLLGRGVEPKAALIAVLRKMLTILNAMVRDNTPWRPPCPTPA

SEQ ID NO: 374060 - protein, 357 aa, unidentified
MLSSNVKYIGLDVHKEAIAIAVVNGAGKLVMESIVENKSSTVLDFLHGLRGELHVTLEEGTWAAWLYDVFKPHVREMVVCNPRRNALLKEGSKSDKIDARKLAELLRAGLLRAVYHGENGLQTLRELARSYLTISKDLKRVKNRLKALYHSWGICCAGKQVYAARHGEQWLSKIAQVGVHRRAELFYQQLDGLLVLRNTVRGELLAESQKHQAVKILRQVPSIGPLRAALLLALMQTPHRFRSKRQLWTYSGLAVVTHDSAQHRYVDGQLQRSKKPQQIRGLNQNHNHAMKEIFKSAALNASRCAGPLQDFYARLLAKGMKPDMARLTLARKIAAITLALWKKGGSFDAEHLKSQAA

SEQ ID NO: 374061 - protein, 412 aa, unidentified
MELLHRRCCGLDVHKETVVACLRLVSDGKVTTEVRTFQTTTADLLRLSEWLAANECTHVAMEATGVYWKPVWRILDDGEFALVLANAAHVKNVPGRKTDVTDAMWLAELLAHGLIRASFVPDAQTQEMRNLLRTRKQLVREQSSHVLRVQKTLEDANIKLDSVLTDLMGKSGRAIIEALIAGETNPVKLAGLADRRVKASFEEFREALRGRVTKHHRFLLRLHLNQIDALDAAMATLDAQVEANLGPFRTAVELIGSIPGIKNLGAHVIVSEIGIDMSRFPSAAHLISWACICPRNDESAGKRRSNRVRKGGTWLKTTLVQCAWAAVKKKDSYLQAQFYRIKARRGPKKAIMAIVASILTTIYHMLKDGTMYKDLGRNHFDRRSSDQQKNRLVKRLVDLGYAVEIKPLAATA

SEQ ID NO: 374062 - protein, 366 aa, unidentified
MKKVSTVAADQSSNFSQPQLTIGLDLGDRSSWYCVLDPRGELQWERKVSTTATAMREAFQRMPRSRIALETGTHSPWVSRLLSELGHEVIVAHARNVRLIGESRRKDDRLDAQTLARLARIDPQLLCPVRHRSAQAQVDLTVIRARAGLVRARTALVNTARGLAKSYGERLRGCNVRNMNPEKAEGLSPELQAALQPLLVAIESLSERIREYNQRIEALAQQSYPQVALLKQVKGVGTLIALTFLLTLEDPHRFRKSRDVGCYLGLQPGRRNSGQSEPQMHISKEGDPYLRTLLVQGAQHILGPFGPDCDLRRWGLKLAERGGKNGKKRAIIATARKLAVLLHRLWVSGEVYQPLHNSKPMVATAA

SEQ ID NO: 374063 - protein, 401 aa, unidentified
MRAADWFFVTIAAFDNSGDRTTMASIGDSVRSNTTIYAAIELSKKSWVVAIAHPDRDRPSMHRIAGGNLADLIGRLRKAAGERRIVVCYEAGYDGFWLARSLLKIGIDCRVLDPASIQVNRRARRVKTDRIDSLALLRSLIAVDRGERHVCAVVRVPTVEEEDARRSHRERQRLVRERTGHINRIKGLLFAQGIRGIEPKRRRTRIDFGKLTTAEGRPLGERLRRELEREYQRLELVQNQLHIVEKERDTADAQDPAVERKRELLCALQGVGSTSAAILAREVFARPFASRRHLASYLGLTPSAYDSGSMTRCQGISKAGNSWARRVLVEVAWLWRKYQPASDLSEWYVRKTAGQSPRIRRIMLIALARKLAISLWRYVETGLVPDGAVMAKTALHQGAAT

SEQ ID NO: 374064 - protein, 391 aa, unidentified
MVCVGIDVAKDKHDCCILDSDGMVRADCFTIPNNMDGFKQLLQTIRDCTKKSDKIKVGLEATGHYSYNILGFLLDNDLAVYVMNPLHTNLYRKSLSLRKTKTDRVDARTIATMLLSDVDLKSYTDTAYHNEELKSLTRYRFDKVRERAKLKQSVSRLVTILFPELEKLVPSLHIASVYALLSEYPGAKQISEIHLTKLTNLLATASKGRYGKDKAIQIRDAARTSIGSVMPAKFLELKHTIKLIRELTSEIDEIEVSIQKIMDELNPPILSIPGVGIQSAAMILAEIGDFSNFESPDKILAYAGCSPSTYQSGKLTNCYAHMEKRGSRYLRYALYNATKYVCHWNPVFAEYLAKKRAEGKHYNVALSHATKKLVRLIYALQKSGKAYLVAA

SEQ ID NO: 374065 - protein, 314 aa, unidentified
MNTPVCVGIDVSQSQLDVAVRPGTGFSVSNDEAGWATVVMRLQLLTLVRIVLEATGGLEVPLVGALAAARLPVIVVNPRHVRDFARATGQLAKTDALDAQILAHFAEAIRPPFRPLPDAHTQALAALAARRRHLVEMLTAEKNRLRTATPATRQSLRRHLVWLQRERTRLDTELAVVIHSSPVWRAADDLLRSVPGVGPVLTTTVLANLPELGTLTHKQMAALVGVAPLNRDSGTLHGKRLVWGGRAHVRAALYMAALVATRRNPVIRTFYQRLCQAGKAKKLALTACMRKLLIILNAMVKSRTPWRVAVSQPA

SEQ ID NO: 374066 - protein, 352 aa, unidentified
MDRYIGIDVHAASSTVVVVNSKGKQVAQHVVETNGRALIECLRLISGQRHLCIEEGTQSAWLYEILSPHVADMTVMRVPESRGQKSDQRDALGLANKLRLGAIESPVFKDHGAYRTLRELVRVHSMVVADVVRVQNRIKSFMRSRGIVTTGKKVYREASRKGFLKKLPEGTRTAVKTVYSEYDALAEIRGAAQKQLLTESRKHRITRVLQSCPGIGPIRAAQLLPIVVTPHRFRTKRQFWSYCGLAIVTRTTSDWKRDKSGNWQKAKVPTTYGLNVNHNHQLKAIFKGAATTVIMQLQKDPLYGDYKRMVDGGTKPNLAKLTLARKISAIVLSMWKNEEGYEPDKYRKALSA

SEQ ID NO: 374067 - protein, 390 aa, unidentified
MVTILRPFGEIVSSPFEIKHTSSDILSLIKLIHSIESESRIVMEHTGHYYEVLAQQFSAAGLFVSAVNPKLVKNFNNDSLRKVKSDKADSIKIARYALDKWQNLKPYSIVDELRTQLKAMNRQFHFYVKQKTAMKNNLINLIDQTYPNANTYFNSPPRSDGSQKWVDFVYTYWHVDCVRKMSLNSFVKHYQNWCKQKKYIFNKSKAEEIYTKATELVPVFPKNEITKRIIRQAIAQLNSTSATVETIRILMNETASKLPEYPIVMQFKGIGPSLGPQLMAEIGDITRFTHKGALTAFAGVDPGVNESGSYAQKSVPTSKRGSSNLRKTLFQVMDVLIKTMPQDDPVYQFMDRKRAQGKPYYVYMTAGANKFLRIYYGRVKEYLCILSESS

SEQ ID NO: 374068 - protein, 313 aa, unidentified
MFYLGIDVSSNTLDVAFFSPEQGTTRCEQYANTAAGAKKLLRAMVPLDVRHVVLEATGGYENRILDAVAASYPTTRIASHRGTAFARSLGLFAKTDRVDAMVLARMAHAMPAQPYVPLAPAVRDLRGLVKGRDQLIQQRDDNRRRIKQCDCAISLASLTRVGRVLANEIKALEVHIREAVKAADAERAAQLLEVPGVGKIAVATLLAFLPELGQRGNRQISALVGVAPYTKQSGRKDGPRQIMAGRPFVRRILYMATLAAIRSAKSSLRGHYQALIARGKPKKVAIVACMRKMLITLNAMVRDGTSWNAPMTA

SEQ ID NO: 374069 - protein, 413 aa, unidentified
MDVIVACCAGLDVHQASVVACINSPGRGGRSHKEIRTFGTMREDLTALRDWLANAGCELVAMESTGVYWKPVHEALEGHFDLMVANARHIKNVPGRKTDVKDCEWIADLARHGLISRGFVPPRAIRDLRELVRYRRKIAQLQTGERNRLIKVLETAGIKLAGVISDVLGVSGRAMVRALIQAEDTPEAMAALAHGRLRASKTDLARALAAPPKPHQRFMLRTQLARIEQAEADLERIDTELTNMAAPYRQAIELLMSIPGVNWINAVTILGEIGVDMTAFHSAAHLASWAGLCPGNDESAGKKRSGKVRKGNVVLKATLVNAAIAGSGPRGHKGTFLAEKFRRLAARRGKMKAAVAIAHKILVSIWHMLTDGTFYQDLGAGFLDRIERTRNARHLIRRLTNMGFDVHLTEQTA

SEQ ID NO: 374070 - protein, 360 aa, unidentified
MPVQSNKLNFKGQNIYIGIDVHLKSWNVCVYVGGLKIKPFSQTPSAAVLKSHLETNYPGGTYYSAYESGFCGFSVHYELLRHGINNIVFNAADISDTSKERMRKTDSTDSSKIARNLSKGELSAIHVPSEQEISDREVLRTIMTHVKMCVQTKMRIKSLLYVKGIRYPDTFEKPGTHWSRNFVSWIENEASSLPYEGGRSLLIQIENLRFIHNQILKATRELRKIMTQPRYQDSYKLLMSIPGIGFLTAATFLLEAGDISRFASNDHLASFVGFVPDTRSTGEKDIAIGVTSRSNHRLRTMFIESAWSAIRQDPALTLAYTKLVSRMEPNKAIIRIGRKLLNRVACVLRTRKPYVKAVVQ

SEQ ID NO: 374071 - protein, 343 aa, unidentified
MDLGGAEWKHTPESIYIQVTITWVSLTVRTKGFSADGCPIVSIVEALKPFRKTLTGIAVESTYNWYWLVDGLQGAGLKMHLTNPSAMQQYEGLKHTDDKWDSFWLAHMLRLGILPEGYIYPKKERPIRDLLRRRLFFVQKRTSHIQSLQSMFTRHLSGKISSNEIKKLDPKHADQLFQDPYVSLAAKNNIDTIGFLTTKIKEMEKMILSKSKLKKSFQSLTSTPGIGPILGLTIMFEVGDIKRFAAAGNYASYCRCVKSIKLSNKKKKGQGNRKNGNKYLAWAYVEAAHLIIRYCPEANAFYQRKMAETNGALATKALANKLARANFYMLRDQVVFKKEKLFP

SEQ ID NO: 374072 - protein, 371 aa, unidentified
MVWTPPTSASSLRIMVTINEEKGNGMSNYTVGIDIAKRVFQVHVVDANGEVQAARKLRRSEFLGFLSKLPPSLIGMESCSSAHHWARELSAMGHEVKLMNPMYVKPYIKRGKNDAVDAEAICEAVTRPTMRFVPIKSVDQQSVLMVHRTRSLLIKQRTMLVNALRGHLAELGIVAPVGIERIAELVDRVTGREGDEVGIPPLVRSLVEVFAQQISTITEEVRALEKSLRSWHRTSEASQRLATIPGVGEITATALAATVPDPSYFQSGRAFAAWLGLTPRSNSSGGKERNGRITKAGDRHLRTLLVLGATSVIRRVRAGQPTPIYGWVNRLLDKKPARLASVALANKLARIAWAVMARGTDYQPQRAALAL

SEQ ID NO: 374073 - protein, 478 aa, unidentified
MNVKGRKAKKQANTNNSMNVLSQEEIARRIAAVEAGLKSSTWKNLEVGTKFDKNAKLTFINDDMLILGCDVGSETHYVRAIDTRGRELSKDAFAFSNNAEGFQNAKTWAMQIAAEQGKKQIVLGLEPTGHYWFCLATWMVENGISVVQVNPYAVKQTKEVEDNSQLKDDRKDPKVIANLVKDGNYGMPYLPEGVYADLRRLSMLRDQLTEDRIRNVNRLHRELKICFPEYMDAFGKVDGSFALAVLEKAPFPEDILALGADGLRKIWSDAKLRGRGYSRADHIVSLAKNSVGLNHGTDASKESVRCFVEQIRYLTSKLDKIEEALHQKCREIPHAANLLEIGGIGENILSGILAEMGDVSRFDDVKEIQKLSGLGLVACSSGKHKGETKISHRGRKRLRYWLFMAARSAVSHTEEFATLHEYYTTRADNPLKKMQSLIVIACKILRVIFAILRTGQKYDPAKMLGDIKHPANEEAKVA

SEQ ID NO: 374074 - protein, 416 aa, unidentified
MGKQRDIACGADIHKNTIVATILSLAGTKNQAKFGTTLSELLRFKFWLTDNGCGVVAMESTGTYWIPVYSVLEGSIEVVVANPYMIKHIPGKKTDLIDSDWLAELCLKDLIVPSRIFPKEDRALRSLTRAREGLVKIRTQLKNRIHRDLSSSHIKLSSVVTDIFGKSGMHILRGLLDDQSIDEIIKGIPSGRVKKNADKIKESIENNLDSSQIFLIESSLDLMGHVQDKIDRIDMDLKSKIITRLNDLKIAMSIPGIEFTSAATILAEIGNYRNFSSPEKLASYFGLVPFVNQSADKLHTGCITKHGSKHLRWIMVQVAHAASKKIGSKLRKFYLRVRARKGANVAIVALARKILCILYHLLMNQEMYEEPGAARKTRPNRLDQSTTQREFTAQEMIDILKRSGYEIRKIDRGACG

SEQ ID NO: 374075 - protein, 276 aa, unidentified
MPHFDRFVGVDVSKDHLDAHFLPSGQQLRLANTPQGIALLLRHIGSFEGVACGCEATGGYEEALLIALCEAGLPAYCLHPSDIRTFARLKGKRAKTDRLDAKAIVEALAVAAAHRQPVLRTKQQSTIRELITLRRRLIAMLNELKSLKARMTSLETLMAIDALITVHGEARKQAEAAIAAAIARDAHARQTARRIRTVPGAGPVLAAELIGSMPELGHLSSRQAASLTGVAPHPRQSGTRTGTAGVRPGVPTSGGPSIWRPSPSSAAKASRSPPSI

SEQ ID NO: 374076 - protein, 342 aa, unidentified
MKTFVGLDFSQKKTSICVIDHNGNKIRMVNVDTHPGVIADYLFSEGFDKSKVGLETGPLCVWLYHSLRNFGLDVDCIHARHVHAALSMQLNKTDQNDAFGIARLVLSGWYKPVHVKSLQCHQQRLILTSREKLVQLRVAVTNQIRGLLKTFGVVLPPGKNSVFERAVLESSPSLETVKPAVIMLLDTWEHLSGQIRKFNYMLEKLARKDPVCQILQSIPGVGVLTALSFKTSIDDPSRFRRVSDAGAFLGLTPKKYQSGEVDRNGGISKQGNRMTRTLIYEAASCLLTRYGTDTSLAIWANGLRRRMGYKKVIVALARKLTTLMLSMWKSETFYNERLKAVN

SEQ ID NO: 374077 - protein, 320 aa, unidentified
MQEPSLSKLCIGVDVAKAELVISVGAEHRACSVVNDEAHIAAWLRAVPAGALIAMESTGRYHGLLAHLACQAGFTVYVLNARDVYFYARALGTRGKTDGVDAAVIARYLTEHHTRLHPWQAASAVQHQLQDLLTRRAQVVVQRSALRQIFTDVDIQELAMQTLQEGFDALLQSMDDKVQALIASDTQMAQGCQRLCSITGIGPQTSALLATLLSRFDFANADALVAYCGLDPRPNDSGTKRGRRRLSKKGPPLLRRQMYLAGFAASHSKALKPLYLAIRAKGFASTEAFLILGRKLLRVAFAVWKGTQMFDPARLSPTTA

SEQ ID NO: 374078 - protein, 400 aa, unidentified
MRAVFGIDVSKASSEVAILVNGERVHGYTMTNDAIGFSRLLEDLKTVSNPEIVFEATGVYSRRLQAFLENNDYAYTRLNPLEAKKQLDSLRVRKTDKIDAEKLAQSQFVLNRKPAYAQEEVYQNLRDLSRFYQNLTEDIVRAKNRLHKVLQVTFPELENILSTPSGEQYWNLVIAFPCKDFVLDLSKDELSESIRQSTSKRISDKRVAYLAEKLIALANQSYCAVKKTSPMLEEVRYYGKELLRLSERRQVVLDHMVSLAQPLPEYEILLSIPGIAETTATSIIGELGDIRRFQSANQINAFIGIDLRHYESGNFLAKEHITKRGNPYARKILFKCIHNMASASHTNPCHIADFYEKRKRQSQIASTKPHTIASIHRLIRTMYYLITHNKLYDYASTQNR

SEQ ID NO: 374079 - protein, 341 aa, unidentified
MNKIDGILGIDISKATFDVALLIGEKRRKSKKFSNTLEGFEKLTEWLNRQRVERVHACMEATNIYGHALATYLHQKGHAVSIVNPSQVKGYGQSQLRRTKNDRADATLIANFCKSLSPKPWKPPATEVAELQALTRRLDALDHMITQEKNRLETAPEILHRDIEAHIEFLKQQLKTLKKSIQEHLEKHVKLHKQQQLLITIIGIGEPTAARILAEIGAIENFNSARQLAAFTGVTPQEEQSGESIQGKTHLCKIGNSRLRKALYFPALNAIQRCPQIQIFRERLLARGKKKMEVVGAVMHKLIRVIYGVLKSGQPFDPEKLIPQTLDQSTDDDTSKLALAS

SEQ ID NO: 374080 - protein, 323 aa, unidentified
MTATPDHYLGIDVHKRQAQVAVLDDEGEVTEEVRVANADLDEIAQKYAGSSAALEAGSNYFTIYDRLDEELDVTLANPAKADWLTDQKQKNDRKDAKNLGRYLRLGEVPESYVPPEEYRRYRALARGRKKLVDKRSDFKNEVNSLLDQNGVTYDGSLWSDQGREFLRELTLDDASELLLEQWLEAIDEFTVKIKRMQRRIEEVAAEVDELDTLMSAPGIAAFSGLMIHGEVGEVERFDRAAEVVSYAGLDSVIRESGDSRREGQISKEGNGYLRWILVQCTNTAVHNAKDPYLSQFYWRLQKKRNKPHKVAIVATARRLFAIF

SEQ ID NO: 374081 - protein, 404 aa, unidentified
MTKNHILGLDIAQSTAVAQLDLANGTKCWRGTLATSQAGWHQLATLLAAHGAQLSTTLVVVEATGVYHLPWAERLHAAGAEVYVLNPLLAARLQSAANALREHKTDPVDVHRLCETGRLYAADLARFRYRPEPARQGLKQLDHARRKLRTTLTNLKKSVRSHLELVFPALLQANIAADTARASRILAAAPTAGAWRALPAAARAKLAGVKHADLDHACADTLADETLAHACVPALRALLAAEQALAAQLRECDDVIAPRLPAERVALITSLPGFGERTAAVLATYLPASFEGWGTRKQIVARVQALFGCDPRLRQSGKWTGKVKLSKRGIAAGRTALFQAAFCSLATDEENATYYAQLRTGDGQGRRSKTHKEAMVDVMRKQLRRLVAVLCSNQPFVKKTHAAA

SEQ ID NO: 374082 - protein, 417 aa, unidentified
MAKRVRTVKEGTLIVTVDIGVASNTGYCATVDGRDAKTFTFANTREGFEKFWYMIVASKSRFICNEVIVGYESTGPYAEPLVHFLGNKPVRIVQVNPMHTKRMKEVNDNSPLKTDDKDPRVIADIIRLGRALSVIVPEGDTAYLRRLNNARERHIREQTALLNQLQQLVFLIFPEFMSVFKDMKGKTARGILRNYTTPQRIGALDRDKLGDEMRKQSMGRFRRKDAEHLISLAQNTVGIKEGLAGIALDVHHILMQLEAEARFIGEIETEMAETLERIPFSPRLLSIKGLGIVSIAGIIGEVGDFSKFKTQSEIMKLAGLDLYEISSGNRKGQRRISKRGRSLLRKILYYAAIQMIRKNGIMHRYYTRLTSTGMLRIMALVAVARKLLRIIYAIVRDNRDYAGEYQAPTRRVIKRAA

SEQ ID NO: 374083 - protein, 322 aa, unidentified
MKNESESFALFVGVDVSKANLDIHFSDSRMSLKIDNSEAAIVKSLIKVLRKRKRVLVVAEATGGYESTLARALQERQIAVAVVNPRQVRDFAKGIGRDVKTDPIDAEVLARFGEVVHPAPTAAKSEAEERLEALVTRRGQLVDLIGQEKNRLRQCRDRDIQKLIGKSLESLQNQLKEIDSLLKHCIENDEVNARKIEILDSAKGIGAVAVGTFVAELPELGKLNNKEIAKLVGVAPINDDSGRRTGKRLTFGGRSQVRRILYMATLVATRHNPRIKRLYQHLLAKGKLKKVAIVACMRKFLTILNTLIKDDVLWSNEKSVPG

SEQ ID NO: 374084 - protein, 320 aa, unidentified
MRNTVGLDISKLTFDATAIVGNAEYSAKFDNDSKGLNQFSDRLKSLGCQNLHICMEATGNYYEEVADYFAQYYSVYVVNPLKISKYAESRFKRTKTGKQDAKLIAQYCRSAKESELVKRQKPTDEQYRLSRMTAAYAQIKSECAAMKNRHHAAKDEEAAKAYAQIIKAMNEQLEVLKEKIKEQTEKPNCKEGVKRLETIPAIGRMTAAVLFHHLTSSKFETSNKFAAFAGLSPQQKESGTSVRGKGKLTKFGNRKLRAVLFMLTMVAYRIRAFPGFIKRLEEKKKPKKVIIAALMRKLAVIAYHVHKKGGDYDPSRYKSA

SEQ ID NO: 374085 - protein, 312 aa, unidentified
MAKPVTKITLGIDVAKDQLVICQWGCEQLLTLVNQPAEIQAWLETLCGPVRLAIEPTSHYHLAVVEAALACGHQVYLVNPRQLVHYRYAVDVRNKTDAVDAWLLARYLEHEAAQLRPFRPQDRRAQRLWALLTRRATVVQSRQQLQQSFAEVRLSIQALLSQFQQLLQRLDQQIQHLLRELGWWPDYLRCQSIPGIGPANAAALVAAYHRGAFAGSDAFIAYLGLDIRLRESGRFKGKSKLTKRGEPELRRLLYCGSNAACNHPRFAAYRQRQLDKGLSKIAARVALARKLARIAFTLMQNQQSFTDQPKIA

SEQ ID NO: 374086 - protein, 297 aa, unidentified
MREPSTCKTTIGLDIAENVFQVHGIDDAEKIGVKRQLRRGQVKQFFEALRPCLIGMEACASAHHWARELSKLGHEVRLTAAKDVKAYVKRNKNDATDAEAICEAVRRPTMRFVRVKSAEQQGQLMQHRSRDLRTQVINALRAHLAELGVTAAQGREGIKDLLAIIADDRDERLPMDARASLLVLAAQLQALQTLIGTLEKRIAAQHRANSDSKRLTTIPGIGLIGATAIAAVVTDPKAFRSGRDFAAWVGLVPREDSTGGKRKLGPISKQGDRYLRRILVVGAHSVLRRAKHNPEKY

SEQ ID NO: 374087 - protein, 338 aa, unidentified
MQTYAGIDLHSSNNFIGVIDAKDKRLYSKRHDNNLKQVVKALGPFKKNLQGIAIESTYNWYWLVDGLQEHGFNVHLANPAAIQAYSGLKYTDDKWDSFWLAHMLRLGILPQGYIYPKQHRAVRDLLRRRLMFVRQRTSQILSLQSMITRNRGLNYTGAEIKRFRDEFIDVLFTDPHLNFTAKKNIETIRFLDRIVGQIETEVNSQIKLKKEFHMLRTTPGIGNILGMTIMLEVGEITRFAKVGHYSSYCRCVESKKISNGKKKGENNKKNGNRYLAWAYVEAANHAIRTCPEAQRFFQRKMSKSNRVLATKALANKLTKATYYIMRDQLVFDAAKLFG

SEQ ID NO: 374088 - protein, 354 aa, unidentified
MAKTLEAAVAVIGIDIGKNSFHVVGLDRRGAIVLRQKWSRGQVEARLANTPPCLIGMEACVGAHHLSRRLKALGHDARLMPAKYVRPYSKGQKNDFRDAEAIAEAVQRPTMRFVATKTIEQLDLQALHRVRERLVSQRTGIINQIRAFLLERGIAVRQGCLSLRTELPRILAAPPDVVSPRMVRIIEDLAGDWRRLDERIKALSEEIEAIAHQDVGCERLMSVPGIGPIVSSAMVAAIGAGDGFSKGRDFAAWLGLVPKQVSTGDRTILGKISKRGNRYLRVLFVQAAWVVLVKRKSQERLGLDRWLEAAKKRLHHNVLAIALANKLARIAWSVLAHGRSFEAGRIAVATAQSA

SEQ ID NO: 374089 - protein, 424 aa, unidentified
MKSASNTPSSERPLVLPEVAPNDVTAGIDWARDDHAACVVDGRGRRIATTMVEHTTAGLRDLVAFLGRHGVWEVAIERPDGPVVDTLLAAGLTVVVISPNQVKNLRGRYGSAGNKDDRFDAYVLADTLRTDRARLRPLVPDTEATIALRRACRARKDLVKHRVAAANQLRAHLRNVFPGAIGLFAAIDSEIALAFLARFDTQDRADWLTPKRLADWLAKQGYSGRTDPAKLHQRLLDAPRGASGEQATNQAAITAGYVALLRTLLAQIKTLSAQIDRQLDAHADSHIFTSLPRSGRVRAARLLAEIGDCRARFPTPESLTCLAGAAPSTRQSGKLRVVGFRWSCDKQLRDAVTDFANGSRDSNPWAADLYNRSRARGHDHAHAIRILARAWLHVIWHCWQDGLAYDPETHRALQRVLAQQDEAA

SEQ ID NO: 374090 - protein, 458 aa, unidentified
MLEGDAVKKAQRIAKLPVINPNAAGIDIGATQIFVAVPPDRDAESVRCFGTFTTDLEKLADWLVACKIQTAAMESTGVYWIPLFQILEKRKIEPVLVNAQHLKNVPGRKKTDVEDCQWIQHLHAVGLLRGSFRPADEICTIRSLWRHRENLIQLASIHVQHMQKALDQMNIQLHHVISDVTGTTGLAIVDAILLGERDPAKLAKLRDPHIRASEQTVMESLVGDYRQEHLFVLRQSLESYRHFQRLIQEVDLEVKQMVKELPSQVDVQERPLPKATNPRKTPWRNEPPELREDLYQAFGVDLTQVPGLNTLTTQIVLTEIGPDFSRFPTSGDFCSWLRICPNPKITGGKIISSKTRPSKNRAALALRMAALGLHRSQSFLGNYFRRMKARLGTPKAITAAAHKLARIVYHMVTTRQEFDATIFEALERRSRDHKHLRLRAQARELGFDLVKINAEAVS

SEQ ID NO: 374091 - protein, 400 aa, unidentified
MLLFFEVITMIFVGIDVAKDTHYAAVSDDSGAVLVKPFAFQNNAEGFCLLLKKLSEFDRSKLLIGLESTGIYSENLICFLYESGFRLAVINPIQTATLRKTAIRKTKTDKVDTMLIIKSLMVNSYRLYSQRDADSLKLRTLCRFRQNLKKSKARLKIQLAGYVNIVFPEFGNFFKSGIHIAASYALLKKYSSPKEIAALRTSTLCTLLSKASHGRFGKDTAEALKSLALSSVGVKNPYISIQIAQTIAQIELLEQQIKDLNSAIEEAMESINSVLMTVPGIGAVNAACILGEIGDIKRFSKPCKLLAYAGLDPTVRQSGQFTAKSTRMSKRGSALLRYALINSAWQLTLNDTTFKAYYDLKRSQGLNHYGALGHVAHKLTRVIFKLLTSDTPFNPAKLVA

SEQ ID NO: 374092 - protein, 344 aa, unidentified
MGEVSTIGLDIAKSVFQVHGVDGAGAVMIRKRISRAKLVEYFSELPPCLVGIEACPSAHHWGRELQRLGHTVKLMPPSYVKAYLKRSKNDANDAAAICEAVTRPSMRFVPIKTKEQQTALMLHRARQLLVRQRTMLSNALRGHLAELGIVSAKGRNGTGELLKIIADGADNRIAPETRAILDVMARQYSAIGTEILSIDKNILALHRSCEASRRLAEIPGIGPIGATALVAEIGDWKTFSSGRSLAAWIGLVPKQHTTGGKDRLGSITKQGNRYLRWLLVVGAMAVIRYAQKHGTQKRPWLGRLMERRPTKVAAVALANKIARMAWAIMVRGERYKEPKLLLAA

SEQ ID NO: 374093 - protein, 344 aa, unidentified
MDYYVGLDVSLRSVAVCVINADGKLIFERSVACEIEDIVECLRDVPSTALHIGFEAGPMCQHLFRGLRAAGFDVVCMEARQVNAALSAMRNKTDKTDARGIAQVLRSGWFNPVYIKSREAHALRALLSSRKAIQKKCIDLANEVRGLFKIFGIRLPSRVDQGSFDERVRPLIEADPDLSDALLPLLDARAVLYTTYRELDRRVKQAASRDEACMRFMAIPGVGPIAALTFRAAVDDPSRFTSSRTVAAHFGLTPRRYQSGEMDNPGRISKAGDSDVRATLYSAANAMMMRSVASSEIKSWGLRLMRRKGRRRAVVAVARKLAVIMHRIWADGTEFRQEPLRGAA

SEQ ID NO: 374094 - protein, 337 aa, unidentified
MKFCGIDLHSNNSVVVVTDETDRVLVSRRCPNELTPILLLLEPHRAELVGVVVESTYNWYWLVDGLKAAGFEVKLAHPVAMKRYDGLKHSDDKDDATFLAHLLRLGILPTGYIHPPQERALRDLARKRIQLVRSRTQHILSVENIMARQFGQRLSCNEVKGLSATSVDRLGLPTDVALAMKANVAIVQALQTQIDFLEERLLHEARLRPEFSLLKTMPGIGEVLATIIMLETGNIERFADAGHFASYARCVKSAHYSNGKKKGEGNARNGNAYLIWAYIEAANFARRFSEDAKRFFEKKKAKTNAVVATKALAHKLARASYHILKEKQPFDARRCFA

SEQ ID NO: 374095 - protein, 452 aa, unidentified
MDQQLGKSNGLSLERIEPNAAGIDVGATEIFVAVPPDRDRQPVRSFKTFTDDLRQMAAWLVQCGITTVAMESTGVYWIPPHEVLEEAGIRVCLVNSKHVKHVPGRKSDVSDCQWLQYLHSVGLLRASFRPESEIRAIRALSRHRSSLIEIASVHVQHMHKALTQMNLQIHHVLSDITGLSGMAIIEAIVAGERSPVRLAALCNQRVRSDQETVIKSLVGNYRSEHLFTLKQSLTAYKHYQELIADCDREIERLMRLLNGKIDPPPSSPATPPDPRFQKRSKNQFRFDMGSELNRVFGVDLTTIPGISGLTAHTLLAEIGPDLSRFANVAAFASWLALCPANKKSGGKVLSSRTRQTNSRASHALRIAAQTLARSKSHLGNFYRRMRARLGGPQAITATAHKLARIIYHLITTGQHYDETVFVREDQKQAQRQEKRLRKQAKSLGFQLVPIAA

SEQ ID NO: 374096 - protein, 345 aa, unidentified
MNVTTVGLDLAKRIFQVHAVDASGSVVVRKALRRSQVLPFFTKLPPCLIGMEACGTSHHWARELTELGHKVRLMPPAYVKPYVKRGKNDAVDAEAICEAVTRPTMRFVAMKSAEQQAALSLHRTRNLLVKQRTQLVNMIRGLLAEFGIDIPEGLERALGLARQIAAKEATPDVPAVAMQSLGLLCGQVFDTHVRLQAIDRSILALQRSDEVARRLSTIPGIGPVGATAFAASVADPELFRSGREFAAWLGLTPSQNSSGGKDRLGRITKMGDRYLRKLLVIGATSLIRRARDKPETADPRLVALLARKPVRVASVAMANKMARVVWAVMARGEIYQSRHAPNLAA

SEQ ID NO: 374097 - protein, 350 aa, unidentified
MKKICIGIDVSKETLDVTVIHIESYELMEKLGYSKFENRPSGFRSMTAWVRKVIKSRGQMDEALFCMETTGSYDLPLCHWLHKNGLNVWRESALQIHCSKGFQRGKSDKEDSEIIAQYAARHQNRYTAFVPDAEAIADLKELICYRDSLVERRKECKVRLANKKETLVNKNSKAWKCIERLSKAEIKRLDKVIGECDEEIRNLMKEDEEMKKNYQHLTSIVGIGLINGAALIAYTGNFKKITTPNKMSCYCGCFTFYEDSGTSVHRKSPYRNACCKMLKGYLRMAAKSAMLANTELRKYSERLREKGKPYAVILNNVANKLLHIMFSLVKHDYDYEYNHEVVRRMEREIA

SEQ ID NO: 374098 - protein, 329 aa, unidentified
MKLQHIIGADLSKKSIDLVCHLFKSHLEIENSIPGFNKLIQWLRQHEINLCETMIVMEHTGLYSYCFENFLHQHEIAFCKINALEIKRSIGVVRGKTDKLDAARIAVYGYEKKDRLTAHVPAGDALKRLQMLHSTRNRLMKQRASLICAIKEYRNIGMLEKDVILQTQLQLVKTFDKQIEKLMAQIELIINEQTPLKQNFQLLQSIKGVGKILALAAIIKTSNFTRFANARKFACFCGTAPFEHSSGTSIKTKSRVSHLADKQMKSLLDLSAKSAIQYDKELREYYLKRTEGGKSKMSTINVVRNKILYRMFAVIKRQTPFLENYLQAA

SEQ ID NO: 374099 - protein, 457 aa, unidentified
MNKKNQKAPNIEGFDMINPDAAGIDIGSKIHYVCVPEERDEVRIKSFGCFTEDINKMASWLKKCRVRSVAMESTGVYWIPVYQILEQEGFEVNLINAQHVKGVPGRKKTDVEDCSWLQKLHSYGLLKASFRPNDQICVLRSYIRHRARLIENASTHVLRMQKALTEMNMQLHNVITDITGVTGTAIITAILAGERDPVELAKLRNEGIKSSEDVIAKSLQGNYREEQLFILRQEFESYQFYQNQIQALDKVIEACYQTFGKQENREPLKTKKKRKSKHTPPFDLRERLYVLTGVDFTAIPGLNELTVQTILSEIGTDMSKWETEKHFTSWLGLSPTNKISGAKVLSSRTRRVKNSAANAFRTAALAAGKTQTAMGAFMRRIKSKAGAPKAITATARKIACLFYRLLKFGKDYVEQGIESYEKKYEANLVGKLEKLAKRLGYDLVEKPEKQLVSAIVS

SEQ ID NO: 374100 - protein, 426 aa, unidentified
MKFKQSDGQNQRIERITTSHLVVGIDIAKEFHVAQATNFRGIVLSTRHLKLSNTREGFELFGRWFNDLQRKHQLNNIIIGMEPTGHYWFNLANWLVEQGISVAVVNPVTTKRNKENRDNSPSKSDPKDALVIADVVSRGYYSEYTKQAHIFQRLRTLMSDREFWVTNSVRLQNRIIRWLDIRFPEYTSVFSDWTCKRSMASLCEFPVPSDLQGKTAEDVIQSWRKHMQRAGGSTGLTKAALLISYASRSVGETAAIDEAKQDLRRLHEEYCRIGKILEEIEQEILALLGKMPVAQQLRSIKGLGPIFVAAILSGAGDLKQYAHGRQLLRRAGLNLAESMSGKRKGQIVLSKRGDATLRKYMYLATLRLIGSNPFFRKWHEHNVQVKHMKGYRSVYKLIGKLARMIIGLVQRGESFSPEKQPFSMKV

SEQ ID NO: 374101 - protein, 412 aa, unidentified
MLFVGDDWAEDHHDVELVDEAGRRLARARLPEGLDGLSRLHALIAERLSQDSADLPAEEAARRVVIGIETDRGPWVQALIAAGYVVFAINPLQVARYRQRHSTSGAKSDAGDAHVLAEIVRLDREHHRPVAGDSPNAEGVKLLARTHQSMIWDRTRQVLRLRSALREFFPAALAAFDDLSAADTLELLARAPDPDRAARLSRSQLAAALRRAKRRNVEAGARDLQAVLRAAALRQPAAVQKAYAAIVVGQVRLIAGLNAEIGALEEVVAEHFGRHRDAEIYLSQPGLGTVLSARLLAEFGDDPDRYADARSRKNYAGSSPITRASGTRRIVLARYARNRRLADALHQWAFCSLKGSPGARRYYRALRSRGVGHQAALRQLSNRLVGILHGCLKTGTVYNEHTAWSHHTQTAA

SEQ ID NO: 374102 - protein, 321 aa, unidentified
MNKNTEIFGIDISKDVFDVYGLELGHHQFANNEKGFKQFIKKLSKDSLVVMEATGYYHYCLAEYLYEKGYVVSVVNPLSVKRFIQMKLSKVKTDKSDARSICEYALNNDVPLYTAKDKSQAECLQLLRLMDTHLKHRTTMKNKLDGEQVLGIPSKAVYRSLSRAVKQLNKELALLEARLIALVKEEQQEQLRLLKTIPGIGEKAAILLVVFTDGFSKFENSKQLCCYAGITPTIRQSGSSVRGRSRISKIGNRKLRNQLFLSSFTACQYNKACRELYERIVAQGKSKKLAMLAVCNKLLKQAFAIAKSGMPYNENFVSKLV

SEQ ID NO: 374103 - protein, 421 aa, unidentified
MKPQAPEAFAAFVGLDWADAKHDICLQVAGSARREFLRLEHRPEVIDAWVCTLRTRFNGQPIAICLELNKGPIVSALQNYDFLVLFPVNPLTVAKYREAFTPSRAKDDPTDAELQVELLLKHRDKLTPLVPQSPEMRALAQFVAHRRRLVGDKVRLTNRLTSALKNYFPHVLQWFQDKDTAIFCDFLSRWPTLKAVQLARRTTLESFFRAHHVRSADVITTRIEAIKNAVALTTDAGVVVPNTLLVQALVAQLRVTLQAIADFDTAIAQRAQAHPDFPLFDALPGAGAVFAPRLLVAFGEQRERFTSAEDLQKYAGIAPVTERSGKKSWVHWRWQCPTFLRQTFVEWAAESIRHSFWAQVYYQQQRDKGKAHQAAVRALAFKWIRILYRCWQERRPYDESTYLQALHRRGSSLIQNLAKAS

SEQ ID NO: 374104 - protein, 347 aa, unidentified
MKIIGCDFHPSYQQVAWLDTESGEVREATLAHENGEAQRFYESLRGPVRVGMEAVGNTLWFERLLAGLGHEVWIGDAAHIRALVVRRQKTDRRDALHLLELLTSDRFPRIWVPGPEQRDTRQLLLHRHKLVRLRARVKNELQHLALNQGVRRKRKLWTTAGRQLLESLPLDGWTAQRRQDLLQLLDQLHRRIGELDRAVEAEAARHPAAQLLQTHPGIGPVTGLAFVLTLGPWQRFRCAKAVASYLGLNPREHSSGGRQKLGAISKQGNPLLRSLLVEAALSAVRGDAELRRAYRRLAQRKHTALARVMVARKLAVRLYWMLRSNQPYAPRPAVRMPGSPSHSVVAV

SEQ ID NO: 374105 - protein, 462 aa, unidentified
MAKKAKKIRKDKRLELKIVNPDAAGIDVSSTEMQVCVPLDRDTDYNRTFGSFTEDLEKIGEWLLRCGIKTAVMESTGIYWLPLYMHLVGQGVEVYLVNAKSVKNFSDEKKTDEIDAESLMVMHSYGLLKPSFQVNNFAREIRNLSRHRDNLISAAAKEVQHIQKSMEMMNIKLSNVISDITGKSGQAIIHAILAGERDAQKLASLADNRCKISKEIIAKSLVGNWNEDLLFALKQSHELYHFIQKQIIECEQKIGDLVQKYSIHLPPQKQELIRSKKQTGKKVKVAFDVEAYGQKIFGVNLMRIPGINQGSLLKLIGELGHDFTETFETCRKFCCWENLAPNNKISGGKIISSKLPKRKNPVGQIFREIAVSMSGSKSPFGDYYRRIRSRKGAMGALVATANKISKIVYTMVKDKTEYDQNLIKIDEPVFMMRKLKNMQKSMAILQKQIESYQTKPILQVVN

SEQ ID NO: 374106 - protein, 396 aa, unidentified
MISVGIDVSKGKSTVCIMKPCGEILESPFDIGHTADELDSLISLIKSFDEETRVVMEDTGHYHLPVATYLSSHNIFVCCVNALRMKKFCSQSIRRAKTDKIDSIKIASFGITYWNELVKAYPSNVIYDELKFLARQYYQVTGMLVKSNVNFSNLLDQVMPKINDVLSNQGENHKLTEFVSRYIHFQNILDMGEMKFTSDYCKWAKKKGYRLNERKAAEILALAQNGIPTLPNSQSVKIAVSEAVKLIHSIEESRNTILAQMQDLCNTLPEYSVVKEMDCIGDTLAPRIIAEIGDVRRFKNKHSLIAYAGIDAPPYQSGAFHASERHISKRGNSYLRKTGYEIMQSLIKHKPADNAVYDFIQKKRSEGKCGKEAMIAGLNKFLRVYYGKVMEFYSEH

SEQ ID NO: 374107 - protein, 417 aa, unidentified
MIHRKMRYTYVGVDSHKETHCAVFLDCFFEKLGEITFENLPSKFGGFLELAQKYKSEGTVFLFGLEDISSYGRTLTVFLKANGQKVKHVNAQLVASERKNQTIVQKTDSVDAECAARVLLSKFSALPDADTQDIYWVMRSLVARRNFLVKNRAAAKKQLHSFVTQHYPNYRQFFEGIDSATALAFFTRYPSPILLKGTTAPELTAFLQDTGKGNYTLETAQRILATLEDTTIQYQEFRDTVVKSTIRQIRFNIEEIEQLEEAMEVFLKKFDCTLTSMTGIDTVTAARMLAYIGDIKKFSTPAKLARYAGIAPVTYASGKKDLQFANQRGNRQLNALFYQLAVRLCYATGSSRKVMNSFFFDYYNRKLSEGKTKHQALKCAQRRLINIIWTMLTRGEEYVNPPLYDLPEDEEADAQTV

SEQ ID NO: 374108 - protein, 371 aa, unidentified
MNSIIYVGMDVHKESYTLCCYDIEKDELLYKQTIQPDYRLILKYLGQVRNRYSEEVDFVCGYEAGCLGYILYHQLVDHGVKCIILAPTTMGITNTHHIKTDKRDAGNIARCVAFGTYSPVHIPTAEDESIKEYIRMRDDQKKALKVLKQQILALVLRQGKRFEDGKNYWTIRHVTWLKSLDLGGTTQEALSEYLISYEYLAGKIERLDQRIDELGSTQRYRENVQKLCCLLGVKTHTALAVIVETGDFARFAKAGNYAAYLGLVPGEDSSSDKKVRGGITKAGNGHVRKLLVESAQSYARGAVGYKSKALKARQRGNAPEVIAYADKANERLRRKFYRMTLSNNIKRNVAVTAIARELACFIWGLMTDHVA

SEQ ID NO: 374109 - protein, 526 aa, unidentified
MATKVKSGKKRTRSRSRKFRQAVLGKPDGVIQPRVQQVGPEHFGIVAIDCAKARSKWMLADFYGKVLIPPTTVEHQRTQLDLAICQLRQAREQHQLQDLIVCVEMTGTYHKPVWRAFRKAGFETRLVHPFASSHYRMPEHGDVKTDDNDLAAIFRAAVNGFGLIEKEIQEVYLEMQILCRHRRDLVNKKSKLQCQIRHHLEHCLPGFAALFDGDNLWTQATPIPLLKAIALRGGTPAAVTEAGQSGVTKWLKDASVRFHAKTVERVVVWAANAASHDAMTRSYTRVWQALLEDWQAKQQQIAALERDIASVLVQTPYLLLLSHPGINVISAAELGGELGPIENYASAKAMSGRAGLFPSRYQSDEVDRGGNLSRFRNGRLRRAWMMVAENMVKCNAYWRAKAAAWKAKGHDPRDIRCRIANRLTRIVFQMISGRRLYQHPSRLDRSYVMEKLLTYHREHNTPPHLIVRDLELAAKQIPASAYAEEAKPLQAAYEASCRSRRREPQPIGTLLVAVLARLGVVGLESE

SEQ ID NO: 374110 - protein, 339 aa, unidentified
MTVKTVGLDLAKDVFQVHGISENGRIIFNKAIKRAKLLSFFEILPPCTVGMEACGSSHHWGRQLRKLGHDVRLMPANYVKPYVKRGKTDAVDAEAICEAVRRPTMRFVEIKTEDQQAILSIHRTRDLAVRQRTQLANMIRSLLREFGHILPIGIEAVTAFAKRHLDGDHPDMPEIANGMLGIQCYQFIGLNERIEGYSKMIEQHALLNADARRLMRMPGIGPVTASAIVATIGDAKQFRTGRDLAAWLGLTPLNKSSGGKERLGKITKQGDRYIRKLLVVGMTSRAVMAKRSPEKVDLWTAKIIADKPFRLATVAMANKAARSIWAMLTKKQEYRQPAF

SEQ ID NO: 374111 - protein, 371 aa, unidentified
MKQIRSFVGMDVHKTTISISVAEDGRSGPVRFLGVIPNTPEAVHKMVKQLARHGELDFCYEASGCGYGIHRQLTGLGHKCTVAAPSMIPRKPGERIKTDRRDSEKLAILHRSRDLTPVWVPDTTHEALRDLVRARVDASMHLMRARQQLLSFLLRHGRSYPTGKHWTQRHRSWLAGQTFQEEAHGIVFQDYLETVWTTQERRDGLIKRISAMVLSWSLGPLVEALRGLRGIDLVSAATFIASTGDLSRFESPRLLMGYLGLVPSEHSSGGTIRRGGITKTGNREARRMLIEAAWSYQYPARIAKEKAEILVRLPKKIRDIAWKAQVRLCTRYRSMIARGKKPTVVVAAIARELAGFIWAIGQEMRLCASSS

SEQ ID NO: 374112 - protein, 416 aa, unidentified
MKGTTQKEKYRRCCGMDVHKETVVVCVLAAEGQAGKPLKKVYGTFRHDLGRMRGWLKQLQVTEIAMESTGVYWRPIWNVLEGHGFHLVLANPKQVKALHGRKSDKRDSQRIAEFLQDRRIDPSLVPPPEIRRLRDLLRHRVSLLEQRNQTHNKIRDLFETANLKLSSVASKLGVSGQRIIEALIAGETSADKLSWKVKGKLRKKEKQVRQSLVGCFDEFHREMLELLWKQYQFLSGQIEQLEAKTRREMEPYRELIELLDGVPGFDEVIAWTLIAETGTDMSVFPTHGHVASWAGMCPGTNESAGRQMSTKTRKGNRYLRRALLEAAWAATRKKNCYLRAFFYRLMYRKGWGKAIVALGHKLLVIAYEIMKTRTPYYELGADYYDQLNPEKTIQRLVQRLGKLGLEVAITPKEVTA

SEQ ID NO: 374113 - protein, 380 aa, unidentified
MKKIRFIGLDVHAETIAVAVAESGRGAEVRSMGIIPNRAESVRKLVKKLGPSDQLRACYEAGPTGYALYWRLAELGVKCEVIAPTLVPMKSGDRVKTDRKDAERLARSYRAGDLTAVWVPDPAHEALRDLVRARLAAKRDQTRARHRLSKFLLRHGRRPKNNIGAWTGAYLNWIKRDVHFDQSAQEATLADYVHEVEHAQERIDRLENAIDEAIALMPERMKEVVESLQSLRGIAKISAVTIMAEVGEVSRFKTARQLMGYSGAVSREYSSGERTRRGRITKTGNAHLRRIIVEAAWSYRHRPSIGAALKTRQKTASPEVKEIAWKAQNRLHRRYVRLMAKGKTKQKVVTAVARELLGFIWAIGVTVEQKHGSTAIKRAA

SEQ ID NO: 374114 - protein, 344 aa, unidentified
MNITTVGIDLAKNVFSVHGVDARGKVVLKKTVSRGKLLECFANLPPAIIGMEACSGAHHWARQLRSLGHDARIIAPRFVIPYRKSGKNDGNDAEAICEAVSRPAMRFVPVKSVEQQAVLCLHRIRSTVVAERTAQINQIRGLLSEFGLIMPKGRYPAQHHIPDILEDAENGLPGLARRLLADIYQRIQTLNQQVLAYDREIESLARQSEPARRLMGLPGVGAVSATALVASVADPAQFDNGRQLAAWLGLVPRQYSTGGKTRLGRITKQGDKYLRMLLIHGARSVLAALKDDRQDRISRWLRELIARRGYKRAAVALAAKNARMIWAMLVRGEAYRIAPASLAA

SEQ ID NO: 374115 - protein, 346 aa, unidentified
MNYFAGLDVSLEETAICVVDGTGRIVKEARAASEPAALIVALKELGLPLERIGLEACSLTAWLHDGLREAGLVTICIETRQANAAMKTMPNKTDRNDARALAQIMRTGWFRQVHVKSRQCRLWRSLLVARRTVLNEMRSIENVVRAILREAGLKLGTPSRPAFANRVRELAGSEPLVIQLVEPLLGVLATMLGALAQLTKQVLDLVRKEEVCRRLMTVPGVGPITALAFRATIDWPDRFRRSRDVGAHLGLTPSRYQSGETDIQGKISRCGDELARTALYEAAHTLLVRSQKWSSLRAWGMKIARHRGMARARVAVARKLAVILHRMWSEGTTFRFGTPPAGAAAA

SEQ ID NO: 374116 - protein, 361 aa, unidentified
MDSSPPLAVSYCTREFKRSDEESEMNSNVVGLDTAKSIFHLYSQTATDKPVKKKLKRAEMLSYFANLPVSLIGLEACGGAHYWARELTKLGHEVVLLNAKFVKAFVVGNKNDFNDAEAIFTAVTRPNKRTVAVKDDAQQDMQMLHRLRQERVAERTALANQMRGFLAERGIVLATGLNSVRKALPLILEDTDNALTSTGRELFAEQYQRLVAIDADIKAHEQRISRLCGQNALSKRFRDVPGVGPITATILASDIGDGKGYTRARDYAASLGVVPRQHSSGDKQVLLGISKRGNRYLRTLLIHGARSVLKVCSGKTDPLSRWLQGLIERRGFNKAAVALANKNARILWAMATQGKAYRAGA

SEQ ID NO: 374117 - protein, 342 aa, unidentified
MMTAIGIDTHKSSLAACAIDELGASHDERTFANNPAGHRQLEIWAATIVPAARIGVEGSSVYGAALARLLLAAGHDVREVPPHLSRHERIRTRRAGKSDPGDALAIARVTAREADLPPVRTADLSADIGFLTEARDDVVVEATRTRNRIHADLVRLVPGYEARSANLVATRHRKTAGRLLRGIPGVHAELARDRLRRLDQLIVEADRLERRLVELVGDHPLVGLKGSGAVVAAKLIGETGDVRRFRSADAFAMLAGVAPIPASSGQTHRLRLNRGGNRQLNRALHIIALSQSLHHPPARAFIARKRAEGRTWREALRSLKRHLARVVFRLLVAGAARTEPAT

SEQ ID NO: 374118 - protein, 342 aa, unidentified
MTIIRIGLDTSKHVFQVHGVDENEQAVLRRQVRRSEMERFFAKLPATRIGLEACGASHHWARVLGALGHEVVLMPPQYIKPYVKRGKNDAIDAAAICEAMSRPGMRFVPVKSAEQQAALMVLRVRDLLVKQRTMLINAMRGHAAEFGVTAAKGPVKVAELAPRAHAEEAGVPAPALEMLSLLAGHLEAIEARLKTLEAQLVSVHKANPVSQCLATIPGVGPAWLMLGGAVSFALRVPDPKAFRSGRHFAAWLGLTPREHSTAGRHRPGRISRAGDGSLRKLLVLGATAVIRFAKPGRASPWLLQLLARRPTKLAAVALANKMARIIWAMMVSGEIYRRPQQA

SEQ ID NO: 374119 - protein, 349 aa, unidentified
MTMLADQFDAVIGVDTHQDTHTAAVVATATGAVLDELTVPTDPDGYDALVALADRHSGLRVWSIEGTGSYGAGLTAHLQDLGETVIEIERPNRPARRNGKSDAIDAVRGAREALAIEHHAQPRSRGPRAALAATLAARRSAVEASATAQRQLRALVLVAPEILRARFRGQSTIAMVATATSLRTSSRWDLETTTSATALRALARRINTLNDEADAHEATLRSIVASWRPDLLELTGVGPIVAATVLCAWSHPGRCRSDAAFANLAGAAPIEASSGKHTAHRLNRGGDRQLNRAIHVIALTRLRYDPATRAYAERRRAEPNMTDRKIRRCLKRYIARQLYRQLENPPSPT

SEQ ID NO: 374120 - protein, 403 aa, unidentified
MNMNAVGIDVSKGKSMVAILRPYGEIISKPFEVKHTVSGIRSLIEQIQSIDGESRIVMEHTGRYYEPLVRELSKADLFVSAINPKLIKDFGDNSLRKVKSDKADAVKIARYTLDSWTELRQYSLMDEIRNQLKTMNRQFDFYMKHKTAMTNNLISILDQTYPGANTYFDSPAREDGSQKWVDFSATYWHVDCVRKLSLNAFIDHYQKWCKRRKYNFSRSKAVEIYEASKELVSILPKDDLTKLIIKQAVEQLNTASQTVEQLRTMMNEAASKLPEYPVVMAMKGVGKSLGPQLMAEIGDVSRFTHKGAITAFAGVDPGVNESGSYEQKSVPASKRGSSTLRKTLFQVMDVLIKTKPQDDPVYLFMDKKRAQGKPYYVYMTAGANKFLRIYYGRVKEYLSSLPK

SEQ ID NO: 374121 - protein, 334 aa, unidentified
MKKRYFMGIDVAKATLDFCLLSKNATLLWRGQLRNEAQAIAQFLAQLQARGYKLAQIHFCCESTGVYGQRLAQGLHQRALALSVINPAQVKFFAISVLRRTKNDPVDAQIIARFCRERKPLATRPLRPIESQLKLLVHERETRVNEQTRERNRAKKDPYQIQLPNLIGQPRQCRLTQLAEQIAQLDAAIEALIASDELLKTQSRLLGSIPGIAKLTAAKLLSELAGKEFHSARQLAAYAGLTPQECRSGYSAYGKTRLCKIGNALLRKALYLPAAVARRWCKPLQPWIAALQSRKLHDLAIRGAIMRKLLHIVFGVLAHQQPFNPLLVFIPKTP

SEQ ID NO: 374122 - protein, 387 aa, unidentified
MPQPNDMSRSLITLEQDSTLIAVIEMGQSSWLVAGIVPGIERQPLKKLAADQDGLLQLLHRWRKEAAQAGHPIKRIAVAYEAGRDGFWLARWLRAREIEAYVIHPSSVPVSREHRRAKTDRLDTELLKRAFLGWLRGEPKHCSMAAIPTVEDEDARRPSRERESLVGECTRIVNRVKANLARLGIRGFRPRLAHAPKRLETLRTPEGTAVPANTLAELQRDMVHLRFVKQQIKEIETARAKRLEQASGGGRDAMVRLLARVVGIGIETADMLVQEVFSRKLRDRKAVARYAGLTGAPDESGQKRRERGLAKAGNARVRHAMIELAWGHLLHQKDSALAEWYQKRTVDARGGTRKTMIVALARKLLIALWRLVTTGEAPAGLLLRPAA

SEQ ID NO: 374123 - protein, 373 aa, unidentified
MAPVMIGIDPHKGSHTAVAIGADEEPLRQVRVRASAAQAQKLVAWAADWPERTWAVEGARGLGYLLAQQLVAAGERVLDIQPKLGARVRLLATGASGKNDPNDARSVAIAALRSTTAAEVAAAGHAAVLKVWSKRHRDLGRARNQLACRLHAVLCDLAPGGFSKEITAGQASGLLQRIRPSGAAAQARYDLASEFVEDLRRLDAQLRDTRRKLTAAVKESGTSLTEIFGVGPVIAATVIGATGQVSRFASRDRFAAYNGTAPIEVSSGNRRACRLSRRGNRRVNHAIHMAAVTQIRNKHSQGRAYFDRKLAEGKTRKEALRCLKRRISDAIYARLQDDARRTRQARTLTAREGNRGTTLTPARPAHTPNQLFG

SEQ ID NO: 374124 - protein, 371 aa, unidentified
MFTLTALEPKEAEMRIIGVDLHTRQQTVAMLDTETGELVEKSLPHDGEEVRKFYSALPGQVLVGIEATGSMHWFLELLEELDIDHQVGHPSKIRKAETRKQKHDRRDATLLLKLQVENRFPSIWMPSTELRDLRTLLMHRHPWVRMRTRVQNTLQAIAIGRGLRRGKALWTQTGQHAIESLPLPPHTAYRRTELQDLYHKLHAQIDELDQRVGDQALQRSGARLLMSHPGVGPVTALATDVFLGDPTRFADGKAVVSYVGMIPSEYSRGGQQRLGGLSKQGNPFLRFLWCEAAVHAVRKDPELQRFYRRKLAQKGLGKARVAVARKLGIRLWIMLRDQIDYQEFCRRGQLRQENGGACAGMPEVGHSPAMQ

SEQ ID NO: 374125 - protein, 428 aa, unidentified
MERQNESNIDLRFFAGVDLGSGEHAVHVVDESGKRLDGFTGEHGGAGQAALADRLRRICGGSPELMGVALETPRAALVELLLEQGFAVFAINPKQLDRFRDRHSPSGAKDDARDARVLAGSLRTDRASFRRLNPESALTIELRDLSRLDEGLKREFRRGCNQLREQLHRYYPQLLGLCPAADEPWFWALLKRAPLPAAGAKLTPANIRQVLALNGIRRLSGDDIAAALRTPPLQVSPGTAAAASRHALMLVPRLDLLFRQIGETLAAMESTLESMASDSEHQGHRDAAILLSLPGIGPVTGAAMLGEAAEPLRNRDYHALRSLAGSAPVTRQSGKRLVVGMRHGCHPRLRNALHGAVSCHVRWDPRAREQYQRLKAAGHNHARAVRGVGDRLLRLVVTLLKNGELYDPQRRLLPETKTVAATGQPVIC

SEQ ID NO: 374126 - protein, 451 aa, unidentified
MSPRKSDATLSLAHPDAAGIDIGSASHFVAVPHDRDDQPVREFKSFTADLYRLAQWLKDCGVTAVAMESTGVYWIPLYELLDSQGFTVYLVNARHVKNVSGRKSDVLDCQWLQQLMSYGLLAGAFRPSDEICVLREFSRQREMLLASQVRHVQHMQKALAQMNIQLTQVLSDVVGVTGQAIIRAIVGGERDPHALARLKKRQVKASEDDIAAALQGNWRHEHLFALRQALALYDTYQQLLNDCDQHIQAELHKLHRHDGDPGKSQRRWPKKAMAFDLRTHLFAMCGVDLTRINGIDEMTAFTVLAEVGPDMNRFPSAKHFASWLGLCPGTRISGGKVLNGATKRSPNRAAQALRLAAMALRHSQSALGAYYRRLCARLDKRRAITAAAHKLARLIYTLLTKGSEYVDQGELYYEERHRQRVLHHLTKRAETMGYSLVPLTASGETNEVSMT

SEQ ID NO: 374127 - protein, 424 aa, unidentified
MKVTYQTCCGVDVHKSFLVATIVKTTGGIEPSYQKKRFSTFNNSILEFKQWLLDNDCHDVCMESTGKYWVPVFNLLEDEINVVIANPKWVKAVKGNKDDAKDSKWIGDLFRLGLVKGSYIPCKKVRILREYTRYRYKLVSCRSSEKNRYQNALTVCNVALDSVVSDIFGKSSTSIIDYLLEQSGSSINHEEIASKLLRSLKSKEDAVIESIEGYQMTDAQKYRMRLVRAHMDYITAEINDVDKMIENMISSDPDFENAVQFLCTIPGVKRASAITIISEIGTDMTQFSSSKRLCCWAGLTPGSNESAGKKKSVRITRAGVYLKPALVQCAHAAVKSDKSPYYKKKYDSLVKRRGKKRAIIAIARMILTAIYQMLSTGELWNPSDLYKIDMPVALVEKQKAKAIKQAKKLLQQEGLLPPDEPLAS

SEQ ID NO: 374128 - protein, 429 aa, unidentified
MPYRIAGIDVHKKILAVVVSNVEIESEYQFERRMFGSNPEQLRSLAAWLLEQEAEEVVMESTAQYWKPVWGALERYWKPICEKREGARRKSGTLHLAQALSNRGRRGRKRDFVDAERLVKRLVARELVLSFVPDPEQRLWRTVTRKKYQLRCDRVRLQNQLESLLEEAHIKLSSLVTDLLGVSARRMLKALADGETNPAALATLADERLRATPEQLCDALGACTELNPVYRRLLKMALEELRLIDEQIAQLDQEMANLLRPHQDAVERLAEVPGLGVDSTQQIIAEVGPTAETFPSAKCLSSWVGACPGDEESAGVNYSHRSPKGNRHMRRLLNQTANAAARTKGSIFEIVYRRSVPRLGHNQAIGAIAHRQCRLIWLILHQRVRYEERGPAVTKQSRQKRTARMIRQLRSLGYRIEAPNPQPSQAQAQ

SEQ ID NO: 374129 - protein, 390 aa, unidentified
MILVGIDVAKDKHDCCIINSDGEFPEEVFSILNNREGYETLYKRICSLAVDLAKVKVGLESTGHYSSNLLAFLLDKHLTAYVINPLRVNLFHKGQSLRRTKTDKIDSRNIAHLLMADSSLKPYSLSSYHMEELKSLTRYRSSKVRERTKLKTSIARLVTILFPELEQLVSSIHIHSIYAMLEKFPGSAYIAATHLTRLTALLLKASRGRFGRETAIRIRDTARRSIGAVSPAKSMELQHTIAHLRVYNQEIGEIESEIEKIMDDVNSPITSVPGIGMQMGAVILAEIGSFRRFDSPDKILAYAGMSPSTYQSGKLTGSYSRMEKRGSRYLRYALFNVTRYVCHYDPGFTAYLSKKRKEGKHYYVAISHAVKRLVRVLYAMEISGNRYQTA

SEQ ID NO: 374130 - protein, 312 aa, unidentified
METKFVGIDVSKLTLDFDCLPVGNPKQFTNDVDGIAALVDLLKDSGVERIVLEATGGYEAAVASALAVAKLPVAVVNPKSVRDFAKATGHLAKTDRLDAKLLAVFAERIMPPLRALPDEAQRALADLLGRRTQLIAMRAQEKARLTITTGAAQKDVRQHIAWLDKRIVKIDGDLEKRLRKSPVWCEKVELLGSAPGVGPVTTFALVAKLPELGTLNRQAIAALVGIAPFNDDSGTRRGKRYIRGGRADVRCTLYMATLSAIKHNPPIKAMYERLTAAGKPFKLAMTACMRKLLTILNAMLKKNQKWKIEPSA

SEQ ID NO: 374131 - protein, 362 aa, unidentified
MSVEERTHVGLDVHAHAVVGAALDGETGELVRRRLGSSPAEVLTWIRSLPGPVAAAYEAGPTGFTLARALRAAGVRCEVLAPSKLQRPVGERVKTDARDALHIAKLLRLGEIVAVTIPSESQEAARDLVRAREDARRDLMSARHRLSKLLLRHGLTYPGKATWTRDHHAWLRQRRFELRGLQAAFDAAHEAVVAVQDRRDRLDEAILAMAAESEFTSVVNRLACLRGVSTLTAFALAVEIGDWTRLDGRRIGSYLGLVPTESSSGQSRSQGGLTRTGNAHARRLLVEAAWHHRTAYKSTSPILRARWALASPAARERAHQGNLRLHRRWRAFEARGKRKVVANAAVARELAGWCWSLAVMES

SEQ ID NO: 374132 - protein, 356 aa, unidentified
MSRDLKYIGMDVHKEAVVIAVRNSTGQLVMESIVETKASSLLQFIHGLQGELHVTWEEGTWAAWLYDLLKPHVQEVLVCNARRNALLKEGSKNDKVDARKLSDLLRTGMLRPVYHGEHGLRTLRELARCYQTISQDQSRVMNRVKALYRGWGIGCAGTQVYAPRYRQEWLEKIQHAGVRRRAELLYQQLDSLQALRRTLRSELLAESRKHKASKLLRQIPCIGPIRAARLLALMQTPHRFRSKRQLWTYSGLGIETRDSAQYRFVRGQLQRAKKPQQIRGLNQNHNHEMKEIFKGAATRASCGVGPLRDFYVALLAKGMKPEMARLTLARKIAAIALILWKKEERFDAEQLKTQAA

SEQ ID NO: 374133 - protein, 323 aa, unidentified
MKSKFEIEGDWTVVGIDVAKDELVTYVDTTKEFGSCRNSTGDLKKMGRQLKKLGPRLVVFEASGGYEAEAAGIFADLGLPVAVVYPRRIRQFAFGLGMIAKTDEVDACVIAYYGRIAGIQPMPPKSSELRQLQALTGRRSQLIEMRVAEQHRLETAHPSMHGDIKKHVDYLNRQIDGIEKKVAQEISESPVWSEKAERLCSVPGVGPVLSSTLITELPELGSLSNKEIASLVGVAPFPHESGKRTGKRFCKGGRNSIRRVLYMATVSATRSNPVIIAFYKKLCDRGKLKKVALIACARKLLITLNAISRDNSSWHPNNEMFST

SEQ ID NO: 374134 - protein, 345 aa, unidentified
MDQISRIGMDTSKHIFQLHGVDAAEAPVLRKKLRRKEMVAFFEKLAPTVIAIEACGASHHWARLLQSVGHSVKLIPPQLVKPYVKRAKNDAADAEALCEAMSRPTMRFVPVKTAEQQAALMLVGVRDRLIRNRTQLSNAIRGYAAEFGLTSAKGMAHLVPLLERIQADESLPVLARELFAIQAEEYTELQTQIDELDVKLAAWHRADECSRRLAKIPGVGPIGAVLLRMKTPDPELFRSGRQFAAWIGLTPKDHSTAGKVRLGVITRAGDEGLRSVLVVGATSVILQVRRGGRASPWLAELLKRKSPKLAAVALANKMARIAWKLMLTGETYTAKSAPAALAAAV

SEQ ID NO: 374135 - protein, 356 aa, unidentified
MREGLRLARGSDVFLGLDISKASWHVTARSGGETLLSASFPPKREALNGLLRRLEGCRIHSVYETGPFGYGLHDWLRSRQVDSMVVSAAHVPGEIGNRVKTDRRDGLKLARTLEAGLLRPIFVPEARQRADRELVRQRHRVQRDRCAAMVRIKSFFLTYDIEVPQEAGPHWSGQFEAWLRQFQLEDPSLQRVFEELRSLYFDLDVRVDALTKELRQMARSSDYAAMVELLSTVPGIGWLTALTLVVEIVDFGRFPDGEALSSYAGLTPSEHSSGNRIRHGHITRQGNPVVRSVLVESSWILIGKDPEMRRFYERIKVRRGGKRAIVAVARKLCHRILAITQSGQPYRVNFTHTKEN

SEQ ID NO: 374136 - protein, 372 aa, unidentified
MKYIGIDLHSNKFTCCFLYENNRKKLITYNLDSQGLKDFLKHVNRETSIMVEASTNTFGFVDRIKNAAKEVIIANTHKLKLISLVKKKTDKIDAEKLAIVLKMQIKSNQKMFEPVHLPNDLIRKLRSLFTTYRLYRKHITSIKNRIHSIYKQELMPFTKEYIFGKKTKAILRQVNINPQADFQLDLLFNELDAKEISIKKITHYIMYLAKPYKEQIDILTSMKGISLFIAIALIADISVLTRFNNSKKFASYLRSTPGVDSSNETIKNLSTNKMGRRLSITLLSQSLNHFRDSNPKIRKWYDKKIDNGKKRGKVRMAICRRVFTEIYQMLKKKEYHYYRDVRNHINKMHAYTIFLENYRVPDKYAYNFKKCA

SEQ ID NO: 374137 - protein, 379 aa, unidentified
MSDSATKSFGSEAQAASLPPLTAGLDVGDRHSTMCFIDAAGETVERTRVRTTSEALRGAFGHRAPLRIALEVGTHSRWIRRLLVELGHEVFVANPRRVRAIYESDTKTDSSDAEMLARLARVDPKLLCPVRHRREDRARALAVVRSRDGLVRARTLLINHVRGAIKPVGGRVKHCSSESFARQAPEQIPAELQAVLQPVIEQIGHLTRTVREFDRQIEQLCEQFPDAQRLREIPSVGPVTALTFVLTVDDPARFQNARMIGPYLGLCPRRKQSGRDDPQLGITKAGDSYLRKLVVTCAQHTLGPFGKDSALRRWGLQRAGSGDRIAKKKAVVGVARRLTVVMLHLWVSGETYRPFPTPAPPARPPSPEKTVEKKEKKAA

SEQ ID NO: 374138 - protein, 459 aa, unidentified
MSPRYKGKKKIPSVSKTPPSLPVLHPHAAGIDIGAREIYVAVPPGSDPKPVRAFATFTEDLHALRDWLKTCGVTSVAMESTGVYWIPLFQILEAAGIEVCLVNARHCKNLPGRKTDVQDCQWLQYLHSVGWLRGSFRPPETVCAVRSLLRHRDGLVRAAATCVHRLHKALTQMNIQLQHVIADVTGVTGLAILEAILAGERDPRALARLKDGRIRATTDVIAKSLRGDWRAEHLFTLRQTLDTWKHYQAQITACDAETAGLLQGFAAKVDVAVQPLPARTSTHKTPQKNEPRFEARAELYRTCGMDLTQVPGIQSGTALVLLAELGPDFAERFPTAKHFGSWLGLCADNRITGGKIMSSSTREVKSRAATALRLAAQGLNKAQNYFGDLYRRWKARLGTPKAITAMAHKLARILWHLCKYRQAFDPAVFQKEEEKMKRKKLARLHNNAAALGLKLVPAQ

SEQ ID NO: 374139 - protein, 432 aa, unidentified
MSKFFYNPTVGIDVSADFSMVAILAPNGDIYRKAFKINHDVDGFNHLVKEIKKVEKEFNMKTGIFMESTGVYHLSLFHFLKTNNLEAYVINPLVTNSNKNKDIRKVKNDKKDALAIAKIGKFEDIRAYSYFDVSIFTLKSLCRDYYKLVDTRSTFKKKLSADLRVVFPGYNNVFSDVTGATSIAILKCYQTPQSILDAPKEDIIKILKESSKKNFIWCNNTYDKLIKIAYNARYIAISSLGLSIKITINIGTIENFNKQIELILKEIENVLYSNDISSKFKQNILLLISIPGVGFISAVTILTEIGDFQGFLKPKQLVAYFGIDPSVNQSGKFKSDKDKISKRGTRFGRRALYAIALASIRTKRTGEANNKILLDYYKNNLKGKKKKVALVAIMHKLLNYIFAVLRNQKEYEQRLPKIHHKMHLENSNKSAA

SEQ ID NO: 374140 - protein, 317 aa, unidentified
MSKRTTICAGIDTGKRKLDVALEASRERLEVDNNVAGHCALTDWLRRHRVKRVGIEASGGYECPVVVELRRKGFVVVVFQPAQVRAYAKFHLRRAKNDKIDAGLIAMCTASVKTIHAPPDPRLAPFAEHLTMLDQISDDGARCKNRLESCRDPHSRQFWNEEIARLKKLHKTELKSLVSAIRQHRDLAERLDLIHSVDGIGLPTAVAILARMPEIGRISREQAAALAGVAPYDDDSGQLIGVRHIEGGRKRLRGALYCAALPASQRWNPQLIALYRRLRAAGKEHKRALIACARKLLIFANTVVARGTVWTARPNPA

SEQ ID NO: 374141 - protein, 368 aa, unidentified
MKEVTTRYVGLDVHKATISIAVADDGVAPVLFGTIANEATAVHKAVSLLKSGGKLVAAYEAGPTGYGLHRQLTQLGVDCVVVAPALIPRRAGDRVKTDNRDAIALARLLRSGDLTPVWVPGQQDEALRDLVRSRFDAKDDLRRAMHRLAKFLLRQSIQAPPGIKPWSARHLQWLETLRLNHPTSQLVFEDYRVAVHAARERVRRLEADLERCAEQSPRLGTILALQVLRGVAFLSAVTIVAEVGDFRRFPNAPRFMSFTGLTVSEHSSGQSRRQGRITRAGNRYLRHILVQAAHNARFAPSLEGELKRRLKDVPADLVALSVTAQNRLHRRYRHLDRRIGRPKAVTAVGRELAGFVWAIGQRMEASAA

SEQ ID NO: 374142 - protein, 341 aa, unidentified
MSVIAPVFSFGLNGYTGIEARMTRRGGEKTMQPVIGIDISKDTLDAYRLSDDMHIQVSNDKLGHRALMRWIGQTDTSLIVFEATGAYHRELEARFAAADLPYAKVNPRQSRRFAEVTGRLAKTDRVDAIMLARMGAMLGLQRQEPPTDEIVDLREFLAARRALMKDKVAAKTRLQTTTQDLLRRQISVRLRQIEAQIAQIDAAMSKKVMQNEALSQKLAILVSIPGIADVTAISMMVEMPELGTLDGKKAASLAGLAPVSRQSGKWRGKEHIQGGRTFVRRAVYMPALVAVQRNAQLKAKYNQLIEAGKPPKLALTAIMRRLIVLANALIRDRRQWSEIRP

SEQ ID NO: 374143 - protein, 404 aa, unidentified
MKARQKLFAGIDWAVRSHAVCVVDSAGGVRARFDIVNTGKTFAGLVKRLSKLGVEGVAIERPDGPLVEALVGGGLCVVVVPPRQLKALRSRYSSSGAKSDPADSYVLADVLRTDGHRFNPLTSDSPETRILRALTRTRKDLVESRVALVNQLRAHLELAFPGAVGLFSELDSPVAVAFLRRYSTAAKASRLTEARLAAFLRRIGYCGRVPVAELRQRLKEATPPGITEEEAEARAICVGALLDAIEIVRAKAKDLEGEIVERLETHADAAIFTSLPRAGHGVRAASLLAEIGDVRARFPDEESLAALAGVAPVTRRSGKACSVGFRWACDKKLRNALVDFADDSRRASPWAAHVYKQAVSRGKRHSHAVRILARAWLRVIWKLWQDGVPYDPSKHGGEVRLQAA

SEQ ID NO: 374144 - protein, 412 aa, unidentified
MGSLLQRSLPTATLVVAIDPGKARNRVWLSTDASGLVVEPLSVPVLRSGLDEVDALVRRHCPDVGPIFAVEATGALHRAWVAELNRRFPQAVRVFAPSETAAARAQLGSRRFKTDDRDCAALTYLARQGQGRSVPADDHEALLAAVRHRRGLVAERKAAQQRLHDQVNALCPGLSAPTGQGRSLDLAGVTGQAFLQCLIDFGGRPVGARSLRARAPGRLSAANAAFWAARWKDCLPPPAHVAAGVDRLARSVRRWRYLNDDITAVETDLETLLAGTDGQILTSLPGVKTVRAASFAAFSLPVTRFPDAEHLYSATGLAPASYQSSSIDRRGRISRQGLPEHRDALMNMAWGLAQHCPPFTDREEQLRIRGMKPMQVRVALARHTCRLAYRMLTTQDAFDEQRYRRNRHQVRR

SEQ ID NO: 374145 - protein, 371 aa, unidentified
MEHTRFIGLDIHKERISIAVAESGRAGAVEYHGEIANDPGAIGKLCDRLRRPGKPLAFCYEAGPCGYGVHRQLTSLGHRCDVVAPSLIPTKSGDRVKTDRRDATMLARLHRAGELTPVWVPDADHEAMRDLIRLRSVVRQIVTRARQHLQGFLLRHGRKHGGGTAWRMAYRRWLSTLAFEHPAQQIAFQDYVDAVMDAERRLKRVEEQIVGLLPEWNLRPVVDALQAMRGIALINAVVLVTEVGDFTRFSNPRQLMAYFGLVPGERSSGQTVRRGGITKTGNAHARRALIEGAWAYRMKPRIGRHKVDRIEALPKVIRDIGWKAQIRLCARYRRLSARGKTANVVNVAIAREMEGFIWSIACAIQSTPTAA

SEQ ID NO: 374146 - protein, 321 aa, unidentified
MLAKRSRHSFIGIDVSKQLLEIGVHKSNYRLCCPNDPKKFPALIAELIALRPARIVLEATGGLETALLQGLHAVGLPAVRINPRQVRDFAKALGLLAKTDRLDARVLAHFAAAVQPPLRPIKATEDIELDALMGRRNQLSDILGAEKNRRGSAATDAARADVEAHIEWLEQRLKALDKQLKDQLKCSAVWQQKDKILQSVKGIGFVTSVSLLADCPELGKLNRHQIAKLVGVAPLNRDSGKQRGARHIFAGRAQVRAKLYMATLTAIRCNPLIKAFYQRLLAKNKLKKVAIVACMRKLLTIINVMVRDNKLWNVKAQSVSA

SEQ ID NO: 374147 - protein, 349 aa, unidentified
MKVLIGVDPHKAANAVAALDEHGEVLECAEFSADRRGLRALERWAKRFPERRWAVEGANGLGRTLSRRLVSADEEVVDVPAKLSARVRVLSVGNGRKNDELDATFTALAAWRNGRLARVRTEEETDVLRLLSERREDLVSERTRVLNRLHGLLRDLVPGGVSGMLSADRAACVLRGVRPRRDSRSAAYSVRRRIASELVRDVRALDRKIASLDAEIREKVERSGTTLTEIFGVGPILAAKIIGLIGNVDRFPSKGHFASYAGVAPIEASSGEVMRHRLSLAGNRRLNHALHMIAINQVRYRGEGGVYYRRKMAEGKTHREAMRCLKRRVSDAVFKRLRADFEEKMPMTA

SEQ ID NO: 374148 - protein, 372 aa, unidentified
MKENSVIFIGLNTSKLKISVAVADGVRNGEVRFFGDISSEPASVASMVNKLSKRGAQLHFCYEAGPTGYGLYRQIVELGHECVVVAPSLVPKRAGDRVKTNRRDAVSLARLHRAGELTPVWVPDESHEAIRDLVRAREAANNALKQARQQLQSFLLRHGRIYTGRTPWTRAHTRWLASQAFDHPAHHILLAEYCQAIEDAGVRLDRLTKLVVETASSWSMAPVVAAYQAMRGVAFMIAVTFVVEIGDVRRFDNPRQLMAYLGLVPSESSTGERVKRGGITKAGNARARRVLIEGAWTYRFPARVSPTIQARLEGLPRTVREIAWKGQVRLCARYRKLMAAGKLKVVAVTAIAREMAAFLWAIGQEVAPTAKP

SEQ ID NO: 374149 - protein, 328 aa, unidentified
MHVAAALDSVGGLLGVQEFPATAAGYASLLSWLRSFGTLAVAGVEGTGSYGAGLARHLAAAGVRVVEVDRPDRQDRARQGKSDPLDAVSAARAALSGRASGVPRGRDGAVEAIRALMVAKRSARQERTQAINQARALIMTGPEELRARFVRRSPAQLIEAIAALRPRPGDVPGYATRVALRELGRRGQFLDAQLDRLDELIGPLVTERAPGLLALHGVGPDTAALLLVAAGDHPERLRSESSWAHLCGVAPIPASSGKTAGRYRLNRGGDRQANSALWRIVIVRMSSHPATRAYADRRSEEGLSKKEIIRCLKRYVAREVYRQLRDGA

SEQ ID NO: 374150 - protein, 379 aa, unidentified
MTSTAAAAGSRETVYAAIELSKKTWVLGIAHPDRDRPSIHRVCGGNFAELVGRLRVAARNNRRILVCYEAGYDGFWLARALAKIGIECRVLDPASIQVNRRARRVKTDRIDVLALLRALIATDRGERHVCATVRVPSVEEEDARRSHRERQRLVRERTGHINRIKGLLFAQGIRDIKPKLRRTRIDFAGLETAEGHQLPDRLRRELDREYARLALIETQLREVEKERDTADAQDPVVERKRQMLVALQGVGSTSAAILAREVFARSFASRRQLGSYLGLTPSAYDSGSTTRCQGISKAGNSWARRVLIEVAWLWRKYQPASPLSNWYLQKTTGQSGRIRRIMLIALARKLAICLWRYVETGLVPEGVVIARAEPRCTPA

SEQ ID NO: 374151 - protein, 402 aa, unidentified
MNAVGIDVSKGKSMVAIMRPFGEIVSTPFEIKHTSSDINSLVKLIKSIEGESRIVMEHTGRYYEVLAHQLSEANLFVSAINPKLIKDFDNDSLRKVKTDKADSVKIARYALDKWQNLKQYSVMDELRNQLKTMNRQFGFYMKHKTAMKNNLIGILDQTYPGVNTYFDSPARSDGSQKWVDFASTYWHVDCVRKMSLNSFIDHYQNWCKRKKYNFSQSKAEEIYGKAKELVPVLPKDDITKLIIKQAVDQLNSASITVESLRTLMNETASKLPEYPVVMAMKGVGTSLGPQLMAEIGDVSRFTHKGAITAFAGVDPGVNESGSYEQKSVPTSKRGSSDLRKTLFQVMDVLIKTHPQDDPVYQFLDKKRAQKKPYYVYMTAGANKFLRIYYGRVKEYLASLPES

SEQ ID NO: 374152 - protein, 343 aa, unidentified
MQIRSVGIDLGKTTFHFVALGASGKVLVKKKFSQKQLLAFTANLQTSLIGLEACSGAHFLGRALRQQGHDVRLIAAQFVKPFVKSNKNDFVDAEAIAEAVERKNMRFVPIKTDDQLDLQAMHRIRDRLVSRRTAVINQIRAFLLERGMVFAQKPAKLRAAMADVLENADNALTPMMRHLIGILWDEWKTVEEQIEELTDRLEQIADSDAACRRIRQIPGIGPIVATAIVAAIGNGAAFRKGRDFAAWLGLVPRQYSTGGRARLLGISKRGNIYLRKILIHGARAAAMRIKRDRFPIGAWMNALEARAPRNVMVVAMANKIARIAWAVLSTGEDYRPAVNTAAA

SEQ ID NO: 374153 - protein, 412 aa, unidentified
MQTMVERGCGLDVHQATVVACLLVALNNGTVKKQIRTFNTTTRELVKLREWLLSEGCTYVAMESTGVYWKPVFAILEGSFELVVANAQHVKKVPGRKTDVKDAEWIAELLCHGLLRSSFVPPKPIRELRDLLRYRRKLVESQSAERNRLLKLLETANIKLSSVATDVFGVSGLLMLRALIEAKATPQEMAQLAKGRLRNKLQELELALEGKIEEHHRFLLQLQLDRLQAVEKDLAKLEQHIQEKLQPYATQQALLQEIPGVDWTLAAVIIAELGVDMTVFQSVSQLASWAGVCPGNNESAGKRKSSRIPKGNVYLKTALVEAANAAARAKGTYLRDKFYRLKARRGYKRAAVAIAHKILVAIYHMLSQQVSYNDLGDLYLDTRNKNHLTRNLIHRLERLGYAVTLTPQQKAA

SEQ ID NO: 374154 - protein, 327 aa, unidentified
MTQKMDVVGIDVSKATLDAYALTSQQARQFANDPAGHQGLVAWLQGLDVDVAVFEASGGYERAAAQSLRRAGLVAHVVDPKRVRYYARAAGQLAKTDRIDARMIAAFGAAFLRERPSGIAGAEDPARQDLAELVGTRQVLADHRTSLQQQADAVTSAIAKKLLLAPLKQLDRQIETSDRQIAAAIARHEPFAALARRLDTVPGLGPVSIAALIAWLPELGQLDRRQLAALVGVAPFADDSGKRTGQRHIQGGRMKLRNILYMATVGAATRHNPVLQARYRRLLENGKKPKVALIACLRTLLTILNAMVAHQQDWNPTRLPATEPVAA

SEQ ID NO: 374155 - protein, 474 aa, unidentified
MPLLGRNHNPTNMKSKTPKSKKKKQKVSVDQGWEAINPRAAGIDIGAREHFACVPAGATPKNVRSFGTFTADLSALADWFKECGVTSVAMEATGVYWIPVFQILEERGFAVILVNARQTKNVAGRKSDVQDCQWIQRLHTYGLLQASFRPEDPYCVLRTYLRYRDELVSARSTQCQHMQKALQQMNVQLTQVLSDVTGVSGRAIIQAILEGQRDPEALLSWVDVRVRATPARIKKALEGDYRPEHLFVLQQAFCLYGIYEEKIKACDQQIVRETAALSDKVDPQLKPLPTRKEGRPASKDKMQGQDMREVLYRKFGVDLTAIEGIGVTTALVILTEVGPNVTGFRTEKHFCSWLGLCPDNRISGGKVLSSHTRRVINRASDALRMAAVTLERSQSALGGFYRRMKGRLGAAEAITATAHKLARIIYRLIKHGEAYVRQGMEDYERKFRERKLHALRKTAISMGFNLIEQQQVAS

SEQ ID NO: 374156 - protein, 478 aa, unidentified
MAASNKKKNVMGAPAPLAGPAQPGGEATEVAEERVEVVTYAAAIDVAKASGMVCTRVPGSRSDRKRQTVWQVDATCASVIALMDHLRCEGIQRLVLESTSDYWRCWYYLAEAVGLEVWLVNAKDVKHLPGRGKSDRKDCVWLCKLNERGMLRRSFVPPEEIRDLRALTRTRSRLAQDQVRHQNRAGKVLEDALLKISGVISGLFGTSGRRFLDALVAGERSPAALAALGGRRLKASPQRLADALTGRFRDVHAFEIATHLRLIDTINDEIARLDERIEQQLAAIAGVAPACTACGLIGGGHAPGCASDGTPVLSLIERLDEITGVGVRNAQVIIAELGTDMSVFPTAGHAAAWARLTPRTFQSGNTTRPGRTGKGDPCLRGALGQSVMAAARTDTRTGEQYRRTARRRGKQKGIVAVSRVICEIAWLLISDRGARFTDLGPDYYSIRSPHSQTRSRIREIERLNPGLKVTLTPAATAA

SEQ ID NO: 374157 - protein, 408 aa, unidentified
MNAVGIDVSKGKSMVAALWPMGEVALAPREFLHTASGLDQMAHAILALGEDTRVVMEATGRYHEPVAAALSAYGIYVCVLNPLYIKQSGAGSIRKVKTDKADSLKIAKYGLDNWVDLREHTAMDTIRQQLKLCSRQYNIYMKTEVSLQNNLISLTDKTFPGVNELFSSPTRADGHQKWIDFVMIFWHRNCVCRISENAFTARYEKWCKRKGYHFRAEKAAEIYARSCELFVTLPKDDNTKLLITTAVQQLLAGKMTLAALRAEMTRLAQQLPEYDTVRAMYGVGETTAAQLMAEIGDVRRFPRRSSIVAFAGVDPAVAQSGKHEVQSTATTKRGSPHLRKTLYQIVCTYLRKAPVDEPVYQFLDKKRGEGKPYFVYMTAAQNKFLRIYYARVKECLEAFDTQQNTVQD

SEQ ID NO: 374158 - protein, 313 aa, unidentified
MHAEVFVGVDISKDRLDVYLLPDGVHIAVKNDAEDIASLITRLQEKDPKIIVMEASGGYEISVAADLGCAGLPVAIVNPRQVRNFAHGLGKHAKTDALDAYVLARFAETTEPPPQPLSTEEEKQLKELVTRRRQLVDLRASEKNRLHKARSTRVRHSIETVIAALDQEIRDIENNIDDFIKKSPLWREKEDLLKTFKGVGAATVMTLVAKLPELGELGRRQISRLVGIAPLNKDSGRMRGKRMISGGRADVRSALYMVASTARRFNPVIKCFYQRLEKAGKPFKVAIVACMRKILLILNAMIKNKRPFQAVSA

SEQ ID NO: 374159 - protein, 304 aa, unidentified
MNGIGIDVSKRQLDVGTTDGKTLQVSNSRSGFAELDLWLQGHPAVQIVLEATGGYEQPVLDFLYNAGHPVVRANALRARKLAQGLGHMAKTDRLDAYALAKMAALVKLRSYQPLEPWQREMRDFVRARRQAMHALTVARQQQEMVGNRELRRLLQANITCLQRTVERLGKRISEQVSKQPQLAVLKSMKGVGPGLQAVLASYLPELGKISGKAVASLVGVAPMSHDSGTMRGKRSIHGGRAEIRQVLYMASMSAMRHEPRLRDFYQSLRARGKEGKVAIVAVMRKMLVILNARMRDAQSGPIPA

SEQ ID NO: 374160 - protein, 415 aa, unidentified
MKGEGKSRDFRYIALDIHKYYSVVAGVNREGEEILPACRVEHFDLENWLPKHHLPTDRVVIESTTNAWHVYDLLEPLVAEVLVANPIKVKQIACARVKTDKKDTLILARLLAANLVPTVWVPPKPVRELRQLISQRRQLVGMHTQLVNRMHSVSHRHHLGHPKGKRFQEKDMGWRDSLGKMERFQLDLDLETKKFMKIQIDQITQELRCMSHQEPWASQMMYLMQIPGFGVVTGMTVLAAIGDIARFETPKALASYSGLTPGVEQSGVKLRGKRITKEGRREFRWAMVEVAQRAVKADPHWKRLFTELERRMHRNQAIVAVARHLLTVVWSVLSQGKSYRHYSDERIAYKYYTWSWQLDEAQRNGLTRPQFVRYYLMRLGVGADLQHVALDPKHPHRLASESEILEMMTDLQPPG

SEQ ID NO: 374161 - protein, 457 aa, unidentified
MVKSKCSVQGIGPSTKTTAQHCVRATYGSAIGVDVHAKQLVCCYQSSDGVDPLTHLPILKEQHAEFGTLRSELNEFAAWCLELKPEIILMESTGVLWRSPYEALEDVGFTTQELMLVNARDVKGIIGRKTDREDAVRLAQIARMGIIKASFVPPRIFREMRLIARRYQTLKKTTANLTNVYQKLLNAAGLRASSVFSDVRGLAATAILESKLNDAPDFAETVIERSARLKAPPEKIIDALDFEISDTMRAQLLDEKLLIERTQTHADAAMNRLRQLQKPYAKQIKLLMSIPGIKEDSARLIFAELCSDLKQQFPNSEKFCSWLGICPGNNISANKSHSGRSPKGNKWLRRTITECSQGIGLSHLCLRSRFEAFKLRRGKKRAVVAIGHLLCRIIYSVLVNGRMFKSVNEGDNLKNVLVQRLKSNLKNLRRQTPLVMCGNEMIERDTGGDHLRNACGF

SEQ ID NO: 374162 - protein, 342 aa, unidentified
MEKVSIIGLDLAKRSFQAHGARADGSVGFRKKLSREKVLGFFAEQPRCVVAMEACGSAHHWGRAIGDLGHEVRLIPPAYVKPFVKRQKNDAIDAEAIAEAASRPTMRFVAVKSEGQQARAMLFRTRDLLVRQRTQLINALRGHLSEHGVVAAQGPANVKVLEEAVEDQTTSLPLLVVELARVFLDQIEGLSKNISKLEKVTAQEATCGETTRRLQTMPGVGPITALAIETFAPPMDVFKRGRDFAAWLGLVPRQHSTGGKQVLGKISTMGQRDIRRLLIIGAMAVVRSTLRKGAPEGSWLQRMLARKPKMLVAIALANKMARSVWAMLAKGEDFRVPAVAAI

SEQ ID NO: 374163 - protein, 348 aa, unidentified
MAHFVGLDVSVKETSVCVVDDAGKVILEQPVPTEPADIIALLTSLGVSFCRIGIEAGPLSQWLVNALTAADLPVICVETRHMKALLTAQQINKTDRNDARGIAQMMRVGLFKPVHVKTLLAQQQRMLLTSRKLLQRKLLDLESDLRGTLRNFGLKVGGVSGSRYEARVRELVEDLPGLAAIAEPLLNVRRVMRQQFAVLHKMLLDTVRSDPVCRRLMTAPGVGAVVALTYRATVDQPQRFAHSRAVGAHVGLTPKHYQSGEIDYDGGVSKCGDALLRTMLYEAAHSLLICNRKWSWLKAWGVRVAQRRGMRRAIVAVARRLAVVLHRMWVDGSEFRWRKDSTAVPAVA

SEQ ID NO: 374164 - protein, 384 aa, unidentified
MHKEKHCAVVIDCWMEKIGEVNFENRPSKFPAFVEDIRKICGTRNFVFGLEDTRGFGRNLASYLTGRKFEVKHVNPAYTSAVRLSNPIAYKDDSYDAYCVARVLRDMVDTLQDAKHEDVYWAIRQLVKRRDMIVKNNVMNKNQLHSQLSYSDPSYKKLFAQVDGKSALCFWENYPSPEHIWSTTPEKIYETIKPVHQALKIERIHAIIDMIKKDGNTQKGYQEERDSIVRNIVKDIKNNQELIKDIEEQLRKLLPQTGYKLQTMPGIDLITESKIVSEIGDINRFPDSDKLARFMGLAPVHFSSAGKGRDERCRSGNRELNAIFHFLAIQMVVISPSGKPRHPVFREYFEQKVKEGKNKPQALICISKKACKDNLRYDEDKDRV

SEQ ID NO: 374165 - protein, 341 aa, unidentified
MQPKFIHFSGIDVSKNWIDTCILINGDRSMFHHERFEQSKSGFNELRKWLIKLMGKQTDQLLICVENTGLYDDALLYFLSDKGFTVCLENAAKIKASIRDRRSKNDQLDARNITLYALHHTDELELWQKPRAVVEKLKQLLAARSTLLAHLTSIKQAQKETQVFDWYKIKKIKNYQAGIKGLQKDLEQIEADIWKLIKSDEQLYKMFMLIISIPAIGKITAWHFICYTNEFKRVKSGKNLSSYCGVVPFRQKSGTTLNKPGRISHEANKVLKKLLHLCALTALKMKGEFAAYYQRKTEEGKHALTVINAIRNKLALRIAAVIRNQEPYNENYSYHLSLEKP

SEQ ID NO: 374166 - protein, 362 aa, unidentified
MYIGVDTHKKAHVLVAIDDQGQTDGTHTMANTPSGWAMALRWARDLDATCIWGIENSGSLGKGFAQFLLVHGEAAVHEIVPHRTAQYRKRGRSQDKTDHTDALAMARLLRAEIEFLPSVQHDDVSTELRLLSDHRDNLIAERTRLINQLHAQMLQIDPCYEEKSGALTSIAGVRYCGDLAVPHADGVLQTRLLIVRQLVGQILQLAEAIETVETALKQRVEATETALVQLCGVGTIVAARLIGELGSVPRVHSAAALAALAGIAPVAVSSGGKGGHRLNRGGNRRLNRAFHMIALSQLRCEPLARAYYAKKRAEGKTGRAALRCLKRRLVDVVYRLWGKGDGERAGDIPTRMTDPVVRRSAA

SEQ ID NO: 374167 - protein, 343 aa, unidentified
MQTITTIGLDIAKSVFQVHGVDAGGQVIIRRQLKRRYVVTFFQKLAPCLVGIEACGSAHHWSRELQALGHTVRLMPPAYVKPYVKRQKNDVTDAEAICEAVTRANMRFVPTKTAEQQSGLVLHRARHLFIRQQTAVINAIRAHLAEFGIVAPVGRHGVEELLNVVANPNDKRVPEIARACLSAFGAQLRRIKEQILEFDRLIRAWHRSNEMSMRLDEAPGVGPVLATAVVATVADPKSFRSGRNFSAWIGIVPKQHSSGGKNRLGNISKQGDRYLRGLFVAGALAVIRYAKIHGTKHRPWLTALLARRPTKVAAIALANKIARMVWAMMVKGERYKEPVALAR

SEQ ID NO: 374168 - protein, 383 aa, unidentified
MTSSNIRYVGLDVHKRLVEACFVDQAGEVLLRRRFPLNRDTLELFASGTLRPTDQVALEATTNCWAVADVLRPCVARVVVSNPLATKAIAQAKVKTDKVDAYVLAQLLRCEFLPEVWPPDEATRLLRELTGRRAALVRQRTALRNRIHSVLAMRLIEAPTRLFTAAGLLWLRQLELDDQARLLVDSDLRQLEFLQKEIDALDAELAQRGYQNDSVKLLMTLPGVDVAVAEAMMAAWGDAKRFPDGDHAASFLGLVPSTKQSAAHCYHGPITKQGNSHARWMLIQAAQHLGQHPGPLGHFFRRLARRKNHNVAVVAGARKLAVIGWQMVVTGEPYRYAAPRTTETKLARLRVKATGQRRRSGPAKGHQVRGQAARRQPHHQAAG

SEQ ID NO: 374169 - protein, 362 aa, unidentified
MAQVCSWVALDVHARSVLAVSVDASTGEMGTRRLPATTSEVVAFCASLRGPTRAAYEAGPTGYGLARALEAAGIGCIVAAPGKIERPSSDRVKTDERDARRVLRLLMIDGLHPVRVPSSQEEGLRDLVRAREALRGDLMRARQRLSKLLLRHDIVYEDSASTWGPRHRAWLTKIDLGRQGAQATLLDHLGAIDALVIRRDGLEAQIGELVAASPWAQTAARLRCLRGIDTLSAVGLCVEVGDFERFDRAGRLMSYLGLVPSENSSGESRRQGAITKTGSRHARRLLVEAAWHYRKTPARGKTLQRRQDGHSAVVVAIAWQAQQRLHRVWRRLDGERAKRRTIVAVAVARELAGFCWAIARAD

SEQ ID NO: 374170 - protein, 346 aa, unidentified
MSGFTIGIDIAKRVFQVHAIDHETGEVTSKKLTRGEFLAHFRKLPPSHIGLESCGSAHHWARELSALGHDVRMMNPMYVKPYVKRGKNDAVDAEAICEALTRPTMRFVPLKTIEQQSVLMVHRTRALLIRQRTMLVNALRGHLSEFGIVAPLGIERVPELIDRVLGREGDEFGTTPLVRSIVVMYAEQIEKIKEQIRKLERELRVWHRTSEASQRVASVPGVGTITATALVAAMPDSSAFQSGRAFAAWVGLTPRSSSSGGKERNGRITKAGDRHLRVLLVLGATSVLRRVRAGQPTPLYGWVKKLLDRKPPRLATVALANKMARIAWAVMARKMNYRPELAAAVG

SEQ ID NO: 374171 - protein, 337 aa, unidentified
MIAVGVDTHKYQHVAVALSELGQLLGEVVVPATMAGYCELVTWLAGVGGDVVVGIEGAGSYGAGLCQHLQAAGMCVVEVERPRRRDRRAGKWDRLDALLAAKRVLVNDGISTPRASGSRSALAALLVAYRSCVEERTRLLNQLQGLHVTAPVALRERIGRGNGDRLAARLVVMRTRADASMQEHTLLAVLRDLARRARQLDADAGRYRQQITELVRLLDAGLLEEPGVGPISAAKLLVCDPARFRGEAAFARCNGTAPQPASSGQTIRHRLSRGGDRQANNAIHTIAMSRSVNHAETRAYLERKISQGKTRREAMRSLKRHLSRRLYKRLATVPLTP

SEQ ID NO: 374172 - protein, 347 aa, unidentified
MKFYTQTHKYYCGIDLHARCLYVCILDQDGDPLVHKNINASPDALLKIIAPYREDLVIGVECMFSWYWLADLCRDQQITFILGHALYMRAIHGGKAKNDKIDSQKIAILMRGGMFPEAYVYPREMRGTRDLMRRRIHLMRKRSELLAHVQNTNSQYNLAEIGKDLRQAANRAGVAERFHDPSVQKSIELDLNLIGFYDQQLKKVEWHILKHARACDQQSLLLLRSVPGIGRILSLAMLYEIHTIERFATVQDFASYCRLIKCRKESAGKSYGTSGRKIGNAYLKWAFSEAAVLFLRQNPQAQDWLKKLANKHNKARALTILAHKLGRAVYFMLKRKTLFEQQRFLNS

SEQ ID NO: 374173 - protein, 344 aa, unidentified
MTTIKYSVGIDIASSTFTASVGEIPWKVVLKPETFDAKRTEDGYQALLVWFAQHHLPVSEMVVCMEATGVYSEGLAYFLYAKGYQVAVQSPLEVKRTFKPYGPKSDAVDSLQIAEYACRHTDKLSFWKPRSEILEQVKALLSVREQFVSQNTAHKNALKAIQRKVVRTPFAEQAYLQLIEQVNKQIQAIDTEVRRLIENDPTFKEMLLLLLSVPGVGLLLAAHFILLAQFSLEYKVLASFLGVCPNEHSSGTSVFKHATSRHFGPSAIRKLLYLAACSVCTHRPQFGMYLARKTKEGKPARLVLNNVENKLVRIMCAVLQSKTAFIENYHSVQPLAFQKTLTAS

SEQ ID NO: 374174 - protein, 337 aa, unidentified
MEFKRIAVDTSKSVFTVHGVDEQDRPILRQNLTRAQFEKFLGKMSPTEVVLEACGSSHHWGRFLQGLGHTVRLIPPQYVKPFVKRGKNDRNDAEAICEAASRPTMRCVPVKSANTQAEAMDLSVRDLLVRQRTQLVNAVRGHAAEFGIIAAKGIAQVEPLLQKITETDMPQAAKDTLAQLGRCIAQLDTQLAEITQRLTTRHKTNPVSQRLAAIPGVGPITALTVAAKVDAGQFESARHFAAWLGLTPRERSTGGRQCLGGISRAGNERLRQLLVVGAMAVIRHAKPGSKTASPWLLTLLERRPRKVVAVALANKMARTLWAMMTNRTAYRRTPQVA

SEQ ID NO: 374175 - protein, 469 aa, unidentified
MICSVGIDLHQGQHRARCLDDRAQPCDGFSFQTTPEGLATLEERVFRDGANPVIVLEPAGLPWLMVAVYLRTRHPDCRLVKARTQKVAALRRYLRGPVKSDRLDALTLAKMPFIDPEQLDEIYLPPAEIHALQRLTRQRKRLESDVSGRKIRISAIIDGYLPGVRRAFDDAWSSPFRVFLRSRISPFCVVREGEEALHAYLSKASPRSRWSRVQTRQVFLACQSVAAVCELSAAAGTVNEEFFLNLQDEIARELRMMEMDEAESESLAHRIDGLYRKLHPSDNLCTIPGVGEHTAPIFLASVGDPARFRNQSAFANWEGVVPGARQSSNVEAKGLRMTKAGPSIMRMALFQAGDIGRRWDPQLASVYYRQMVYHGKNHRQAMGAVMSHLGARVLRVLKEDRPYELRNIKGKPIDKKEARKLILSQYHVSEAIRRERRRRNSRNRRRRLISGDSDLQDTRGSRAPQPIQA

SEQ ID NO: 374176 - protein, 347 aa, unidentified
MIYCGIDIASKSSYVYVTNAKGRKLTAGEVPTTKSGFEDRLKRYVARGLRIAIEAGNQTAWIYEALTEMGAKVTVVNPTKVKLIAESRCKTDKIDARILCELLRIKALPHPVHMPGKKARSLRGLLVARRQLVSARTKLSNVVRGMVRQEGIILQRGALSSFKGWQRLMGDGFDQPHLLAVVSAYYDSFASLTRSIRELDRELADRESKEKRAARLQTIPKVGRIASLTFLAAVDNVKRFRSSRKLVGYSGLAPTVRSSGERTEYGSISREGRRELRAVWVQIAHLVAADTSRATQPLRTWFNRVAKRRGKKTAIVALARRLLIIAYHLLRDETVYEPARLKRKRAA

SEQ ID NO: 374177 - protein, 343 aa, unidentified
MKILKQVIGIDVAQKELVVCLGGLDQELTINIHSRKTFANTNKGFQALLAWKIKLTDPNVITRFVMEPTGVYHESLAYFLTDQSEEVSIVLPNKISNYFKTLEVKTITDFTSAEAITRFGLERKLDAWQRPKPIFKTLRQLSRERDQIVQERTMVKNHLHAEQAEGEPNKTSLIRLEKRIAFLNKQEKQINDEITLIVKKDEQVRQSVKTITSIPGVGILSAVVILSETNGFELIRSKRQLSSYAGLDVRDKTSGTSVKGKPQISKRGNRYLRKAMHMPALVAIRSDGHFKDIFVRLVSKHGIKMKAIVAVQRKLLELSYTLFKTNTPFNKTLVSIQPIEAQV

SEQ ID NO: 374178 - protein, 428 aa, unidentified
MSNQELIRRKQYCQIVKEITGSDQYMVVGIDIGKDQHHAFMGTATGKSLFRKLIFENNIDGFSRLLKTADEIKLQNDFSKIVYGLEPTGNYHKPLARHLIRCGSNVVLVSGEAVKKNRSLLDGRWDKHDTKCAANIADLVSRGRCLYYDSPSPEIIELRSLLSLRKRLKREEHSLRMRIRNNLLTQYFPELDRFYSACESESLAIVKWCLDPDQIAGMAFEPFFQMVTQIRRGPAQLLRLRKIYQQASESIGCPMGSAAAFEAQLLVDKLKQVRQQLKDTEAAIKEDALKFEEYSCLLTIPGFGPYISAKVLASIGDPFRFRNRKQLIKMAGYDLCANRSGKTSDKAIPVISKKGNSELRYALYQAAKVASTKVDLFRTYFTELLRGRERERGIKTKMCVKLAAKMLIIAWTLMKKKEPFDPEYLTIG

SEQ ID NO: 374179 - protein, 411 aa, unidentified
MEVVHARCAGLDVSKKDAKVCVRVAGAGRRKTVETVTTWSSMTNQILALRDHLIAERVTCAVMEATGDYWKPFYYLLEDAGFEVVLVNARHVKNLPGRKTDVSDATWLAQLGAHGLVRGSFVPPEPIRQLRDLTRARTAITRERGREAQRLEKLLEDAGIKLSAVASDVLGVSGRAMLDALIAGDRDPGALADLAKRRLRSKIPALTEALTGRFSEHHAFLARVHLDLIDHHTHAIEELTKRIEVLMEPFRGFHTLICTIPGIGSLTADVIVAETGADMTRFPTAKHLASWAGTTPGSNESAGKVKSSKTRPGNPYLQGALGAAAMSCSQNPRTYLGARYRRIATRRGPQKANVAIQHSMLTAIWHMGTTGTLYDDPGGDYFTRLHPDRAKNRAIHQLEAMGYRVTLDHAS

SEQ ID NO: 374180 - protein, 417 aa, unidentified
MSQPFLFFVGIDWATEKHSVCVLDREGNKVAECQAVHSGTGLQQLVDWLRQQTGVAPDQVAFGIEAPAGAVVDTLLEHSYQGFHINPKQMDRFRDRHTVAGVKDDSLDAYVIADSLRTDRPCFHPIQTDDPQIHRLRTLSRLEDDLGQDWSRLTNQLRQQLHRYFPQMLELSPAADEPWMWELLQTAPLPVMARKLRCSQVQKVLTRYRIRRLSAQQVREQLQTPPLPVAPGIAEAASEACLLLILRLHLLAQQRKHVAQCMKAILAGLAEDSHRKEHRDVQVLSSLPGVGRIIAATMLVEAAQPLANRDYHALRAYGGVAPVTRQSGKRKQVIMRYACNHRLRNAFYHWARVSLQNDDRSRAHYHGLRKKGHSHGRALRGVADRLLAMLVSMLRSGTSYDPQRRSPNQFAAEPLAS

SEQ ID NO: 374181 - protein, 395 aa, unidentified
MEFLKYGLGIDMAMEKFDACISIIDKLQHVMIRSQCSFNNNKKGFEAFILWVTKNTELAIPAVYLMEATGIYYEQLAWFLHNKNCSVSVVLPNKAKKYKDALGLKSKNDRIDAKGLAQMACEQNNTTWKPLTSNIYLLRLITRQIQNVSEQSTALKNQLHAMEYGMYRDKAIEKMYAGQLNLLQKNKKSLQLRVEQIVEKDEILKRKFKHIGKIKGLGLQNLAVIVAETNGFTAFENVAQLVSYAGYDVVENQSGKRSGKTKISKKGNNHIRRCLHFPAFNMIKYEVAPFKNLYERVYAKNKIKMKAYTAVQKKLLEFIYILWKKDEAFDPNYQDKKSRDVEPVSSFASVPQEPSIACGNKETKLKFIKQKITPAITRVTQDKHPSKYRRMPSFA

SEQ ID NO: 374182 - protein, 344 aa, unidentified
MLFIGIDVHKAKWVVTIRTYDLELRTFALNPSAEELERFLLKNYPGAECRIVYECCFSGFWIYDYFSEKGYSIIVTPTNRIYKDGNTIKTDKIDSRKLAFQLSRGLLREVMVPAKKIREYKYIFRIYDKQKMRKGQILRQVKAILEQKNHPLKWEKWNKGLVEKLKLLTFEDKLFDLKFGNLLKEYEYVVSQIKDSEEIIGKIKEDEILGQRITRMENINGIGIISSVRMSVYLFDRKDRFDSSEKLNHYLGLTPSERSSGEKVSRGRSGMCGNRQLRSIIIQLAWKTVRKDGALLDKFDRVYKKSGSKQKAIVAVARKLMTKLFAIIQKEEEYRINTKTVQAA

SEQ ID NO: 374183 - protein, 340 aa, unidentified
MSEITTIGLDLAKHVFQVHGIDAEGTTVLRKRLRRNQVLGFFSRLPRCVVGLEACATAQYWARELGALGHEVRLMPAQYVKAYVKRNKNDAADAEAICEAVQRPTMRFVPIKTAEQQAAQLLHRGREQLVRQRTMLVNALRAHLAEFGMVAAQGLRNVAQLIAIVRDAGDLRLPDVARQVLQVLAAQLEHIEAAIAALEKQLMAWHKANAVSQRLASIPGIGPIIATAIATTVADPGVFRSGREFAAWLGLVPRQNSTGGKTRLGGITKRGNRYLRRLLINGASANLLRSKATKADPWVIGLRRRRPPLVVAVALANKTARIAWAVMLRKTEYQPRAVAA

SEQ ID NO: 374184 - protein, 438 aa, unidentified
MLKVIHPNAGGLDVGAEEVYACVPEDRDAQPIRRFGTTTPDLHELAKWLVGCKVDTVALESTGVYWIPIYLILSDYAIEVQVVNAQHVKAVPGRKSDVKDSQWLQELHSVGLLRGSFRPPDDIVILRSYLRHRDSLIEHRAVHIQHMQKALVQMNVQLTQVLTDVTGVTGMAIMRAIARGEQDVDTLLGFRNARCGHSPDDFVKALTANYRVEHVFALKQSLVLYDAYTDQIGLCDAEIARHFAVIKPSHDQDDLPPLDDSRKRNTHSKNAPHYDARGQMYRITGVDLTEIDGLHDSTAQTILSEIGTDMSKWKSAKQFAAWLGLAPRNDITGGKVKRSRTLHGNRRANQAFRMAAQAVGKTRTALGAFYRRRRAIAGPQQAVVATAHKIARIVYHLLKHRQPFHPVSAADYDQLQLDRERISIQRRASKLGLKLVPA

SEQ ID NO: 374185 - protein, 347 aa, unidentified
MRFYTKQHTAYCGIDLHARSMYMCILSQNGEIVLHRHMKTSPEMFLKAIAPYREDLVVCVECIFTWYWLADLCAREGIPFVLGHALYMKAIHGGKAKNDKIDAQKIAVLLRGGMLPQAYVYLAAMRATRDLLRRRTHLMRKRAELLTHIQQTNSQYNLPEIGKKIAYKANRDGVAERFPDPAVQKSIEVDLALIGHYDQLLRDVELSILKTAKQHNAQTLYLLRTVPGIGEILSLVLLYEIHDITRFPRVQDFLSYCRLVKCTKESAGKRYGTSGTKIGNAHLKWAFSEAAVLFLRANPAGQKYLTKLEKKHGSGKALTLLGQKLGRTVYYMLQRQTAFDMDKFLNG

SEQ ID NO: 374186 - protein, 273 aa, unidentified
MLSFCGIDVSKDRLDVMVLPDEYSSSVPNDPAGWAILVEQLRGFSITAIGIEASGGYERGAVRSLQAAGMPVRQVNPFKLRQFAKASGVLAKNDPLDARMIASFVGIMPTRPAQRTTPAAEQLVEMLAVRRQLSAEKTAAENASRLLEDLMLQRLSRRRIARLAADIELLDKRLVEIVATDATLAHRYRLLTSMPGVGPVLACTLIALLPELGGMSRKQVAALVGVAPYAFESGTLKGRRCIWGGRANVRQVLYMAAMSASNGILRSNSFTIV

SEQ ID NO: 374187 - protein, 362 aa, unidentified
MALRARHRALVVASVFHQPEQLLGAIEPVFCKAGEGELNFVSTKANKKRRSFIGIDVSKKLLELGVHQSDFHFSCPNDPKSFPLLISELISLRPARILLEATGGLERTLLQALRAVGLPVVVVNPRQVRDFAKALGLLAKTDRLDARVLAHFAASIQPPLRPLKSQDETELDALVGRRTQLSDMLAAEKNRRGSAATKTTRDDIEEHIEWLEDRLKELDEKLKQQLECSTVWQQKNKVLQSVKGIGFVTSLSLLADCPELGQLNRHQIAKLAGVAPLNRDSGQQRGVRHIWGGRAQVRNKLYMATLAAIRFNPVIRAFYQRLLDRNKHKKVAIVACMRKLLTIINVMVRENNLWDVKEPVSA

SEQ ID NO: 374188 - protein, 337 aa, unidentified
MKVTLIGVDLAKTIFQVCGVNQAGKKVFNRQLRRSKLLSFLLQHPEVTIAMEACGGSNYWGRALEKRGFTVMLIPPQHVKPFVKGNKNDRNDAFAICEAARRPAMQCVQPRSLAQTDTMLVHRILARRISERNALINQIRGLLNEYGEVVARGKEKLRDGLPLILENAENELTETARYYLNQQLLEWRELDLAIAELDKTIAHQVKHSEQAKRLTQIKGVGNKISSALVAFIGNGSGYRNGRHFAANLGLVPKEHSSGGKQRLGRITKRGNAYLRWLLVQGAWSVIRYADRSDDRLSRWVKQLIERRGKHKAAIAVANKLARISWAMSYHQTEYRAN

SEQ ID NO: 374189 - protein, 352 aa, unidentified
MRAHNINLSDGETIFVGVDIHNRQWRVTIRITEVELLSASIPGDWESLRRLLERYRGHPIEAVYEAGYFGYWLHDRLLEYGAGCIVTPPSLLPQESGNRVKTDKRDSRKLALLLAKGMLKRVHVPTPHEREHRGVVRRRRQLVRDRVRTQNRIKAELRFYGIRLPEVTGRWSKLYVENLHRIRFSTRWQQESFASLLDQYAFFTEQIERQTKSLRALAETDTYRERVKILRSIPGVGLIAAMEMLLELQDVARFRRADQLAAYVGLTPSQHSSGDTVRMGRITRSGKNSLRGTLVEAAWRMVSRDGRVRRQYEQIKARAGAKRAIVAVARKLLLRARRMLLDGRAYVLEQAA

SEQ ID NO: 374190 - protein, 326 aa, unidentified
MNGSGRVISNERFLSTQDALDKFLDRFDKAKFVLESTGIWEFIYEGIEKKGFEAVLAHPLKVRAISEAKVKTDKVDAETLAHLLRADLIPRSHVPPRDIRNLRQLVRHRAYLVRQCTSIKNRIHAELLRRGIRRPDDLKKTFTFKHVGWMRSLGILTVTSSLNCLEGIQAQIREVESFLLAEYNSRRDAQLIATIPGIGFYGALLILAEIDDIHRFSHPEKLCAYAGLVPTVHQSASRSYHGGITKNGSPHLRWVLIEAVHVHTNYCPGSKLSRFHAKVAQRRGKQRATVATARKLLHTIYWMLLTKEKFHCQGFNLVEKAATLIA

SEQ ID NO: 374191 - protein, 330 aa, unidentified
MYLGIDTHTRYSQVAVVDDDGNLQDEIRLPNDRLDELAEQYAGGEAAIEASGHYRPVYEMLDEHLGVTLVNPSKNRVIADATVKTDRIDAKRLAHMLRADMLAESYVPSDEIRELRDLVRTRKSLVEERTAEKNRVRAVLKRTDNAYDSELFGPTGREFLAELSLSTADRTIVEAHLSVIDEYNAQIDRLEDLIEQKVLESPAAQRLLSIPGVGQSTAALIVAEVGEIERFDRHEELVSYAGLDPMIHQSGETEVQGSISKEGSAPLRWALVQCAHVSVSYDDYLGNFYTRLKQRKNHQIAIVATARKLLVSIFYMLKRQETYDPPEVSA

SEQ ID NO: 374192 - protein, 367 aa, unidentified
MTIVAHAHPFVVGVDTHAKNHALSILATPAGVQVDDGEFPTTAAGMARAIDWVARRTGGDLAVLWVIECAASFGSQLAHAVTAAGYQVVEAARMSAKANRGVGKSDPLDARRIAAAVLPLELDRLRHLRKDDGVRVGLRVLIAARDHMTGERTATVNALIALLRVLDLGIDARKPLTAAQIIEVSKWRTRTEDIGAAIARAEAVRLAKRVIVLEAELAENTKTTTDLLRRSPARVLLDKPGIGPVTAAVAMAAWSHDGRLRSEAAFASLAGVNPIPASSGNTVRHRLNRGGDRRLNQALHMAVVVRMRMDPATKAYVERRLTEGHTKKEIRRCLKRYLARQIYRTLTAVTRADEALAAVTSATPIPA

SEQ ID NO: 374193 - protein, 407 aa, unidentified
MRLFAGDDWAEDHHDVELMDATGQVLARRRLPEGVAGMARLHELTGAHLGDDPDAAQVVIGIETDRGPWVAALVAAGYGVYAVNPLQASRYRERHGVSGAKSDAGDAHMLADMVRTDSHQLRAVAGDSPDAEGIKVLARTHKTLIWERTRHIQRLRHQLREYFPAALEAFDDLAAPDALELLARAPDPARAARLTRAQVSAALKRARRHHIADKAAAILAALRGEQLGQPAAVTAAYAATVRSLIAVITAVSEQVSTLQGQVGAHFGRHPDAEIYRSQPGLGPVLGARVLGEFGDDPHRYADGKARKNYAATSPITRASGKKKVVAARFIHNDRLVDALNAQAFAALNASPGARALYDDLRTRGIEHNDALRRLANRLVGILHGCLKTRTLYDEATAWSHRENKLAA

SEQ ID NO: 374194 - protein, 408 aa, unidentified
MNAVGIDVSKGKSMVAALRPMGEVALLPQEFLHTEVGLEQMAYAIVALGEDTRVIMEATGRYHEPVAAALHEYGIYVCVLNPLFIKQSGGGSIRKVKTDKADAMKIAKYGLDNWVDLREYTPMDTVRQQLKLCSRQYNLYMKTVVSLQNNLISLTDKTFPGVNELFSSPERADGHQKWVDFVMTFYHCDCICRVSENAFAERYQKWCKRKGYHFSAEKAQDVYLGSCGHFTTLPKNDNTKLLITTAAQQLLAGKMTLAALRTEMTRLAKQLPEYDIVRAMYGVGETTAVQLMAEIGDVRRFPRRSSIVGFAGVDPAVDQSGKHSAKSVPTTKRGSPHLRKTLYQIVCTYLKKSPVDEPVYQFLDKKRSEGKPYFVYMTAAQNKFLRIYYARVKECLEAFDAQQDTSQR

SEQ ID NO: 374195 - protein, 357 aa, unidentified
MGKSIQKLSSVTRVGLDLAKRVFQVHAVDANGEIVVARKLDRGRLVSFFSELPRCVVAMEACPSAHHWGRQLLALGFEVRLIPPAHVKPYVRRNKNDAVDAAAICEAAGRPGQRFVPVRSVENQAELMRHRVRELLAGQRTAALNALRGHLTEIGVVAPQGARHAYDLKRLAVDGFDEYGEVVVPDCVRVALRPLVSQIEALDEAIGAIDKEIAMSVKADETAKRLMTIPGVGPVTASAIMATIQDMGDFASGREFAAFLGLTPRQSSTGGKPRLGRITKMGDRYLRKLLVVGACATLRHRKGHNDALRLWASGMLERKTVKYKFKLTAVALANKVARIVFVLMRRGGQYDGRPVAA

SEQ ID NO: 374196 - protein, 355 aa, unidentified
MSSEKYIGLDVHQATICVAVMDAKGKVVMESILETKATTILEFLAGLRGTLSVTFEEGTWAAWLYDLLKPHVANLVVCNPRKNALLKHGNKSDKIDARKLANLLRLNDLEPVYHGETGVRMLRELARSYLTIVKDVSRVMSRLKAIYRSWAIPCAGRDVYYTRHRGEWLGKIPEAGSRRRAEQLYQQLDMLQPLRQQARRELLAESRKHTITAKLRQIPSLGPIRSALAVALIQTPHRFRTKRQLWTYSGLGLETRDSGEYHYVEGQVRRRKKQVFIRGLNKDHNHDLKGLFKAAATRASVQPGPFQDFYQRSLAKGIQPTMARLTLARKIAAITLTLWKKGENYDAEKLKAQAA

SEQ ID NO: 374197 - protein, 365 aa, unidentified
MASVAYLAPIHLGLDVHKDTISVGILDPDQQVPDVDRIANDEPSVRRLLARFPDRARLRACYEAGPTGFELARLLHRMDVRCEVIAPSLIPRAPGDKVKTDRRDCRRLARLHRAGELVAVRIPSPAEEAVRDLCRTRADMVQDLTRARNRLGKFLLRHGRPWRGGSTRTHAYQAWLRAQRFDQPAMTQTFGHYLAVVEVRNQALDAVEADLVGWCARPPFAWQVARLAAYRGITRLGALTLAAEVGDWRRFASANAFMGFCGLVPSQYSSGNRVHRGRLTKAGNAHLRAQLVESAWSYQHRPSVGAEIARRQQGLDPAVTARAWAAQQRLSGRFRRLAARKHTKSIVAAAIARELAGFLWAEMTA

SEQ ID NO: 374198 - protein, 336 aa, unidentified
MTPVNAPAEPSQGAAAAGDGIFVGIDVSKAELDVARSDTGSTVQAFANDPAGIAELVRQLSALRGRVRLVLFEATGGLEGPLAAALLDAALPAASINPTRARHFAIGIGVLAKTDPVDARVLMRCARQGQHRLLAKRGERRAELEALVTCRRQLLHVRTEQTNRRGTTSNKAALPAIDAVLKTLDRQVLGLNRQVEKLIESDDDLDRDSKLLASVPGVGAVLCATLLSELSELGTLGRRSVAALAGVAPFPDDSGPRKGKRRIRGGRASVRNVLYMATLAAMRFNPVIRRFAERLRSAGKVNKVVIVACMRKLLSILNVMLREQLTWDELRLVKNA

SEQ ID NO: 374199 - protein, 410 aa, unidentified
MRMAGIDVHKKVLMVVVVEASMPEEKPVRRRFATMPSELQRFRIWLQQQGVEEAVMESTAQYWRSVWLELEPHMRLHLAQAFSNRAPRGRKHDFKDAERLVRRLMADELILSFVPSGEQRIWRSMTRMKLQLTRDRVRLQNQMECLLEEMRIKLSIVVSNLLGASGLRILHALAKGETDPKQLAQLGDERLHCTEEQLVDALTGRVQGMHREMLALQLERLQLIDQQIAQLNSMIAQAMKAHQDAVIRLAEVPGLGVDSAQQIIAEVGAQASTFPSAAEFTSWVGTCPGKEESAEQNRSSRSAKGNKYLRRVLNQAAHAAVMKKGSYFQSVFRRLLPRLGYQSAVWAIAHRLCRLVWKILHEGVRFVERDCEADPRAKKQRAQMLVRALRKLGYEVTITPINQVSATNAI

SEQ ID NO: 374200 - protein, 355 aa, unidentified
MDSTKYIGMDVHKETISIAVLNSSGKLVMETIIETKASTLLQFVQGLRGSLHVTFEEGTWAAWLYDLLRPHVTKVVVCDPRKNALLKTGNKSDRIDARKLAELLYLNKLKPVYHGEHGVRALQELSRSYLTISGDLARVMTRLKALYRSWAIPCAGKQVYAPRYRSEWLGKITEAGVRRRAEFYYQQLDALRALRQQVRRELLAESAKHKASKLLCQIPSIGPIRAAQLIAILQTPHRFRTKRQLWAYGGLGIETHSSADHRYVEGQLRPSKRPVSLRGLNRNHNHELKNIFKGAAIIAATKAGPFQEFYAALVAKGIRPEMARLTLARKIAAITLIVWKKGVCFDAQHLKPQTA

SEQ ID NO: 374201 - protein, 400 aa, unidentified
MDQPLWAGVDAGKSDHYCVVIDADGKRLLSRRVANDEAALLELINAITALADGGELTWAIDLNAGGAALLIALLIGAEQRLLYIPGRTVYHASGGYRGEGKTDAKDAAVIADQARMRRDLQPLRPEDDIAVELRILTSRRTDLVTDRTRAINRLRAQLLEYFPALERAFDYSASKAALILLSGYQTPDGLRHAGAARLAAWLRKRKARNADAVAAAAIEAAKSQHTVVPGQQLAAAMVARLAEEVMTLDTEIGDTDAMIEERFRRHRHAEIILSMPGFGVILGAEFLAATGGDIAAFGNTDRLAAVAGLAPVPRDSGRISGNLKRPRRYNRRLLRACYLASHIAIRTDTASRIYYDRKRAEGKRHTQAVLALARRRLNVMWAMLRDHKPYQPTAPNAAAA

SEQ ID NO: 374202 - protein, 355 aa, unidentified
MDSKKYIGMDVHKESISIAVMNGAGKIGMECVIETKASTILQFIEGLRGDVQVTFEEGTSAAWLYDLLKPHVTKLVVCDPRKNASMREGNQSDKIDARRLAELLRLNHLSPVYHGEHGLRSLKELVRSYLTITKDLVRVMTRVKAIYRSWAIPCTGKQVYAPRHRAEWLGKIGERGVRRRAEFYYQQLDALRTVRQEVRRELLAEAKKHQAWKWLCQIPSIGPIRAAVLLGILQTPHRFRTKRQLWTYSGFGIETHSSADHRSVDGQLKRVKKQSSIRGLNRNCNHDLKNLFKGAAIVASSKPGPFQEFYTALLNKGIRPEMARLTLARKIATIVLIVWKRGACFDAQHLKPQTA

SEQ ID NO: 374203 - protein, 345 aa, unidentified
MHIASIGIDLGKTTFHLVALGERNKILLRKKFSRTQLLAYTANLPASLIGLEACAGSHFVGAALREQGHQVRLIPAQFVKPYRKSNKNDFIDAEAIAEAVSKQNMRFALLKTQEQLDWQAMHRVRDRLVHRRTALINEIRGFLLERGITFAAQPIHLRKNLPAVIEDAEQNLSPRLRWLLDRMWQEWKQLETDIETITDEIERISHEDARCRQLRQIPGIGPLVSTAIVAAIGNGAAFRRGRDFAAWVGVVPRQYSTGGKQKLYGISKRGNVYLRRMLIHGARAVLFRVKFDTGGFGQWMRRLAQRAPSNKVVVAIANKLARIAWAVLSSGQDYRHQPLEQRAAA

SEQ ID NO: 374204 - protein, 394 aa, unidentified
MNRWRCPVVRVNDLSRSAVAFEQSTTLVVVVEMGAKSWLAAGNVPGVERQPMKKLEPDAAALLGLIERWRGEAIKAGQTIRRVVLAYEAGRDGFWLARWLIARGIEVHVIHSASVAVSRERKRAKTDRLDAAMLMRVFLGWLRGERGHCGMVAVPTLEEEDARRPSRERESLVNEKSRITNRMKSALARLGIRGFKAHLRKAAQRLEGLRTPEGTGLPPNITEEFRRDMARLALVREQIAAIEKARIERLQRAPNTGPNLMVRLLARVIGIAIETADMLVREILSRNWRDRRAVARYAGLTGSPDESGTKRREKGLTKAGNARVRRGLIQLAWRFLQFQKESALTKWFRSRTEGPSGVRKTTMIVALARKLLIALWRLVTTGEVPEGVVLRPAV

SEQ ID NO: 374205 - protein, 312 aa, unidentified
MNHSSSTPYVGIDVSKSTLDVAVGTDGEYWQASNHQQGIHKTIARLLLLQPALVVIESTGGLEKALITELYKAELPFALVQPRRVREFARSIGLMAKTDKIDARLLARFGEAVKPPLTRLPSEAEQDLNGLMVRRRQLLDMLVTENNHLSTTALSLRAKVEEHIAWLNKELEELDREIDDQIQMTPQFKEKAKILRSAKGVGPILSAKLLSAVPELGTIDRKKIAALVGVAPMNFDSGKKRGYRKTKGGRTEVRSVLYMSTLVATRYNPVIRAQYQHLLKRGKEKKVALTACMRKFLTILNAMLRDQQPFRG

SEQ ID NO: 374206 - protein, 349 aa, unidentified
MEHYAGIDVSLELSSVCVVDAKGKIVKEAKISSDPVALVTFFRGLGIAIERIGLEAGPLSQWLHAGLTQAGFEVVLLETRHVKAALSAMTVKTDRKDARGIAQLIRMGWFRPVHCKSVGSQEVRALLVGRKLLLGKLLDVEFSIRGILRGFGLKMGVVTRRNFEARVRELCAGHSMLEQICAAMLAARSALQTEYTKLHKAMLTIVRKDEVCRRLMTTPGVGPLVAITFKTGIDDPSRIGKSKAVGALFGLTPKKYQSGETDVTGGITRVGDEMVRTALYEAANILLSRVTRFSALKRWGMDVAKRRGAKRAKVALARKIGVILHRMWVDNTNFRWTKEAPNAPRLIQA

SEQ ID NO: 374207 - protein, 365 aa, unidentified
MNCVGIDVSHGKSIIVVMRPFGEVVVSPFEVLHTDSEPSKLAGLLKSLDGETRVVMESTGYHHTPVAWLLHDAGLYVSVVNAMLVHDYGNNSLKRAKTDKKDAVKLANCGLDHWLTLPRYVPEEDTRLMLKTCYRKYQQYSKVQTMLKNNLISLLDIAFPDANRLFTSPPRADGSEKWVDFVAAFWHCECVCNLSEKAFTAKYHKWCRKHRYKFCEDKTLDIYSSACGHFGVIPKTDTAKLLVEQAVFQIRATSTTLAALKQEMQSLAASLPEYPVVMGMFGIGPALGPPLMAEIGDVRRFHSKKALVAVAGIDAPPYQFGQMDVRSHSISKRGSASLRRTLFLVMSVILQHAPMNEPVYQFMNK

SEQ ID NO: 374208 - protein, 369 aa, unidentified
MRAGLPGRDRPNPPGSVEAVGEQGSSRLVLSQPEQLPGPKSPHPQGRAAREAAGMSERGCVVGIDVSKATLDIAVRPSGARWQASNDPDGCAMLATQLTELEPALIVLEATGGYEAVPAAALVAAGLPVVVVNPRQVHDFAKASGQLAKTDALSAAVLAHFGEVMQPPVRPLPDADTQALQHWLARRRQLVEMLTAEQNRSQTAPVAIRPTIKAHLGWLRRQLKGVERRLKEQIQRSPVWRAQEHLLASVPGVGPVLATTLLADVPELGQLNRKEIAALVGVAPLNRDSGTLRGKRTVWGGRAPVRAVLYMAALVGTRKNPVLRAFYARLLAAGKPKKVALTACMRKLLTILNAILKHRTPWKPIDVCA

SEQ ID NO: 374209 - protein, 341 aa, unidentified
MPIVTIGIDLAKNVFAIHGVDDAGKAMPIKPHVPRDQLVALIAQLPACLIGMEACSGAHHWARVFQQHGHTVKLMAPNLVAPYRMSGKRGKNDAADAAAICEAVTRPSMRFVPLKDEHQQATLCLHRTRQGFVEERTATYNRLRGLLSEFGVVLPQSPEKLRRYITEHLDTLPGWAKHSISDLLDHAGNIEDRLIEYDRAIAGIAREDARSKRLMQLRGIGPTTASALLASIGAGHDFRNGRQVAAWIGLTPGQYSSGGKARPGSITKAGDAYLRGLLVNGARAVIASLGEKQDRFSRWVRTLVERRGYWRAAVAIAAKNARLAWASLKYSDDFKLEPVAD

SEQ ID NO: 374210 - protein, 399 aa, unidentified
MRKTCGLDVHKDTVFCAIYNGKKQSEVKEFLTTTPGIYAMAEELQIQNVSEVAIESTGIYWKPVWNIFDEMGFRMMLVNPYLIKQMPGRKSDVKDAQWIATLLHKGLLRGSLIPCKEIRELRTYSRQYIKLQQKQTSVLQQMERNLEMCGVRITSFVSNISAKSVMEVIKKIIAGEDSAQALTTSVHARIINKHSREKIIESLTGFITPQNRFTLSLALNEYNMLVDQSQQCLLRMEQLCSQHYKIEMELLQTIPGVSTISSMIILAEIGGNMTAFENSGKFVGWVGLRPRNDESAGKYKSTATTKGNKYLRTILVQVAWAASRTKGSFFKEKFNRLAIRKPRKKALIAIARKIAVLIWHMLDKKQAYDPNKLVVLDPVKLETKLKYHKKEIEKLEKLT

SEQ ID NO: 374211 - protein, 383 aa, unidentified
MFSSPSADASVSDSTHTIYLALELSRRSWLVALHAPDAAKIELHRLPAGDGQAVLDLLARIRTRVERRTGVSPHVSCCYEAGRDGFWLHRLLEAHGVSSHVMDPSSLQVDRRARRAKTDRLDAQALLRALMAWSRGEPKVCSMVRPPSPDEEDARRPSRERATLLQERIRLVNRIKGLCATQGIDDYEPLRPDRRSRLAQLITGDGRPLPPRLSAEIARQLDWLELVLRHLAEVETRRDADAAAARAASSSKLGTLLHLRGIGSEIATVLAKEVFYRCFASRRHVAAYAGLTPSPFASGRRSREQGITKAGNARARKALIELAWLWLRNQPDSALAVWFRSRVGSATGRVRRIAIVALARKLLILLWRYVETGALPADVAVKP

SEQ ID NO: 374212 - protein, 511 aa, unidentified
MTAPVGRSIFTSWHNRVVMKKQTSSSKSVYRNQNVQIRAIFERASSPRKVLCVALDYAKRKHVALCCDGNGDILKQPFAVENNAKGVAYLCEQVEATARRRKIQNETIFFGGEDQPSYVTNFVSALNDRGHLVARVNAYEASEQRENLLASTDHLDLLAIAKMLLSRRARLAGACEERAAIYPQLRELCRSRRSLVRQQTATSNRIHTCVDQLFPEFLNSSKSGLTPFVEASLALMRDRFSSVEIARRRPAALANFLRRHHVHHPDETSGKILSLARAALPANPDMVPALQRSLRSGAELYACLRGNANQLRLEAAHMLASTPYVMLTSIPGISFTLAGGVAGELGDPALLAGPDSLCAYAGIVPQVAQTGGPDSPPRHRSTSPRHNRILKDWVVQSSQKIALYGPPELKDRMTRWKANGQSSVFAGARRYLRLLRALVGNEVPYLAPSGRGPGSDPDQQVLAIEQTWRILVRKWRVVPGWQELLTDEQKPLGLWRRVVMELHHIKLPTGL

SEQ ID NO: 374213 - protein, 358 aa, unidentified
MKYVGIDIHKKMCQAAIIDDEGELLDEIRFRNDVEGIEDFAMKLTTFRDEVKAVVESTGNLWIQIHDRLEEHGFNVVLSNPYKTRLIAEAKIKTDKVDARTLARLLRADMLSTCYVPNKEERSRREVLSHRMRLVKTRTEVRNRIHSLLDKHGLRMPHKTPFSKKNVAWLRERSLGFMDDAILRSDLAVLESVDEQVGLMEEKIAVLAAEDPRVRLLMTMTGVGYFTAMLLLAEIGDIDRFGSDKRLASWAGLAPSVHQSGEKTRIGGVGGPGNKRVRWVMVQCVHSACRSDPRLRSFYERYSKRKGGKKAVVAVAHEMIRIVFYMLRDGEAYRGGNRGVMERKFKSLERMALNGLRN

SEQ ID NO: 374214 - protein, 339 aa, unidentified
MEQITTVGVDLAKSIFQVHCNDSNGRMVLNKKVRRRDLLMFMSTIRPCLVGMESCCGSHYWARKFTECGHTVKLIPAQYVKPYVKTNKNDAADAEAIAEAVTKPNMRFVPIKEPYQQNIQMLHRVRSRLVGSRTALCNSARGFLMERGIIMSKGIQKLRKDLPNIISDAENELTDMAREEMHNLYSELCSIDVLVTEYDRKIQLIYDNDEACKRIGKINGVGIITATYVRAVMGDPRTFKNGRQFAAWLGLVPRQHSSGGRNNLLGLSKRGDIYLRMLLIHGARTVVMYSEGKKDRLNRWAQDKIATRGFNKACVAVANKNARIIWAMLAHGEEYKMAA

SEQ ID NO: 374215 - protein, 358 aa, unidentified
MGQGNRRMVGGQVVVVTKDDVVCVGLDVHVKSFHVAIWKNGQIVWQGVIPAKAEVLIKLLAGVRAGLKKVVYEAGPTGYGLARALAREGIPVEVAAPSEIKRKSGKEAKSDRIDSRKLAEMASKGDLKYVRIPTEEEEADRQVVRLRDQLVDRRRKARQQIRGFMLQYGLETPRGLNQWSRKAVEELAAVPLRRELRYCLDKMLEEEEALRAKIQEIEKEISRLANEKRYVVKMDLVCSHPGVGRTVAMEFLTEVYRPGRFAHAGQVSKYVGLAPLRWSTGETAKDLGTNKSGRKRLRSMLIEAAWTWVRHDARARATYKHLAAQTASGKKAIVAMARKLVVNLWTMLCDGTFYREAA

SEQ ID NO: 374216 - protein, 394 aa, unidentified
MKFVGIDIASETHAVAVVDEKSDVLVKAKPFSEDADGYGKLLGLIGSSADTLVAMEATGHYWKNLFVYLAVNGFAVALVNPLRTHRFAGEDLQRTKTDAIDALGIARFAAQKRPPPTRLPDTITEELRELIRFRDRLKQDFDDRVRQLHRLVDLGFPEFTRYVRSLDSELATAILKDFPTAEAFAGIRPRSLSNLKYDGRHFVGLELANTLIEAAKVSVGRHHGHAYRVQVRCYCEDLDLLRRRLRELARDIESKLDQHEIGKLLTTIDGIGPHTAARLVATVGNPADFRDERAFSAYVGAVPGLNHSGMHQPMRAGLTPIGNTALRAKLYMPTLSAVTHNPWLRAFYERLIAKGKLRKVALLAAMRKLLTAIYSVAKNRRPFTPNLLPAEGAK

SEQ ID NO: 374217 - protein, 325 aa, unidentified
MNAHIGIDISKASLDVCYLKDIRRNGYERHVFDNTPRGYQQLFKWLRGVIQPAFSPLQVTLEATGVYHLGVARALTGQGVMVSVINPLQAHHYAKGLGMRAKTDRLDSIMLAHYGWERSPEPWQPASPSLTELKALNSRLDAVEKDIYREQNRLESAMIAQHSKAVIRLIKQSIRTLEKQQQTLMNLIDACIDRDEILKNNRLLLLSIKGIGDVCSRYLIAEIYPGRFKSAAQCAAYMGLVPIPQQSGTVQKVALSKAGNRKLKAKLYMAAISAKQHNPVLKKHYDRLMARGKSKMTALCAVMRRLVQICFGVLKHQKAFCLQAV

SEQ ID NO: 374218 - protein, 415 aa, unidentified
MRAAELRPRSDDIIVGIDLAAREHQAVIVGADGRRLTRFRVPHSRDGIAELLRRSRAKSWQATGRVLAFEATGHVWQALAAILEERGERYVVVNPLAVFRLREARRMDRTKTDLTDAEQIAELARTGMVTSTRPLHGPYLALRRSWGEYVRVRFEAARLKSLLRQQLFGLFPELLEVWSRVDRPGLLAVLRLGLTPAQIAALPQSEFLTRVCAERGGRRLWRAKVRAAHEKAARSVAPDERLEAAALEARRIVARYDLLEAQLAEVQGEVEALLGEIEEARWLATIPGLGFASVAGIIAHTGPIGRYRHGRQLVKLAGTNPTRNETGERTGGYQAMSHRGRAGLRQVAYMATISCLAHNVRLRAHYDRLVSRPERPLAKMTALGACMNKLLLWAFAVMKQRRAFELDHEWKECAA

SEQ ID NO: 374219 - protein, 355 aa, unidentified
MDTIYIGVDFHARQQTVCSLKTDEGVVSTYNLKHQDKDEVRAFYQQFSGRVIVGLEASGYSPWFEQLLEELGHEVWLGDATEIRRRARWRQKNDRRDAELILDLLAHAEFPRLHRPAMKSREVLRMLRYRQKLIKIRTMGKNSLQALALQSGLAKRSQLFTRAGQQELLAANMSPAMQWQRAQWLQLLEPLNQRLLETMLWLKQQSQDDQRIVRLRTHPGIGLLTSLCLVHTLEPVSRFRNQRKVAAYAGLDPMERSSAERKHFLGISNAGSRVLRYLLVEAAHTAVKKDDDLKRFYQRLVERRGRPKAKTAAARKLLIRSYIMLRDEIDYAEFRRRAVAARLARQSTRPLMPVV

SEQ ID NO: 374220 - protein, 352 aa, unidentified
MNIKYIGMDVHKETISIAVMNGEGKVVMESIIETKASTILQCIQGVHGDLHVTLEEGTWAAWLCDLLKPHVTELVVCDPRRNALMKEGNKSDKTDACKLADLLRGGYLRSVYHGENGLRTLKELARSYLTISKDLTRVMNRVKALYRSWGILCGGQQVYAPRHRTEWLNKIGEAGVRRRAEFFYQQLDALRELRQAVRKDLLAESRKQSATKLLRQVPSIGPIRAALLIALIQTPHRFRTKRQLWTYSGLAIETRDSAQYHYVGGRLQRSKKPLRGLNQNHNHDMKTIFKSAASMASSREGAFHDFYQGLLTKGMQPAMARLTLARKIAAITLILWKKGAHFDAKQLKLQAA

SEQ ID NO: 374221 - protein, 349 aa, unidentified
MPIVADEYTQVIGVDTHARTHTYVVLDTRTGGIIDTAMFPTNPAGLARALAWIDRRTSAGRLAAIEGTSSYGASLTEALQQAGIPVVEARPPRRADRGARGKSDPIDAEAAARAVLRTDTALLSWSRTGKIRSALRLLLSARRSMDGQRTASRNALIALLRTIDLGVDARRPLTDKQIASIAVWRHHPSDDIDRLIARGEAVRLARDVIDLTGKLEANHDALRLHVSALAPSVLDIGGVGPVSAAVFLTAYSHVGRVRSEAAFASLAGAAPIPASSGNTSRHRLNRHGDRRLNSALETVARVRLSYDPDTRAYKQRRLAEGKTTREVKRMLKRYIARQIYRHLTATMTA

SEQ ID NO: 374222 - protein, 432 aa, unidentified
MSKFFNLPVAGIDVSADYSMVAILAPNGDTYRKAFKITHNAEGFLHLLKEMRKVEEEFSMKPSLFMESTGVYHLTLFHFLKNNNADAYVINPLITNSNKNSGIRKVKNDKMDALTIAKLAKYQNIKMSDYLDIQIYSIRSLCRDYYDLVDKRSEFKKKLSSDLRTFFPGYHEIFSDVTGLTSLTILAKYTYPQSIIDASMDDVITILKETSRKSMLWCTNTYNKLLSTAKSAAQIGITDNSFKITIDINLKLISALDEQIEALLNEIESSVNSSSTPKEFKNNINLLLSFKGIGFITAVTLMSEIGDPTRFKHPKELVAFFGIDPSVNQSGKFNSDKNKMSKRGTRFGRRALYAAAISVIRKTTDGKPTNSILYQYRHENLNGKKKKVAIGAIMHKLLKYIFAVLRDQRTYEIRDPRIHNQMYITNSSKKVS

SEQ ID NO: 374223 - protein, 374 aa, unidentified
MRYYNQQHRFYCGIDLHASTMYLCILDHAGQIVFHKDLPTDVDTFLEAIASYREDLVVCCECLFCWYWLADLCHAQNIPFVLGHALYMRAIYGAKTKDDKIDSEKIARLLRGGNLPFAYAYPKGLRETRDLLRRRMYLVRKRAELITHVVNTNTQYNLPPFGKKLMYARNRKELNILKRFSDASVRTNIELDLRLIDTLDELINDAELYLTRTVKVDQPQWYYLLNTIPGVGKILALVLLYEIHDISRFASEGQFLSYARLVRPLKRSAGKITGGGGGKIGNAYLKWAFSEAACLVVRCSEQAKRFLARKEKKHGKPKALGILAARLGRTVYHMLRRNEAFNAQRFWNGEPRVKSAAGSGGRQVKETTRRRCKV

SEQ ID NO: 374224 - protein, 316 aa, unidentified
MAMRVSKSIVGVDVAKVELVIYEPDQDLLTSITNDKPTIKRWLKTLPRPAAVAVEATNVYHIDLIELAHEAGLDVYIIDGYQLSNYRKSVGVRSKTDASDARLLARYLKNEGEDLHPWTPPPAVYGKLQSLLRRRASLVQAKTSLTQSWANDASLKAVFATFLKSVERLDLLVQKKLKDVLREAGLLEEVARCQAIEGIGFLTATALVMAYNRGDFKSSDSFIAFLGMDLRVSDSGQKNGRRSLTKRGCSEVRRLLHNAAMSACRSSTWKGFYNEHLSSGKATTQVLVMLSRKLARIAFSLMKNQSEYQPKGLIMA

SEQ ID NO: 374225 - protein, 410 aa, unidentified
MKHQNGVDVSIVPQLDKACGLDMHKDKIVGFISAKDGSGQELKEFTFTCELRQVKEWVQNHQVEHCLMESTGIYWMSLYAILIEAGIHVTVANPTHIKQVPKRKTDRKDAKWLCTLLLNGLVRPSFMPTAEQRILRDHCRSRLFYMRQQNKTQNRLLKILESNNIKLRSVISSIKTKSAMDMIRLLAIGVTDKEQLAGCARGQVKRKKDALIKALDGTLAPHHLVQLQMLLQDFDHVQTQLNTLEVIITEITQEHYSLAFECLDSITGIAGRSAQIILSEAGSHMSRFSTADHLTAWCGLAPGNNESAGKRRDTSVKKGNPYLKTAIVTAAWAAVRVKDSYWRALFERLRKRMKVQKAIVAIARRMLKVVHKTLDTLTMYQEKGIAHFVDLQAKAALYHRMKQQWPSTES

SEQ ID NO: 374226 - protein, 408 aa, unidentified
MNEKTLSYTAFCGIDISKDSFDYCLLNQSKQIICHSKLPMTIDSLKNIKRIAEADVNQNTIFVMESTGKYHRRVSNYLVDNGFDVCVLQPLLIKKYNESKDLRKTKTDKKDAKLIAEYAVDNHNSLHLYNPEHDAFKELSRYRQSLVRALSSQKTTFKEMMVSIFPELVSLKKDFIYRKTILYLLRVCCLPVKLSKMRILTIEKMLKKCKATRLSITAAQLKEMAKTSIGIATETSQFIITELIDEILEKMSRIKKVEAELEKQTAGKYDNEIEIITSIEGIGNSTALSFLIETKDLSLFSDWKKLSAYAGIDPSISQSGSSVNKKGKISKRGNKYLRSTLFLMAASVFKHSERYGIYYQKKRDEGKEYKKTIIAIANKLLKLIYSLLKKGEFYDPNYEEKLSLERLC

SEQ ID NO: 374227 - protein, 423 aa, unidentified
MKNSAAKKRKQVPAGYLVVGVDPHKKKHAAVFMTQDFIVHSKLKFGNSREGFEKVLERVRTEIIKTGCRGVIFAIETGAHHWRNLAYFLDEKGIPLRLINQFTLKRRREGKDLNHRKNDYRDSEVAAQLLCTGEFNVARLSQGVYAELRAAYGSYRRLVKERTRLMNLVKSLLDGLFPEFTQVFKNTCGQTAASVLCTCAVPRAIAGMTESEFVDAIKAAHHGRIMKRKLRALHHVALTSVGIEAGAQSVSSEIAFQIEKLRLIKQQLGQINEALTGLVHETMEGKYLLSIVGLSYVSVAGIIAELGSFSSYQNARQLIKMAGSNPTESESAGKRHSHTPISKQGRPVLRHCAWTAVIPMMRFNADFRDWAKKLRERPAGANPLTGREVMVAAVNKLLRLAFALVKNQTFYRIPESQPVEITI

SEQ ID NO: 374228 - protein, 399 aa, unidentified
MARVWAGVDAGKTHHHCVVIDGDGGKLLSRRVANDEPELLVLISDVTALADEVTWAVDLPDGGAALLIGLLLDAGQELLYIPGRAVNRAAGGYRGEGKTDARDAAVIADQARMRRDLQPLRPGDELTAELKLLTARRADLVTDRTRLINRARGLLTSVFPALERALDLTTAGPLVLLTGFQTPAAIREAGEEGLEAWLRKRKVRNAGKLAAAATAAAARQHAVLPAEKLTAQLIAAVAGEVMNLNGQVRDLDKLIEERFHRHELAPVIESMPGIGVLLGAEFLAVTGGDMSFFGTADRLAGFSGLAPAPRDSGRVRGNLHRPKRYNRTLNHVFYYSAMISIATCEESRRFYDRKRAEGKKHTQAVLALARRRVNVLWALIRDKRTYQAAPPRHASAEAA

SEQ ID NO: 374229 - protein, 351 aa, unidentified
MKEYIAFDSHKHYTLMEREDRQTARTVQLRVTHQPGAIRSCLRNCETGTDVAVEATGNWYWIVSEIEQAGLKPQLVHPRKAKLMMGLINKTDKLDVHGLNRLQRNGTLPTVWIPPAELRDQRELTRTRLVLVAQRTRLKNRLQSTLAKYGLAVRDCSDAFGTVGRSQWPELLGKLPEQTQWVSQQLLKQLDLLEEQIGQCEKRLNQLLKITPQIERLKSLPGVGLILGASIAFEIGEVSRFASAEHLASYAGTTPRVHSSGDKLRFGRLRPDINRYLRWAFVEAANVVALHHQQRPERHVSHLYWRLKQRKGHAKAIGAVARHLAEATFHILSRQEDYVDPALRKGRSKPV

SEQ ID NO: 374230 - protein, 343 aa, unidentified
MGEVSTIGLDIAKSVFQIHGVDASGAVVIRKRISRAKLLEFFAALPACLVGIEACPTAHYWSRRLQALGHTVRLMPPSYVKAYVKRSKNDANDAAAICEAVTRPSMRFVATKSAQQQSGLMLHRSRQLLVCQRTMLSNAIRGHMAELGIISAKGRNGTAELLKIISDEHDDRIPAAARFSLDVLARQYAVVRAEIVAIEKRIHAWHRSSEESRRLEEIPGVGPIVATALVAEVGDWKEFTSGRSLAAWIGLVPRQHSTGGKERLGRISKQGNRHLRWLLVAGAMAVIRYARQHGTKRPWLARLMDRRPIKVAAVALANKIARMAWAMMVRGERFKEPKLLPAA

SEQ ID NO: 374231 - protein, 405 aa, unidentified
MFYRPYIDGTVKTLISDGAVNTMLVPNDVRIRKSTTTYSTKEGTNMAKINLSQLNDVLEKQIGTVFHVGIDVHKNSYHVAFLGDIGNSSTFVCSAAPEEVIKHFNRFDGKIAQVVYECGPTGFELARVLKEAGYNVLVVAPSRVPRPVTTGAKTDRLDCMRLAQYSAHGMLKSVAIPSRDQEAQRSLIRRRHDLVDSIRTVKQRIRSHLLYLSVKEPPGLDHWGDKSVKSLLKLPMLAGARDTLKSLVRELTFLKSERQRIEKQIRCVCSQARHGKIFECLQTTPGVGPITAATFQLEVFDPGRFKTGDQVASYLGLAPMVRQSGESKGRSRLRPVGQKRLRSLLVEAAWCLCRKDEQAMAKYRRLVSKTNVAQKAIVAVARDLAVILWRLSLEQRAYELRPVTA

SEQ ID NO: 374232 - protein, 338 aa, unidentified
MKLYGGIDLHSNNCVINLMDENGIVIFKKRVTNSLDAILLIFQAYQDAIVGLVVESTYNWYWLVDGLMEAGFKMHLANTAAIQQYSGLKHGDDDSDAHWLATMLRLGILPEGYIYPKEERMVRDLLRKRLQLVQQNTLNLLAIQGLYIRHLNVPLNSNKLKQLTPEKLALDFSDDNVRMAAASNLLMHDCLTGQINIIEKSLKQQLKLREEFVQLTSIDGIGLILGLTIMLETGDITRFNNVGNYASYCRCVNGARYSNGKKKGNSNTKNGNKYLAWAFVEAANFAIRYNETVKRYYQRKLTKSHPAVAKKTVAHKLARACFYVLRDQVAFDVNKAFG

SEQ ID NO: 374233 - protein, 360 aa, unidentified
MHYRTFVGLDVHKATVTACAWNPITEEEHRQTFRYDPAAIAEWVLSLEGPALAVYESGFCGFSLYRSLSELGVDCCIAAISKIARPKGDKVKTDKRDARFLSRQLAGGNISKVAVPDIQTESLRELSRLRITLRDQLTAAKHRISQIVLRYGLRFGGEEKNWSAKHRLWLGSLEMPTVYVQATFDFWFGEVLRIEDEKGRIEKVIRGLCKEEPLATAVKAFTLIKGVSEITAFCVLVEMGDIRRFKTAGAFSAYLGLVPSEDSSGDKTVRGGITKTGNTHARKALIEAAWAQNRVKSPYTKIPEGTDAEIARAVRTINIRLKKRRERLLKVNKRKSCVANTAIAREMAVSFWALARLLVI

SEQ ID NO: 374234 - protein, 370 aa, unidentified
MQDNIFVGLDVHKATLSVAAAEGERGGEVRAMGNIAHNPTQIAKLAEKLGKAGRRLSFCYEAGPCGYDLYRQLTALGHDCIVVAPSLIPMKAGDRVKTDRRDAVMLAKLHRAGELTAVWVPDRGHEAMRDLVRARATAVQVLGKARQHLQGFLLRHGRVFTGRKGWTFAYRRWLSAVRFDHPAQQIVLQDYIHAVTDAEARVVRLTTQIEELVPQWSMAPVVEAMQAMRGVALIVAVTLVAEVGDFSRFDNPRQLMAYLGVVPSEHSSGANVRRGGITKAGNALARRALIEGAWTYRLPARVSLTLLRRIDHLPQNIRDIAWKAQVRLCARYRRLAAAGKPKTVVNTAIAREMLGFLWDIARQVHVSSAI

SEQ ID NO: 374235 - protein, 343 aa, unidentified
MTDHQTRVTGGVDTHRDEHVAAALDERGGQLGVKPFPATSTGYQDLLAWLNSFGVIERVGVEGTGCYGAGLSRHLQAAGVEIVEVDRPNRQLRRRAGKSDPVDAVAAARAAQSGQATAVAKSADGDVEKLRALRLARASARHSRVRVINQLRALVVTAPDELRAELTGLTAITLPQRCARFRVPDPTTNLGALKYAMRSLARQAVTLRAEIKDLDRVITTLVNQTAPELLGRHGVGPDSAAVLLIAAGDNPDRLRSEAAFARMCGAAPLEASSGPIVRHRLSRAGNRQANAALHSIVLTRMVSHPETRTYVARRRAEGKTSLEIMRCLKRFVAREIYHQLAPT

SEQ ID NO: 374236 - protein, 348 aa, unidentified
MSEIIRIGMDTSKHIFQLHGVDASERVALRKRLGRNAMLAFFAKLPPTVVVIEACGAAHYLARELGKLGHTAKLIAPQLVKPYVPRNKNDGRDAEGLCEAASRPRMRYVPVKTAEQQAALMLLGVRDQLVMRRTQLSNTIRGHAAEFGLIEAKGLDKLAPLLAAIEQDESVPVLARELFAMLARQYAQVQVELKAIEAKLLAWHRADDLSRRLAQIPGVGPVTAAALVMKAPDPHAFRSGRLFAAWLGLTPKDHSTAGKTRLGKITRAGDERLRQLLVVGATAVVKQAKARGRGPRWLTELLKRKPPKLAAVALANKMARIAWKLMTTGESYDSARIEVRIDAQAAAA

SEQ ID NO: 374237 - protein, 324 aa, unidentified
MAKRITICAGIDTGKRKLDVAIDGSSLQLQVENTAEGHKVLLEWLRRHKVKRIGIEASGGYELPVVTELRRKRFVVVVFQPAQVRAYAKFHLQLAKNDKIDAALIAACTAAVKKIHAAPDPRLQPFAEHLTLIEQIGEDIKLYKNRIETCRDPRIQKLWKEEISRLAKRERAELKALVAAIRQHRDLAQRLDLIYSVSGAGMPTAVAILVRMPEIGTLSREQVAALAGLAPYDDDSGERSGARHIDGGRKRLRRALYTAALPASFFWNPHLIALYRRLRAAGKVHKSALIACARKLLIFVNTVVGRGTPWQEQQPVRATNPAAA

SEQ ID NO: 374238 - protein, 435 aa, unidentified
MEEVEDEPLFCERVAGIDIGKAVISVTVRVPSETRTGGRRQEHRTFGTTRRELAGLAEWLRSLNVEKTGMESTSDYWKPVYFLLEREGLECILYQASQVKALPGRPKTGKRDSVWLAKITEQGSVAGSFVPPEDIRRLRIHTRYRRKLTQMRTAEKERCEKLLEDGHLKLSSVISDIHGVSGRDMLNAIIAGERDPRVLAEMARGRMRLKIRKLEQALDCEFFTADHAFILQMMLEGIDSLTARIAVLDEKIAVLCEPYERQIAQLDGVPGFGVTASQDLIAEIGTDMTVFPSPGHLCSWLRTAPGVKESAGRRKGKNATGRGNPYAGSTLGETAAAAGRTDTFLGAKYRRMCQRMPKKKALGALMRTQAVIAHHLLSDPGAEYEELGPGYYEERLADTARRARGHIRSLERLGYRVQADPVDPLTGELITPATS

SEQ ID NO: 374239 - protein, 372 aa, unidentified
MGHHTEAFVGIDTSKSRNAIAIADGGRGGEVRYLGELPSTGAAIRKLMAKLAAKYRDLTFCYEAGPTGYGLYRLLKSLGHECLVVAPSLIPKKAGDRVKTNRRDAVSLAKLLRAGELTAVWVPDERQEAMRDLSRARQAVKKDLQGKRQQISSLMLRLGRIYPGKTTWGPAHMNWLMAQKLEHREQRIAFEELLEGIRQESERVERLEDAIREAVPEWSLAEVVAALQAVRGIDLIAAVGVLAEIGDLSRFQNPRELMGYLGLVPSENSTGDKVKRGGITKAGNGRARRILVEAAWSYRYPPRVSRDKQPKVEAAPRHVREIAWKAQTRLCGRFRSLERKGKRRTVIATAIARELSAFIWAINRELMAHRQA

SEQ ID NO: 374240 - protein, 390 aa, unidentified
MILVGIDVAKDKHDCCIINSDGKFPEEVFSILNNREGYETLYKRICSLAVDFTKVKVGLESTGHYSSNLLAFLLDKHLTAYVINPLRVNLFRKGQSLRRTKTDKIDSRNIVHLLMADSSLKPYSLSSYHMEELKSLTRYRGTKVRERTKLKTSIARLVTILFPELEQLVSSIHIHSIYAMLEKFPGSAYIAAAHLTRLTALLLKASRGRFGRETAIRIRDTARRSIGAVSPAKSMELQHTIAHLRVYDQEIGEIESEIEKIMDDVNSPITSVPGIGMQMGAVILAEIGSFRRFDSPDKILAYAGMSPSMYQSGKLTGSYSRMEKRGSRYLRYALFNVTRYVCHYDPGFTAYLSKKRKEGKHYYVAISHAVKRLVRVLYAMEISGNRYKTA

SEQ ID NO: 374241 - protein, 464 aa, unidentified
MIVRLGVDIACRAAHQASLATENGSLLWSGRRFRTDATELAQLWACLPTGTPADPVEVTVVMEPTRNAWVPLAAWFRRHGATVVLVPPERAADLRAYYAKHTKSDRLDSAILARLPLLHPDGLHPEHGLGPGEALRRATKLHSTLIHRRTTVLARLDALLEILGPAWHTALSANLSNKTPLKLLAAGYADPHTLRRIGRARLARFLHRHSRGAWGEAHAEQLLAAAAETLCLFDGELDYPELADDIAIEARLALAITTEVADLDERIAVLVDRLDPHGIITSAPGVGPITGAVILGRLGDPTRFTSLAGARSFTGLVPSLNASGLSGQHGGPTKRGDALLRQALFLAADHARRQDPTLAAKYHRLLVHAGKHHISALCHIAPTLLTRIVACWRAGQPYQLRDLDGIPISPERARAIITENYTIPDALRTARRSTQKATGRRSKESQRAPSTGPSPTNATTPGAA

SEQ ID NO: 374242 - protein, 346 aa, unidentified
MEQITTIGLDLAKQVFQVHAADAGGVQIFNRKLRRAEVLRFFEKTPACLVGMEACGSAHYWAREISALGHDVRLIPPVYVKPFVKRGKTDAADAEAISEAVTRKTMRFVPVKSADQQAAAVVLKTRALLVNQRTQVINALRGHLSEFGIIAAAGTTKVAGLISIVRDETDLRLPKAARLALMEVVSQIEALKAQIEKLEKVIVATVKRDDDARRLVTIPGVGAITAASVRALVPDPGGFKSGRHFAAWLGLTPKPHSSGGKERLGRISKMGNPALRSLLVVGATAVLRHARGNPNASKWLTALLARRPYRIVAVALANKTARIIWALLVKGGTYQDNGASNQRATA

SEQ ID NO: 374243 - protein, 312 aa, unidentified
MDSKKVEFEQVIERGCGIDVHKSLLVATVRGTGLKEETREYGAFTEDIESMSGWLKECKITHIAMESTGVYWKPVFNILEEDFEIILVNARHIKNVPGHKTDKKDSRWIAKLLLSGLLKGSFIPKQPIRDLRDMTRYRRKVVEQISSEKNRIQKILEDGNIKLSSVVSNMSGAVATRIIDDLIAGEEDITKLVAHRHGKMQVSETDLAKSLVGNLTVHHRQMLQLIKQSIKDKELLISNLDKLIDEHLKANELELDRDLLSTIPGVGKEGAEYIIAEIGNDMSVFEDEQHLSSWAGMSPGNNESAGKKKAHE

SEQ ID NO: 374244 - protein, 416 aa, unidentified
MKIVRPICCGMDVHKNIIVATIGITNKKTRITEYIQETFSTLNSDLLNLKQWLINHKCFDACMESTGKYWIPIFNILEDEINIYLTHPKYVKAIKGKKTDKKDSKWICDLFKHDLIKFSFIPPKEIRALREISRYRYKLVGMRSSERNRYQNCMTVSNIGIGSVFSDPFGKSAQAIMKEVLESDIIEDEKILKCIHRSCKNKDKILDSIKHCNIETDQRFKMNESMTHMEELQVHINNCEIEMMKRAAPMFDQFMHITQLPGISTLSAILIISEIGVDMKQFESDKQLTSWAGLAPANNESANKKKSVRISKAGQYLKPLLVQCALGAIKDKEGYFGIKYSRIKKRRGHKKAIIAIARMMLVSIYHMILTGEKFNPSDYESFRNPKPPIKQQDLTEESAIEFLKKSGFDVSKLTKP

SEQ ID NO: 374245 - protein, 345 aa, unidentified
MEHFAGLDVSVNETSVCIVDDTGRIIREVKVASEPDALVEVLKNGAYHFKRIGLEAGPLSQWLYSALGEANLPVICVETRHMRAVLKAQINKTDRNDARGIAQMMRAGLYRPVHVKTLRSQKLRTLLTHRKLLQSKAIAIENDLRGTLRNFGLKVGVVGTVKFEARIKELVENLPDLAALVEPLLIVRRVLREQIAVLHRRVLTIVRDDEVCRRLMTIPGVGPVVALTYRTTIDVPARFRNSRAVGAVLGLTPCKYQSGESDYTGGISRCGDEMMRVMLYEAAQVLLVRSTKWSWLKAWAMQIARRRGMKKAIVALARRLAVIMHRIWVDGTEFRWTREQASAAA

SEQ ID NO: 374246 - protein, 342 aa, unidentified
MQVVTIGLDLAKHVFQVHGVDAAGSVVVRKRLKRSEVATFFADLQPCLVGMEACSTSHFWAREVARYGHTVRLMPPAYVKPYVKRGKNDAADAEAICEAVTRPNMRFVAAKTPEQQASLLLHRARRLLVQQRTMTACAVRSHLAEFGIIVGQGIRNVRPLAEGAIRDGGDGIPADAVGIIRLLTEQLAALDDRIFQVEARIETLHRTNPISRLIATIPGVGPITATAIAASVPDPSIFRSGRDFAAWLGLTPRQNSSGGKERLGGITKRGDTYLRHLLFIGARNVIRYPKARAAAGAAWVEALIARRSKTVAAVALANKMARIAWAMMTTGEMYRSAREATA

SEQ ID NO: 374247 - protein, 455 aa, unidentified
MPRTTTGDRPELKPVNVEAAAIDIGSKMHMAAVDPACTDTPVRAFGTFTQDLHDLADWFKACGVTSVAMESTGVYWIPAYEILEQRGFEVILVNARYAKNVPGRKTDVSDAAWLRQLHSYGLLRGSFRPDAEIATLRAYLRQRERLVEYAAAHIQHMQKALMEMNLQLHHVVSDITGATGTRIIRAIVAGERNPDVLATYRDVRCHSSIETIRAALVGNNRDEHVFALTQSLELYDTYQAKMFDCDRKLESLIAALTDKGAKPVGKLSRPRVKTKQVNTPSFDVRAALYGVLGVDLTEIDGMGPSLALKLIGECGTDLKAWPTAKHFTSWLCLAPGNKISGGEVLSSRTRRSSSRAAALLRLAATTIGRSDTALGAFYRRLSSRAGKAKAVTATARKIAVLFYNTLRHGMTYRDPGADHYEEQYRSRVLANLKRRAKSLGFVLQAVPGDAELAVS

SEQ ID NO: 374248 - protein, 349 aa, unidentified
MRSFTAPAGTRFYAGVDLHARALFLVVIDGDGHTCFARNLAASPDPFLRAVAPFRDGLLVACECMHCWYWLADTCHDHHIPFVLGHAWAMKAVHGCKTKCDRKDAEAIARLLKGGNFPPAYAYPKERRGLRDLLRARLRLVRQRAELYGHVHTARRQANLPPVSSDVKYKSKRAACTADIADPFVRRRVETHLALVEPLDTAIRRLEAAIEDAARGIFPVELAVLQSTPGVGLVLSLTIVLEIDTIDRFDTRQQFCSSARLCGAVQTSDNRRTGEGNRKAGNAWLKWAFSEAAVLGAQKDERIGAYLQRLASKLGKAKAYSALAHKLGRAFYHMLHTKEVFDVNRFVRH

SEQ ID NO: 374249 - protein, 419 aa, unidentified
MGTLNTTSFTAFIGIDWADAKHDICIQSADADEREFDVIPHKVELIDEWACTMRQRFGSPIAVAVELSKGPIVYALQKHDCFVIFPVNPTTLARYREAFQPSRAKDDPTDAELAVDLIIRHHERFKPLQPQSVEIRMLVSLVEQRRNLVADKIRITNRLRVALKQYYPQMLEWFDHIDTLLFCDFLTRWPTLLQVKRARQSTLRKFFHEHSMRFEHVLEQRLIAIKAATPLTLDEAVVVPHRLQALVYVEQLRVLLDAIKRFDIQIESVAKQHDDYALFTALPGAGPSLAPRLLVAFGEQRERYKSAAEVQKYSGVAPVTERSGKKHWVHWRWQCPTFMRQTFVEWAAQTINKSYWAGEYYRQQREKGSTYQAAVRALAFKWIRILYRCWQTRTPYDEVTYLKALERRGSPLLAARKLT

SEQ ID NO: 374250 - protein, 385 aa, unidentified
MYCGIDWASSHHDVAVVDDDGRVVARGRVSNDAVGFAQLLTLLAQAGDSAKDPIPVWIETDRGLWVAALRIGRVIYPINPLAASRFRARYAVSGAKSDATDAVLLASIVRTDAAAHRPLPADTELSGAIRVLARAQQDAVWARQRIGNQIRDLLKDFYPAAIVAFAELPSGGLARADARTILAAAPTPAEAAKLTLARLRRLLTKAGRRRDLDADIDRLRQVFTDTYLHQPPMVENAIGIQLTALLRQFEATCAVDDQLAEAAIAHFEQHPDAKIINSFPGLGNLAGARVLAEIGDDRTRFADARGLKAFAGSAPITRASGKQTMVLHGHIKNRRLAAVGSICALSAVRHSPGARRHDDTRRAAGDWNRQAQRHLFNKFLGQLHH

SEQ ID NO: 374251 - protein, 336 aa, unidentified
MIDDVQWFVGIDWATQSHRVCLLDVEGRHVNERDFAHGGAGLTELRDWLLEKTKAAPGQIAVAIETPHGPVVEMLLDHGFLVFAINPKQLDRFRDRFTVAGAKDDSRDARVLGGSLRTDRQAFRRLVVDDPLVIELREWSRIAEELQQERTRLANRVRQQLWRYYPQVIELTDDVADDWFLALWQQVPTPATAAKVSEKTITRIFKDHRIRRLDAATVLQTLRQKPLFVAPGTTEAACAHIRTIAARLHLVNQQIKEAHRALDGLCAKLEARESPSGQNREQRDVTILRSWPGIGRIVLATLLTEAAEPLRTRDYHALRALAGTAPVTRRSASNAS

SEQ ID NO: 374252 - protein, 398 aa, unidentified
MLSIGIDVSKGKSTVCGMKPGGEIVYTPFEVQHTREGMSELVSLLRGSGEEVRVVLESTGSYHCPVVAALLENGIFVSVVNSLRMKRFCSQSIRRVKTDQIDAMQIALYGLAYWQELQPTRLPENTYRELQLLARQYYQMTSLLIKAKVDFNALCDQVLPGMQELMSDHAGRHKLSDFVLRYRHTTHILEMGETRFRKDYCKWAEKKGYRNRERMAALIFATAQNGIPVLPDAPSTQIVITEAIRVLHTVEASRDAILTQMQALAKTLPEYSLVREMPCIGDTLAPRLIAEIGDVRRFHSKRALIAYAGIDAPPYQSGKFSANNRHISKRGNRYLRKTGYEVMQSYVMHKPANDPIFTFIEKKRSEGKSGKLAMVAGLNKFLRVYYGKVTELYRSLPQ

SEQ ID NO: 374253 - protein, 453 aa, unidentified
MGKSNKKAIKIGFHEGLPQIRANAGGMDIGASEVWVDVGGKDPEPVRRFETFTADLQEMGDWLKRCGIETVAMESTGVYWIPICQVLESKGIEVVLVNARYAKNVSGRKTDMLDCQWLRILHSYGLLEASFRPARDIGVLRAYMRHRQMLIEYAAAHVQHMQKAMTQMNLQLQHVLSDITGATGMRIIRAIVDGERDRNRLAAMRDVRTKANETTIAKALEGDYRAEHLFALKQSLELFDSYQKQIEACHQQIADHLRSLESKADPAAGLKPARTTKKKRRNQPDFNIREEAFRISGVDLTEIDSIHESAALGLLAEIGVDLSPWKTEKHFASWLTLCPNNKISGGKVLHRSTRKSASRARDILRLCAQSLLVSRSALGAYCRRMCARLGKPKGIIAAAHKLALLVYRMLKFGRRYVDIGQEQYEEKYKERALKQLARKAQHFGFQLVPSSQQ

SEQ ID NO: 374254 - protein, 412 aa, unidentified
MYYVGIDIAKKFNVCFIVDDKDKVVKKSFKFNNDEKGFKNFFNLLSSIDNNISNFAIGMEATGLLFENLYLYLKNKGYNVILLNPYQTSKFREMDTMKKVKNDNIDAIMIASLIKSGRYSKAYVSKEVYASLRALHRHREVLQDELKKHKRRVSSLLAVVFPEMEQVIKDPFNVTGLALLEKYPTAMHYRYASPQRILKLFRNIKGNNFNIEKAQKLLDLAKSSVYSGNAYDERAYVIQSHIRVIRLLNEEIKSIDNQMLKLFNQTPSLSKEEEDEVIDIIDNLRTIPGISDKTLFTIMGECGNLDRFKNINAFIGYLGLYPTLEQSGNNTKYGKLAKRGSKLAKKALYQAAVAAIRHNNEMKKLYCDKTSQGKAKKEALVIVARKLAGIVLSIYKHNVPYNPNRVFNQNGA

SEQ ID NO: 374255 - protein, 360 aa, unidentified
MVVQRTNVGLDVHARSVVACGLDRQTGEVFEQRLTPSHEEIAAWIRSLPGPAAAVYEAGPTGFGLARSLRAVGIDCEVAAPSKLMRPSGDRVKTDTRDARHLARLLMLGDVTAVAIPSREQEAARDLVRAREDCRGDLMSTRHRLSKLLLRQGIVYRGGKAWTGKHELWLRCQRFDDPALQLAYDTSFEAMLATIARRDRLDRAIEQMAADSEFTAVVSRLCCVRGVATLTAFGLAVEIGHWHRLTGRSIGAYLGLVPTEYSSGASRVQGGVTRTGNGHARRLLIEAAWHHRARYRPGATLRRRWDAASAPARARGQLANQRLHARWQTFDARKKRAVVANTAIARELAGWCWSLAVLDG

SEQ ID NO: 374256 - protein, 414 aa, unidentified
MKLYVGIDVSSKELEACFMNSDGDTVERLTVANNLHGASHLRDRIAATADKLAVSEIHIGLEATSVYSWHPAMYLHEDPALQAHRTKVFTINPKLVNKFKEAYADMDKTDRVDAWVIADRLRFGRLTKTIVMQEQYVALQRLTRMRFHLVHSLTREKQYFLQNLFYKCNAFTTEVESSVFGHAILEMLSEKYSLDDIAQMDVTDLADYLRDKGRNRFPDPDNVARCIQKAARASYRLSKVVEDSIDLVLGTSIQTIRSIQSQLKELDKAIERILDSIPGARCLRSIPGIDRVYAAGILAELGDIDRFHDQAAVAKYAGLTWRRSQSGAFEAEDTKRIRSGNRFLRYYLVEAANSVKNRDPEFGDYYRKKFAEVPKHQHKRALVLTARKLVRLVDVLLRNDQLYTPRRKVQQTEK

SEQ ID NO: 374257 - protein, 340 aa, unidentified
MKDTVIGVDLAKNIFQVHGASRAGEVMFRKKLRRQQFMQFMATQPPALVVLEACGSAHYWARELAEAGHEVRLIAPQYVKPFVKRQKNDAADAEAIVIAARQPEMRFVEPRTEAQQARGVLFRARQRLVHQRTELVNALRAVLYEFGLVVPQGIAHIRHIEAMLDEAVLPEAVKQECLDLLRQISEQSVRIDVRTKKIRMLAQESENTCRLQSMPGVGPLTALAIEAFAPDLQSFRRGRDFAAWLGLVPRQFSSGGKERLGKISKAGQADIRRLLIMGAMTQVNWASRKAPAPGSWLARMLARKPRMLVAIALANRMARAIWAMATKQEDYRDPALSVAA

SEQ ID NO: 374258 - protein, 393 aa, unidentified
MICVGIDVAKDKHDCFILSSEGEVLAGVFTIPNNRDGFETLLQRIRSCALPADKIKVGLEATGHYSYNILGFLLDCGLATYVINPLHTNLYRKSLSLRKTKTDRIDARTIAAMLMSDVNLKSYTDTAYHNEELKSLTRYRFDKVRQRAKLKQSVSRLVNILFPELETIVPTLHMASVYALLSEFPGAQQIADTHLTHLKTLLDDASKGRYDREKAVEIREAARRSIGSRMPAKSLELRHTIQLIRELDKEIAEVEDSIEEIMNSIQSPITTIPGMGLRMGAMILAEVGDFANFDSPDKILAYAGLSPSTYESGKLSLAGAYSHMEKRGSRYLRYAIFNATKYVCHWDSTFAAYLAKKRAEGKHYNVAISHAAKKLVRVIYSLQKSGQAYQTAA

SEQ ID NO: 374259 - protein, 327 aa, unidentified
MRQTKSLTEKVKTTVAFDVCKAALDVHIRVDGKAFQVPNTYEGFDQIALALADYDVSLILMESTGGYEDVAACHFQSLGYDVAVINPRHGRSFAMAMGKLAKTDRIDAAVLADFAAVIDSRSDRSRFIKPPTDEERKFLSQMVARRRQVVGLLTTEKQRLSHADDYAKQSINKVIVFIESQLDEINKDVSFYLKKNYSGLSKMLSEIPGIGELSVGLLIGDVPELGQTGNRQLSAVIGVAPFNHDSGKMRGKRCISGGRQNVRNVLFMGVMSATRFNPVIKAFYDRLINKGKPKRVAYIACVHKLLRIMNAMVRDGTPFNPDLHAVI

SEQ ID NO: 374260 - protein, 337 aa, unidentified
MRSYAGIDLHSTNSYLGIIDNDGNRLFGKRLPNELDTIRSALKPFGKGLAGVVVESTYNWYWLVDGLQSTGFKVHLANPSAIKQYEGLKHTDDRWDSFWLAHMLRLGILPEGYIYPKQHRPIRDLLRRRLLFVRQRTSQILSLQSMITRNIGIHIAGNEIKKMKEASAQHLFDDPDLAFTAENNISTINFLKIKISNIEKRILAQTKLSPQFVLLNTIPGIGNILGLTIMLEVGDISRFAKAGNYGSYCRCVKSEKTSNKKKKGEGNRKNGNKYLSWAYVEAAHHAIRFCPEARRFYQRKLAKTNGAVATKALANKLARASYYMMRDQVPFDKDKLF

SEQ ID NO: 374261 - protein, 352 aa, unidentified
MRGLRAKRVRAVKEGTLIATVDIGATSNTGYCTAIDGRDIKVFKFGNTREGFDKFWNLVVASKNRFHCDEVVVGYESTGPYAEPLVHYLMDKPVRIVQVNPMHTKRLKEVNDNSPGKTDDKDPRVIADIIKLGRALSIVVPEGDAAYLRRLNNARERHIGERTALLNQMQQLVFLLFPEFKTVIKQMKGKTVRFILNKYTTPDKIGALGKEVLGEEMRRRSRGRFGIKDAELLIGLAQGTVGIKEGVAGIVLDIKHIIAQIGVVDGFIAEIEAEMAVTLERIPSSPRLLSIKGLGIVSVAGLIGEVGDFSKFRTQSEIMKLAGLDLYEISSGKRKGQRRISKRGRSLLRKIL

SEQ ID NO: 374262 - protein, 410 aa, unidentified
MEGAVVGPGPEPTRFVALDVHKQYVMVGAVDARQEVVVPPRRVALVEFPEWARDHLTPADAVVLEATANAWSLYDCLTSLVAPVTVAHAGVIKLIAHARVKTDRRDTLHLARLLAARMIPAVWVPPVEVRELRGLITHRRRLVAQRVQAGNRLQAVLHRHRIVPPVGKLFSRQNRAWWADLPVSTSERLRVRQDLAVVETLDALVVEVEAERGRLSTTTPWADQVPYLVQLSGLGVLAAMTVLAASGDITRFPTPKHVVGYAGLGAGVHDAGQTHQGGRITKQGRRELRGAMVEAAWVAVAHHPHWKEQFARLSARLGAQKAIVAIARKLLVVVWHLLTKREADRAGNPEAIARKLYTWVSRCGTTPGRQRPLGALVRRELDRLGIGAELTVTGYGRCPLPPPGVTAHAG

SEQ ID NO: 374263 - protein, 317 aa, unidentified
MEAELQGPCVGIDVSKAHWDVAVEGGRGVRRFSADATGVAELLSWLEKLGPKLVCLEATGGYERSLKSALHRRGLPVSVVNPRQVRDFARARGELAKTDALDAAMICRFAVAFQPERDDPPTPAQERLRALRARRQQVVHSLTQEKNRLAIAPDAEARQSIEEAIGFYDRQLRELDRRIAELTSADPGFRQRLALLVTVPGVGAVTAAGLLAELPELGTMNRGEAAKLVGLAPINRDSGSLRGKRMIGGGRAQVRCSLYMATLVAIRYNETIRRHYQQLVDRSKSKMAAIVACMRKLLLILNAILKNNSPWKENLTT

SEQ ID NO: 374264 - protein, 416 aa, unidentified
MNAVGIDVSSRKSTVAVLRPLGEVVCLPFDVTHDIAGLASLVEKLKALDGETRVVMEHTGRYYEAVEKALHEAGLFVCAVNPLLIKEYGANSLRRVKTDKADAVKIARYALDNWADLRDFTPMDAIRYDLKTLNRQFQLASKQRTASANNLIALLEQSFPGIRKCFDSPVRSDGTQKWVDFAHSFWHVDCVRKQPFAAFCERYRKWCKRHAYLFKLSNAEEVYALAKRAVVLTPKAKVVKVLVQEAANQLSSISRSVEVYRAEMDRLAAMLPEYPVVMAMYGVGKSYGPQLMAEIGDVRRFERKQALVAFAGIDPMPNQSGDKNVRSNKSSKRGSPYLRKTLFNVIRTYLQCAPQDEPVFQFLNRKRAEGKPFYVYMLAAANKFLRRYYAKLRDFFASLDTLQPVAPIPTILKATL

SEQ ID NO: 374265 - protein, 412 aa, unidentified
MLKIVYPICCGMDVHKSFLVACIASTNEHGVTSYKSKRFSTFTGDLRRCAAWLIENNCTDVCMESTGKYWIPIYNILESTCKIVLAHPKYVKAIRGKKTDKKDAKWIADIFKHDLVSGSFIPPADIRQLRDLVRYRWKLTSFTTGEKNRAQNCLTVSNIKLDDVFSDVFGKAATAITSRLLDNPSERITDISAFRTKHMKASNEQVLAAVDGEMCAEQAEKLRIIRSHMEGLDLCKANLESLILSTAEKYLPQLNLVMTVPGIQSFAAIGVISEIGVDMSVFPTSKHLCSWAGLTPQNNESAGKKKTTRIGRAGAYIKPLLVQCALCAIRAKQNPEIRSRYINLKKRRGHKKAIIAIARMLLTATYNILKKNEPYNPELYCNGDRPPVHREVSVEEAVFILQRQGYLVQAPS

SEQ ID NO: 374266 - protein, 312 aa, unidentified
MNTQNTNPIHYVAIDVSKASLQVQDDKRAFAVENTSSGHRKLLDHLKECSKPLVVYEASGGYERELAAFLRKSAIPQAMLNPARVRDFARSEGVRAKTDPIDTRMILAFAKSKALEAIDPPSEESLKLAALLDRRDHLVEQMAREKNRLQNSEALIHRSIQRMMKILQKEIAVIDKAISQLVDSDELLKSRSQTMQSVKGVGKVTAWTLLAYLTEMDHLDRNKLVALAGLAPFNRDSGKMSGRRSIQGGRAKVRKCLYMAAHTAASCNPVIAAYVQGLRDRGKPYKCAIVAAMRKLLIHLQCLIKKSQLAPC

SEQ ID NO: 374267 - protein, 348 aa, unidentified
MQFYTNLHPFYCGIDLHARMLYVCILDERGEILVHKKIKDSSEELLKLLSPYIGNIVVGAECMHCWYWLSDFCEHHNVDFILGHALYMKAIHGGKTKNDKIDAYKIAKLMRGGNFPLAYVYPKEKRAIRDLLRRRTHAVRHSAELKAFIKNSLSQYNLPVPEKSDLSYTTGRDAMRGYFPNPQVQRSIDMNLRLIEVYDHEVSSIECHVEKLTKHDNGRDYYLLRSLPGVGRVLALTILYEIGSIHRFDSVQKFASYSRLVKCKAESAGKAYGTQGNKIGNAHLKWAFSEAAVLFLKGNPSAQAYLLKLQKRMSKAKALSALAHKLGRCMYFMLKNQTVFDSERFLAG

SEQ ID NO: 374268 - protein, 428 aa, unidentified
MNKDELSRIEQFNQFKNGIRGSNKHLIIGIDVAKDKHHAFMGSATGKSLLRRLIFENNISGFGKVLTQSEAIRVQNALQCSVFGFEPTGNYHKPLAEYLIRCMHNVVLVSGLATKRNRELLDGRWDKHDTKCAANIADLISQGKCLFYETPSPQIRQLRELMSLRRRLKKEQHSLKMRIRNNLLAKYFPELDRFYNQCESQCLDIIRECLNPSEIAGMEFDQFYKALPVRKGKIVQLRRLIKIHHLACESVGCEMGEAGEFEARMLVDKLRAVCKRIEETKDLIEDISLDFTEYSWLLTIPGFGPYISALVLATISNPYRFTNRKQVLKMAGYDLNAVRSGKKSDMVVPKISKRGNAALRYALYQAAFVASTRNLAFVQYYTRLLQGREREQGIKTKMRVKIAAKMLVIAWTLMKKKIPFNPDCLKYE

SEQ ID NO: 374269 - protein, 428 aa, unidentified
MSENSTTHPEPEFVAFVGIDWADQKHAWCSQRAGATQREHGEVEHTPEMVEVWVSQLAQRFGPGPIAVAVEQVKGALVYMLSKYECLHLFPVPSTMSASMRKSLYPSGSKDDPRDAELLLDLLLQHRNKLRRLMPDDEVTRRIQNLVEERRNLVDEKTTQLNRLTGYLKVYFPQMLEWFEKLDTKLVCDLLERWPSLEELQKVPPAELRKFFGQHRGRHQELTERRLEGIGQAMPAIRDRAVLEAKRAMVQVSAQLLRILLEGIANLDSKIEEAASAHPDFFIFESLPGAGSALAPRLLAAFGSQRDRYGSAEEVQTHSGIAPVMEKSGKKKWVHFRWACPKFLRQSFHEWAGHSISQSTWARAYYQQQRGRGKDHHAAVRALAFKWIRILFRCWQDRVAYDENKYLAALARRGSPLSSVLTVTAATL

SEQ ID NO: 374270 - protein, 390 aa, unidentified
MIYVGIDVAKDKHDCCILGPDTEELFQVFTIRNNSDGYGELFHKIESVSKDKSQIKIGLEATGHYSYNILGSLLDHGYHTFVINPLHTNLYRKGQSLRKTKTDKVDARSIAEMLVTDKTLKPYTGTSYHSEELKSLTRYRFELVKERAKLKTSVSRLVNILFPELESLVPTLHMNSVYRLLQELPGAYFIASSNLTHLKALLADASKGRYGREKAIEIRETAKSSIGSLMPAKSMELRQTIRRIDTLTSDIKEVEQSIQKIMDECGSPITTIPGIKYRMGAMILAEIGDFARFSNADQVLAYAGLSPSTYQSGQLISSYARMEKRGSKYLRYALFNAAIYASVWDERFRLYLSKKRAEGKHYYVAISHVVKKLVRTIFRMEITHTSYQPL

SEQ ID NO: 374271 - protein, 402 aa, unidentified
MNAVGIDVSKGKSMVAIMRPFGEIVSAPFEIKHTASDINSLVELINSVEGESRIVMEHTGRYYEVLAHQLSAANLFVSAINPKLIKDFDNDSLRKVKSDKADAVKIARYALDKWQNLKQYSVMDELRNQLKTMNRQFGFYMKHKTAMKNNLIGILDQTYPGVNTYFDSPARSDGSQKWVDFASTYWHVDCIRKMSLNAFIDHYQNWCKRKKYNFSQSKAEEIYGKAKELVPVLPKDAITKLIIKQAVDQLNSASTTVESLRTLMNETASKLPEYPVVMAMKGVGTSLGPQLMAEIGDVSRFTHKSAITAFAGVDPGVNESGTYEQKSVPTSKRGSADLRKTLFQVMDVLIKTHPQDDPVYQFLDKKRAQGKPYYVYMTAGANKFLRIYYGRVKEYLASLPES

SEQ ID NO: 374272 - protein, 402 aa, unidentified
MNTEDIEVFIGIDVGKSEHWATALSREGRKVFDKALPNDEERLRALYKKLADHGHLLVVVDQPATIGALAVAVAQDMGITVGYLPGLSMRRIADLTPGSAKTDAKDAAVIAGAARSMPHTLRAINASDEDAAALSMLTGFDLDLARQVNQSANRIRGLYTQIHPTLEQVLGPWLEHDAVLEVIAAWPTPADLKRAGKARIDARLKKHGCRRHATWAGQIVSALEHQSVVVAGTDAAAVVLPHLARQLISLHAQRADAAAQVEALVEAHPLYEVLISMPGIGVRTAAVFLAETLGKTFDTGAQLASYAGLAPVTRRSGSSIRGEHVSHGGNKRLKRAMFLSAFASLRSDPVSRAYYQRKRDQGKRHNQAVLALAHRRILTLHAMIRDGALYDPQPATKLPAAA

SEQ ID NO: 374273 - protein, 346 aa, unidentified
MKVTTIGIDLAKEIFAVHGLDSKGHTVFRKALKRHEMAKFFANLEPCLVGMEACGSAHHWARKLESYGHTVKLMAPQFVKPYVKTNKNDMADAEAICEAVGRPNMRFVTHKTVEQQAILAVHRARQGFVKARTAQGNQIRGLLSEFGFVLPQGLQVITKRVPEMLEDSDNGLPSSFRQLIERLTNNIKEMDRQVDELEAEILSWHQNNEASKKLATIPGLGPITASAIVATVGDAKEFKNGRQLAAWLGLVPKQNSSGGKQVLLGISKRGDSYLRTLLIHGARAVIRFAKNKAEPNIWINKLLDRRNKNVVAVALANKNARIIWALLTKNTVFKANFSPKTVNVGV

SEQ ID NO: 374274 - protein, 416 aa, unidentified
MIMSGSSSPTPEPVETTHVVGIDIGSQACTMACLTMDKRQVIKPTPFANTVQGLDWLFERLEGLGVAPKQILVGLEATSRYGENLLQALLKRGYQVCLLHPAQMHAFAKQRGMRAKTDQLDATTIARALLSGEARFGYVPSEQVATYRELMRLQHQLSDDVVRYKNEIHALLAVLFPEFTQVFVDPTRPTALAVLKRYPSAQAIAQTEVETLSKCLHELAPRHYGRATAEALVRLAKASISSGLAIAARSSSLRILCDQLEHTQANLEHLQREIDQLLGQDPKATGLLGVPEFGPTTVAVLRAELGDLTRFTRINQVVAYVGLDLQVKQSGKWKGQTKLSKHGSGRVRRILYLAALRSIHLAASPFGAYYQRLLARGMKKGMAVVAVMRKMLIIAVHLIQTEECYDPGKVAVGAGN

SEQ ID NO: 374275 - protein, 344 aa, unidentified
MSEYAGQQFVGIDLHRRRSVIVRTTESGEVLESVRILNDVESLNRVIERAGEDPEVVLEATYGWYWAVDALQEAGARVHLAHPLGVKAFEYRRVKNDFRDAADLADLLRMGRLPEAWIAPPATREVRELVRHRAKLVALRSHCKAEIHAVLAKCGIQVSMSDLFGVAGTALLDRLQLAAPYAARIASLRRLIDDLDVEIEVFTDAVQGRLHADPGYVAVQQIPGIGPILGAVFVAEVGDVTRFDSAPQLACWAGLTPKHHESDTHVRRGPITKQGSRLVRWAAVESVKRVGPHTRVGAVRDRVAERRGGNIGAVAAARQQIEYVFYALRDGHVRALAHPARASA

SEQ ID NO: 374276 - protein, 318 aa, unidentified
MALELIFVGIDVSKDWLDVWLAPLKRFERIGNDAAGWLATIGLLRSLGDQPGIVVAFEATGGYELGLRQSLLEAGFDVRRLNPLRVRLYARSLGRYAKNDRIDARLIARYAEAADTTPDILDPAREHLAELVSHRRRLVDERVAVSNQLGTLRCDLLQAQNRKRCALIERQIEETDALILAAIADVPSFRAKIQLLKTLKGIKDITAMALVALLPELGRLSRRAIAALVGLAPFDHESGKFKGTRSIAGGRAAVRTALYMAARAAARSKSPLGDFYKRLIAAGKSPKIATVALMRKMLVTLNAMIRDNEPWKHAAAAR

SEQ ID NO: 374277 - protein, 364 aa, unidentified
MNEHITHVAFDMHQDSVTAAWLRPGASTPEVRTIPHEPKPFRRLVKEILSHGPARACYEAGPLGYAPQRQLEAWGLPCEVIAPSLIPRRPGQRIKTDKRDAKKLVGLYRAGELTPIRIPTPTEEDVRELVRCREACGADALRAQQHLRQFLLRRGLRSPDGPAGSQAWWAWVQALQLPDPAAQRTLDEYCLAATTLRARWKALDPEVAALASRDPWVTPVARLRCLRGIDTLTAVTVLLEVFDFRRFGTPRPFMSFVGLVPREHSSGGKEARGGITKTGNTHLRRVVVEAAWHYQHRPRLSKAIQARRAGQPPAVVALAEQAEQRLHRRFARLLARGKRPVIAATAVARELCGFLWAVMVQVPA

SEQ ID NO: 374278 - protein, 423 aa, unidentified
MMKLKYSICCGLDVHKNVIVATIVITNKDGVSEYKQKSFSTISSDIQKFHNWLIENHCYHVCMESTGKYWIPIFNYLENDIEICLTHPKYVKAIKGKKTDKKDSKWIADLYKFDLVRCSFIPPKDFRQLRELARYRFKLVCMKSSEKNRIQNCMTVSNVGIASVLSDPFGKTATEIMSYLLEHTADSIDEKAVRKLIKKGAKAKSDEIIEAIRGYNIETDQAKKLELARAHLDFLDDMITQTEVELYVRIKPYYEFVEFVSSMPGMTELSSTIVLAETGVDMNIFDNAKHLCSWCGLSPANNESAGKKKSVRIAKAGDYLKPMMVQCALAAVKSRKQPYFAIKYGRIKKRRGHKKAIIAIARMMMVCIYHMVSEKKPFTPTDYEELMDPQNHVERVVLNENNVFAYLETLGYDSSKLVKRSDN

SEQ ID NO: 374279 - protein, 317 aa, unidentified
MDTPCYVGVDVAKDSVEVHVRPTGEAFRCSTDAVGLREFVRRLKPLSARIIAMEATGGYESVVAASLDEAGLPVAIVNPRQVRKFAEGLGHLAKTDKIDAALIAHFAEVAGLTPRPMPPADQVELRALLARRHQLVEMKAAEAQREARAANKLLRRSHAAMTRSLTAEIARLDKAIGQLVDGSPLFRGKEDLLRGIPGIGPIVARTLIAELPELGTVGRHEIAALAGLAPYSRDSGKFRGKRWIRAGRPRVRALLYVAAMAAIRGDGPLARFYRRLLDAAKPKVVALVATMRRMLVIANAMIRDNTPWEEIAAASRI

SEQ ID NO: 374280 - protein, 345 aa, unidentified
MTEISTIGLDIAKSVFQVHGVDAAGAEVVRRQLRRGELLKFFGKLAPCLVGLEACGTSHYWARRIAALGHQVRLLPPARVKPYVTPGKKNDAADAAAICEAVRRPHMRFVSVKSAEQQAMLTIHRARDLLVGQRTMLINAIRSHLAEYGIVAAQGKGAFAGLLARLRSEEEGGLPEAALAALRLLADQIDDANAKIDTLEREIVARHRANEVSRTLATIPGIGPITASAIAAAVPDPAMFKSGRQFAAWLGLVPRQHSSGGKERLGGITKAGDRYLRRLLVIGATGLIRYKRENVPGGLDWLKTLLARKPVRLVTVALANKMARIAWAVMTAGTAYREKPTQQAA

SEQ ID NO: 374281 - protein, 349 aa, unidentified
MPILADLVDVVIGVDAHTDTHTAAMLSAAGAVLAELTVAADDDGAAVLAAWADDQAGGLRRQWVVDGARSHGVGLTRFLLAAGETVFDAARIPGSARRRGGKSDRLDAIAVARIALSAEHVATPRADGDREALRILHVARRHYTDTRTATVNLLKSLILTADDTLRRQLRGLNTDQQVRRLSHLEAEAETDLDAVGRVRRAQLRALATDIAALDQTLAHNLTQLRDLVEAMCPTLLEQPGVGPVTAAVALTAWSHPGRLRNEAAFAALGGANPIPASSGRTIRHRLNRGGDRTLNAALHTIALTRRRCHQPTRDYVARRTAEGKTLKEINRCLKRYIARQLFRLMQASA

SEQ ID NO: 374282 - protein, 349 aa, unidentified
MKKIFIGIDFSKEKFDATLIQAEGLKECAPSVHEVFDNKTPGYRRLVKWVKAHAEGFTPEAWLFCGENTGGYSIGLSNYLYALGYDMWLECAYKIKHSTGIQRVKNDKADSRAIAEYAMRNYDKMILHKPQSTSLTCLREVFLYRHSLVRQKVALQVRRNEKRLTQEKSDARAFMSFTSKHLITEVNKAIAKCDEKIKEIIASDDELREVFDIITSMPGIGVQNATCLIVYTDNFQKFDLDSRKIACYYGIAPFGRQSGTSVNSRPQVSPFANRMIKSLLSQAALAAIKFDINVHCYYQRLIERGKHPLLVHNNIKNKMLHILVAMVRDRVKYNPDNVYRTSNKVSLAP

SEQ ID NO: 374283 - protein, 410 aa, unidentified
MELLHRRCCGLDVHKETVVACLRLVSDGKVTTEVRTFQTTTADLLRLSEWLAVNGCTHVAMEATGVYWKPVWHILDDGEFELVLANAAHVKNVPGRKTDVNDAMWLAELLAHGLIRASFVPDTQTQEMRNLLRTRKQLVREQSSHVLRVQKTLEDANIKLDSVLSDLMGKSGRAMIEAMIAGETNPAKLASLADRRVKASPEEFREALRGRVTKHHRFLLRLHLNQIDALDAAMATIDAQVEANLEPFRTAAELVMSIPGIKNLGARIIVSEIGIDMSRFPSEAHLISWACICPRNDESAGKRRSNRQRKGANWLKTTLVQCAFAAVKKKDSYLQAQFHRIKARRGPKKAIMAVVASILTAIYHMLKNGTMYHDLGCDHFKRHSTDQQKKRLVKRLSELGYAVELKPLAA

SEQ ID NO: 374284 - protein, 354 aa, unidentified
MNLQKNEMEVVLGVDTHLDVHVGAVVSRSGKLLGTQSISTNTLGYLNLFNWATSFGHLEEAGVEGTGTYGAGLCRSLIDKGITVYEVNRPDRAKRRLKGKSDPTDAESAARSVISGIATAIPKHQSGACEAMRIASVARRSAVKARTQAINQLRAILVSAPQDIREKLWKVKAVECVQACNRVRNIGDTPLLDTLLITLKSLAKRWQMLTAELNQLDKLLEKLTQTHAKKLRSRFGVGPNTAAILLSVAGDNPERLKSEAALASLCGVNPLPASSGKTVRHRLNRGGSRAANNALWTIAMVRMRSDSRTKVYVERRTQEGLSSKEIQRCLKRYIVRELFPVILSDLGDSHNVLT

SEQ ID NO: 374285 - protein, 406 aa, unidentified
MKLVPIHKRVIGLDVHQAQITACAIIEEGSGETRIERRQFGGFKRDRRELAAWAATLRPDEVVLESTGIYWKSPYAALEAAGIRATVVNARHVKQVPGRKTDIGDAQWLATLARAGLLRGSFVPPAKLRELRLIARQRQKLVGLLSSEKNRMHKVLTDAGVRLGVVVSDLHGQSARAMIKGILQGQAPNEVLALASRRLKASREVLHDALQGELTASHLFVLDELLRHIKELEARIARFDARLLHELASEHNALALLQTLPGVDTIGAAMLLVEIGSDMSIFGNPDRLASWVGICPGNNESAGKRKSGRVRKGNPYVRRLLCEFAHAASRTKSAFHAKFQSLIVRRGHKRAIVALAHKMLRTIFFMLKRGDYYRDSATSYEQLSVQRNASRWIKALTRFGFIPAAA

SEQ ID NO: 374286 - protein, 347 aa, unidentified
MRFYTQQHGYYCGIDLHARTMFVCIISQDGTVLVEKNIRARPGPFLDLIAPYRNDLVVAVECIFTWYWLADLCHEEGISFVLGHALYMKAIHGGKAKNDRIDAGKIAALLRGGMIPRAYVYPSPMRSTRDLLRRRLHLVRHRGRLLAHIQNTNHQCNHDDFRKKLTYKANREGVAEQFDDPSTRKSVEVDLALIAQYDGIIRDLELFIVRMAKQHDIDMFHRLRSITGVGKILALTILYEVHDIMRFETVQQFASYSRLVKCSRESAGKRMGTGGAKIGNVHLKWAFSEAAVLYLRKNPAGQKYLARLTRKHGKGKALSILAHKLGRATYFVMTRSRNFDEKKFLAA

SEQ ID NO: 374287 - protein, 401 aa, unidentified
MKTVLSVDVAKNKSMIMLMNSDGEILIDTKEIKHNLENFEKVKEEIKENNPENLTVFMESTGTYHLPVERYFKENGFNTLVINSLTTKNNYDTIRKTKTDKKDCYRLAKLFFVNEVEYHELSKKDLYANLKAMTRQYFYLLHQNVSCKNRYKRLLNICFPELEKIFKSTRIYDDTALNFIKEFPHAEIVKEKRIDTLYNNLYKTNGRNLNFYKKLAATIKIASNNSYPGVDKEHKDVKNLSDMAKIVQNNNNVINELRDKMIETAKKSPYYEIINSFYGIGEILTAEILGELGDITRFDSPKQLIAFCGLDPTIKQSGKSINVKGAISKRGNKYARYILFNCSQMVVKLGTSNYPEHPVYIYYQSKKAEGKHYYECLTACSTKILRMLYSMCKNNKQFLEN

SEQ ID NO: 374288 - protein, 374 aa, unidentified
MAVGVVKQVGAFSRREGPGVGTLGPSTATPSRRKKVPVNKQYVGIDLHRRRSVIVHKNAQGELVSKTQIANDPLALADAVAAAGPEPEVVIEATFGWYWAVDVLTEMGAHVHLAHPLGNNWGNRRVKNDERDAADLVDLLRLGRLAEAWIAPPELRELREMVRYRHKLCRLRSGLKAQVHAVMGKHGVLPAWSDMFGKGGNAQLDGLDLAEGYSFRLESLRDLIGAYDREIVSLDRRIAVRLADHRGYRAIQAIDGVGPILAAVFVAEIGDVTRFPTADRLCSWAGMTPKHRESDTKVRRGSISKQGSRLLRWAAVEAVQKNHAGGDFKAAYRRIAERRGRSIAKVAAGRKVLTLVYYGLRDGHIRCLAPAAGG

SEQ ID NO: 374289 - protein, 351 aa, unidentified
MKEFISLDAHKRYSWMEREEVKSRKIRHARIEHAPGAIRQGLEGRQKGTPVAIEAMGNWYWIVDEIEQAGLEPKLVHPRKAKLMMGLINKTDKLDAHGMNQLQRNGTLPTVWIPPRELRDLREITRGRMVLTRHRSRLKNRIQATLSKYGWTGGEASDPFGKKARGELMKAMDTLPSQTAQVTQMLLEQLDFVEGQIQVMEQKIRELVKETVEMDRMRSQPAIGWILSAVIALEVGQMSRFASAERYASYAGTTPRVHASGDKVRYGRLRPDVNRYLRWAYIEAAHSVCLHRKAYPQRHVSQLYERIRARKGHGKAIGAVARHLAEATYYVWTREEPYRDPALGKGRSTEV

SEQ ID NO: 374290 - protein, 441 aa, unidentified
MAKLPILDPRAAFVDVGSEQMHVSIAGGTPKVFGTVTSQLHALRQWLIEQEVTSVAMEATGVYWLPLYSELERAGLNVIMVNGRQTRNLPGRKSDMMDCQWGATLHAHGLLRPGFVPPAHIRQLQDYMRLREDHIRSAASHVQHMQQALERMNIKLHDTISSLTGVSGLAVVRAILEGQRDPHELLALCDVQIRRKKAERVIESLRGTWADEHLFALSQALQSWEHYQRQIAQCDQRVELLLDQAAPGGGADDAKARPRGPRKGSSENAPKIPGLRDKVAAMCGGKDLSVLPGFTEYSVLRIISEVGTDLSKWGLDKRFASWTGLASGSDQSGKRRRSAGRKRNRVGRMFCVMARSLARSKDSALGGFYRRLAARRGALVANIALARKLAVLFWRMMVKGTAFVEMGLAAYEAKVLKGKQRAVNRLAKELGLQVTAIPTPA

SEQ ID NO: 374291 - protein, 412 aa, unidentified
MQDILTCAMGLDIHRDVIVACLAKGELGTDPEIEIRSFSTLIPEMRKLRDWVLEAECRYVAMESTGIYWQPIYEMLEPCFDGQISILVVNARHMKNVPGRKTDMRDAQWIATLLRAGLLKGSFIPDKTFRELRHLTRYRKSIVHDITAQKNRIDKFLQSSGFRFTAFLSDAFGASGRNIIRHLMEYGNISREALDRCLKTQTRKRIDEILIALNGSLSEHQRGFLRMIFGHLEALEQHRHTVEDAITKEITKHEEALSLLCSIPGIDVTAAAAIIAEIGTDMSAFPDSQHICSWAGLSPGNNESAGKRKSAHINKGNPYLKSMLCEVGWVISGKRSLYLSGWYWRIKQRKGAKRATIALARKLLALIYTMLKTGSPYNEDCFEIRRKQSERKRASRMVNELQKLGYFVVAPG

SEQ ID NO: 374292 - protein, 392 aa, unidentified
MIYAGVDIAKMDHVIGAVDETGAEVAKPMPFKNSESGFEKCIAWLESVAESEGGVFVGMEATGHYWMACFAYLTAAGYRVCVVNPMQVRAMRGLKGLAGVKNDRIDSWLIAETLRQGDYDETRLATDELQALKQLTRYHQGLKQELAAVKTQAVCVLDSYFPEYAALFSDIFGAASLKVLAECPTPSEAARKRTATIAKLLSEGSRGRLGDAKAAQVRAAARSSVGIRLGEDAASFQLKTMVSQVEFLNRTIAKVEREVASLLAKIEPNITTIPGVSTTTGAQIVAEIGDVRRFKSAASIVKYAGLNSGVDESGRFAARGVPITKHGSPYLRRSLWLAANRARQHDPRLKAFYDKKRREGKPHRVAVTAVARKLCHVVYAVMRDGEPYDPAK

SEQ ID NO: 374293 - protein, 305 aa, unidentified
MDVSKDWLDAHVWPGGACGRFARDAAGVAELQALCRQYDVELVVMEASGGYERLAFLLLWDGGQPCALVNARSVRRFAEGMDILEKTDRIDAAVIARYAVARGIAPMPPPSAAQQRLGSLVARLAQIAGDLSVNKQRCAATFCAETLASLDTVIACLKREERRLAGEIASLIDDDPLWSRLDRALRAVKGVADRTVARLLAQLPELGIVSNKAIAKLAGLAPIANDSGRRAGARSIRGGRAGPRSILFLIARIAAKYDPHLAAFHQRLLAAGKKKMVIRIALARKLIVILNAKARDARIQFANAT

SEQ ID NO: 374294 - protein, 426 aa, unidentified
MTNSLFIGVDVSLQSNQFCVLNFDQHKFFNLKFPNTPDGCEDAINRIKNIHDKFYFDKIVIVCEATGMYSFHLACYFSSHEYLNNFNTEVYQINAHDFAKYKDSFSDIEKTDPSDAYILADFARVGRTKALHPFRGSQYIALQRLTRQRYHISKNLVKEKLYVMNNIYLSFSGLIIADKKNKPFSNMFGATSCAIFDNFDSPDQIAETPVDNLLDLISKVGKNRTKNPNEKIDLLNKAIRSSYRLEQTAYNGINIAVASSLNTIKFLENQLKQVDKAILDTVSGLDSNAYNSLLSIRGIGKVYAAGILAEIGNINYFKHNSNLAKYAGLYWNRTQSGKFEKEDKKFSQHANKYLRYYLIEATASCVRMNFPFIKNFYDSKYKEVTKHQHKRALVLSARKLVRLIFGLLRKNQYYIPIDSNTQSLIN

SEQ ID NO: 374295 - protein, 386 aa, unidentified
MPQPKDDLSRSLVAFEQHRTLIAAVELSLATWLVGGIVPGIERDPLKKLVSDEEGLLKLLYRWRDEAVKAGHKITRMVVAFEAGRDGFWLARWLRARGIEAYVIHPTSVAVSREQRRAKTDRLDITLLKRSFLGWLRGEKKHCTMAAVPTLEEEDAKRPTREREQLVGKRTGIVNRMKAALVRLGIRGFNPKLRKAPRQLAGLRTPEGRPIPPNTLAELEREMAHLRFIDEQINQIETSRLKQLKQALQQGANTRVLQLQRVNGLGIETADMLSSEVLSRDLRDQRAVARYAGLTGSPDESGSRRREKGLAKAGNARVRRGMIQLAWRFLVHQKDSALAQWYQASVAAGKKRKTMIVALARKLLIALWRFVTTSDVPQGVVLRPAA

SEQ ID NO: 374296 - protein, 438 aa, unidentified
MIAYVGLDVHQDTVTAAFLRSDGSEPVKRWQVANNLPGATELAGRLSELGTANGTSELHIGLESTGLCGWHLAKLLSGPGAVASCQSQVYLLNPQRVKSWRKTMGTGGKNDWRDPFVIADFMRLGRGLPSPFHVDMVYAPLQRLTRFRFYVAHSLAREKTYFLTMLFLPFSAYGQAEPFSDLFGSSSLSILEGYTTEDLVQAKLTDLADTLHRSSRGHLADETGTAKALQQAAQDSYQLDHALHDPMRLVLQKTTLNIRGLQSTLKIVDATIARELKGIPQTLDSVPGLGPVWTAGLISEIGDISRFPNDAALASYAGLVWNGSESGQFQAQDVSLSKKGCVYLRYYLVESANSVRAHCPEYTAYYKAKYDQTPKHAHQRALILTARKLVRLVYPLLRYGQLYQKPEDRPSRQDGPLPHNARPGRTRSYPLAKAVGQG

SEQ ID NO: 374297 - protein, 400 aa, unidentified
MISVGIDVSKGHSTICVLKPYGEIVSVPFEVEHTEQDLQQLVEQIQSFSDGELRVVLEATGIYHLPVVAFLQQQGIFVSVINPLSMKKYASIALRQGKTDKIDSVKIANYGIDNWYHLVDYQPETETYQELRLLSRQYLHYTSLKIKAKVNLTNLLDKTMPGIKPLLRSQTEHPNQEKLCAVVNRYWHFDNITRFTESRFVKDFAAWGEKQHFYANEKKARDIYAVAQQGVTTLSSRLPSTKLLVQAAVRTLKELETTLSLILQEMQSLAELLPEYQVAIEMPGIGPTLAVRLIAEVGDVRRFHSANALIAYAGLDSPPHQSGMLVKKRSISKRGSPALRKTGFEIISSIRKTKPSVDNAVYLFMLKKQEEGKPVKVAKIAGLNKFLRIYYARAKEAYLN

SEQ ID NO: 374298 - protein, 322 aa, unidentified
MLEAVVGVDIAKKKFDIALFMEGKFKHKTCLNTRQGFEELSQWLKRQGVERVHVCMEATGTYGDEIATYMHDAGHTVSIVNPARIKGFAQGELLRTKNDKVYAALIARFCVAMNPEAWTPPAPKIRRLQSLVKRADALIVMLTQEQNRLGTAHETVESSIKEHIGYLDQEIEKLKRQITEHINSDPNLKTKRHLLSSIPGIGEATIAVIMSALHIFEGVDRVQKTVSSIGLAPREMISGSSIKGKPRICKVGHARLRKALFMPVLVAMRYNPVMIDFCSRLRRKGKNGKVIVCAILRKLVHLIYGILKSGKPFDPNYKPNFA

SEQ ID NO: 374299 - protein, 401 aa, unidentified
MLNPQSLQLRVGVDVGSRCHTVAIGLSDGSLLEEFEIPHTAAGFGDFFARIEGHAKRHPYPIAVAMEGYNGHVRPLDSLVKARGWRLFNVNNLKLARFKEIFPAAAKSDRIDSAKTLELFQLRDHLPMAGEVLQEVMATPEENNVLKRLSRRRRRLVNERGRVASAMQADLQAVCPGLLEITRSAGNLWFVNFLTCRKGLRKLARIRRDSLLKVPGIGATYANSIAAWQGRAYFAPDADLVGEMIQQDAARMLELKRHIKALEGQMAQVAENSAIAGRLVSIPGFGAICAAELAGEIGTLERFRSEASLALYLGMATLDNSSGKSRRSKAPRHVNTRAKRAMMIAVDKHRKLVPQSQRYYEKKRAEGKRHNQAIRALGRHLCRVIFKIIAQDRSYRIDPLP

SEQ ID NO: 374300 - protein, 412 aa, unidentified
MTKQLMAGMDLHSNNLFCGIVDGEGKRVFEKKLPCVLPQVLQGLAPFKERLDTIAVESTYNWYWLVDGLQEAGYRVVLANPAGMEQYGGLKHTDDKSDAFWLAEMLRLKILPTGYICQRPLRSVRDLLRRRMMLVHKRTALILSLQSLHARTLGCALSLGEAKLISVEAVRKSFAHPADKLISGLDVQLIEHLNKAIKQIEKMVLGMTKPLPCYRVLHSLPGVGRILALTITLETADVKRFATAGDYASYCRCVDTRRMSNGKKKGENNGKCGNKYLAWAYVEAANFAKRYDLQCRQFHDRKAARANKIVATKALACKLAKAAWHMMNEQTGYDPARMFPTAQSATTNGPVALDLSHQNRSRRQTCQDGAQAPSQPAVFGPKAALGLLPSRALSSASAKPSRARTKAQRKTI

SEQ ID NO: 374301 - protein, 431 aa, unidentified
MMDKERSWFVGIDWAAQEHVVSLYDGAGNKIGQRKFSHGGTGLTDMIAWLLKASGGEPGEIHVGIETPHGPIVEALLERRFNVYSINPKQLDRFRDRFTVAGAKDDSRDADVLSDSLRTDMRAFRKLSIADPLIVELREWSRIDEELKVEHGRLSNRLKHQLWRYYPQMLELADDVGAKWFLELFEAVPTPEKAANVREKTIARILKNHRIRRFDAAHVLAELCKPALAVAPGTIEAATAHIRSLIGRIRIINGQLADAGQQLDRLCKKLSEPVADEDGEAAPGQKPEQRDAAILDSLPGVARTVLATLLAEAPDTLQRRDYHALRALCGSAPVTRRSGKSRMVVRRYACNHRLRNATYHWAQNAIQHDHTSREKYDALRARGHGHARALRSIIDRLLSVACAMLDSGTLFDPEFAANELLGRSRSLEVTG

SEQ ID NO: 374302 - protein, 399 aa, unidentified
MNLNVGIDVSKAKLDYCGLDSDHNICFQDEAANQPIGVSTIKQAILQAAEVRSYDHIIIGMEATSMYNILPSYTFEHDHELNSLDVKVVTLNPKMTHKFSQVYDEDKTDKVDAMNIAEFIGLGRYTVPVPRDEAHFALQRLTRERFHLIKQINDCKSHFLNNLYYKLNTIDAELPTSVFGNTMMTVLADERYSLDELAELPLEQLISDLNEMGRGRFGDPEVVAKALKAAVRSSYRIGQIILNSVNMVLGMYANEIRMFSQQKKKLDQSIGKLLEAFPEAQCLRSVPGIGPVYTAGILAEIGQTERFPNEASLAKYSGLVWRRRQSGNSETQATPRVRAGDQYLRYYLVEAADSVRRHDPTFTAYYDKKYREVPKYQHRRADLLTARKLVRLVFALEPV

SEQ ID NO: 374303 - protein, 409 aa, unidentified
MRPILRSCCGIDVHKSMIKACVAKGPLNKPPKIEIRTFSTMTSDLLKLSEWLKENKVQAVAMESTGVYWKPIFNILEADFPVSIANPKYLKKVPGKKTDISDSEWIATLLRCGLIPKSFIPPKAIRELRDLNRTRRKMVEHMAAEKNRLQKVLEDANIKLASVVSKVDGVSSMNMIQALLTQDEISREDIAAMVHGKLKKKIELLVQALHGRLTDHHRYLLQLHLKQIAFLADQIKELDDVIQKRMKAFKKESDLIKTVPGIGDTTSSAIIAEIGIDMSQFPDEAHLSSWAGICPGNNESAGVKKSGKIRKGNKFLKATLCEAAWSASKKKGSAYSAYYNNLAKRRGKKKALVALAHRMLMDIYRTMKTGEPYVDEGAEAVFERNSSGRQKSAIRFLEKAGYAVTKASA

SEQ ID NO: 374304 - protein, 316 aa, unidentified
MAETHKTWVGIDVSKSQLDVYAHPSGTSFSFAQSDIGLKELIATLRSMSPELVTMEATGGFEASAAAALTAGGIPVAVVNPRQIRNFARAIGVLAKNDNVDAKVIALFAEATKPQLRQFPDEQTKQLHELLKRRAQLVEMLAMEKNRLGMSSGAVARNIKQHVKWLSAQISDLNGDIENFIRNSPVWREKEDILKSVPGVGPVLAASILAFLPEIGKLNRRQITSLVGLAPFDRDSGYYRGRRKIWGGRSNIRSVLYMGALTATRCNPVMKAFYMRLIAKGKEPKVALTACMRKLLITLNAMHKNNTAWSLQHSCC

SEQ ID NO: 374305 - protein, 391 aa, unidentified
MRFIGIDIASEKHVVAVVDADGQVVVKATVFAEDAGGYERLLALVGPPQDCLVAMEATGHYWQNLFAALAAAGFSVALLNPIRTHHFAKEEMARTKTDAIDALGIARFAQQKRPVITTLPDRATEELRELVRLRDRVVQDLGDATRRLHRLVDLGFPELTRYVKDLSSMLATTILSAYPTAAAFPVVARPLSKLVYDGRHKVGPELAGKLVEAAKISVGHHHGDAYRVQVQYACQDIGTARDRLRELDVRIETLLDAHEVGRLLTTIDGIGPHTAARLVAEVGDFARFDDGAKLAAYVGCIPGLRHSGKHRPTRNAMTSLGHARLRAALWMPLLTAVRRNVWLRNFYERLITAGKLPKVALIASMRKLLHAVHSVATHRVPFVPRLPEATS

SEQ ID NO: 374306 - protein, 428 aa, unidentified
MTQSPNPTPPTFAAFVGIDWADQEHAVCLSPADTLKPEQFTIHHTPEAIAEFVAMLRCRFGGQPVAIALEQARGALLYALMGHEFVRLYPIHPATSKRYRDAFAPSGAKDDPVDARLIWELLVKHRDQLRPWQPQDATSRQLALLCEHRRDLINQRTRLVQQLQAALKTYFPQALDWTGEDLASVMATDWLVRWPTLEQLQRVPPKTVRAFYYAHHCRRPDLVQQRLHQIKTAQPLTTDAAVIAAHSLRVQSLAHQLRPLLASLAAYDQQIQALFATHPDAAIFTSFPGAGECLAPRLAAAFGTDRDRFPDADSMLRWSGIAPVTRRSGKFQTVHRRYACAKFLRQTFHEFARCSIKFCEWARLYYETQRAKGKGHHAAVRALAFKWIRILWRCWRDRRPYDDSLYAAALRRSGSPLAKLLPLPSQQP

SEQ ID NO: 374307 - protein, 367 aa, unidentified
MQNASTFVGLDVHKNTISVALLRPGQPLLEWSLVNDTGGVCRLIRKLEREAEGGLCCCYEAGPTGFVLQRQLTQAGIECRVVAPSLIPVKPGARVKTDRRDARKLAELLRAGLLTEVKPPTEDEEAVRDLTRSRDDAQRDLTRARNRLSKFLLRRGCVYVVGRKPTWSAKCRAWLRALTFPRRADQIVFEDYLLAVEQVEGRLERLNEEIESVAQEQPWRERVQALRCFHGIDTVTAVALVAEIHDPQRFPHPRQLMSYLGLVPREHTSGMRERRGGITGTGNRHVRRLLVEAAWHYRHKPVVGRALRLRRREQSPKAIALADRALRRLTLRQRRMLHQGKHPNLVNIAIARELVGFVWNVLHPVTT

SEQ ID NO: 374308 - protein, 358 aa, unidentified
MYKFMKKFFIGVDVSKDTVDVSFFDDDRMKSPEYLAQYSNSPKGFREMVKDLRMCCHGVSSGQWLFCCETTGRYDHPMCHWLVDHGMVVWRESALQIKWSSGIQRGKSDRVDSLRIAEYAWRHQDKMQKFVKPSESLSNLKAAFTHRRRLVEKRTATRCQLKSMSSEKGLSASVARMIVRDLSREIERLSASITTMDESIQKIIRSDSELDRNYRHIISVKGVGPITAVALIVCSGNFKAITSAKKMACYCGVASFRSQSGTSINRKASVSNLSNRQIKSLLSMAARSASRSNPVFAEYFNRTLSRGKPVALVYNNLRNKIITVVYKLIERDCDFDVDYMRMHSTGQRANEPAIREAV

SEQ ID NO: 374309 - protein, 378 aa, unidentified
MPSENTVHVAIELSFSSWLVAARLPGIQTVRLHRVEGGNTAALLTLIGELRSRASRELDRTADLACCFEAGRDGFWLQRLLSAHGIAAYVLEPTSILVNRRARRAKTDRLDAEGMLRVLAAWLSGDRHVCSMVRVPTPDEEDAKRPHREREHLVQERLRIENRIEALLFGQGIRRRPSLRSWERDMAELRTGDGRALPPLLRTELDRLRRRLVLVLELIREVEAERAAATAAQADDGAVQKITMLQRIRGLGPNFAAVLVREVLYRSFANRRQLASYVGIAPMPYQSGGMDRDRSISRAGNPRAGTTLIQLAWLWLRYQPASARAAWFRERGGSLQGRTRRIALVAMARKLLIALWRYVETGVMPEGIEIQTQAEITA

SEQ ID NO: 374310 - protein, 334 aa, unidentified
MKKFEFFLGIDISKNTLDYCLLDDQCKVLEKGKVNNEPVSLSKFFLKFENEYCCKTTLLIVFENTGIYSKPVARFLNENKWCYSEVSALEIKRSKGVSRGKSDRVDAHQIAQYGFRNLDKIMLCTEPELIHQQLKILNTEREKMLSAIGSFSRTGEAEEFLGKEVFKVVKTHNRQTLSALRKQLKQLDDKISALLRSNEDLKKKQELLKTIPGIAEVGSLYLLLATKGFTRFKNWRKFACYCGIAPFEYSSGSSIRGRNRVNPLADKKMKSLLHLLALTSIRHDPELKLYYERKKEEGKHSLLVLNNVKCKLVSRIFAVIKRETPYVKTHQFAN

SEQ ID NO: 374311 - protein, 358 aa, unidentified
MNNVKSSRIDFTGQPIYVGLDVHKKSWSVSISTQYGQYKSFSQPPEVDKLVHYLRQHFPGAQYSTAYEAGYCGFWIHDRLKESGVGCLVVNPADVPTKNKERKTKRDRIDCRKLSRSLRNGDLEGIYVPPREKLEDRSLIRTRLSMGRKQTRCKNQIKSMLFFYGVVIPEQKEMGHWSQRFIRWIEGIRMERASGDMALKIHLEELGHLRQIIAKLNRAILALARTEQYRPWVLLLRTVPGISTLTAMILLTEIGEITRFPSIDELTSYVGLIPDTEASGEKEHIGGITQRSHSQLRWMLIEASWKAVQKDPALMMAFDQYCKRMRKTKAIVKIARKLLNRIRYVLKNRSEYVPAVLE

SEQ ID NO: 374312 - protein, 394 aa, unidentified
MYKLFVGIDVAKGSSVGHGLDGTGETLFSLAFPMDGEGFSKLFDAIKGNCGDLSEVLVAMESTACYHINLFSFLTSKGIIAVVLNPLLVSNFAKLSLRKTKTDKKDARTIAQFVMIHKDSISQLSVSQDLQDLRDLARESESLCKLISISKTEIKRLLQTLFPELETICDPSTKVMLDFLQEFSSARMVRVANPKAIAKVLKRRGVGTRLTYAAADLIKAAQNSVATVSPAKELILRNKVATLRHLYEQRHELMTALTDYCKASMIEDLEIVTSIRGISNNTATAFLAEIGNVRHYPTSKNLIAFAGIDPAVYQSGKYEGSGRISKRGNRHLRRVIWLMTTCVIQHNETFRSHFARKRQTGQPYKKAVLSTAHKLVRVIYSMLSQRTHFREDCI

SEQ ID NO: 374313 - protein, 310 aa, unidentified
MPDPVFVGIDVSKMRLDVAVRPTDAVWTSSNDDVGVAALVRSLVALAPQLVVLEATGGLEGQLVAQLATSRLPVAVVNPRQVRDFAKATGKLAKTDSIDASVLAHFAQAVGPTPRPLPSEEAEVLEAILVRRRQLSEMLVAERNRISTSAPSVRPGIQAHVIWLKAQIKSADGDLNSRLRQSAVWREKDDLLQSVPGIGPVLSSTLIALLPELGTLNRKQVAALVGVAPLNRDSGTLRGKRSIWGGRATVRAALYMGALVASRHNPILRIFYRRLLAAGKLKKVALVACMRKLLTILNAMFRDRCAWKAV

SEQ ID NO: 374314 - protein, 347 aa, unidentified
MAIVGGFDIHRRQVTFDYLDTVSGQVRRGRIDPACRETLRVWLARFADRGDVTFAVEGCTGWRFVVEELQRAGITALLAEPAETAHQRGPKKRAKTDRADARHLRTLVAEGRVPVSWIPPGQVRELRVLLQLYRDLREEHTAWVQRIHATLFHQGVPGLAGRLADPQARALLEHGQDIGLSPAGAQAVAVALRRMDDLEAALGPVHAQIAAFARHQAGCKALAAELYGVGPLVAAIVWAFLGDTRRFSSSAQAVRHTGLDVTVYSSDDKRTPGHLSHQGPPILRWALFEAGHQGSRASSPDHLYYTDVAARIDANRAALSVARKLARRSHHILRRLGDQACAPLPGW

SEQ ID NO: 374315 - protein, 334 aa, unidentified
MKNYCYHVGIDISKLKLDVNLLNVQTLESEHFVTDNNPKAIKSFIKLLIKRKIDVGQVLFCCENTGIYTNHVIHTMAELKFDLWVVPAIEIKQSKGISRGKNDKTDAKDIALYSFRNSDKMVLYALPERDIQKLKILYTEREKALKSLLIIETSKENSDFIDKEVFKEIEKLNNSLVNAIKKTIKAIEDKIKQIIQSNPVLQKQSELIKSIPGIGEQTSVYLIIATKGFTGFKNWRKFACYSGIAPFEYSSGSSVKGRTKVNHLAVKKMKSLLQMCAMTALKYDAQVKQYYDKKKDEGKNSMLVLNNIRCKLISRVFAVIKRETPYVNTYKFAT

SEQ ID NO: 374316 - protein, 338 aa, unidentified
MAILFVGIDLAKSVFALHGVNEHGKAVLVAPKVPRDKLLGMVAALPPCTIGMEACSGAHHWARQFAQFGHTVRLMAAQFVAPYRMSGRRGKNDAADAAAICEAVQRPNMRFVPIKSLDQQGRLSVHRMRQAFIEQRTGMINRIRGLLAEFGFVLPLKAATVRQHAGACLEDLPGWANLAIGDALSELHRLDERIAQYDRHIAQMARDDDRARQLMRLRGVGETTASAMVAMVGNGHEFSCGRQFAAWLGLTPGQYSSGGKSRLGRITKAGDSYLRSLLVLGARAVLNAAQGKSDTISRWACALAERRGYWRAVIAIAAKNARMAWAVLRRGEAFEMPS

SEQ ID NO: 374317 - protein, 353 aa, unidentified
MITIGVDAHKHAHMAMALDERGRVAGQWQGENSAAGWDEATRWARALGDERQWGIEGGGGYGRGLAQHLVDGGEVVYDINPRLTATERRRSRRVDKNDAFDAQAIAQVVQREEDMLPRVAAEDETVALDLLTAEREDAQAEATRLRNRLHHLLLQLDPEYHLHLPALTSVAGVQAAETYTTTSGNLVQQERAAVVRRLAGRLRLAMEQVAELGGRIEALAQARYAPLTRLCGVSLLTAGSLAGILGPGHRFASEAQLAAYAGVAPLETSSAGRVRHRLNRGGNRRLNAIVYRIALVQARWSPEAKAYLARRVAEGKTKREAFRALKRYLVRAIWRLWGACLPPAAVESVRQAA

SEQ ID NO: 374318 - protein, 349 aa, unidentified
MRYFQPPADTRFYAGVDLHARSLFLVVLDQQGQTRYARNLPAAPQPFRKAITPFRDGLVVGCECMHCWYWLADTCRDDNIAFLLGHAWGMKAVHGSKTKCDRKDAEAIARLLKGGNFPLAYAYPKERRGLRDLLRARLRLVRQRAELYGHIHTARRQLNLPPVSNDVKYKSKRGSATADIDDACVRRRVEADLSLLEPLDTTIRRLEKDIAVAARQHYATEMAVLQSTPGVGLVIALTILLEIDTLERFDTRQQFCSYARLCGARQESGGKTVGTGNAKQGNAWLKWAFSEAAVLSAQKNERIAKYLDKLSGRLGKAKALSALAHKLGRAFYHMLHKKEVFNIDKFLRH

SEQ ID NO: 374319 - protein, 344 aa, unidentified
MNSMHYIGFDIHKKVISFCEKQMDGTIVDQGMIKATRQSLNDWAGKRTTSWIGAMEATLFTGWIYDYLLPHAVELKVAHPEMLKAITAAKKKNDAADAEKIADLLRCNLLPECYMAPEEHRNLRRILRYRNLLVREAAKMKTKTATLLMEVGAEYNKQRLHGSKYFQELLGTLDYVPESVLNLLQMSRSGMEFFDRMQKSLVHALRNDPQICRRVELLMSIRGVGEVTALTWVLEIGDVHRFGRISQAVSYCGLCSAQKESAGKEIRGPLSKKRNKHLQTVLIEAAKLAPHWNPQLAMVHKRELQKGNRNKATLAVARKLVAYMLAVDKSQQGFIPKEVLKEAA

SEQ ID NO: 374320 - protein, 353 aa, unidentified
MEHFIGCDAHKKFSVFASIDEKGEYGETIRVPHDVEVFREFLNELPTGSKIALETSGCYYWMVDEMERAGHLPQLAHALTAKRRMEGRHKTNDWDAKGLAMLLRNGTLPVVWIPPAELRDQREMLRWRMCLSQMRTQIKNRIHGVLQRYNIDIAVSDLFGDGGRVKLLARQGELPPHSRQSVLEQLKTIDSLETQIGECERILEEILYPSVERDLLDSLPCVGKILSAVMALEIGDVRRFSGPDHLVSYAGVVPAARESADWKRKDKCPRDCNVYLKWAYVEAANLISAHSKHWAGRHVVQLYQRVKNSTKMHGKAAVAVARHLAEASYWMLSKQEVYREPQTRRQVLSSTHG

SEQ ID NO: 374321 - protein, 398 aa, unidentified
MQYALPLVLPDVPAGGVCAGIDWATADHVACVVDMTGRVTDRFSAAHDKAGIAALITRLRRSKVTEVAIERGDGPLVDALLGAGLTVVVITSRQVKNLRSRFGAAGARDDRFDAFVLADTLRTDRARLRPLVPDTPATISLRMTVRARRDLVRHRVAVCNQLRAHLAVAFPAGITLFHDLDSPISLAFLSRFGSQDAAAGLDEQAIGAWLATIAVRGRPTDGAAQAGITAALTATLTALSAQIKALATQIAGQLAAHPDRHIFTSLPRPGTVRAARLLAEIGDCRSRFPDPESLAGLAGVAPVTRRSGTRIAHGFRWAVNRQLRDALCDFAADSRHASPWAAAIYDDARARGKDHPLAVRITARAWTYVIWRCWHDGTAYDPAKHNALQAVLARQQDQ

SEQ ID NO: 374322 - protein, 360 aa, unidentified
MTMMAGSTRPVTGGVDTHKDTHVAAVVDPLGGVLGTASFPNQAHSFSALLAWMRGHGPLELVGVEGTGSYGAGLARFLRVEQVSVVEVNRPDRAARRTDGKSDTLDAIEAARAALSGRAHAIPKAGDGIVEAIRVLRTARRSAMQSRTQCANQIHTLVDTAPDPVRVQLAGQALAGIIARAPLLTVGTDLADPAACAPWTLQTLATRWAFLDDQLADLDHHLDRLVPRAAPSLVAQFGVGTDTAGALLVAAGDNPERLRSEAAFAALCGVAPLPASSGKTNRHRLNRGGNRDANQALWRIALVRMAHDPDTRTYVARRTGDGLSKREILRVLKRYIARQLFPHLAHLAGPPPPGCVTDPL

SEQ ID NO: 374323 - protein, 362 aa, unidentified
MTFFIGVDLHKTQFTVHVRTDEMAETLKQIRQYKTDKSGYAEFTERIQAYRESGACVKIGVESTGNTRFFKHQVEKAGAEVTVINTLKFKVINESAKKTDKHDAATISEFLAKDMLPASYLCSKETENIRRLLKSRERLVRSIVGQKNEVHALLVSMGLKDEQRSLQSKKGRQKILDVLESNNDYVLEAQSVKLMVEIISQMEAAVKIIEKQLSELTKDDEMVNRLLTIRGCGKITAWTIRAYTEDISRFSSAKKYAAFCGLVPWVSDSNETIRHGKITKRGPQELRVSFVQMVMGIRRCKDTANWRIMQRYDYMKTHKGSGKSIIAAARKLAEIVCAMLSNNNDFDREKMYGKYKPTPLAV

SEQ ID NO: 374324 - protein, 372 aa, unidentified
MGMLAEQADYVVGVDTHRDAHSAAAIAVSTGALLGQTTIAADAFGYKRLLRFARQHAKSRRVWAIESSGSFGSGLATFLLAQGEWVVEVDRPKRPARRDGAKSDELDAIRAAREVLQRDHLAQPRARGEREAIRVLLTTRRGAIRARTKAINHLKALLVTAREELRHQLRNKPTDELIFRCSRLRTLASHSTEHRATVIALRHTARRILALEAEANDLETEIERLVKSNVPELLEEVGVGPISAAQLYCSWSHRGRLRSDAAFAMLSGAAPIPASSGQTVRYRLNRAGDRQLNCALHTIVLSRLQHDPATRAYAARRLAEGKTPREIKRCLKRYLARHLFRVLEATGPHPVTTQQTTQRPRPSRIRTAGHCS

SEQ ID NO: 374325 - protein, 370 aa, unidentified
MSDVSVSYAAFVGVDLHKCTVSLCAVDPLGNPIASLTCDTKCVDRIEQWLLALPRPSRLAVETVGFVEWFIDRYRSCVDGIDIADATELANRRGKRRKTDRNDAADVARRLARGECPLGWIADEPVMQLRKLGRHWRHLSRTLSRAKHAMRWILLAGNLRGPRFDGASAQKWLLGNGHLLKDVQREAFGNLLDIVCLIERQRECLRRRIIFANRNPRFSALTAILKSVPGIDEIWACIIAAEIGDFSRFPNADALEFWSGLTPDNQESAGRTQSGPITKAGSATLRWALCKAAGVLCRSDAKQEAIRQRLIQRMPKPKANVAMGRRLLRILFAMIRDGTLYQGQIKTGYEAPANKARLKRMNQRKELVPV

SEQ ID NO: 374326 - protein, 355 aa, unidentified
MNDIKYIGMDVHQTSTSIVVLNASGRVLVSAVVETQGQAFVAFIQGLRGTLHLTFEEGSYATWLYGVLAPRVSRLVVCDPRRNALLQAGSKSDPIDAHKLADLLRLNALRPVYHGQNGLGALKELSRSYLALVQDSTRVMNRIKALYRSRAIPCAGTQVYLPSHRASWVEQLKEAGVHQRAEFLYRHLDLLSQLRREAKRALLAESRKQTITRILRAVPGLGPVRIAVLLAMVQTPFRFRNKRLFWAYVGLGLVTHISAEFTLVNGQLKRSGKAPALRGLNPNHQRELKEIFKSAASAAVQRPGPWQQFYQQRVQAGRKPELVRLTVARKLAALTLHLWKKGERYDIQHLKTTAV

SEQ ID NO: 374327 - protein, 347 aa, unidentified
MVTLGGDCHKRTHTLVAVDDNGRELGTKTVAAVAVGHLEALRWARQWVERRWALENCRHLSRRLEADLLLAGEIVVQVSPKLMAGVRRSAREWGKSDPIDALAVARAALRESELPVACLEGTSREVKLLLDHRDDLVGERTRVQNRLRWHIHELEPGFDVPARSLDRKVVLNRVAKALAVHRGVAADIAVELLGRVRELTARINELEHQLHVMVAQLAPNLLELDGCAALGAAKLIGETASICRFRTPAQFAMHNGSAPIPVWSGSHERHRLNRGGNRQLNAALHRIAITQMRVGGRGHDYVQHRQASGDTKREAIRALRRRISDEVFRRMWQDHLAAATVQQSAAA

SEQ ID NO: 374328 - protein, 422 aa, unidentified
MKLTYPVCCGVDVHKTFLVATIIKTDGLVPKYYKKRFSTFSRDLLAFRQWLLDNDCKDVCMESTGKYWVPVWNILEDAIRVVIANPKWVSAVKGNKDDTKDSRWIGDLFRMGLVPGSFVPSRKIRVLREFTRYRYKLISMRSSERNRFQNAFTVCNSTLDAVLSDMFGKSAAAIQNYLLDTDVVNPAYCASLLQRAAKKKSADVMAAVEGFKMSAEQKERVRIIQEHFSDINARVARLDAEINKLVSEYESQIALLCTIPGVDRNLAITIISEIGTDMSEFGSSKRLCRWAGLTPGNNESAGKKKSVKITRAGVYLKPALVQAAHAAVKSTKSVYFKSKYEHISKRRGKKRAIIAIARMILTAVFAMLKTGEVFHPCDLQKYDMPEQLRRRQVVSSAKNAVKLLVSLGVLQEDSVSLAALAG

SEQ ID NO: 374329 - protein, 335 aa, unidentified
MSLELLAIDLGKRSFHCHGIDSDGVILSRKVSRAKLLETIKELGPETVAMEACASAHYWGRRFLADGHRVLLINPWFVKPFVKGSKNDAADAEGIYEAALRPTMRFVPVKSTEQQDLQSLHRARERIVCARTALINHMRGLLGEYGIILPQGAWRFLKQAQDAIAAADLSDFARGLFVDLFYELRALDLRLDKLDQQLLKICRTNEACRRLSKLPGVGPVIATALVAAVDDGRHFQSGRELAAWIGLVPRQYTTGGKPRLGGIRRRANHYLRRQMIHGARAVMFRLTKHDDPRSQWLKGLAARRGFNRAIVALANKTARIAWAMLTRKESYLALA

SEQ ID NO: 374330 - protein, 413 aa, unidentified
MEVKENVKRYYLGVDWADEVHQVWVSDPQGNKAAEMKVAQSPEGMSEFSRWLHERRAQGIELWAAIEKPEGRIVDFLLDDGVVVYPINPKAVDRARDRFRMSGAKSDSFDAYVLSEFLRTDHGHLKALRPNSEQAQELKMLTRDYQRLVTQRTRLLNQVVATLKEYYPRPLDLFDDLSTNKALDFIKQCPTPEAVNELSRKQWNRFSRAHRFSQDQTEQLWKTIKAPQLPIPQHVVRAKAKLMAVLVEELDVLVKATTRYAGEVQCFFASMAAAKLASGLPGAKSGTTLASVWAELGDAPGRWQSFRHLQAQAGSVPLTKESGKVRIVHFRFSCNKRLRHAVYWLAFTSLNQSEWAKAYYREQRSKGHTHHQSLRALGAKWLKIIFVLWNDHKPYDENYHLANITRQRMRQAA

SEQ ID NO: 374331 - protein, 347 aa, unidentified
MLQIGDEKRVCLYFGKTTFHLVALGDNGKVLLKKKFTQKQLIAFTANLQTCLIGMEACSGSHFLGRALRAQGHDVKLIPAQFVKPFVKSNKNDFIDAEAIAEAVDRENMRFVPIKTDDQLDLQALHRVRDRLMTRRTALINQIRAFLLERGIVFAKSPIRLREALPEVLENVNENLTPRMRNLVAMLWSEWKDLELQIVQMNDEVERIASSDAACRRLRQIPGIGPLVATAIVASIGNGAAFRKGREFAAWMGLLPKQHSTGGKARLYGISKRGNSYLRKILIHGARAVVLRSKRDRIAMGAWMTSLETRAPRNVLIVATAHKLARIAWAVLSTGQDYRAVPEALTV

SEQ ID NO: 374332 - protein, 400 aa, unidentified
MGRSIGLDVHRDFCEVAIADNGRARSAGRVTTSEHELKLFAASLAADDRVVLEVTGNALAIARIIEPHVDEVLLANARRLKAISSARVKTDKVDARMLADLLAADLIPPVWAADEHTRKLRRLVSRRRGIVKRRTQIKNEVAAVLQHNLKGKPPAGDPFGRKGRSWMAAQELPADERLTIDASLRQLDFLGGELKAVEQLLAQEAADDAEARLLMTIPGFGMVTAITMVAAIGDVARFPNSRKLVGYLGLHPRVRQSGSSPARHGRLSKEGPSAARHVLIEAAWAAVRQPGPLRAFGRRVAARRGPQVAAVAVARKLAVLVWCLLSRGEDYAYGRPSLTRRKVRKLELLAGGEPRKRGPRADPIWKRADDAAERELAERAERAYERTVADRRSAGVGVRA

SEQ ID NO: 374333 - protein, 480 aa, unidentified
MAKHKKSTFERLQYGEMNRSQRRELEQKLWAADPGLEVVHRDAAGVDVGSASHFVAVPRDRDGQAVREFGSWTSDLKRMAQWLKECGIRTVALQATGVYWIALQETLEEEGIQVFVVNARGTKNLPGRKSDVQECQWLMKLHTYGLLRNSFRPPEEVRRVRTIWRQRCRLVEEAGRTVQQMQKALTKMNVQLTNTLTDVSGVSGQAIIRAILKGERDPWVLAKLRDRRVRASEAEIAHSLEGKWQEDILFELRQVMEAYDFYQGQMKDCDVELEKYMAMLPDRQIGGSEAERKPEETGKRKNKRSHAKNRPGFDLESELRRTMGADLSCIDGIGVGTGQMILSELGADLSAFPDEDHFAAWLQLVPRRDITAGKVIRHVRAEGRQRVANALRMAAETLARSNSYLGARYRKLRGRLGGPKAVKAMARYLACLVYRVLTKGKAYVDRGAAYYEGQRQQQEVSALQRKAALLGMMLVPAGNN

SEQ ID NO: 374334 - protein, 340 aa, unidentified
MRSKTVLSKKFKTVGQPNIDELFKVLETYCQDKPHMAVVESTYNWYWLADEFEKRNWNLRLADPSTVSKAGFKYSDDYTDASYLAECVRNGSIRSTAIMPKDDRAVRDLARYRMTLVEDRGRLKTILVNMTANHLSIKLNADKLLKEIDEAVEKAASASDEGATDEVLSHYYDNRQVRTKMRSLLRRIRFLTHEVEALDEELTELIKPNVYATSLQSIKGCGYVTSMLIGLEIGDIGRFRTHKDFVSYCRLAPTSKLSNGKSKGLGNAKNGNAYLSWALTELATFVVRYNPEAKRVYNRYFNRSRLRVKAIRSVAAKIARGIFMMLKNGEVFDMKRCFGG

SEQ ID NO: 374335 - protein, 437 aa, unidentified
MRRVIGIDIHRTFGEVVIWENGLTRHEGRVEMTRTALEGFGRQLKKTDEVVIEATGNCMAVSRVLSPHVKRVVIANPLQVKAIAHAHVKTDKVDAATLASLHAAGYLPEIWTPDAATERMRRLVARRYQVVRHRTRIKNEVHAILHAHLIPKCPHADLFNKRGRDWLTRQPVPEDERAAIARHVRELDRLGEDLAVLDRDIAQDAIDDEAIQRLLTITGVNLTVAAGLMAAIGSIDRFNSPQKLVSYFGLNPRVRQSGLGPAHHGRISKAGRSHARAMLVEAAWAAAKAPGPLQAFFIRIRARRGHQIAAVAVARKLATLCWHMLTKGEDYHWARPSLVAHKRRAMELAAGQPQKKGNRRGASFAYNVKELRQQEARIAEHAEKSYEQFVATWQPRPPKNSGGCAIASNRQGLNRLPGDASSRHATLRHEVDRTGEK

SEQ ID NO: 374336 - protein, 498 aa, unidentified
MKRPLYTYGGLKDMKNKSIFTRQNQTLINLFRDARHPDKVLCVPLDYAKQTHVALCCNGSGKVLKKAFPVKNNPAGIGFLLEAVEKICRKHHIHREHIFFGGEDCGTFSLNFIYGLREEGFVVIGVNAKDAKEQRENMQASSDELDLLGIAKLLINRRGSTAGGEPGAERALRTLTRHRKAQVRLRTATSNRIHQIVDQLFPGFLDERFSGIPPFSEASLWLMSDRFSPAQVAARQDKALLRQLKAHGLQHAEAAIGKLKAYARQVLAHPPELTGLLQTSLASETNLYRCLGANIDQVGRESAQQLARTPGAMLTTIRGIGITLAAGTSAEIGPPDAQPSTRRLGSYAGIVPRTKQTGGPEKGAKTGKVSRRCNHILKDYIVQCGNHLGQHGPADLKEDHRRRGANKQHADFGMARRFLRMGMRLMRNGESYVPPELREGATLEELRAYYLRLWPKLLDKWIKAGAVHTAFDPANPLGQWRERIEAIYEIELTLPNKK

SEQ ID NO: 374337 - protein, 337 aa, unidentified
MHFTYFVGIDVSKDTLDFSVLRSNDLLFHLQVANSLQGITQFFNQLNKVIKAVPGPCLYCMEFTGVYNFHLVEYLTRQQLPLWLESASRIKASSGMQRGKNDKVDSLRIALYAYKNKETVKLWQAPRPVIIRLKRLLTMRQRCIQLKKQAGVPIRENALFSNKEDAKLEASLFKQTLAALNKDLLNIEKAIKELINNDPELKRLFTLMTSIDGIGAVIAAHVLVVTNEFKDFNEAKKFACYAGVVPFDHSSGKSVRGKSRVSHMAHKGIKHLLHMAALRVIQLNGELSTYFIRKAEKGKNKMLILNAIRNKLIHRIFAVVKTGMPYQKNYINPLVLS

SEQ ID NO: 374338 - protein, 343 aa, unidentified
MKLYIGLDVSLASTAICAVSGHGKIVLEATADSEPEELVAALKTMPGGVVAVGLEAGPLSQWLYRYLTDAGFATVLMETRQVKGALKAMPIKTDRRDAEGIARLLQMGWYRPVHCKSVSAQEMRALLSARKAIQQAAINLELSIRGVLRNFGLKMGRVAKGRFEARVQELTEGNPMLEAAANPILATRRALRQELAGLEKALRDHAKEDPVCRSLMTMPGVGPVVALTVKAAIDDPDRFRSSKDIGPWVGLTPRREQSGERDIVGQISRAGDVGLRTALYQAATTMMHRGRKNWLTAWALSVAKRRGKKRATVALARRIGVVLHRMWMDGTDFRFTRKDAAAA

SEQ ID NO: 374339 - protein, 386 aa, unidentified
MPELNDLSRSLITLEQDATLIAVIEMGQSSWLVAGIVPGVERQPLKKLAVDESALLKLLNRWREEAEQAGHRIKRIAVAFEAGRDGFWLARWLRTRGIETHVIHASSVAVSREHRRAKTDRLDTELLKRAFLGWLRGERDHCKMVAIPTTKDEDAKRPNRERESLVGEQSRIVNRMKATLTRLGIRGFNPKLKKAAERLDDLRTPEDEPIPPNTLAELRRDMVRRRLVSDQIRQIEGARLERLEQAPCDGPHAMVRLLARVIGVGIETADMLVQEVLSRNMRDRRAVARYAGLTGSPDESGQKRREKGLARSGNARVRRGMIQLAWRFLMFQKDSALAQWFRARTENARGTRKTMIVALARKLLIALWRLVRDGVVPDGVSLRPAQ

SEQ ID NO: 374340 - protein, 325 aa, unidentified
MSSYEIVGIDVAARTLVAIGERVTLAAAYDNTPASRSSLIQTLGRSRWPVRVVLEATGIYFVDLACELVAAGIAVMVVNPKAAHHFAEAILQRRKTDPVDAAMLREYGRRMDFVPWQPPRPELFGFRALTREVQALSKAVAAAKNRLHAVTATRLTPAALIRALERQIAHNQTLIDELVAAALAQTETDPELARLFARTDSVPGFADKAAVLVIGELAVLPPMTARQWVAQAGLDVREESSGTSLARRPRLSKRGNKRLRQTLFYPALTAARCCPAAGAFVERLVAHGKTRLQAIVALMRKLLHGLHAMWRNDEDFNAEKLFAQA

SEQ ID NO: 374341 - protein, 345 aa, unidentified
MQNQEMKSFPFWFGVDVSRETFTAAGRSVLPGDEPRFPETESYTLDRNGARGFLKWAKSIAKDCDYGIVMETTGPYSGRLAAILKAICPSLHVAVCNATSISLYARSFSDEKNDKADAAIISRYGCERQPQEPRRPSPELGRLREIVRARDSLVDQRLQAANRLESIVDRDVRRIQKGVIKSLDNAIGKLDDAIRATVNSSAEIKHEVELMMTAPGVGFTSAACIYAELGSLKEYSRKQVSAMSGVCPVNQTSGKSVSKHKMSRKGSRLLRKILYLDSHMAIRMIPALREFHARMLAKPESSKMTAKCACMRKLLLLLHAMVMRDEKFDPNYKSEKNIKNVKKTI

SEQ ID NO: 374342 - protein, 377 aa, unidentified
MKATSTRPAAVLGLDVGKSSHWACLVDRDGEVLASAPVRNREAELDALFASAPAGTLVVVDQFRNIGSLAVRRARAAGLGVAYLPGLAASRAAGLFAGEAKTDERDAAVIARTALGVPDSLSGVPGCGEALEAARALSSQRDHVVACATRDKNRLRAVLLESCPALEAAVDLSDRRWLELLAGFGGAWGIARSGAGGPRAEAAGEAAAASTAPPPALVEAENRQVRFLAARISEALDEAGALEAETAALLEGDETYACLLTVPGIGPRTAAQLAVSVDIGRFPDHDHLASYCGIAPRVRSSGTSVRSVRASRRGDARLKSLLIFSCNSLVRSSGRYGEYYRACRARGMGHGRALKAVARKRLRAIYAVMRDRVPYRE

SEQ ID NO: 374343 - protein, 424 aa, unidentified
MKVTFQTCCGVDVHKSFLVATIIKTSSGIEPSYQKRRFSTFNNSILEFKKWLLENECLYVCMESTGKYWIPVFNILEDEINVTIANPKWVKAVKGNKDDTKDSKWIGDLFRLGLVRGSYIPCKKIRILREFTRYRYKLVSCRSSEKNRYQNALTVCNVALDSVVSDIFGKSSTSIIDYLLEQSGTSIDHEVIASKLLKRLKAKEDAVIESIEGYQMTDSQKYRMRLVRAHMDYITAAINDVDSEIESLIASDPDYENAVELLCTIPGVKYDSAITIISEIGIDMSQFCSSKRLCCWAGLTPGSNESAGKKKSVRITRAGVYLKPALVQCAHAAVKSDKSPYYKKKYESLVKRRGKKRAIIAIARMILTAIYQMLSTGEQWNPSDLYKVDMPEALLEKQKQKAIKQAQKLLIREGLLPPTEPIAS

SEQ ID NO: 374344 - protein, 415 aa, unidentified
MEPMHQRVAGIDVHRMKHVVTILIGQEDGAVSSQTREFGGFKRDMRALVAWLQTHHIQQVVMESTGIYWKSVFAHLEAAGIPALVVNAFHVKNVPGRKTDVGDSEWLAQLARFGLLRGSFIPPKDLRELRIVSRYRRKLTGMLAGEKNRLHKLLDDAGIKLGGVVADIDGVCASKMVEGLIAGGKPDELAALGRGKVRATTDILEAAMDGELSARHRLVLDMAYDHLRYLEGKLAALDRYLLAAMQPYAWAWRLLQTIPGIDAISAAMILIEIGDDPHRFGSPARLASWSALCPGNNESAGKRKSGKTRHGNPIVRYLLCEAANAARRTKTVFRAKYESLVIRRGHKKTIIALAHKLARTIYFVLVRREPYRDSTVDYEAASVAKNAPRWIRALKKYGYWPQVAAPNPPTAATAT

SEQ ID NO: 374345 - protein, 395 aa, unidentified
MENPIIACDVSKGKSHIQGFIGLSNPFGNPFVVRHLKCELKQIKDLAKSLEKQTKRKPVFVFEYTGIYHECIVNYVRDIGLECCAISPLESAKVRKSSIRVTKTDSKDCLNIATVYYTRKIRQFNCDNNNVKALSRRKTELKSQLIQLKCSYRRYIDLIWPCFDDIFDLDTQFASIIISKYKHPYKLKKWNVKAIVNTLLNNGHFSKSRVFDVADKVKDYAMNCVSGVDEDSEYVSGLVDTYERIQNIKDEISKINVRLEKALQNSVPYKLLKTIPCFGENILLQVSAEIGDYTRFKTAKQFVAYCGLDPSILQSGKDDGEHYSITRKGNRIIRSSLYLAISQMLVRKVDNQITKFYFKKKSSGLSHKVAAVASCRKLACCVFGMLNNGTCFETI

SEQ ID NO: 374346 - protein, 429 aa, unidentified
MNGVDTTRLESFRQLRKEIRGSSEHLIVGIDVAKDNHHAFFGTARGKTLLKRLVFNNNLQGYEKLFTYVEATKVKNNLNKVVFGLEPTANYHKPLGEHLIKCGFDVVLVAGTAVKKNRELLDGRWDKHDTKDAANVADLVSQGKCLFYEYPIMLLRELRNLLSFKRRLKKQEHGSRVRIRNHLLAQYFPELDPHFSRMSGCSLSVVKWCLEPSLIAGMEYEEFLRLVAPGKRTIRQREHVKLIWEKAFESIGCKVGETVQFEAKMMVEELQHVRESIFEVEEKIEGICLNFPEYKYLLSMPGFGKDISSKVLGAIGNPFRFHNAKQVIKLSGWDLNANRSGKSSGYATAVISKKGKADLRYALYQAALIASSRNQHFVAYFTEKLRQRSREKGIKTKMRVKLAAKLLVIAWTLMKKQEPFNPEYLKVTL

SEQ ID NO: 374347 - protein, 330 aa, unidentified
MGNWNVVLGVDVSKLTLDISCAERRLHIKIDNHSKGFAIFKRWCKTNSIELKELLVVMEYTGGYEYRFIQFLESQFIAYTRISGLEIKNSMGMVRGKNDKDDSFRIGQYGEDKIKRLEASRPLNNNILILRQLLSFRKRLVRETAGLKSTLKERIYMFSTGKDDRISKIIRSKIKADQKHQSEIEAEIASIIRQDGEMVKNYRIISSIKGIGRVNAWMTIAYTENFSSFPDARKYAVYVGVIPFGNTSGTTIKGKPKVSYLAQKELKQELNQAAKSAMQHDPEISAYAERKQKTKGYNLVLNNVKFKLILRMFSLVKRGEMYVENYRRAS

SEQ ID NO: 374348 - protein, 414 aa, unidentified
MKLFVGIDVSADQLEACFMNMDGDKLETLRVNNNLAGAQHLRDRILSAADKLPASEIHIGLEATSVYSWHPAMYLHEDEALKKRKTKVFTINPKLINKFREAYADMDKTDRLDAWIIADRLRFGRLTTTVVMQERYLALQRITRMRFHLVHNLIREKQYFLQNLFYKCNAFRSEVESSVFGNAILELLSEKYSLDEIATMEVAALADYLKDKGKNRFPDPEGVAACIQKAARASYRLSKVMEDSIDLVLGTSIQSIRSIRAQLKELDKAIEKIMDDLPGAKCLRSIPGIDLVYAAGILSEIGDIERFDDQAAVAKYAGLVWRKNQSGPFEAEDTKRIRSGNRFLRYYLVEAANSVKNRDPEFGEYYRKKYKEVPKHQHKRALVLTARKLVRLVDVLLRNDQLYTPRRKVNSTKV

SEQ ID NO: 374349 - protein, 366 aa, unidentified
MAQDTQVRYVGIDAHQETLSISVLVGSAKEPLPVQTIANREAQIRRCFKKLLEQGPVIATYEAGSLGFVLYRLLMGLGVHCVVAAPSHLPKIPGDQRKTDRLDAQRLAFFLRAGQIVEVRPPTPEIEALRTLTHARDSMREDVNRARHRVLKLCLARGVLYRDGQNWTPKHMAWLRSAELPVADDKQTLDFLVDELERRVGALARLDLRIEERAKLPDVAESVKSPMAFRGVRTLTAMCVVAELADPRRFKNARQVASYCGLIPSERSSGMKVRRGPITRSGNAKLRRLMVEATQHFARPFPGTGAVHRRRLLAPPKAQRIAARADDRLKARYRKLAARKHTNLAKTAVARELIGFLWATLHPDMH

SEQ ID NO: 374350 - protein, 350 aa, unidentified
MSVNHPNKQLILGVDTHLDLHVAVLINTLGQVICTAEFATNSTGYVKLLRWCQSFGHLTKAGVEGTGTYGAGLSRFLSNHQITVYEVNRPNRARRRLRGKSDPTDAENAARAVLADEAKAIPKTQNGSVEAMRFLLIARRSAVKARTQAINQIRAILITAPDDIRLKYLKSSQSACIEGCANMTAMDGSILLETLSISLNLLAKRWLNLTEELRKIDKNLKKITRTTAPTLMSQYGVGSYVAATLLVTAGDNPERLKKESSFAALCGVSPIEASSGKTVRHRLNRGGSRIANNAIWTITLIRMRSDPCTQQYIARRTKEGMSLKEIQRCLKRYINRGLFPIILNDLSLSA

SEQ ID NO: 374351 - protein, 411 aa, unidentified
MEVIHLCCCGLDVHKETVVACVRRTRPNGGIDEPVRTFATTTAGLLELGDWLVEQQATIAAMESTGVYWKPVWNLLESRLELMLVNAREVKQLPGRKTDVKDSQWIAQLLACGLLRASFVPPLPQRELRDLTRTRTSLLQDKSRVANRLQKILEDANIKLGSVASDVLGVSGREMIRALIDGRMSAEQMADLSRRRLRQKIPQLKEALTGKVSAHHRFMLQLLMDEIEHYEQHITRLDRRIEEVMSPLEKTALTVLDEIPGIDQRAAQNILAEIGSDMSRFPSSAHLASWAGLCPGNNQSAGKRRSGRMSDGNRWLKGTLNQCAWAASRKKDSYFAAQHRRIASRRGVKRATMAVAHAQLCICWELLRQGQCYQDMGRDYFDRINEDRVKRQLVKRLEKLGYAVTLKKDAA

SEQ ID NO: 374352 - protein, 368 aa, unidentified
MDEGTRYVGLDVHKASISVAVAGPYGEPEDHGTIVNDAASVRHLLQRLGEGGRRLAIAYEAGPTGYALHRQVTAMGIDCIVVAPSLIPVRPGERIKTDKRDAAKLARLLRAGDLVAVWVPDEAGEALRDLVRARDDAKTDRLRARHRLSKFLLRRAVHPPGGVRAWSRAHETWLDKVVFAQAADQVVFEDHRSVARAAAERVKRLEGALLRTAGEGPQAELITALQAIRGIGFLSAVTIAAEAGDLRRFATARQFMAYVGLVPSEWSSGPARHRGRITKTGDRLIRHVLGQAAHNARHRPNVSPGLRARQRLVTPEIVALDRKAQARLHHRYRALVGRIGVNKTVIAVARELAGFVWAAGQQVPPRTA

SEQ ID NO: 374353 - protein, 395 aa, unidentified
MDFLKYGLGIDMAMEKFDVCISIIDKKQQVMIRSQCSFSNNKKGFETFILWVTKNTKLDIPAVYLMEATGIYYEQVAWFLHLKNCSVSVVLPNKAKKYKEALGLKSKNDRIDAKGLAQMACEQNSTIWKPLTQSLYTLRLITRQIQSVSEQATVLKNQLHALEYGMYRDKAIEKMYARQLDLLQKNKKSLQLRVKQIVEDDELLKKKFTDIGKIKGLGLQNLAVIVAETNGFTAFENIAQLVSYAGYDVVENQSGNRSGKTKISKKGNNHIRRCLHFPAFNMITYKVAPFKNLYERVYEKSKIKMKAYTAVQKKLLEFIYILWKKDEAFNPNYQDKESRDVEPAPSFASVPQEPLIACGKEENEIKPFKQKITPAITRVTQDKHPSKYRRMPSFA

SEQ ID NO: 374354 - protein, 343 aa, unidentified
MEKRYIGIDLHRNQFTCCIRLENGREYLSQWRLEDLPRFIKKLRSSDELAVEVTGNTRLFYDTVASHVARIAVVDPNQFRVISRSVKKTDSNDARLLGLYLSKELLPEVRMKDKEHSQLASLTQTRDTLVKLRTALKNKVNNMLSARGINLAKEALSSEKKLNEILTLPFDPVVQIELRVIVDQIRSLNRSIAELENTIAEEASKLEGHKSLISIKGIGKITSAVLLSVIGDVSDFPDESRLASYFGIVPRVANSNEPERSGHIHKRGSKLGRTALIQSALIAANYSPYLKSFYERVKARRGAGKAIIALARKFLGIVYRTLKNQWVFADFPNFVLAEPVEAA

SEQ ID NO: 374355 - protein, 412 aa, unidentified
MEVLYTSCCGLDVHQATVVACVRRAGKGRRRASTVRTFGATTAELLRLADWLTEQEVTHVAMESTGVLWKPVFNILEGTCEVILVNPQHFKAVPGRKTDVRDCEWLAQLLEHGLRRGSFIPPQPIRELRDLTRYRKVLIQQRVTEANRVRKLLESANIKLGVVATDVLGASGRAMLRALQSGERDGAVLAELAKGTLRQKRAALADALTGRFTGHHAALLGDLMEHIEFLEATIARVSQRIATAVMPMAEQVAHWQSIPGVDRVAAETILAEIGPDMSRFPSAAHLASWAGICPGNNESAGKRKTGKTRKGNRWLKPLLVECGWGAGRGRRTYLGAQYARLAHRRGKKKAALATGHSILVAAYHILRTGVAYRDLGPDHFDRLASDRLTCHYVHRLEQLGHRVTLNTVPGVA

SEQ ID NO: 374356 - protein, 345 aa, unidentified
MKITTIGIDLAKSAFAVHGVNEHGRAVLKKVLKRGQVAMFFANLQPCLIGMEACGSAHHWARKLQGFGHDVRLIAPQFVKPYVKTNKNDAADAEAICEAVARPNMRFVPVKNVEQQAVLAQHRVRQGFIKARTAQANQIRGLLAEFGLIIPQGIANIAKRVPELLEDATNELPGSFRLLVQRLMEHLKELDRQAGEIEAQIVTWHRDNELSRKLAEVPGIGPITASALVATVSDAKNFDNARQLAAWIGLVPRQNSSGGKNVLLGISKRGDTYLRTLLIHGARSVICAFQRKKDKVDGWLGALLARRNPNVAAVALANKNARIVWALLAHDREFRPGYTSAQASA

SEQ ID NO: 374357 - protein, 367 aa, unidentified
MDETITYVGLDVHKETIAVALADGGGRGDARAFGQIVNTPTALTRMLAKLSQPGRTLKFCYEAGPCGYGIQRQLSAAGHDCVVVAPSLIPHKPGDRIKTDRRDANNLARLHRARELSAVWIPDTAHEAMRDLVRARLAAVRSLRQARQQLSGFLLRHGFHYSRPAWTQMHRRWLAGLCFEQPIHQIVLQDHIATIEAATERRDRLTKQIETMLSDWSLAPVVVALQSLRGMALVTAATMIAELGDLSRFTNPRQLMAYLGLVPSEHSSGGTRRQGGITKAGNTTARRMLIEAAWSYRFPAKISRDQLIRQEQLPKAIRDTAWKAQERLCGRYRKLTKAGKPATTVTTAIARELSGFVWAIACQVSPR

SEQ ID NO: 374358 - protein, 336 aa, unidentified
MQHYCGIDLHSNNHVVVIIDEEDKRVFERRLSNDLSQTLKVLQPYQSTLCGIAVESTFNWYWLVDGLQAHGYQVKLVNTCAVVQYDGLKYSGDQHDAFHLAHLMRLGILPTGYIYPKEQRAVRDLLRRRLSLVRMASAQLIGVQSQLWRSTGIRISSDTLRRQDFKIPLEESHTRQAIESGLAVYQAIQREIDVLEQSAYQAVKLNKAFEILQTVRGIGKILGLTIMLETGDIHRFASAGDFASYCRCVDSTRTSNGKKKGNGNAKAGNKYLSWAFSEAAHFAVRFEPLAQRFYERKKTKTNGIIAIRAIARKLARACWMILKHQRPYEAKLMFPG

SEQ ID NO: 374359 - protein, 348 aa, unidentified
MDHYAGIDVSLEQSSVCVVDANGKIVREGKAASEPEALTAWFGALGLDLARIGLEAGPLSQWLYAAMRQAGLAVELLETRHVRDAFKAMTVKSDRNDARGIAHLMRLGWFRPVHCKSIAAQEVRALLTARKLVDTKLHDVENSLRGILRGFGLKVGKTTARSFAPRVRELVAGQPALETIAEALLTVHEVLKGEFKGFERRVRALAREHEQARLLMTTPAVGPVIALTYASAIDDPSRFPSSKAAGPHFGLTPRKYQSGETNRTGRISKIGDASVRQALYQAAHIMLTKPLKGVTALKSWAMRIAGRAGPRKAKVALARKLAVILHRMLADGRAFNPVASAEPKVATA

SEQ ID NO: 374360 - protein, 333 aa, unidentified
MQFELFIGIDVSKLTLDIAFLSQDAEVESFKIENKPVSIKRFFKKISKKLNLEHSLVCAEFIGHYCYPLRKVCLEEGYSLWLESGAEIKQRSGVTRYKNDKVDAIRIADYARRHQDKAKVQKIEDYTLESVRALSAERELFIKERAKYKVQIKDLKGFMDEALYKARSKRLTKQVDSLTKLIKEVDQQIKSLLESSEKLTNQKAILTSIDGIGDQVAIHTILATSAFTKFNSGRKFACHAGVAPFAFESGTSQRSRRKVSFRANMELKKLFHMAALSAIKMKGEFKEYFDRKVAEGKNKMTVINAVRAKLINRIFALIRDNRKHEKNYQPNLA

SEQ ID NO: 374361 - protein, 453 aa, unidentified
MKKADQSNAPGESFKRKIFSQGLPVFHLYAAGIDVGDTIYDVAISNGGTGHEVREYSTFTEDTTNLVDWLVSEGITTVAMESTGVYWLNLYLMLEEAGIEPYLVNAKHAKNVAGRKKDDTDAIWLQKLHSCGLLQKSFQPEAEMRVLRSYVRQRKNLIRISSDSVRRMQKAMELMNIKLHTVISDILGKTGLQMVNAIVNGERDPKELVKLKDPRIKASEEDLKKSLTGIWKKEYLFMLKQAYDEYLFYQAQITACEEMIKEQLLNQAAKILDGDLTDIQLKKKPKKNQFSFGIQSLLKIIVGVDLCEVDGINEVSCLELISEIGTDMSKWNSGKHLSAWLNLAPNTKITGGKIISSKMQKKKNHAGQTLRMSASGLSKCKSPIGDYARKMKSRLGKTAAVPAIAHKLARIVYTMIKEKRPYNHEIMSNNQEIWKEKRIKYLEKQLNQLKCAI

SEQ ID NO: 374362 - protein, 327 aa, unidentified
MMRRVIGMDIHRTFAEVVFWEAGKLRPAGRISMTRAGLEGFGRTLSKEDEVVIEATGNAMAVVRVLSPYVGRVIVANPLQVKAIAHAHVKTDKIDAGVLAALRAADFLPEIWLPDPETERLRRLVARRNQVVRHRTRIKNEVHAILHAHLIPPCPHAELFGRLGRIWLSQQGIPDDEAAAIDRHLRELDRLGEDLAVLDREIAQAAIDDPAVKRLLTITGVNLIVAAGLVAAIGDIRRFSDPERLVSYVGLNPRVRQSGLGSGLPSTGASASAAGRMPVQCWSKQPGLRPRHRVHCALFSCASVPAAVTRLPRSPSPASWRCCAGIC

SEQ ID NO: 374363 - protein, 416 aa, unidentified
MSFALPDALFFTGIDWAAETHAVCVMDAVGTIVAEFTIEHSADGIAALARCLARYGQPGVMPVALERPNGRLVDLLLEAGHPVVPVKPNAIKAWRDGEVLSGAKSDAGDAAVIAEYLRLRAHKLKAAAPYSDETNALRTVVRARGDLVEMRVAASNQLAALLDAHWPGAKAIFADVESPISLEFLTRYPTPASARHLGEKRIAAFCAKHGYSGRRSAADLLARLRHAPAGAATEALTEALRDAVLAAASVLTALNASIKNLDRSVAAHLGEHPDGAIFTSLPRSGQVNAAQVLAEWGDCRQAYEHPDSVAALAGCTPVTKESGKHRAVHFRWACNKRFRKAITIFADNSRHASPWAAKIYNDARASGKDHPHAVRVLARAWIRVIWRCWLDGAPYDPTRHGAAAALTGQPAKQTAA

SEQ ID NO: 374364 - protein, 521 aa, unidentified
MATKAPRRPPRRPHEIHKPNGSIHPRVQTVGPEHFGIVAVDCAKARSKWMFANFYGNVLIEPTELDHAKPAFQAATDQIRQACATHQVLDLIVVVERTGRYHHVVRDAFTAAGFEARVVHPFATKQFRQPADPGNKTDDTDLSAIHRAAVNGFGLVEPAPDPTHNQLKLLARHRRDLVRKAVALRCKIREHLNVFMPGFEKCFADPFDGAVALTLARRLGFPRAVRDAGVAGLERVLREAGVGFQKRSLDRVLAWAEQAPDPSDDAPIHQRIAIALEDDRRAKLREIATLESDLAELLARTPYLLLLSIPGINVVSAAEFAGEMGPIGHYASSRSITRRAGLVPSRYQSDQVDRKNGPLIRQANRSLRQAILTIADNLMSCNDDFRRQAARWREAGKDPRHSHVKVAGRFCRIAYQMVAGGRVFRHPCCQRRDYVLSKLIKFHGEHVTPLVQAQATLAQAVGQLPGSEYAAEAAPLAEELESACRKRGRGPCLIGELLPAVLAKLGVDLVESTSSGEVDPR

SEQ ID NO: 374365 - protein, 350 aa, unidentified
MIHIGMDLHHRNHVVRALSDDGELFKARRIYHDDLSRLWQYLDQFGDEKIRVVFEAVSNARWMYRLLAARPNVEPVAVTPHKVKIIAETVAKTDTIDAGKLALLSKINMLPRAWLPDERVELLRELVRHRAALVRQRALCKTQVNGVLVRCGLQRAYDDIFGPLGRRWLASLKLPGVMRLQVDHWLASIDGVTPRIANMDRRIHAAIAADPHWQSDAALLDSIPNVGPVTISTILAELGDWRRFRCRAEVAAFAGLAPVSKRSSNTKRYGHISKRGSSELRRVLTEIAQGAGRRIPQYRALYERVAREKCANVAKSAVARRLIEDAWTILKKREPFRLMPVQAESLTRAG

SEQ ID NO: 374366 - protein, 349 aa, unidentified
MKIIGCDFHPSYQQIAVLDSVTGEMVEKALSHERKEEVRTFYAGLEGPVRVGIEASGQSQWFERMLAELGHEVWIGDAAKIRASCERKQKTDRRDAELLLRLLAEGRFPRIWVPTAAERDDRQLLLHRHKLVRMRTQVKNQLQAQALNQGVQRKRKLWSEAGRKQLESLPLLPWASRRRAELLQLLDQLEASINELDRAVAEQASARPAARRLMTHPGVGAVTALAFTLTMGPAERFQRGKQVASYLGLIPSEHSSGGRQQRLGHISKQGNPFLRGLLVEAAQSAVRYEPEMRRAYQRLAQRKCRALAKVAMARKLAVRLYWMLRLQVNYAQLIQGSHAGQPGTFCGRG

SEQ ID NO: 374367 - protein, 316 aa, unidentified
MDHNTAVYGVDVSKAKLVIGRYGVHTLTTVANGAEPIAGWLASLPKGAVVAMEATGIYHRLLAEMAHVAGMQVYVLNPQTLKHYARAIGQRAKTDPCDARMIARYVMHERAKLRGWQPPARAANRLAQLLERRHTVVGVRETLKQSLSGLPMLKATQHSLLASLERTVERIDILIDHEIARLPGAAALYERLKSIVGVGPVLAAQLVAVFNTLNFAHEAAFIAYTGLDPRPDDSADRHGRRRLSKHGPGLLRCQLFNGARAAANSKLFKPRYLQLRNRGFETTEAIVILARKIARIAFALFNSGEIFDAQKHFKTA

SEQ ID NO: 374368 - protein, 347 aa, unidentified
MVTFGGDSHKRSHTLVAVDENGRQLAACTVAATSSGHMEALGWARQWPERRWALENCRHLSRVLERELLSAGEAVVQVSPKLMGSARRTGREQGKSDPIDALAVARAALREPHLPVAQLEGKSREVKLLVDHREDLVGERTRIQNRLLWHLHELEPGYQVVASGLLRTVILGEVRRRLENRTGVVAEIARELVERLSELTRSVKRLQRRIEALMEELAPALLRLPGCAGLSAAKLVAETADVRRFRSSAAFAMHNGTAPIPVWSGNHERHRLNRGGNRQLNVALHRIAITQMRLGGPASAYIARRLAMGNTKTEAIRALRRQISDEVYRRLRQDDSERSTAPIAAAA

SEQ ID NO: 374369 - protein, 338 aa, unidentified
MQSYQLFIGIDISKKTIDVSVSPNGSKSQMPHACFENKPSGFKSMLDFIKTHQNGIKKNNCFFCMEHTGVYTFLLCNFLQKHGLAYTLVSPHHLSKSLGLRRGKNDKADSKDITRYAYLFREELKPSVLISDTLLTIKSLLGLRRRLVNAKKGLTTAANELRQFAKPAIYKPLVEQSNKLIRQNEKAIEVVENKIKKLIEKEQELQRLFDLVTSVKGVGFVIAAHLLVYTNQFKGFENAKQFACYIGVAPFEKSSGTSVYVPAKVSHMAHKKLKGVISNGASIAILYDKELKAFYDRKIKEGKNKHVVRNAVTNKLIHRVFAVVKRGSKFIDLFRHKA

SEQ ID NO: 374370 - protein, 395 aa, unidentified
MLAANERPEAPTAIRIDLGAIFVSLELSRSKWLITSLSPGGGEKMSKHAVAAGDIAGLLAPFAELKRKAQARTGRCFPIIVIQEAGLDGFWIHRVLQAEGIESHVVDPASIATSRRRRRAKTDKIDGETLVRALLAYKRGEPRVCAMLRVPTPEEEDRRRISRERKALTNERVRHVNRIKGLLFSQGVSGYQPLRRDRRTRLEELRTGDGRPLPAHLKMQISRELDRLELLIGQIKAVEAERDAMLAVAPVGSAHFADCEQPAPAMLLALKGIGPEFAVVLWSEGLSRHFDNRRQVAAYAGLAPTPWQSGSIDHDQGVSKAGNPRLRTTLIQVAWLWLRHQPHSALSLWFKQRVKQNDGRLKKKTIVALARKLLVALWKYVNAGVVVEGAVMRTA

SEQ ID NO: 374371 - protein, 357 aa, unidentified
MKSKIKQLDFVGETIFTALDVHKKNWCVTIGSKEFELEHYTQNPNAKELARHLKKNYPGAKYIVAYEAGFCGFGIQRSLKEEGIDCIVVNAADIPTSNKEKRRKQDKIDSRKIYKRLAAGDLEGIYVPQTEMEHARSLVRERSRIVSDQTRCKNRIWSLLMFSSLSVDTDKPKQYWSRKFVESLKQLDCGSKPLREALDLAIEEYILIRQLLTTATKKVRELSNDKLFAEIQQFLRSIPGIGLINAMVIHTEIQFICRFKTLDHLCSYAGIVPDSDSSGDKERITGITHRSNNYLREAIIESSWVIVRKDPAMLMLYKRYCARMDENKAIIKIARHLLNRIRYVWEKQTEYEIGIAA

SEQ ID NO: 374372 - protein, 353 aa, unidentified
MPSKADTAVARTIGIDTGKNTLHVIGLDEKGAIVLRERVSRTRIAARFVNVPPCLIGIEAGMASHHIARELVALGHEVKQVPPGYSKPFRQGHKNDFRDAHAVAEAVERPSTRCVPIKTDEQLDLQALHRVRSRLISNRTAVTNQIRGFLLEHGIPVRQGHHFLRRQLPQLLGTRTDVLSPRMIRVIGDLMSDWNYLDERIERVTDEIESLARADEGCQQLITVPGIGPIVSSAMVAAIGTGAAFCKGRDFAAWLGLVPKQMSTGDRTILGRITRRGNRYLRTLFIQGARAILLRPTGWAKHSFGSWLAAAARRMHRNVLAVALANKLARIAWTVLAQARCYEARVEPRVEPA

SEQ ID NO: 374373 - protein, 351 aa, unidentified
MIIIGVDYHPSDQYIAFVDTETGEGEERRLNHSDQEAEKFYRELALRGVSVRVGMEATGYSRWFERLLAELGIEVWIGDAAEIKTKRVRKQKTDPNDARLLLKLLLENTFPRIWVPSPENRDLRQLLWHRHRMVQMRTRIMNQLQALAMNEGQRRRKKLWSEPGRAQLEKLPLATWASRRRHDLLELLDRMNPTIEALTTAVEQEAKKRLEVLRLMTHPGVGPLTALAFVLIIGTPERFKCGKQIGSYVGLIPSEDSSAGHQRLGHISKQGSSLLRFLLVEAAQAAARCDAEWRRRYVHLAMRRQKSIAKVAMARRLAVRLYWMWRNGWEYSQWVKVGPYAGQLVTGHGVN

SEQ ID NO: 374374 - protein, 390 aa, unidentified
MHVVYECCAAIDVGKDEIAVAVRMPGDGPDGRVTVKRTFRAFYGVMGEAARWLVSLGVTHVAMEATGIYSMPVYYALLEHGDFARVLICNAAHVKNVPGRKTDYADAEWLAHLLECGLLAGSFIPPAEIKAARDVIRYRTKIVQQRVSEIARLGNTLQDAGIKIDSVASSIATKSGRAMIEALTDGEHHALMCRLHLDHIDHLEAAIARLDARIEQMMEPFQCWRDLLITIPGIGRHAAAAVISEIGVTVKEFFPDDAHLASWTGLCPGNHQSAGKRRSGKPRHGNTHLQTLLVECAWSAVRHDGYLRSLYHRHVMRNGGYRSSTAKKKAIVVVAHAMIVIIWHIMDTGKPYYELGAGYFASLQDPERETRRLIARLQALGHAVTINPAA

SEQ ID NO: 374375 - protein, 346 aa, unidentified
MMIVGCDFHPGWQQVAIFDSDTGEMEQRKLVNGDGEAERFYRGLPAPALVGVEACGNSQWFVDLLERLGHQVWIGDAAQIRASYVRRQKTDKRDAEHILKLLVEGRFPRLWTPSGEQRDGRQLLIHRHKLVEIRSRVKNGLQHLCLNRGVQRQHKLWSAAGQIQLRELPLEGWSRVRREDLLTLLKQLDEQIGRLDEAVERAAFGDTASRLLMTQPGVGPVTALAFTLTVGDVSRFRHSKQVASYLGLIPSEHSSGGKQRLGAITKQGNSFMRMLLVEAAQSATRHDPQFKREYLRRCHTKAKGVAKVAAARKLAVRLYWMLRTQKPYPEIAHIESSPRVPLVGGS

SEQ ID NO: 374376 - protein, 374 aa, unidentified
MENIITYVAMDTHKKEHKVALHYPGDEQIIQFVVKNTAADIKKMVSSIKKKSSADIIFCYEAGVCGFTLKRRIESLDCKCKVIAPSLTPVKPGERIKTDRRDAIKLLAMLQAGLLTEVYAPDERQEADRDLTRCRQSAQENLKRIRHQLLKFLIRHGYIYTDGTHWTQKHFRWMRTLEFNVPMLRNVFDNYLTEMQHCVQRLETLDKDVQKLAAAEPYHQIVGLLCCFHGIDTLTAITTITEIFEFGRFSSPGELMSYLGLTPSESSSGEKNRKGAITKTGNKRIRRLLIEAAWHYRHPYNTASKTLKQRRKHQPQWAINIADKAGQRLRKRYWYLVNHGKPPCKANVAIARELAGFIWALFKEYRLRSDTKAA

SEQ ID NO: 374377 - protein, 311 aa, unidentified
MTEQVIGIDVGKAKLDVGLSTEKRVRVWANDADGRAELSDWVVAQGASLVVVEASGGYEAALVSELVARGQEVALVNPTRVRAFARAEGTLAKTDKIDAGVIARFGATMKPQARVRRDEVQVALNEQVTRRRQLVLMLTAEKNRLHTASPVMQAQIARHIAWLKAEIEALEAQISQAIKANPVWAETAKRVDSVPGVGFITASTLVADLPELGHLNRQKIAALVGLAPFNRDSGNQRGKRRIFGGRTSVRSVLYMATLSAIRHNPVIKAFYQHLLDKGKLKKVALTACMRKLLVIINTMVKTGQDWRPSIA

SEQ ID NO: 374378 - protein, 350 aa, unidentified
MSVRNKPREAAVFGVDIGKNVFHVVGLDPAGHPIQKATFRRDTVLQFFERATPTIVGMEACPGSQWLARKLQGFGHTVRIVAAKFVKPFVKSNKSDIIDAEAIAEAVTRPTMRFVEVRTSDQIDVQALHRVRDRLVAQRTRVICQMRAFCLEYGIAMHQGAGKFKADMPRVLEDEDNDLSAPMRQLLMSLFEDIRYLEQRIAELSRQIEAAADADDTARRLMTVPGIGALTATGLLAAAGTGRQFKRARDMAAWLGLVPREHSTGGKTTLLGISKRGSSYLRRLLIHGARTCLLHLDRTRDRLGVWLDGLQARMHNNKAAVALAAKIARVAWVIMTRPGAIYNRQDPAKT

SEQ ID NO: 374379 - protein, 321 aa, unidentified
MESAILGIDIAKQKFDVALLVKQQMTTGRFNNTTAGFGMLERWLVKYGVERVHACLEATGTYGEALAEYLHRAGYVVSVVNPARIKGFAQSELSRTKTDKADAQLIARFCTVMKPDPWQPPTPEVQELKALVRRLDELKGMLTQEKNRLASADDVVKPSIQEMIGLIEKRIMKLSRQIRDHVNRYPDLRGKRDLLESIPGIGPGTSAMILAEFGDVARFHDAGCMASFCGLTPRHRQSGTSVRGRSMLSKTGSSRIRKALYMPALAAIRCNPVIQAFRARLLANGKNKMLVVGAVMRKLVYFAYGELRSGRPFDSTVAAAA

SEQ ID NO: 374380 - protein, 411 aa, unidentified
MRVHHNVCCGIDVHKKSVTACLMWGPADKEPEFEIRRFGTMTRDLQKLAEWLKQAGCEAATMESTGSYWKPVWNVLEGQIPNLILANAQHVRGLPGEKTDRKDGKRLAELTRHGQVRPSYVPPRAIVELRDLTRYRSKLLSAGSSERNRIQKVLEDANIKLGSVLSDVFGVSGQKMLQALVKEDTVDVAKLAQLAHWSLKPKIEAIQHALEGKLTDHHRFLIDASLQHMHFVEEQLIRLDEEIQRRLQPYQEQYELLQTIPGIKQTGAARILSEIGPDMSPFPDGDHLSSWGGACPGNNESAGKKFQSKIRKGNPHLLAALTECAWAATKKKDCHFRNKYYRLKSRRGSQRAIVAIDHAMLKCIYVVLNQRKPYEEPKPTSLTDAQKERKASSLCRQLRALGYDVKIQKAA

SEQ ID NO: 374381 - protein, 350 aa, unidentified
MIEFSAGIDLSKDTFYACLQAREPVNAPTIIGTKEFDNSRKGFETLLAWVRKRVSKGAVVQFVMEATGVYYEELAYFLYEQGYKVAVVLANKMHHYAKSLNIKTKTDRVDASIIASFGLDRSVKEWKPMSPFYKELRELSRAFLSLKKQKQRAKNQLHALRHAHKTSVVVMELKKDQIAFYEQKIALLKEEIRKVATQDQAFYAKVKKVESLPGAGFETIIGIVCETNGFELFNSIRQLVSYAGLDVVFNQSGVFNGKTRISKRGNARIRQILYMPALSAIQHHRSIKGLYERVVERNPTVKNKGVVAGMRKLLIYIFILWTKNEEYDPTYQWSTHSVEQKKGAKSPRTR

SEQ ID NO: 374382 - protein, 423 aa, unidentified
MDKNDDSRLEVFRQMRREIRGSADYLLVGIDVAKERHDAFFGSAQGRTFLKRLSFETTREGFEKLCSHADAIRARHGLTKVAFGLEPTADYHKPLGEYLIRKGHTVVLVAGNAVKKNRELLDGRWDKHDAKDAANIADLMAQGKSLFYDFPSPDLQELRGLLSLKRKLKKTEQSYKVRIRNHLIAQYFPEMDAYFTCGEGPAIVRWCLDPKDLSTLPLEEFIRMVSSRNGGEKQQRRLREVHEKASASIGCETHPSVAFEARTLLEALRQLRSTIEETDTRIAEVCRRFPAYPFLLTIPGFGPDVSAKVLGALGDPHRFENSRQVLKTAGLDLSSDRSGKRMEVTPVISKRGKADLRYGLYQAALIASNKDLSFIRYFAGKVEGRCREKGIGTKMRVKLAAKMLVIAWTLMKKKEAFNPACIG

SEQ ID NO: 374383 - protein, 371 aa, unidentified
MEHTRFVGLDIHKERISIAVAESGRSCAVEYLGEISNDPVAISKLCDRLERPSKTLAFCYEAGPCGYGVHRQLISLGHRCDVVAPSLIPTRPGDRVKTNRRDATMLARLHRAGELTPVWVPDADHEAMRDLIRLRSVVRQIVSRSRQHLQGFLLRHGRKHGRGTAWRMAYRRWLSTLAFEHPAQQIAFQDYVDAVMDAERRLQRVEEQISGLLPEWNLRPVVDALQAMRGIALITAVVLVAEVGDFTRFANPRQLMAYFGLIPGEQSSGETIRRGGITKTGNAHARRALVEGAWAYRMKARIGRHKVDRIEALPKVVRDIAWRAQLRLCTRYRRLSARGKTANVVNVAIAREMVGFIWSIACTVQSAPKTA

SEQ ID NO: 374384 - protein, 411 aa, unidentified
MGYFIGIDISKGSFNYSVVDEGCKQIESKKLSMDRNGFDEFKKVTEKYKDSVVACESTGSFHINLISFLLSFKREVAIINPSLIKRFSWSVSLRKTKTDEIDAYMIATFVCKNKENVNYLMLDDIDSIVPIARLRESIAKDIAKTKTQLRQHLNITFPELERNYNIFTYSILNLLKRFPSAKAIQKASNMKIYRAIKHKSAGRDVNITPKQIKELAKSSIGHTSSEYEAIVEYDVEHLMFLLEKMEKVEKQFIDKMNRSRKDDVDILTSIKGIGDITASYFIAEIGNIERFKNKKKLIAYIGTDPSIAQSGSSINRRGRISKKGSKSLRRTLYIMAMGTIRSNEYFKSYYLKKRQEGMQHRKAIVALMNKLVRVIYALLKRREKFSLKKAKSFSSSCANPSACSCSGVFYP

SEQ ID NO: 374385 - protein, 338 aa, unidentified
MKLYGAIDLHSNNNVTVLIDEQDHVVYQKRLPNDLPLITQQLSGYQDRLQGIVVESTFNWYWLVDGLMEQGHRVHLANTAAIQQYEGLKYTDDHSDARWLAHILRLGVLPEGYIYPKEERAVRDLLRKRGQMVRQRTTNLLSIQNLITRNTGNSINSNRIKTLEAQQVDDLLPNPDLALAVKANLAMLKCADEQIDILERLVTERIKLRAEFCFLKTTPGIGQILALTIMLETGVIQRFPTVGDYASYCRCVGSQKLSNGKKKGKGNTKNGNKYLAWAFVEAVNFAIRFNAKIKSFYQKKKSKTNGIVALKAVAHKLCRACYYIVKEQVPFDITKAFA

SEQ ID NO: 374386 - protein, 409 aa, unidentified
MRAVPAHTPPFYVGIDIGKTLHHAYVVDAEGVPCMPKVVAFANPREGYARLDALLAEATAQALPTEVMIGCEATGPYWLSLYEALTAQGYRVLVLNPLYGKARRGTTLRGTKTDAVDARLIAQSLQREDVPSSHVPEAEVQGLRDLTRLRTDLVAQIGDVKRRIISVLDRTFPEVATCFTAVCGQAARTVLETWTLPEERAVVPTARLASLLARLSPGHFGTEKARAVKEAAQQRIGVRRGADALAFELRLLLRQIRELERWVAELDREIRHRYASLDPYLPTSPGGGAATAPAIYAEIGDIQRFTDSDQLVALAGVAPQLHESGQTAGQTKMSKRGSPYLRRAVWHAALTACRLDPMFQAIYERQRHRGKHHLVALSHVANKLMRVVYAVLKEQRPYEARFHVPANSH

SEQ ID NO: 374387 - protein, 411 aa, unidentified
MQTLVERGCGLDVHQATVVACLLMVRREGKVQKQMRTFGTTTRELVSLREWLLSEGCTHVALESTGVYWKPIYAILAGALEIVVANAQHIKKVPGRKTDVKDAEWIADLLCHGLLRSSFVPPKPIRELRDLMRYRRKWVESQAAERNRLLKVLETANIKLANVATDVFGMSGRLMLRALITGKATPQEMADLAKGLLRKKIPELQLALEGKLEEHHRFLLELQLQRLEAAEKDLAALEQRIRQKLEPYAAQLGLLDEIPGVDWTLAAVIIAELGVDMSVFGSVSQLASWAGLCPGNNESAGKRKSSRIPSGNVYLKSGLVEAANAAARAKGTYLRDKFFRLKARRGYKRAVVAIAHKILVAIYHRLSQKVSYNDLGDLYLDKLNKNHLTRNLVHRLERLGYQVTLTQQKAA

SEQ ID NO: 374388 - protein, 393 aa, unidentified
MFYVGIDIAKRSHEACVIGQDGNFIVKPFKFTNDFKGFTKFLDAVKTVSPNLSDFEFGMEATGQYWLNLYCKLTDNGAVVHVINPVQSDALRGIYIRPHKTDAKDALIIADLLRFGRYAETTLSNPDLLSLRELTRQRFYLVDCASDCKRKVITLVDKLFPEYENLFTDMFGSTSLQLLETYTTPDALAAVDIDALAKFLNTASHGRFGRDKAEEVQSYARNTFGSFLFADSAGFAVKQFLEQIQLLERQIQELETYIAEYLSKFNSTLDSIKGVGPTLAAIFVAEIGDVSRFTSPDKLAAFAGLEPRTNQSGEFTGTQSHMSKRGSPYLRRAFFLAAVACNMHNPALHAIYEKKRAQGKHHNVALSTVARKLVNIVYAVMKSGKPYEMVMPA

SEQ ID NO: 374389 - protein, 335 aa, unidentified
MTNHGGFSNSELTQMKNTQIQTPSSWIGIDISKAQLDLASGYPDLKLPSSVPNSPEGHRKLLSLIASFPGIKIIFEATGGYEKPLLLTLQKSEIHATRINPAQVRSFAKAKGLLAKTDKIDAKLLAHYGEIFTPKATLPIDPELDELQDLIKYRRHLRNQLHREKMQLEHEHCKPVTAMIRRRIISLQKQLETLTKTITDQAKKSEVLRPAVEILTTVKGVADLTAASLLAAMPELGTLTRKQTAALAGLAPINCDSGTMRGHRKTYGGRSEIRQALYMAAVVSSRFEPILRDFYQRLIKNGKTKKVALTAVMRKLLIHLNSLMRNHLETSETTP

SEQ ID NO: 374390 - protein, 465 aa, unidentified
MEKKTKLVDSVSMTVINSHAAGIDVGSREHYVATGQQSSDVCTFGVYSKDNAALVAHLQQKGITTVAMESTGTYWQPLFACIQAAGIAVVLSNNYIKDPQKKTDAKDARWLQRLHTLGLLKTSFIPAAQIEQVRTYHRHRSSLVAQAATCIQKMQKALRLMNIRLDIAVRDITGVSGMAILESIVAGQRDGTFLASLVHYKVKKSKEEIAEALQGQWKTEQLYIVADELESYKHYQLRMVNCDKQIELLLQQMTSAITVKHASEIPAAENVVSPAGAIKPTKVKKNKNSAGYDVSKLSMEYFGIDLLEVEGIGGATVMTFIAEVGSDIIKFPSKKHFTSWLRLSPNNKITGGKVISSRTPKGKNILSNAFRLAANTIAQRKDGVLKKIFSRIAFKKGRAAAITALARRLAEIFWIMTVRKVPYKAQNEKEYDEQTKKSIIKNIQHKMRKMNLTAEDIAMGGLVTN

SEQ ID NO: 374391 - protein, 338 aa, unidentified
MIYVGIDLHRKWSQLAALDAAGEPQLSRRIPSRPEDFFRVFGELGPEPMEVAFEATFGCSWLIDLLADAGIPAHMAHPLATKAIAAGRVKNDTVDARTLAYLLRANLLPEAWIAPVEAREARRLVRMRASLVRLNSRLKCQVHALLADYGVNPELTDVFGRQGRRIMAELRLPEVSQHRLEVNLRLIDGLAQEVKAADQMLKQRFGRDACALRLLPIPGVGLFTSATVVAEVWDVSRFPSPRRLGSWAGLTPREHSSGEHTRRGHISKQGSRWLRWVLVEAATHALPDPQLREVYLRVRRGSKDRDQIARVAVAHRLLTLCYYALRDEAGCRAYPVSA

SEQ ID NO: 374392 - protein, 370 aa, unidentified
MNDMVFVGLDVHKATIAVAIAEGARGGEVRELGNFINHPDHIKKLVERLAKGGCSLSFCYEAGPCGYGLYRQLIGLGQECAVVAPSLIPMKPGDRVKTDRRDAVMLAKLHRAGELTAVWVPDAAHEAMRDLIRARSTAVRVLVKARQHLQGFLLRHGRNYAGKKGWTLAYRRWLTTIRFDHAAQQVVLQDYVHAVTDAEERVERLTKQIADLAQNWSQAPVVAALQAMRGVAFIVAVTLVAEVGDFTRFANPRQLMAYLGLVPSEHSSGSTVRRAGITKAGNALARRALIEGAWTYRMQPRVSRKLHDRIDGLPQIVRDIAWKAQVRLCTRYRRLAATGKPKVVCTTAIAREMLGFVWAIAQTVQAPRAI

SEQ ID NO: 374393 - protein, 353 aa, unidentified
MPVYVAVDFHAREQTISWCDTADGEVHRTKLRHQHDDVRQFYEQFSGEVIVAFEASGYSAWFEQMLAELGHTVWLGNAAEIRRKAPRKQKNDRRDADLMLELMLKSDFPRVHTFSAESRTVLRQLRYRHKLVKVRTIAKNSVHAIGLNAGLPLRGRLLTPTGLEQLQALPLSPVLSQQRDEWLALIRLMNTQIGAVEESLAQRAQADEAVELLRTHPGIGLLTALALRYTLDPIARFTSTRCVVGYAGLDCVEEQSSERRRMGSISKQGSRLLRFLLNEAGQTAARQDPQLKQFYRRLRRRRDKPKAKVAVARKLLVRSFIMLRDQIDYAEFVRRGVAARVARETHSPKVTDL

SEQ ID NO: 374394 - protein, 391 aa, unidentified
MRKDTLYVGLDTDKKHIDVAVAEPLPGGEVRYWGKIANAAPSVDRLIRKLGQDGRPLVVCYEAGPFGYGIYRQLLGKPGVTCEVVAPSMIPRRSGDRVKTNRRDALALARLRRAEELTAVWVPDEAHEAMRDLVRARAAAVTAVVRCQQQIGSFLLRQQIAYVGGKPWTKKHRQWLGTLTFEQAAHRLMVAEALLALDQATARRQRLGEHIEELVASWSLAWLVQALQALRGYQLINAAVLVSEIGDPRRFESPRQLMGFLGMNVSEHSTGDTIRHGHLTKTGSKRGRKALIEAAWTYRTAARHPKAAAARQPAAVQQIADKASHRLNRRYRHLVARGKPTQLATAAVARESLGFIWAIAHAAAPTPHQAAARTAVGLQGMRKSSTSSSRP

SEQ ID NO: 374395 - protein, 299 aa, unidentified
MSIVGAFDVHRRQLTFEYLDTVTGELKRGRIMPADRPHLRAWLSRFAGQRDVQFALEGCTGWRYVVEELYAAGITPHLAEPADTAALRGKKRHAKTDKTDTRHLRVHLMAGDLPECWIPPQHVLEARATARLYKDLVDERGGWHQRVAATLFHHGVPAAVSVAKPDGRAAAEQAFLSPAGRQAVETGLRQIDRIGAELEPLRRQLDMLSRRQPGCAALRAAHFGIGAVTSVAIWAELGDVRRFASSGDVVRHTGLDITVWSSDGKGPPGRLSRQGPPLLRFSSAQGVLSGIHVAIDPAC

SEQ ID NO: 374396 - protein, 315 aa, unidentified
MEKQGVFVGVDVSKARLDVAIRPSGEFFSEVNDERSVGLLVKRLKSLGCTRIVMEATGGYETLLAAALAAEGLPVVVVNPRWARDFARSIGQLAKTDRLDARLLAQFAEVAELQVRELPDEQTRELKALVARREDLLEMLQAEQHRLEHAPKGLRREINGHIDYLRKRVKQLDRDIDRMVRSSDLWLEKSKILTSVPGVGPVLCAALLARLPELGRLNRAQAAKLVGVAPLNQDSGKFRGIRMISGGRADLRRVLYMNALNGMRHNPVLKTYYLRLRAKGKPGKVALVATMRKLLLILNLMIKNRTLWNPRCLDA

SEQ ID NO: 374397 - protein, 355 aa, unidentified
MNSLGIDVGKKICRAALKDERGDVIREFFFSNNNEGISTLIQSVSHYGKCTAVVESTGNMWIRLHDTLEENEIDTILANPYKTKIIAEAKIKSDKLDARILADLLRADLVYESYVPTKEFREKRSLVRHRISLVRNRTMLENKVHSLLDKYDYKSQLTDVFGKSGIIWLKTLDVSTIDRLIMNTTLAAIENINLQIETISKELAKYGWDSDDVKILLSMTGIDVFSAMLIATEIVDVKRFCTPWKLVSYAGLAPSTRESSGKTKTGRISKQGSPWLRWILVQCAMTGVRYDQRLKSFYERLKSRKGSAKAIVATAKEILVIIWYMLTRRELYRHMNKKRYEQKLSKIKKIKESAV

SEQ ID NO: 374398 - protein, 350 aa, unidentified
MLIMRGDYHPGFQQIAFVDTETGECGERRLAHREEAEEFYRKLSERSLRVRVGMEASGHARWFERLLRELQFELWVGDAAEIGTKRVRKQKTDRQDAQLLLRLMIEDRFPRIWVADADNRDLRQLLWHRHRLVQMRTRIMNQLHVVALNEGVRRKKALWRPAGRNELESLRLAPWASRRRQDLLDLLDQLTPKIQELTRALEEEVEKRPVTRRLMTHPGVGPLTALAYELVIGTAERFHNGKQIASYVGLVPTEESSGDRRRLGHISKQGNSLLRFLLVEAAQVTVRSSPQWRSKFFHLALRRGRKIAKVAMARKLAVHLYWMWRQGWDYGQFEKFGSHAGAPGNRHGAQ

SEQ ID NO: 374399 - protein, 382 aa, unidentified
MDTLSNTVAAIDSEQQKAKLFVALELGQATWVVALHSPIADKISIYRIEGGDTDQLMALIEKKRVQAARRLGRAAQVVSCYEAGRDGFWLHRFLIRRGIDNRVLDSASILVDRRARRAKTDRLDARALLRVLMALVRGEEQVCRVVRVPSIAQEDERRLSRERERLLHERNSHIARIKGLLILHGVRDYRFIERDWKERLDAVRTTEGQALPARAKTEIERECRRLWLAKQMLAEVEREIEQMIAHDGAVAGKLIQVRGIGQTFASVLTHEVYYRSFDNRRQVGSYLGLVSIPWQSGSVRRDQGITRSGNARARRCAIELAWLWLRHQPGSALACWYRTRVGTMTGRMRRIALVALARKLIVALWRYLQNGIVPEGAVLKAA

SEQ ID NO: 374400 - protein, 418 aa, unidentified
MLTAQWFVGIDWASETHEVCVLDRDGHVCERRQVKHTAPDLQAFVEALLARAHGDATAVAVGIEVPRGALVELFVERGFAVYAINPKQMDRFRDRFAPAGAKDDRRDALVIGDSLRTDPQAFRQVRLDHPAIIQLREWSRIDEDLSVELTRLTNQVRDLVYRSAPGLLALSPAADEPWVWALLRQASTPATQRRLSERRLDRLLRDHRIRRLTATQVRVVLQEPAVFTAPGVVDAVAAHLQVVLPRVELIATQRREAERQLERWLEVLETEMPAGDQREHSDVAIVRSMPGIGTRVAARMLAEASQPLVDRAYHVLRAHLGVAPVTKQSGKRRTVSMRYACSLRLRNAAYHWARAGTQNDPASRTYYTTLRARGHSHGRALRSVADRLLRILMTLLNRGQVFDPHHGQPSSLPVAAGA

SEQ ID NO: 374401 - protein, 428 aa, unidentified
MNEEDRTRLEEFRQFKKEIRGSGEYLIVGIDVAKDKHHAFFGMATGKTLLRRLVFDNNIEGFERLLVQVEALKVQQGLRQVVFGLEPTANYHKPLGEHLIRCGHKVVLVSGVAVKENRKSLDGRWDKHDVQDAANVADLLCQGKCLFYEYPEVAVRDLRDLLSLKRRLKRMEHGMRVRIRNHLVAKYFPELDRYYERSESGSLGIVRWCLDPSVIAGLEYGQFAQRVAPGKRRLSQESRLQAIWKLAVDSIGCEVGSAVEFEGKVMVEGLKQIREVLQATEEKIEEICSPFPEYSCLQSIPGFGPDVSAKVLGAIGDPFRFQDGKQVLKLAGLDLNAERSGKTSEAAVPVISKKGKADLRYALYQAAFIASSKNQGFMVYYTDKLRGREREPGIKTKMRVKLAAKLLIIAWTLMKKKEPFNPDYLKLE

SEQ ID NO: 374402 - protein, 333 aa, unidentified
MGLEPEPSKEGSWMMAQNDLVVAGIDVAKDKVDVCVRSLSLKRTFASTAEGRRELTSWLRRRKVGKAVMEASGGYERDWAKALRNAKIEVRIVDPKRVRSFAQSAGRLAKNDTIDAEMIAWFAEIFDEARGQAYDATREQLHQMVNARQALKDMQTKLESQGEHALPATVQRIHARIMKTIAVELVKIEAAISAVVEATPRFTELAEIIESVPGIGRTTSAALIAAMPELGQANNKIVAALLGVAPYDDDSGRRRGERHIKGGRRRTRNVFYMACLGAATQHNPVLKAFYDRLVAKGKQKKVALVACMRKLISILNIMIERRQKWDASRYAVS

SEQ ID NO: 374403 - protein, 356 aa, unidentified
MAKFSKEPVTTIGIDLAKNSVHVFGVDAQGEVVFSRKLARRALSAFIAQQPPCRIAMEACGSAHHWARTFQELGHEVVLIAPQHVKPFVKTHKTDAADAEAICEAAQRPRMHFVPVKSVEQQDIQATHRMREQVVSQRTALVNQVRGLLAEYGIVMPQGRKAAMSRLPEILEDASNGLSERFRAELHGLLEELRHLDERVAHYDSQVKAVADTSESVQRLMTIPGIGPLVATALLATLGEDWSLFANGRALAAWLGLVPRQHSTGGKPRLLGISKRGDAYLRQLLIHGARAMMRWVERKEDATSRWAQALKQRRHPNVANVAMANKLTRIAWAVMTTGKTFDPARGALAKGAAATA

SEQ ID NO: 374404 - protein, 357 aa, unidentified
MDKKMQDWIVKGKEVFVGLDDAKKTWRVCVRSEKMAVHETSMPANYDVLRAYLRRRYPECTIKVMYEAGFRGFNLYDRLSEDGIECVVLPPHLMLEEKVNRVKTDRRDAWRLAKMLEGEEHLRGCHVPDKERREDRQACRTLNAVEKEIKSTRNRIRKLLQYHGIETAIPEEKAWGKSEFRSVEELSVGVVLRKPIKVLLSLLENLWTYQIELRKELLALSKNPRYQRAFAIARGLPGIGWLTAIRLVLELGEDFTRFSTGKSLANFLGLTGGEHSSGETEHKGRITGQGPTFVRSWMIESAWVSIRKDPVLREKFEKVRRNSGSKKKAIVAVARKLAVRLYACMVMNQEYQIGLVA

SEQ ID NO: 374405 - protein, 408 aa, unidentified
MDKVNPRCAGLDVHKDSVWACARVDGGKPRVEKFGTTSRELLRLGDWLADQGVTVVAMESTGVFWKPVWNLLEGRFELMLVNARHVKQVPGRKTDVRDCEWIAQLLEHGLLKASFVPDRPQRELRDLTRQRTQLLNDRARVVNRIQKTLEDANIKLASVATDITGKSGRAVLDALVDGRLSPEQMAELVHKRMEAKKPLLREALAGRVTAHHRFMLEQLLDQVDHLDGLVGTFDARIEEVMNPLGREAVRRLDEVPGFDVRTAQNVLAEIGTDMTRFPSPRHLASWAGLCPGNDESAGKRRSGRTRKANRWLKGALTQAAWGASRTRRSYFSVRHRRLTARRGVKRATIAVAHSLLVTTHCLLCDPKPYADLGAGHFDTLQSPEQQAQRMVRKLQRLGYAVELKRPAA

SEQ ID NO: 374406 - protein, 401 aa, unidentified
MKLATEHQFTALVGIDWADRKHDFCLQATGSDRRESGVLMHNPESIAQWASGLHRRFGGPIAVCLEIAKGPLVHALQRHDFLVLFPVNPAMLAKYREAFVPSRAKDDPTDAEIALELLLWHRDKLQALQPQSADMRTLATLVEQRRGLVGDKTRITNRLNITLKGYFPQVLDWFEDRDTMMFCDFLYRWPSLKQVKRARQATLRSFFSAHNLRRARLVEERINGIRAASALTDDPAVIRPHQLLVQALVAQLRVTLQAIDDYDAAITAVAMRLPDYQLFAGLPGAGSILAPRLLVAFGEQRERYRSAADLQNYAGVAPVLERSGNKSWVHWRLACPTFLRQTFVEWAGSTIPRSFWAGAYYERQRAKGAHTTQLCDPWPTNGFASCTAAGRPERPTMNPST

SEQ ID NO: 374407 - protein, 358 aa, unidentified
MRKCNTKLANGKQIVLRKGDEVCVGVDAHKKDDHVAVLRNGREVATWVMPHRSEAMVKALEPMKKHLKCVAYEAGPTGYGLARALKGAGLPVMVAAPGKTPRPANRGSKTDRLDCIELAEHAAKNDLKGVAIPTEVQEADRQVVRLRGQLVSKLRRVKQQIKGFLLYYGLEEPAGRGCWSAQGIWALGQMKLLAPLRFALDILLEELKHLADMLKRVEKELQQTGAEARHREQQERLQTHPGVGWRTAMTYRMELFRPERFESQEDLARYLGLAPAVRDSGQKHRAGHVIRAGCGQLRAMLVEASWRWVRDDPGARRVYRRIVRNTGSAKKAIVAMARRMGVNLWLMLLRKESYRPAV

SEQ ID NO: 374408 - protein, 347 aa, unidentified
MAFIGVDLHSNSFTICRLQSDKTETFETYQLSEVDIDRFCQSVDAEDQVAVEATGNTAWFCGEIRACVGRIVVVNPRKFQVIRKSVSKTDRNDARALAFFLSKDMLPEIRLKTVSEAELGSLVHTRDALVKSRTMLINKIHAVHLRRGVKLKKESLTTRKRLRELDLSSFTPLEQVELCALRDQALSLTETLVKLDREIENAASALKGFEELSSIKGIGSRSAAILLAGIGNIDDFESADKLAAYFGIVPRVSQSNDTDNRGRITKRGDKLVRTTLVQCTLIAKRYSGYLNTFYQRIKARRGSGKAIIATARKLLTIIYDTLKNGWIFEDFPNFKIKENQCPAGQPS

SEQ ID NO: 374409 - protein, 358 aa, unidentified
MVTGPKHQKEKRSMEHFAGLDVSVKDTSVCIVDYTGRIVREVKVASEPEALLAVLTNSAYHFKRIGLEAGPLSQWLFSALGEAGLPVICVETRHMRAVLQAQINKTDRNDARGIAQMMRAGLYRPVHVKTLRSQKLRMLLTHRKLLQSKAIAVDNDLRGTLRNFGLKVGVVGTVKFEARIKELVESLPDLAALVEPLLIVRRVLREQIAVLHRRLLAIVRDDAVCRRLMTVPGVGPVVALTYRATVDVPARFKNSKAVGAVFGLTPSKYQSGEINRTGAISKCGDEMMRVMLYEAAQIMLTRTNKWSWLKAWAMQIARRRGMKKAIVALARRLAVIMHRMWVDGTEFRWTREQAAAAA

SEQ ID NO: 374410 - protein, 333 aa, unidentified
MTREYIGVDLHKRFFQACAISVMGDRLWEERFPRTADGIGRFSAHVTSDSAMAVEALGPTWAFVDAVAPTGAAMCVVDPRKTKLKAGHAAKTDRLDARRLADALRRDSVVSVYIPPPDIRALRELCRGRHQLVRIRTRLAQMIRALLLRCDAGEPPGTALFAARTLAWLATVQLAPEATCQLRRLERLYRAVHADATAADADVKARAAGDSIACALATLTGIGPVLGLTLRAEIGDGTRFSGGPALASYAGLVPRVESSGDRVYHGRITRQGSPWIRWALVEAARYALRRPDARGRWARRLAMRKGLAKARVAMARVLCDEVIATWRVAQQRA

SEQ ID NO: 374411 - protein, 344 aa, unidentified
MQKFNVIGIDLAKNVMQVCKIDQNGELHSNKAMSPNKLKELLAKSIPSIVAMEGCGACHYWARLAREHGHDVRIISPKKVKAYMQGHKTDANDAMAIAIASIQCGMVFSQIKEIEQQSLQSLETSRKFLDKEFTALSNHIRAYLYEYGITINKGHKSLRESIAIVLDDTDLRLPLCLKNTLKILWDRYNMTLSQLKETEKNKSALVKQLEPCRRLLDLEGVGDVCASMLYTSIGDGREFKNGRQASVYIGLTPKQHSSGGKTYMRGIDKNGGNKALRAALYQGALSVISRLPPEPKTVKQAWLVDLLKRVGIKRACIALANKTVRTAWALLATGKKYEPVLLAG

SEQ ID NO: 374412 - protein, 370 aa, unidentified
MGAIRVCFKVACGLDVHQAEVVACLSTQDARGRLKRVTRRFRTVYSELLQLRHWLVSEGCEALGMEATGHYWKPIYSVLEGHVRMIVGNPTQMKGLKGRKTDQQDAEWIADLTRLGLIKPSFVPPPDFRALRDFLRTRRGMIQARTTLQHETLKLLEVGGVKLSTFMSSVFGVSGMAMLRALARGESVAAQVHLLAKGKLRSKLADLRLALEQPLPLHLQQILAEIGVDMGVFPTPAHLAAWAGLAPGSFETGGKSKRAPTLRGNTYLKTMLVECAAAAIRAKGTFFSAKFNQLRRRGLDYRKALVAIAHKLIVIIHRVLSGNAPFHDLGATYFEQRNRARTIRNLTRRLESLGFAVSLQNLNIDPEQSQ

SEQ ID NO: 374413 - protein, 459 aa, unidentified
MSRRPKKTKRAGQGGAVPSLRCIAPRAAGIDVGATEILVAVPQDRDPSPVRSFETFTEDLHRLKSWLQPCGLTTVAMESTGVYWIPLFQILERAGMEGCLVNAQPVKPVPGRKRDVIDCRWRQSLHSVGLLRASFRPEERICGIRSLLRHRDSLVQMAAAHVQPMQKALTQMNLQLHHVLSDITGQSGLAILDAILAGERNPAVLAQLRHARVQASEEVITKSLVGDYQREHLFTLRQSLQAYRYYQSLITTCDQEIAEPRQNLDSRTPPDASPLPPERYPHRPRKNEFRFALRSERYRIYGTDLPAIPSINALTGYTVLAEVGTDWSKFRNGDAFASWTCLCPQNKKSGGKILSAHTRRSANRVNRALRLAAQTLERSTSYLGAYYRKMRARHGAPAAITAAAHKLARIIFHLVTTGQAYDESLFAAEDQRQRKRMENKLKRSAHQLGYQLIPLGQTA

SEQ ID NO: 374414 - protein, 340 aa, unidentified
MEQISMIGIDLAKNSFQLHGARTDGSVAFRKKLSRGKVLEFLELQPRCAVAMEACASAHYWGREIGALGHSVRLIPPQYAKPCVNRGKNDAADAEAICEAASRPTMRFVAVKTAEQQGRVMLFRTRDLLVRQRTQTINALRGHLAEFGVVAAQGPAHVDRLASALEDPDSGLPEAVRELGSLLFEQVGGFKAKIERLEKDIHASARQDAEARRLMSVPGIGPITAMAIQAFAPPMEGFRRGRDFAAWLGLVPRQHSTGGKPRLGKISKMGQRDLRRLLITGAMAVVRWAVRRGRTSDPWLARMLMRKPRMLVAVALANRMARIVWALMTKKESYRAPAAA

SEQ ID NO: 374415 - protein, 325 aa, unidentified
MSDNRHSIGIDVCKRFLDIHIYPTSQCWRVPNTIVGLLSVRCQLPEPDQVKRVILESTGGYEREAALWLSQAGYPVAVINARQGRNFARAMNQQAKTDQVDAHVLALFGDKITPPVRPLASESQQQLDDLVTRRRQLVDILTAERNRMALLRGKAQANVEGHIEWLTEQIKDLDGEIEAQIQACQVWRQTQTLVLSVPGVGKVMAATLLSALPELGKLNHKQIAALVGVAPFNYDSGQMRGKRRVSGGRANVRQVLFMSAMVAVRYNPVLKEFYQRLLQRGKEKKVALVACMHKLLTILNAMVKQGTAWVSPVKDTATEKVALPA

SEQ ID NO: 374416 - protein, 368 aa, unidentified
MKKKVLYVGLDVHKKTTDVAIAPGRSNGKVRSYGKIDSTLDALNKLINKLQVDDKQLQFVYEAGPCGYQIYRHLDAKGIDCSVVAPSMIPRRSGDRIKTDRRDALNLARLFRAGELTSIYVPTVEDEAIRDLIRCRDDMKRFERKARQRLLSFLLRHGYQYSGKRNWTKGFYNWLATVKFSHSAQQVTLHEYIEATNECSERIKRITEQIQVHVEEWSRARFVKAYQALRGVSLIVSTTVASEIGDMRRFPNPKQLMAYLGLIPSEHSSGKTVRRGPITKTGNSHVRRALIEAAWTYKMQARISTILLKRQQGLPKSVCDISWKAQTRLCARYRRLMARGKTKQTVITAIARELSAFIWAIDKEMQFD

SEQ ID NO: 374417 - protein, 367 aa, unidentified
MKNVTTYVGIDAHKKDLFVAMLIGNEKTPVTWQLANEPRAVHRLVRKLERETPGPIRVFYEAGPCGYALQRQVTTSRVSCEVVAPALIPRKPGERVKTNRRDARKLVELGRAGLLTAVQPPTPEDEAVRDLARARDDAREDLQRCRHRLGKLLLRRGLHYAGRNWTRAHRQWIDSLTWTYAAERVVVDDYLLAIDHTEARLVELDARLAEVAETGPYREPVSWLRCFRGIDTLTAMLILAELHDFRRFASAPALMAYVGLVPSEDSSGEQHRRGRITRTGNALVRRLLVEVAWHYQHRAGIGVALARRRKGQPARVIAIADKAQQRLCRRFRTLAEHKPTPKVAVAIARELAGFLWAALQPVPVPVR

SEQ ID NO: 374418 - protein, 398 aa, unidentified
MLDQAWIGVDIGKDHHWAAAVDADGRVLLSRKLANDQQAILGVLAEVQVLATRLVWTVDLTTAEAALLLAVLWGHRQQVRYLAGRAVSQAAVGYRGEAKTDAKDARIIADQSRMRRDLPELQPGQDLVVELRILTSRRADLVADRTRAINRLRQQLTAICPALERAAELAGQRGWVVLLAHYQRPGDLRSVGVAALAVLLAGHGIRNADRIAQAAVAAASTQTVDLPGQDVAAGVAGALAAEVLDLEARITQTDHTLQARFGRHPLAQVICSMPGFGFRLGAELLAAIGQVELIGSADRLAAYAGLSPVTNDSGKRTGRLRRPVRYHRALRRAMYLAALTAIRCCPQDRAYYQRKRAEGKRHVQAVICLARRRTNVLWALLRDHRTWEPQPPVNHQAA

SEQ ID NO: 374419 - protein, 530 aa, unidentified
MTATTRSRRSPARRNKRFLVQKPHGQVTDRVQRVGPERFGILSVDCAKERSKFMLADFYGSVLVPPTPLPHNRGDLQAALERVRQAADAHGIRDLVAAIEQTGEYHRPVQRAIRACGWEARLVHPFTSKQFRLPANPGDKTDDNDLAGIHRAAVNGFGLLEPELPADYQRLQLLVRHRRDLVRKQTRVCNQLREVLHAIMPGYAACFSDLWENRLALLIARHTGSARAVRAAGVLGLHEIVRRHAPKDHPPQRCAATLTKIVAWAEQAPEGHPLSDCLRSILVSLDDDRQRKTQEIQAIERAYPNLLTRTPYVLLLCIPGINVVLAAELAGELGPMWLYPTANHITGRAGLVPSRYQSDLVDRADGPLRRSGNRRIRGILMLTADTLVCCNQYFRARADLWRQADKDARWIRVKVAKQFSRLAFAIVGGQRLFPHVCCQPRHYILDKLLAFHRGNDTPMSQVMQDLDQATQQLPRAAKSAEAEPLRQRLLKIQKSRSNKPQLLGDIIPIVLARLGVSGLQSEAREDRDPS

SEQ ID NO: 374420 - protein, 320 aa, unidentified
MRNTVGLDISKLTFDATAIVGKTEHSAKFDNDSKGLDQFSDRLKSLGCQNLHICMEATGNYYEEVADYFAQYYSVYVVNPLKISKYAESRFKRTKTDKQDAKLIAQYCRSAKESELVKRQKPTDEQYRLLRMTAAYAQIKSECAAMKNRHHAAKDEEAAKAYAQIIKAMNEQLEVLKEKIKEQTEKPNCKEGVKRLETIPAIGRMTAAVLFHHLTSSKFETSNKFAAFAGLSPQQKESGTSVRGKGKLTKFGNRKLRAVLFMPAMVAYRIRAFPGFIKRLEEKKKPKKVIIAALMRKLAVIAYHVHKKGGDYDPSRYKSA

SEQ ID NO: 374421 - protein, 355 aa, unidentified
MEYFAGLDVGVKETAICVVNSAGAVVLEASAETTADAIHQALEGYARRLRRVGHEAGALSPWLHRGLQRLGLEVVLLETRHVHAALKAQRNKTDRNDARGVAQLVRSGWYRDVHVKSDDSYRLRLLLTHRRTLKRKFLDLENEIRHSLKVFGVKLHAAGRGSFDAHVRDAVAGDAFLAAMAEPMLRARAALWAEYTRMHALVVQITVHDAICKRFMAIPGVGPVTALAFKTAVDAPERFARSRDVGAHFGLTPKREQSGTSIDFDGHISRQGDKEMRTLLYEAASCLLTRSKVWTSLKAWGMKLARHRGHKRAVTAVARKLAVIMHAMWRDGTDFRFAAAPTVQPEAPATALVPA

SEQ ID NO: 374422 - protein, 349 aa, unidentified
MGEVSTIGVDIAKSVFQVHGVDADGAVVIRRRVGRAKVLEFFADLSPCLVGMEACATAHQWARELKKLGHDTRLMPPTYVKAYVKRGKSDAADAAAICEAVTRPSMRFVPIKSAEQQSALMLHRTRDLLIRQRTQLINALRAHLAELGLVAAKGREGLQQLVMAVTESSDERLPSNARFACQAIVAQLHAVQTQINGLDKRITQAHRANADSKRLDAIPGFGVILSTAVVATMTDPKAFKTGREFAAWIGLVPRQNSTGGKERLGSISKQGDRYLRRLLVVGAISIVRTARMRPDKYPWVIELLARRPAKVVAVALANKMARIAWAVLAKGETYRAPTRSGTAAIAAAA

SEQ ID NO: 374423 - protein, 395 aa, unidentified
MFIVGIDIAKRSHEAIIIAEDGQVVRKAFSFRNNCTGYNLLLEQVRRLTLVKSQIVFAMESTAHYWLALYARLLKDGYAVMVLNPIQSHSLRELYIRKAKTDARDSLIIADLVRFGRCKASNVPQDKILALRELCRSRAYLVDMAADLKRKLIALLDRIFSEYESLFDSVFSKASIAVLSKYSTPQKVKNANLRKLTDILIESSNGHFGEWKAHQLKEAACSSFGIDDSGGVYSTLLGMFLEQILSLTAQADSLEKQISVFFQEFNNPLTSIPGVGTVLAATILSEIGDITRFSSADKLLAYAGLDPSVKQSGEFKSNQNRMSKRGSPYLRRAIWLASTVAVHRDPMFQTYYEKKISEGLHYMNVIGHVSRKMTAVIFAVLRDGQPYQPILQSAD

SEQ ID NO: 374424 - protein, 334 aa, unidentified
MENIALIGIDLGKNSFHIHCQDRRGKAVYRKKFTRPKLIEFLATCPATTIAMEACGGSHFMARKLEELGHSPKLISPQFVRPFVKSNKNDFVDAEAICEAASRPSMRFVQPRTESQQAMRALHRVRESVVQDKVKTTNQMHAFLLEFGISVPRGAAVISRLSTLLEDNSLPLYLSQLLLKLQQHYHYLVEQIKDLESQLKRKLDEDEVGQRLLSIPCVGTLTASTISTEIGDGKQYASSRDFAAATGLVPRQYSTGGRTTLLGISKRGNKKIRTLLVQCARVFIQKLEHQSGKLADWVRDLLCRKSNFVVTCALANKLARIAWALTARQQTYVA

SEQ ID NO: 374425 - protein, 428 aa, unidentified
MLKQNTEPDPAPDFAAFLAIDWADEEHAFHLQVVGQSKIETGTLEQKPHVLGPWVAKLRERFGGRPIAVGLEQSRGALIHGLMSYDFLVLYPIHPTTVAKYREAFKSSGAKSDPLDAGQILEILTKHQDRLHRLNPDTVETRLLGRLVEDRRKAVDLRTTHIQALGANLKEYYPQALELTNDNLSSRLAGDLLIKWPTFEDFQQAKPSTLKRFYYGHNVRSPEVIERVLTLAQKSQALTTDPAIVESGRRLTQMYARLIQALAPAIADYDQRIQRVFDAHPEAKLFNDLPGAGPVMAPRLLAFFGTDRSRYAAAFNVQSFTGIAPVTKSSGKSKVVYARAACPKFDRQTFHEFSRLSVTNCQWARNYVQYYTDKGKKYHTIIRALAYKWIRILFKCWQERTPYNEDKYMETLKLRGSIFATWHLQKKS

SEQ ID NO: 374426 - protein, 370 aa, unidentified
MSQSSTLFIGMDVHKDSIAVAYVAQDHGAEVTYLGAIGTRQGDIDQMIRKMQSKAKHLIFVYEAGPCGYWLYRYLMKKGYDCWVVAPSLIPKKPGDRVKTDRRDAVQLARLARSGDLTAVYVPKVEDEAIRDLTRAREDALSDLKDAKFRLKAFLLRQDIRYVGRANWGPAHLRWLSEVVCPTPAQQIVFQEYVRAVHEHTERLQRLEQELQDHVKAWRLNPVVEALQALRGVQFTVAVTTVSEIGDLTRFDNPRELMKFLGLIPSEYSSGEQRRQGSITKAGNTHARRALVEGAWAYRYPAKVSRHLQLRLEKQPKIIQDISWKAQVRLCKRYRRLVSRGKHANVVTVAIARELAGFMWAIAREVPVTP

SEQ ID NO: 374427 - protein, 316 aa, unidentified
MTAPPVFVGIDVSKDRLDVALRPQYDRWAVAHEASGIAALVARLRHHAPMLIVLEATGGLEISLTSELAAAGLPVVVVNPRQVRDFAKATGRLAKTDTLDASILAQFAEAVRPEPRPLPDAATQALSALLTRRRQLIEMLTAEKNRLGMALAPVRKGIRAHITWIDCRLADLDKELAHTIRESPLWREKDDLLQSAPGVGPVLARTLLASLPELGTLTRKQIAALVGVAPLNRDSGTFRGTRRVWGGRAHVRAALYMSALVATRFNPIIRAFYQRLCAAGKAKKVALTACMRKLLTILNAMLKHQTPWTINIAHSS

SEQ ID NO: 374428 - protein, 338 aa, unidentified
MTIVMGLDQHRAQITAEWLDTDTGELSRTRISPAHRAGVRRFCERFRGQDLEVGLEATTGWRFVAEELRRVGAVVHLAEPAETAARRGNKKRAKSDRADARHVRELLMIDRLPESWMPPEHILDLRARVRLRHTLSHQRGEWQQRIQAVLYHHGCSQRRNLMTEESRSWLGAQPLPPTALEQVTVALSMIDALDDQLGPLDKKLRAYARRQAGCKALMSQFGVGELTAVTILAELGDPGRFSSSRDAVRYAGLDITVHQSDQRRAAGRLSRQGPPALRWALFEATMTASRLGSPDRAYYVQAAERLGSNRARLSVARKLLKRSYHLLRELGPEALQPA

SEQ ID NO: 374429 - protein, 343 aa, unidentified
MECYVGLDVSLKQTSICVVNQLGSIVREGVVDSEPEAIAAFVRLNAPGAVRIGLETGPTATWLWTELKQLGLPVICIDARHAKAVLKMQINKSDRNDAAGIARIMQTGWFKEVRVKGLDNHSVRALLASRALLVKIKRDLENQIRGLLKNVGLVIGRAKFNVFTVRAEELIADRPELIAVVGPLLKARQAIEQQTDDLDRKVLKLARYDAQVRRFMTVPGVGPITALCFKATIDDPTRFKRSRSVGAYVGLTTRRHASGEVDWTGRISKCGDAMLRSYLFEAAGVLLTRVPKWSALKAWGIRLAKRSGLRKAKVAVARKLAVILHRMWIDGTEFNWSTKKAAA

SEQ ID NO: 374430 - protein, 405 aa, unidentified
MVRYIGMDVHREFAQLAVVEDGLVRDEGRIGVTPEALRRWAVGLRADDQVALEATGNSDAIANLLGPLVGRVVVSNPSKTRAIAEAKVKTDKVDARILAQLLAADFLPPVWLPDERTRSLRRQVMRRAHVVRQRTRIKNQVHAILARNLVPTPPVSDLFGVAGRHWLSRQELPADECSAVAALLRQLDFQGGELAAVDKELAAEALADPVVARLMTIPGVDAIAAISIVAAVGDFSRFASPDKLVAYVGLNPKVRQSGNSAPVHGRISKAGRAQVRGVLVEAAWSASHAPGPLRAFYQRIKARRGFQTAVVATARKMTVLAWHLITKDQDYAFARPALIAHKRRKLELTAGAPSRRGNYRQPGAAYNDKQRRDQEKAQAERAEHAYQVLVAHWQTRKPAGQRHRA

SEQ ID NO: 374431 - protein, 404 aa, unidentified
MSVVGWDWASQAHDVTVLDDAGAVLDRWAFGHTEAGWAMALARLGCQGEPGDLPVIIEKTSGLIVDRLLAAGHPVVPVHPNAFHAARPRWGASGAKSDPGDSYKLADYLRTDGHRLRRVEPTDPGLRELQALVRLREDQVRARTAATNQLWAMLGNYWPGPRDLFHSLACGIALAFLTAYPTPQSAARLGEARMAAFLRRNSYRGGKSPALLLARLRAAPQAPLALPAATLTAMVGAHIQQLRSLQAAITGIEHLIAACVAAYPRTRLLARLPGVGTINLAQLLAEVGPILDRATSAEQAASECGTAPVTRASGKTTGVYFRWAASTRARKAITAFAHNARMQSPWAAKLYADARARGKRNPHATRIVARAWIRVIWACWHTGIPYDPATHRAARQPSPAKDLT

SEQ ID NO: 374432 - protein, 331 aa, unidentified
MNQIGIDVSNDVFDAAMCSGGEISKRQFTNTPPGYRQFMAWALRRAHLAQVCLEATGIYHLQLALSIHRHPDIDLMVVNPCAARRFAEAQMTRAKTDAIDADGLLQYVQCMPFHAWPAPREEVLQLQSLAHRLAQLNKELARERSRLHAACRAGTHTRLVQQDIQAHMKQIKQRMESMKAKAMDVILSDPLLADDVRIVDTAPGFAALSATKLLAELSALPDDMRPAQWVAHAGMDPRACESGTSIRYPRRISKQGNSRMRSALFMPALVAIQHDANVAAYYEKMLARGKPKMVAITAVMRKLLHALWGMLHHREAWDGDKFYRINQPEST

SEQ ID NO: 374433 - protein, 358 aa, unidentified
MQSFSSDTSYQLFVGVDIAAVTATVAGQAGQQKPSKPISIEQTPESFDSLHHRLMKTGARPEQILVVMEATGVYWLSLATFFARLGYAVSVVNPAQAHHFAKALLKRAKTDAIDAQTLTRLAALLQPEWWTPPPALYEELEQRLTQRESLLLMRGQLRNQLHALGHLPVVVAQVRQRMEALDQTLTTQIATIETELAALLPTEDLDPLEEEELSPDRAWARTLAKLQTIPGIGLLTALWIVVTTMNFTLCSSAEQAAAMLVLLPCHENPARASTSIAVSVTQGTGDCAQPCIWQPSLPHATIPSSNGFMTGCVPLANRRRWPVVRLHANCCTWPLRLPPTRRILTHTIKQSTSSKQRG

SEQ ID NO: 374434 - protein, 361 aa, unidentified
MAGRTQEDDRGCLADGTASADVRFYGTIANTPDAVRTLGKKLSKAGQQLHLCHEAGPCGYGVQRQLTRLGHRCDVVAPALIPRKVGDKVKTDRRDAMMLAQTLRAGQLTSVWIPDEAHEAMRDLVRLRAQAMRDLRKTRQQLLSFLLRHGLDSPYGHWTKMHRRWLGELVFAHPAHHLAHEEMLQRIERAEALCDRLKQAILELVPQWSLAPVVQAIQALRGVSLIVAAVIVAEVGCFGRFDSPRTLMAYLGLNPSEHSSGATIRRGSITKTGNALARTCLVEAAWTYRFPARVTQIIRERLKALPEPIRNVAWKARVRLSARYRKLIAAGKPAPKVVVAIARELVGFIWAIARMVEPKFA

SEQ ID NO: 374435 - protein, 315 aa, unidentified
MTKPLLSINVGVDVGKSQLDLYLLERDRALAVPNEEPAIASLIRSLRRYRIERIVIEATGRLEQPFVRAALAAGLPVVVVSPLKVRRFADAIGQLAKTDEIDARLIARFAAAVKPLARPASDANAQIIKDLTVRRRQLVSLRTMEKNRRQVMPQELKAGIDRIIKTLDRELKRLEHLIDHAVDQHAPSRHKRELLTSMPGIGNSIAATLIGDLPELGSLNRREIASLTGVAPFNRDSGKLRGKRRIRGGRAHSRTALYLSAMVASRFNPDIKRFYERLLSAGKHKKVALTACIRKIVTALNAMLRDNSTWQPAMT

SEQ ID NO: 374436 - protein, 335 aa, unidentified
MEFTYFIGTDVSKNELDFAVMQGNVFLFHKEIQNTPTAIKSFIKELSKLTGFDLNKTVFCMEHTGIYSSYLLSLLHDKKAPICLEAAMQIKNSLGNLRGKNDKVDAIRIAEYAYRNRDKLSLWQPKRDVIQQLAHLSTIRSRLVQIQKVVKTPLKEAAPFIKKSQEKLHNKLCNKTLNGIKADLEKIEKVIEEIIEGDPELKRLFTLVKSVSGIGKITAAMIIVTTNEFKDIKDPKKFACHAGVAPFVKESGLFKGKGRVSHMANKRLKTLLHLAALNSIRYNEDLKHYYERKVIDEKKNKMSTINAIRNKLILRVFACVNQNRTYEKNYSRLVA

SEQ ID NO: 374437 - protein, 338 aa, unidentified
MGYYVGIDLHSNNNYIGIIDQENRRIFKKKTINDLSEITKTLYPYKKEIQGIVVESTFNWYWIVDGLMDAGYRVHLANPSAIKQYEGLKYTDDTWDSFWLAHLLRLGILPEGHIYPKETRPTRDLLRKRLMLVHHRTAHILSMQSMVSRNKGIQMDGNAIKRLNAKEILGLFSDEYLLMSARCNHETINFLNKQVVKIEKAVLSKVKLQEAYKKLLTVPGIGKILAITIMLETGNIRRFREVGNYSSYCRCVSSTKFSNGKKKGKGNKKNGNRYLAWAYIEASLFARRYSPEAQRWYQRKMSKSNRMVAAKALSNKIARACYYIMRDQVPYDSAKVFQ

SEQ ID NO: 374438 - protein, 460 aa, unidentified
MKQCRRKGPPQKKSGSSSFSMINKDAAGIDIGSGEHWVAVPEDRDEEPVRCFGCFTADLQAMARWLKECGVTTVAMESTGVYWIPCYQILEEHGFEVNLVNARHVKNVPGRKSDISDCQWLQRLHTYGLLSGSFRPDDQICVLRSYWRHRANLVRYASDHIQHMQKALTQMNLHLHKVLSNVTGVTGMNIIRAIISGERDPEKLALMRERGVKNTPEAIAKALEGDYRQEHLFALKQAVELYDFYHRQIEACDREIERYLHTFEAKVDPVQNPLPKQKRKKEMRYQSFVDLRTELYRVSGIDFTQIPGLDVVTVQTILSEIGLDPGKFPAEKRFVSWLGLCPNNRITGGQVKSTKTRKTANRAANAFRMAAQSLANSNTGLGGFYRRIRARLGAPKAITATAHKLARIFYRMWTTGQSYTDLGSDYYENRYKERVLRNITRRARELGYDAVLQPIEQRVA

SEQ ID NO: 374439 - protein, 460 aa, unidentified
MRILGIDLAVVAKHRAILADERGRFIGRLVKFRTCQADLERVYALARRGMTPDEPLAVVLEATDIVWYPVAIFFQQRGATVYLVNPRMAADLARFYQRYAKSDRLSAQTLARLPVVNPDSLYPWVRWGPDYLALQRSCKEVERLTTQASAIQNRLRSTDHLGWPDLHRRVFANPFSRAARWFRDHFYDPRCVVEAGVSGLRQAWRAAEIYDGDEDWIEPLLTLAQEVLSLYGEQGSYLDYRALAEEVQREQRRLAKLEADAHFVRLQVMRPRYRQLHPSRNLETIKGVGQDGAAVHVAFVGDPSRFASNRAFRGWSGMVPYSDQSGEREGKGLRITQAGPDPVKKYAFLEAESARQWDPQIAAIYHDQMVNKGNHHTQAVCACATHLLDRIRVILTQDRPYELRDVDGTPVTTQQARAIIAERYTVPEEVRRRNTRRARRERAERRAERKEKKKRRSRSR

SEQ ID NO: 374440 - protein, 363 aa, unidentified
MRFYKNQHQFYIGIDLHARTMYICVINNIGETVFHKNMECSRDNLELVTNTFGKDIVVGVECIFTWYWVADFCAENGIDFALGHAYYMKSIHGGKTKSDKIDSEKIANMLRGGMFPIAYAYPKEKRAVRDLLRRRLFFVRQRAELSVHLQNTNHQYNINEPLTSSRMRSEVYRNTIPQKFSDPATLKMVNADLAMFQSYHDIITKLEFQIEDSMEGQDPVSYSIINSVPGLGFILSLTILYEIDDIHRFSDVGKFISYCRLVKCSHESAGKKEKGGHNKIGNVHLKWAFSEGAVLFLRNNERGQRWHDKLVQRYGKAKAMSIIAQKLGRTVYYMLKRREAFNPDKFYGDKKIENKDSGGEHLA

SEQ ID NO: 374441 - protein, 400 aa, unidentified
MLSIGIDVSKGKSTVCGMKPGGEIVYAPFEVQHTREGMSELVSLLRSSGEEVRAVLESTGSYHCPVVAALLENGIFVSVVNSLRMKRFCSQSIRKVKTDRIDAMQIALYGLAYWQELQPTRLPEDTYRELQLLARQYYQMTSMLIKAKVDFNALCDQVLPGMQELMSDHAGRHKLSDFVLRYHHTTHILEMGETRFRKDYCKWAEKKGYRNCERMAALIFATAQNGIPVLPNAPSTQIVITEAIRVLHTVEASRDAILTQMQALAKTLPEYSLVREMPCIGDTLAPRLIAEIGDVRRFHSKRALIAYAGIDAPPYQSGKFCANNRHISKRGNRYLRKTGYEVMQSYVMHKPANDPIFTFIEKKRGEGKSGKLAMVAGLNKFLRVYYGKVTELYRSLPAIE

SEQ ID NO: 374442 - protein, 316 aa, unidentified
MSTASIWVGIDVSQKQLDVYVHPSGETLNVKNEKEGIEQLIEFLTPLHPERVVLEATGRLERLALCELAAAGFVVALANPQRVRSYAKALGKAKTDRLDAQVLARFGEATQLAPYPVPEALALQLMDVVGRQRQLVEIMVAEKNRLSRARSTIRQDITEHIEQLQKRINALSEQLQHLMQRSDEWKRKRQLLLSLCGVGELTTAVLLAELPELGTMSHKKMARLVGVAPVNRDSGQHRGTRRIQGGRASVRSALFMATLVAIRHHPVLKAHYQQLRQRGKLKLVALMACARKLLVWLNAIVRDGQVRPLTPATALD

SEQ ID NO: 374443 - protein, 391 aa, unidentified
MIYVGIDVAKDKHDCFITNSDGEVLFQVFTIQNNRKGFDDLFSRIQSTSSDVSNIKVGLEATGHYSYNLLGYLIDKGLPTYVINPLHTNLYRKSLSLRKTKTDKVDARTIAMMLMSDVNLKSYSDTSYHNEELKSLTRYRFDKIQERARLKQSVSRLVTILFPELEKLVPTLHIASVYALLSELPSAGKIASCHLTHLTKLLENASKGRYSREKAIEIREAARTSIGSNMPAKSLELRHTLRLIGELDSEITEIESEIKRIMDQISSPILTIPGIGYRMGAMILAEIGDFSRFDSPDKILAYAGVSPSTYQSGQLESSYSHMEKRGSRYLRFALINAAKYVCHWDETFGAYLQKKISEGKHYNVAITHATKKLVRLIYAMEKSGKPYIKMA

SEQ ID NO: 374444 - protein, 334 aa, unidentified
MNTITLIGIDLGKHTFHIHCQDKSGKALLRKKFTRNKLMAFLAGCPSATVVMEACAGAHFMARRIADLGHEAKLISPQFVRPFVKSNKNDFVDAEAICEAASRPSMRFVPPRTETQQAMRALHRVRESLVRDKVKTTNQIHGFLLEFGISLPRGDAVIKRLSLVLAEHELPDYLVRLLMQLHAHYHYIVEQIAGLEAELKHTITTDDTAQRLMTIPGVGPITASLLSSQLGDGQQYAKSRDFAASTGLVPRQYSTGGKNTLLGISKRGNKNLRRLLVQCARVFMQRLDNYSGKLADWVRQQLERKHSNVVTCALANKLARIAWAITTQHTVFDA

SEQ ID NO: 374445 - protein, 350 aa, unidentified
MRQRRGVKKNEVEQIVPVYVGLDYHDETIRVCVVDETGRELVNRNVANSVSAVVDLVRSHGGLVREASLEACCGAADFATKLAAATEWRVRMAHPGVVKRLKVGANKTDCEDALHLANLSRAGYLPEVWLADDATRQLRRLVRHRQGIVDQKKRIKLRIRALLREERIAAPPNLNAWTKGWMTWLKTVTLGEQTRWVLDQELMHLDHMVCGIAAVEARMDQATKNDPVVAKLKEKPGIGVVTAVVMRAAIGRFDRFHSGKQLSCYCGVTPRNASSGKRQADAGLIESGNDILRPLLLQLAKRLPRIDAHWREFHRNLLVRKPSNVISAAIANRWLRRLYHEMVAPPAVAA

SEQ ID NO: 374446 - protein, 480 aa, unidentified
MATRKRTTFERINLERMNRRQRRELGQRLEKSNPGLEIVHPHAAGIDVGNQSHFVAVPGDRDSRPVREFGCWTSDLVKMAQWLKGCGIQTVLVQATGVYWIALKDVVEQHGIEVVVANAHHTMNLPGRKSDVQECQWLMKLHTYGLVRGSFQLAGDMQGVRAVWRLRCRHVEEAARAVQHMQKALTQMNVQLANVLSDISGKSGQAIIGAILTGERDAGQLAELCDRRVLASRAEVAESLRGNWRDEMLFELDQARESYQFAQQQIQSCDRKLESYLKVLPARQLEITLPLPSTVIKASKVPRKRGFNPDIPGLRDELVRICGVDLTTIDGISVITAQTILAEIGTDMSRFPSEKAFASWLGLTPSRDISGGKVLRVVRRKVPSPTGQALRMAATALKCSNSYLGARYRHLQKQLPSKASAVKAMARYLGILVYRLLTKGQAWVDQGAARFEQKRKALNLASLQSRALASGYRLVPVTSA

SEQ ID NO: 374447 - protein, 341 aa, unidentified
MKQQHQEREVTIGLDLGERRHRFCALDSRGEVVEEGSLLNDRASLARLTARYRGALAVMEAGAHSPWVSRYLEGLGWEVIVSNPRKVRAIYQQERKSDQRDALMLARIGRMDRALLYPVRHGSEQAQQDLLRIKLRDSLVRARVALINSVRFSLKSLGYAVCNPSSERFHKVAMERLPERVQQMIAPSVQALAELSTRIAVLEREINVVARTKYPQTLWLQQVPGVGVLTALYFVLKIEDPQRFENVRDVGAYAGLCPRRDQSGQSDPQLRISKRGDPYLRRLLVSAAQYILGPFGPQSALRGYGLMLAADGSARQETGCRGSGAQTGRSALKPVEKPQSL

SEQ ID NO: 374448 - protein, 428 aa, unidentified
MKNRNVQKLEAITPGTLVVGVDIAKETQWAQFVDYRGLELRKALKFKNHKNGFDSILAGIEAICKDRRLDNIIVGMEPTGHYWKPLANYLLKNKVNVVMVNPYHTKRAKELDDNSQTKSDKKDALTIARLVRDGRYYEVYMPQDIFAELRVLSNSRISLMKRSNALKNTITAVIDEYFPEIVTVFKNPLKGKAAMQILKSRPFPSLILELGIDGVLFEIKKAVKKTVGRKKAQQLVETAKSSIGVGYGLVSAKLKLGLMIEELELLTKQLEQLEKAMEKALADTGYGEIILSIPGIGVVTAASFLGEIGDPMRFDHPRQICKMAGYNLIENSSGKNKSRTVISKRGRKNLRSILYQMAMTMVAVNDEMKKLYKYLKTRPNNSLKKKQALVVISKKIVTVIYNLIKKQTEYQAELVLGEFRKNQIKQAA

SEQ ID NO: 374449 - protein, 423 aa, unidentified
MENTAARKRKQVPEGYLIIGVDPHKKRHAAVAITQDFTTRDKFKFDNTREGLETMLSRVRTEMVKSGCRGVMFAIETGGHYWRNIAYYLDEQGIPFRFINQFTLKRRREGKDLNRRKNDYRDSEVAAQLLCTGEFTESKIPQGVYAELRSAHNAYRRVVKERTRITNLVKGLLDGLFLEFTHVFKDPCGLTAVSVLSTCAIPRVIAGMTEDEFVATIEARHKGRLMRRKLRALHYSARTSIGIDAGAQSVATEISFLVEKLELIRRHIRIMEGMLVRLVDETEEGKYLLSIRGLNYIAVAGLLAELGCFKLYRSAKQMIKMAGSNPTESESAGKKRSKTPMSKQGRPLLRYCAWTSVIPMLRFNPDFRAWAKQRRERPAHANPLNGREVVGAALNRLLRLAFAMVKNQTYYHDVKPALIPVAV

SEQ ID NO: 374450 - protein, 349 aa, unidentified
MNKKIVKQVAGIDVAQKELVVTLGRMYEDWAPELYSHKTFPNTEKGFTAMETWVEQQAGSPAGVRFVMEATGVYHELLAYFLSAKGYELSIVLPNKISNYFRTLEVKTITDKTASEAIARFGLERKLDNWNRPNKTFKKIRQLTRERDQLVAERTMVKNQLHAEKTEAEPNKTSLDRIKKRILLLNKQEQEINTELITLTKQDESVEKAITLMRSLPGVGLLTAATVLAETNGFELTRNKRQLTSYAGLDVREKQSGTSVKGKPRISKKGNKYLRKALHLPALAAIRHDERFKAVFARLVAKHGIKMKAAVAVQRKLLEMMYILYKTNQPYDKEYLKKQAPGEIKQGLD

SEQ ID NO: 374451 - protein, 357 aa, unidentified
MTKITEKLDFTGHTLFIGIDVHARNWNISLYLNQQFLKSFTQPPTPEALQKFLENSYPNATYRCAYESGFCGFWIQRELEARGIGCIVVNPADVPQTDKTIKNKTDTNDSRRLAKSLQAGLLNPIYIPDPEVEADRQLVRSNDRFNNDLTRSKNRIKGLLYHLGIKLPESFAESNWSNRFTQWLKELDIPHSSAKRALEYQLDMAEHIRAQKLIVLKDIRALLKKDRYARTAKCLMSVYGIGPISAATFLTEIVCIKRFPKFEQLNSFVGFYPSQFSSGEKIHQGHIIGRQNKRLRSLMIEAAWTAIRTDPAMTLAYNQQKAKVGSRRAIIKIARKLLSRIKHVWLNQVEYAPGTIK

SEQ ID NO: 374452 - protein, 410 aa, unidentified
MSESPYAFYVGVDWASETHQFTVLTPERRLEAERRIEHTGRALGEMADWLTALADGEPARIAVAIEVPRGPVVETLLERGFHVFAINPKQLDRFRDRHSPAGAKDDRRDGFVLADSLRTDRPAFRQVHVDDPLLIQLRELSRAEEELQTELRRLSNRLWEQLQRFYPQVLRLSPAVDEPWIWALLQLAPTPVAARALRRATLARLLARHRIRRVTAATVLAELHSPALRVAPGTTEAAREHIALLLPRLQLLHEQRGQCARRIEQLLDALEGSDAEHRDVTVLRSLPGVGRVIAATMLAEAARPLAERDYHAVRTQGGVAPITRQSGKSVLVSMRYACNHRLRNALYHWGRVSAQHDPSTRRHYRALRQRGHGHARAIRGVIDRLLVVLMAMLRTGTTYDPARRRVPAAA

SEQ ID NO: 374453 - protein, 389 aa, unidentified
MLLDHPSDGPTAIRTQFGAIFVSLELSRSNWLITSLSPGRGEKMSRHSVVAGDVAGLMTLLADLRRKAVARTDQSYPIITIQEAGLDGFWLHRVLQQERIESHVVDPASIATPRRRRRAKTDRLDGETLLRALLAYKRGEPRVCAMVVAPSPEEEDRRRLCRERRTLIEERITHVNRIKGLLFAQGISGYAPMRRDRRARLEALRTGDGRELPSHLRAQIDRELDRIELLLGQIKAVEAAQDALLAAARKPASEEAAPDPVTMLLALKGMGANFAAVLWSEAFYRQFANRRQVAAYAGLAATPWQSGGIRHEQGVSKAGNPRLRTTMIQLAWLWIRHQPQSALTRWFKERSPQGRKRAIVALARKLLVALWKYVTQGVVIEGAVMKPAA

SEQ ID NO: 374454 - protein, 456 aa, unidentified
MRREKKAVGELSLECIEPNAAGIDIGAREIYVAVAKDRDPEPVRCFSTFTEELGAIAAWLKRCGIVTVAMESTGVYWIPLYEVLEEAGLRVCLVNSQHVKHVPGRKSDVSDCQWLQYLHSVGLLRGSFRPEAAICALRALSRHRASLVEAAAVHVQHMQKALTQMNLQIHHVLSDITGKSGVAIVDAILAGKRDPQQLAKLADGRIHAERETVVKSLVGNYRSEHLFTLRQSLEAYRHYQKMLVDCDREIEQHMSQLPNQPNGGQPASSLQSNKRGKRRKNQFHFDMSKELYRVLGTDLTAVPGLSAMTVHTLVTEIGTDLRRFPNVASFTSWLTLCPGSKKSGGKVLSSKTRKSNSRLAAALRLAAQTLHKSHSYLGAYYRRMRARLGAPQAITAAAHKLARVVYHLISTRTAYDESVFAQEEQKQTIRHQQRLRKQALALGFQLVPISHQEVVH

SEQ ID NO: 374455 - protein, 348 aa, unidentified
MEQVSRIGLDLAKQVFQVHAVNADEKVVVCRQLRRAEVLKFFAKVPPCLIGMEACGSAHFWARQLTDLGHTVRLIPAGDVKAYVKRGKKNDAVDAAAICEAVGRPRQQFVPVKTPEQQAALMLHRTREMLVGQRTQLINAVRAHLAELGIVAALGWNAFNGLVEVLKDGSRIEVPELARTALNLLIDQVHALGLQIKALDKQILAWHNKSEESRRLATIPGVGPHTASAIVATVGDVKRFPSGRRFASWLGLVPRQNSTGGKTSLGSITKAGDRYLRTLLVIGATGTIRFARKDVPGGNAWAAQLLAKKGKQQGRLVSVALANKTARIVWALLARGGEYKAPTAATVS

SEQ ID NO: 374456 - protein, 320 aa, unidentified
MSGYLGIDVAKAELVVAREGVAGSKVYPNTDRGHRDLLNHLSEDGSSIELIVLEATGGYERRVVAVLAEAGLPVAVVNPRQVRDFAKATGQLAKTDALDAQIIATFGSMVRPEVRPLPSEELDDLRELLARQQQLQQMIVAETSRLLHATGRGGRQKLRREIKSHIADLKKRLKMLDADLDDTLKASPLWKEQDDLLQSVPGIGKQTTRTLLGILPELGKVSAAEIARLAGLAPINRDSGKMRGKRRIGGGRPRVRAVLYMATLAATRYNPVVKAWYQRLLEAHKVKKVAIVACMRKLLVVLNAMLKTKTRWQANLPATA

SEQ ID NO: 374457 - protein, 421 aa, unidentified
MNEQAVVYSVHIGIDWADSKHDICICPRDSDTREFDIIQHRAEAIDTWVKDLHQRYGGRIAIAVELSKGPIVSALQKYDFIDLFPVNPSTLAKYREAFQPSRAKDDPTDAELAVDMLLRHPEHFKVLKPQSAKMRALATMVEQRRRLVNDRGRITNRLRCALKQYYPQVLEWFEHIDTPLFCAFLKRWPTLTQARRARANTLKRFFHEHHMYREDVVNSRRQAINAASPLTLDEAVIVPYRMQVLVLVEQLELMFKAIDQFDDEIAKLASQHPDYALFGPLPGAGPSLTPRLMVAFGEQRERFSSAADVQKLSGIAPVTERSGQKHWVHWRLQCPTFMRQTFVEWAAQTINKSYWAGAYYRQQRDKGSTYQAAVRSLAFKWIRILYRCWQTGEVYDESRYLKALERRGSPLVRRQKVLETA

SEQ ID NO: 374458 - protein, 358 aa, unidentified
MAVNEGTRRIVGGVDTHKDLHVAAVVDEQDRVIGTRSFATTRQGYRQMLAWMRAFGDLQRIGVESTGSYGAGLLRFMQQAGIAVLEVTTPDKQDRRRRGKNDDLDAQNAAHAAFAGQRTVTPRSRDGMIESLRVLMACRKTAVSARRVALQMIHNTIVCAPDGLRDQRRSLTRMQLVRTLAAWRPDLTAYRDLDSAYRIGLKSLARRYLELHDEIADLDVMIAAIVDELAPNLVARNSIGHLGAAQLLLTAGDNPERLRSEASFASLCGVSPVPASSGKTVRHRLNRGGDRAANSALHIIAIGRLRTDQRTKDYVTRRIAEGHSKLDAIRALKRYLAREVFTLITQRRREINATRIAA

SEQ ID NO: 374459 - protein, 408 aa, unidentified
MDVLIERCAGLDVHQATVVATVRYPGSQGRATRTETFGTMAADLVALREWLQAYGVTHVALESTGVYWKPVYYMLEEGVTLLLINMQLLKHVPGRKTDVKDSEWLAQLLECGLLKGSFVPPPPIRELRDLTRYRLQQVRERAREVNRLCKVLEDSNVKLTSVLTDVMGVSGRSMLLALVQGTTDPAVLAELARGRLRKKLPELRRALAGRFRRHHALLVETILAKIDFLDEMLERLNAEIDERLAPFEAMVARLDTIPGVNRTVATTIIAETGGDMTRFPTAAHLCSWAALCPGQNESAGKRRSGKTRKGDQYLRGQLIQGALGAIHRKGTALQARYHRVKRHRGHKKAVVAVAHQMLEIAYYVMHEDVTYTELGADYFDRRHADRAMRRHVRHLEALGFKVTIEKAA

SEQ ID NO: 374460 - protein, 402 aa, unidentified
MSSVFVGIDIGKKKHQSALMGEKGETLARTLSFTNSLAGFQSLLKQLDPWSKEDILIGLEATGHYWLDLYTRLVDTGYSVVVINPLQTDGIRNMYVRKTKNDRCDAVIIADVLRFGRFRKSSVPEEDIAQMKALSRLRTGMVQSMSNVKRQIVAILDRLFPEFEACFNDIFSKSSMAVLDEFADPEELARCPLEELADLLFEKSNGRLGAAKAEHLKETASRSFGTGYAKRSMKFELKLLLEQVRFTQDQILEIEDNLKELMKDHQLITTIPGISDILGSAILGEIGDISRFDNPKQLVAFAGLDPSVHQSGNFNATSMHLSKRGSPHLRRALYIAAHVARIHDPVLKEHYEKLINRGKHHRQAQNAVAAKLARIVFSVLYSKEPYDIEKLRSKPKLEEMSA

SEQ ID NO: 374461 - protein, 325 aa, unidentified
MTASHFADNSFVGIDVGGSSLDVAWHRGDSAHYANRPDAIAALVNQLKMHPVRRIAIEPTGGYEKALVKALRQARLPLEIVHTTRFKAYRELVGVKAKSDTSDARLLASYAAAPDEVRGRKANYVELPEDAVREALSEFASRRDQLKHMIHAETCRLGTTRLAELRQAITTHLEALKAEDKLIHQRMLELVRQRLDLKRDQKLLATIKGIGPKSGLVLLASVPELGRIDNKAAAALIGVAPFVHKSGTMAAPARIHGGRAAVRRILYMAAVAASRHNPVLRPFYDRLIAKGKPAKLALIAVLRRLVVFANAVLKSGQPWKGAAVA

SEQ ID NO: 374462 - protein, 307 aa, unidentified
MTYGVGIDVSQAWLDVHVHAVNQTTRLPNTPQGFSRLAKWLSTREPGPIVLEATGGYEQAALDALHDAGFAVIRVNPRQARDFAKACGQLSKTDRLDARVLAHMAQVLPLPLYQPPEPWQRRLAQYQQRRAQLQLTLQQERQRTAHLTDDWLCEQAQEALRHWQAMLKEVDARIAELVASQPQAEVLRDIKGVGPVLLATLLGQLPELGRLNGKAIAKLVGVAPLARDSGTMRGQRRVWGGRASIRATLYMSTLTAIRYEPRLKEFYQSLRQRGKQAKVAIVAAMRKLLVILNAKMRDHLKQQQMAG

SEQ ID NO: 374463 - protein, 327 aa, unidentified
MTLHILGIDVSKATFDVALDKESRMHEKPFANNRTGIEALGRWLDKQEVNQLHACMEATGRYWEELAEWLFSRGYQVSVVNPARIRAYSISKLLRNKTDKVDARLIANFCRAQDPDLWSPPPPEQRQLRDLERRLSSMQSMLRMESNRLGSGVKESTVVADLEDHLEYLKSGIDKLWLAIMAHIDANPWLAHQHALLVTIPGIGELTAARLLGEIPDIAAFDTAKGLAAYAGLTPRHFTSGTSIQRYTPITKTGNAQLRALLYWPAISASQHIPAVYALRERMLERGKSKMAAVAAAMRKLLHIVYGVIKSNRPFDPKLAMPTNHAS

SEQ ID NO: 374464 - protein, 231 aa, unidentified
MVYRGIDISKSSFVAAYPSTNGNPTKTFPNTTARMRELIGTLAVAEHHCVMEATSNYGCCCTCYIRTVLPSVLPPPKKKQIKHFSRMMMPVTKTDEKDAYMIAMYGEKMNPPIYKMPSQATIRILTTEGFTYFDNAKQLSRFIGICPTYQQSRTSVNIREHINRNDDERLRSLLYIAFWTALRYNSRECYIRLKANEKPFKVALIAVTNKLVRPVLTITTINSIYRWICPG

SEQ ID NO: 374465 - protein, 310 aa, unidentified
MDCFIGIDVSKATLDLAALPDGESWTVTNDEHGLAELAPRLVSLAPVLVVRESTGGFEMLAASTLAKHGLPIAIVNPRQVRDFAKAMGHLAKTDALDAGMLADFAQRVRPTPRPLPDEAAQLLESLLTRRRQIVDMLTAEKNRLGFARGPVKRDITQHIRWLEKRLADVDGDLQDAVEASPLYQAKADLLRSVPGVGQVTTLTLLAMLPELGHLSRHQIAALVGVAPMNRDSGTMRGKRMVWGGRAPVRAVLYMAALVGRQHNPVLRVFYERLRAAGKPFKVAATACMRKLLTILNAMLHQNRRWDPQHA

SEQ ID NO: 374466 - protein, 331 aa, unidentified
MFNCIGLDISKKLIAVHIPINKANIEIENSLKGIKGLYSKLNKLYKKEFDDLVFIFEPTGNYSFTLTKFCNEKYIKCFLINPKQFSNFSKALGQRNKTDLIDAQVLSQSISLAKEEAIKVPYIDTIVEELKELISYYKFTSKSTSKLINQLESIMVKDGSKYMINDLKKSLKVSKNKEIEILTKIKDIINSDEKLLKGYNNIKSLSGIGEVGAIVLLHLFIKYPKANQRQIVSLSGLDPIEKTSGTSVHKKSKISKAGSRVYRGSLFMGVLTAIRYDDNFKLFFERLKAKGKHTTAVQIAVMRKMIIIAHSLYKNDKKYDSEFYKKSCSCL

SEQ ID NO: 374467 - protein, 404 aa, unidentified
MGWLAGLVPSIWVTLQRCHGPLYLDEGGSFGRDVAVWGSAEVEPLTRRAARVVPPVSNRSGAFGTAAAVTHDRTVARLSIARTRQVTVTKIICGVDVSSTSLDAFVGPSGPACSFRNTAEGIAELAAFCRQQSVELVALEASGGYEKQAFALLWAGGVPVALLNPRAMRDFAKGMGLLEKTDRIDARVIAWFAAVKGSAPSAPASAEQQRLKALVTRLRQLTELQTAQRNQRLLVSEATVLESIADLLKVVASQIRMLEGEITALLASDPLWQRLDQALRSIKGVADRTVARVMAEMPEIGTLSNKAVSKLAGLAPLAHDSGKREGRRPVRGGRRNVRAILFVVAGVVRRHDPDFAAFHQRLSAAGKPRKVIRIALAHKLLVRLNARARDARKAFAVSGVCQSA

SEQ ID NO: 374468 - protein, 425 aa, unidentified
MNDVVMIAVDPHKASNTAAVLDPVTKTLIESARFANTMDGYAQLTAFAARWAQRRWAVGGCHGAGRSLAQRLVADGEMVLDVPAKLAARVRVYSRGHGRKTDKDDAVSVGLAALDGTGITLVTCDGALVSLRLLGDRREELTAQRTQAVCRLHRLLTELTPGGMRRELTANKAQALLALIRPADDVGRVRVHIARDHLADIRALDARITYIGTQIAALVTASGTGLTGLFGIGPVIAGRILAEVGDVARFATKDHFASYNGTAPIDVSSGDQVRHRLSRAGNRRTGHALHMMAVTQIRYPATPRRLYYERKRTEGKTPKEALRCLKRQLSDLVYYQLLADRRGTIAACGSPTTPPPTRSTSTSPATRSHRAAPPSRPPRRPAPAGSSRRTGKTAASSASRSSTPAPASTKTSSKRPKSTAKTAAS

SEQ ID NO: 374469 - protein, 410 aa, unidentified
MLELFVGDDWAEEHHDVELMDPAGRRLARARLPEGVAGMARLHAMIAAQLGEGVEDAVVKVGIETDRGPWAQALVAAGYEVFAVNPLQAARYRERHSVSGAKSDKADAHTLADMVRTDSHQLRPVAADSPRAEAIKVVARAHKTLIWERTRHTQRLRHALREYFPAALEAFEDLAASDTLELLSKAPDPAAAVRLSISQISAALRRAGRRKIEEKAAVIQTALRAEHLRQPEVVVAAYAAAVQSTVAVLRVMVEQVKTLQGQVESHFGRHPAAEIILSQPGLGSILGARVLGEFGDADDRYVSAKSRKNYAGTSPITRASGKKKLVMARFVHNDRLIDALDAQAFAALSASPGARAYYDRIRIRGVGHRAALRQLANRLVGILHGCLKTGTVYDEATAWPADATASPAAA

SEQ ID NO: 374470 - protein, 461 aa, unidentified
MSNSSRRLSRGDRRRNDWLARLRAVVTRETAVLAFDLAADKQVCALTDQDSRVLARRTVKAKAWQLREAVEWGLTRAAAAGFSSVVVACEPTGHRWRVLDQIAAEAGVRLVCVQPLLVHRAREGEDFTHNKSDETDAMVIARLVTELRCYLPERAEPAWARLRHLGARRAALVTDATTARQQVRDLLECAWPAALQASGEPFKSKSWLAAITVVLDRVGASGDLSVIRRWGWTRFAAAVRRELPRHGATRWYSPIVRAVFDAATDPARAAAGVADQRAGALERTRFALADLAHARAETAVVEARMVEVLDGLGLTTLATSIPGLSAVGAAAILAETGDPTRFSSARALVKHAGLCPRDNASGSYQGKTGISGRGRPRLRLAAWRAVWAALRNNPVLAARYAHLTGRADNKLTKTQARVAVAGSLLRQLHAVITTGNPWDPAIAGGLKPQSRECAKEAAAAA

SEQ ID NO: 374471 - protein, 385 aa, unidentified
MGYSKGGYSKWDTCSRIADCRILANQTKGGEKLETIGIGIDISKKKADVCIRSESKTLESFIISNDSDGIKQLQDRLEPYKNRSRVTMESTGNLWIVMYEKLQEQGLSLSLANPLKTKAIAEAKIKHDKLDAAVLADLARVDLIAKCYVPDHTTRMVRDLIRHRIDLAQKRTQLKNKIHSILDKYCICYDGTLFSESGLQWIKSQHLDKIDSCIINSQLQQIEVLNQLIQDVEVEIASIAIHDKRVELLLGFCGIDYYGAMLILYEIGDITRFNNPKKLVSWVGLAPSLHQSGNMTYTGRITKHGNKRIRWYLAEAAQHAARYDPKLKPFYERIKNKKGHQKAIVAVARKMLVSIYWVLTRNELYDGHREDLQKRKVNKLRKLVQ

SEQ ID NO: 374472 - protein, 365 aa, unidentified
MKHSNRSRVVLKAGTAGSVESLTIGIDLGDRRSHICVLDGAGETVREEDISTSPRSFEVYFKTMPRAVVALEVGMHSRWASRVLQECDHDVIVANPAKVKLISSNDRKNDRVDARSLARLARVDRRLLFPIRHRSEDAQAALSVLRARDSLVRARTRVINCVRGLVKPTGVRLPASNAEGFCSRVNEHIPTTLRPAVALVLEQIQALSDTIAVYDQYVEHLVATRFQQARLLQQVPGVGALTALAFVLTLDDPWRFPKSRQVGCYLGLRPRQDQSGDRDLQLGISKGGDEFLRRLLVNAAHYILGHFGPDCDLRRWGLKIAERGGRKAKKRAVAAVARKLSVLLHRLWITGEVYDPFYRSRGVAA

SEQ ID NO: 374473 - protein, 334 aa, unidentified
MKLMRIGVDLAKNVFQIHGVDCHELPVWRQRLPRDRWLQTVLEKIEPGCEIGMESCGGAHHWARQLQAHGFRVKLVAPQFVKPYVKSNKNDANDAEAICEAMSRPSMRFVAIKTIEQQDIQATHRIRAGLIEQRTAKANQIRGLVAEYGLVAPKELLMLRRAIPCWLGDADNGLTARFRRLLDGLWDDLRALDGRVCQLDGEITAIATNEPSAVRLQQLRGVGPMIATALVVALGDARQFANGRQFAASLGLTPRQHSSGGKDRLLGISKRGDTYLRYIDGAWRTLGATHSQIQRGSAQPVGRSFSRAIASQCGRYCAGQQNCTHGLGNAASRH

SEQ ID NO: 374474 - protein, 364 aa, unidentified
MLIIGCDYHPGFQQIACVDTDGGELSERRLAHREQAEQFYRELKQQNLCARVGMESSGHSRWFERLLQELGFELWIGDPAEIQTRRVRKQKTDRQDAQLLLRLMLENRFPRIWVPDAENRDLRQLLWHRHRMVQMRTRVMNQLHVVPLNEGLRRKKALWRPAGRKELESIALAPWASRRRQDLLDLLDQLTPKIQELTRALEEQVEKRPVTRRLMTHPGVGPLTALAYELVIGTPERFPCGKQLASYIGLVPEEKSSGDRRRLGHISKQGNVLLRFLLVEAAQVTVRSQQEWRSKFFHLAMRRGRKIAKVAMARKLAVHLYWMWREGCDYGQTQKLGSHAGEPGNPDGVQSNTDVMIGHPAPSK

SEQ ID NO: 374475 - protein, 415 aa, unidentified
MAKSMEAIFRCCAGFDVHGANVAVCVRRIDDQGEIHAEVRTFLTMTRDLLGLCDWLIAEGVTHIAMESTGVYWKPIYNILEGQFQILLVNARHIKNVPGRKTDVKDCEWIAQLLQYGLLRGSFIPPQPQRELRDLTRTRTQLTREMASVANRIHKVLEDANIKLGLVATDVLGVSGRKMIKALIEGETDTVKMADMARGRLRDKIALLEEALVGKVTEHHQFLLKALMDHLVYLESQIERFNQRIEEAARPFEKAVTALISVPGYDRISAQSVIAEIGADMKPFRTQAHLCSWAHICSGNNESAGKRKSGATGHGNRWLRTMLVQVAWAASHKKGSYFQAQYRRLAGRRGKKRAIVAVAHSILTVTYFILAEGRAYKDLGADHFDRISRDRIRRYHIKRLETLGYKVELTEKKAA

SEQ ID NO: 374476 - protein, 263 aa, unidentified
MRRTPVGVDIAKHKFDVAVLLDNQKYKTKKFANTPSGCREFAAWLSRFGDCHVCMEATGSYSTELATYLADNNYHVSLMNPACIHSFGNTELARNKTDKSDAAMIARYCALHQPDPWFPAPLSERQLTALVRHLKNLEEMRQMEENRLEVAEAVIVPSLNEHIATLDELIRETKKKISQHIDDNPDLKRDSELLKSIPGVGEMLSSSLLAFAGNLRRFTSSKALVAYAGLNPQRCESGMFKGKSRLSKVVHARGGGKPIQCCG

SEQ ID NO: 374477 - protein, 430 aa, unidentified
MKFKRANRINQRIDRITPDHLVVGIDIAKELHVAGAVNYRGQELGRPLSFSNDREGFERLLRWVAQLQKSSGLTKVIFGMESTGHYGIPLAKWLLGNCHEVVQVNPLTTKRNKENRDNKPSKNDAKDAITIADSVSRGYYSEWVWSEGIYRQLRCAVNEQEAIADDLVAVGNRLQMLLDQVFPEFTKVFKDWDCPRGLATITSFPLPRDLVGLSAEQVIAGWHEGGMKRAGGARGRECAARLIATARSSVGITESTEELARDIQRTLRRYKMLAADKEAVGEEIQQLLEQVPEADLKPMVELGLGLMSKAAILANTGSLQNYEHGNQVMALAGMNLCECSSGKRKGQIVLSKRGRRQLRKYLYWAVVGLVANHESFKAWHEYNVQKLRMKKQRSIFKLIGKLVRILVAIARSGETFDANRANPLGQPVAA

SEQ ID NO: 374478 - protein, 409 aa, unidentified
MDVVITRCAGLDVHQATVVATVRVPDDQGGRRVVTDTFGTMTADLLALRDWLHAYGVTHVALESTGVYWKPVYYMLEDAFTLLLINMQELKRVPGRKTDVKDSEWLAQLLECGLLRPSFVPPPPIRELRDLTRYRVQQVRDRSQEVNRLCKVLEDAGLKLTTVITDVMGKSGRAMLQALVDGTTDPAVLAELARGKLRKKLPELRRALQGRFRPHHAFLIEQIFAKIDFLDEALERLTTEIDQRLVPFEPMLTALDTIPGVDRIGAISIVAETGGDMTRFLTAGHLCRWGAMCPGQNERAGKRRSGKTRKGNRYLRGTLIQAGLGARRKNGSALQARYHRVARHRGHKKAVVAVGHQILEIAFYIMRDGVTYEELGADYFNRRHAEKAVRRHVRQLEALGFHVTIEKAA

SEQ ID NO: 374479 - protein, 449 aa, unidentified
MRKPQVIEDQQHERVFERVAAVDVAKASGMVCTRTPNPSRPGARRSTVWEVPAAMNAVLALADRLVADGIEMVTLESTADYWRIWYYVLEGAGLAVQLVTASQARNLPGRPKTDRLDAMWLARLTEMGMLRPSFVPPAPVRVLRDYARARTHLVQDRTRCWQRLEKLLEGALIKVSAVASKLTTVSAQDMIKAMIGGQRDPHILAGLARGRMKAKHDALVEALTGMFDDHHGELAQMLLDQIAFCDTRIAALATRIEQHLAQVRDAWGVDADGSTGPAAGAGPGAAVLPAAQRLAEIPGVSAELARSIIAETGLDMSRFPTAAHLVSWAGLCPSARQSGARNRTGKKGQGDGYLRGYLGQAATGAAGTATFLGERHQRIARRRGRAKAQVAIGRSILVIIWHLLASPGTRFADLGPDYYASRTDKDKKIRNHIRQLQALGLTVTIAPAA

SEQ ID NO: 374480 - protein, 400 aa, unidentified
MISPHLYIGIDVSKFKHDVVVINDRKQTVTPCFVIKENATGYQSLLDRLETIRQQLAISQLQIGLEATGDYWKNLYYFLQSRTAWPVTVINPVQTRRFAQSHLRRAVTDPIDALEIARYMQERKPDPTPPQTFGLLVVKDIDKQMLSLIKERNANICRLRLELGKTFPELEQQSPSLTAQRVLVLLKHYPTAEMVHLANEDQLRQLTYGIKKQHLPSTFVSRVKLLAQNSIACKSGLGAGIVVQTLALRILEIQAHLDQLKKELIKVHRKIAGKPSILTTIPGVASLTAAILEAYIGDVKRFPNYNQIVAYFGMNPTICSSGVSKAKKGHLQKKGNARVRNILFMNALSLVRYKVEPFYGFYQQKVAEGKPKLVAVTAIMRKLLVVVYEMLKKNELFHAK

SEQ ID NO: 374481 - protein, 345 aa, unidentified
MELHTIGIDLGKTVFHLVGMNLRGEAVVRKKLSRKQLLQFTANLHVDLIGMEACGGSHFLGRALREQGHEVRLMPAQYVKPYVKTNKSDFIDAEAIAEAVARPTMRFVPIKTDDQLDMQSLHRVRERWVMRRTAIVNQIRGLLLERGITLRKGRRHVDAALPGILEDADSKLSGALRVLLAQLKLELDQMAIRIDEADAVLNKTAHENEACQRLVKIPGIGPITATALIAAIGNGGAFRKGRQFAAWMGVVPREHSTGGKQKLLGISKHGNSYLRKLFIQGARAVLQQRTKQAPGLNEWLAQLAGRAHNNVVAVALANKLARIAWAVLAKEEQYHPPTLTSLEAA

SEQ ID NO: 374482 - protein, 328 aa, unidentified
MQKNKEYVGVDVSKESLDMAVYSTGEIRSFGNDDASIAKATTWLKQVNPAIIVMEATGGMEISLYVALQEANLPLAVINPRQIRDFAKSMGILAKTDKVDAKVLARYAATIQPEARPLPDEEARQLNTLVRRRCQLVEMIIAESNRATITRDKTMKQRINAHIDWLKQELAGIDKDISQMMKENPVWHAKDKLLQSVPGVGPVLSATFIAELSELGILNRKKIAALVGVAPFNRDSGKHRGERSIWGGRCRVRQPLYMAALSAVRFNPTIRIFYERLLANGKEKKVALTACMHKLLIMLNVMLKHNSYWSCNYAIFNNTCIPDAKTVA

SEQ ID NO: 374483 - protein, 408 aa, unidentified
MQTVFERSAALDVHKASVTACVRVPGEQHVREFASTVRGLLALRDWLAGFGVTHVAMEASGVYWKSPWAILEDEFECLLVNARHVKQVPGRKTDVGDAEWLCRLVEAGLLRANFVPPKPIRQLRNLTRYRKTQIQERSREVNRLHKALEDAGIKLDCVAADIMGKSGRDMLDALVAGERDPEVLANLARKQMRKKIPALREALEGRFEAHHALWIGVILAHIDFLDQQIERLTEAIGEQIAPLSSAVGLLCTITGVQSRAAEVILSEIGADMSRFPTARHLASWAGQCPGNDQSAGKRRSGKTRNGSKWLDRTLEEVAIAAIRVKGTYLQAQYNRLRPRRGHKKALGAVKHTVICAVWHMLSTGETYRDLGGDYFTRRDPERRTKRLIQQLEQLGHTVTLTDAPPTPA

SEQ ID NO: 374484 - protein, 317 aa, unidentified
MEQRQSSTKVAGIDVGKGWLDVAAHGLEDALRVENDAAGISTLIAWLKAREVGRVGLEATGGYERGVRAALDAAGFEVVVHQPIEVRRFAQLKRWRAKNDRLDAQLIAAATAQVDAVKAAQDPRLVELAERLTAYEQITDQIAALKTFLESVTLKDLDKLLRTQIGSLERTKARLSLDILGRIRAQPDLLARFRLLTSLPGVGAIVAASLVIRMPELGAMKKGQATSLIGVAPFDRDSGQWKGLRFIAGGRARPRRMLYLAAVTAKRFDPGLKAFAERLIAAGKAKKLVTVAVMRKLIEAANLVLSRGQPWQTQPTP

SEQ ID NO: 374485 - protein, 337 aa, unidentified
MKYSGIDLHSNNSVVTVTDERDRVVAEKRLPNDLSKIVAFLLPWRDELAGVVVESTYNWYWLVDGLQEAGFEVKLANTGAIKKYDGLKHSGDEADARHLAHLLRLGILPTGTILPPEHRATRDLARKRMQLVRSRTSHILAIENILARERAVTITSNQIKRLTAVDVDQMGLSADVALAVQSNLAVVTTLGAQIELLEKRLQEKLGERPEYALLTSVPGIGRILAAIILLETGPIERFDAVGDYASYARCVDSQRLSNGKKKGEGNAKNGNKYLVWAFVEAANFALRFNAEAKRFYERKKARTNNVVATKALAHKLARACFHILKERAPFDTRRCFA

SEQ ID NO: 374486 - protein, 476 aa, unidentified
MAGSKKAISTLALIPMLPHETLYIGVDVGKFRHVAGFLSRTLLQRHERFEGCPTFVFEQSREGFRSLVDRIREYVPLEQATVLLEHTGHYHKNLEQYLLEVDITVYRIHVQERPKGMTKTDKRDALGLANRLYTQLELGAQVEEKMQLVRRAVHPTQAAMQLRGFMQHRYELSHQRTQLRNKLTAICDELFPEFTHIFHDPNLEVALAFREKFPTPHDIATASLSALRETRVKYFPSEANLLRLQQLAGETIGINNKDRLRGMKLEQELLIKELRLVQGHLERLDTEITDIVKTCREGQILLSMPPIGEVAAATIIATIGHIDNFEKASELKSYFGWAPTRNQTGVTFDRTKLSHRGVRPVKQMLFLMAARATTLDGEWARIYRRLLPRMATYDERVKEYRGKKKVLGRIAGQMVSMIFALLKTDQETLSRVPSGEEPPPPMLYDPEIHRKHQEGSYRSLKPGTQPRKILQLPSKP

SEQ ID NO: 374487 - protein, 335 aa, unidentified
MKTKFIHFAGIDVSKAKIDVCVIINTARSDLLHGIFEQSKKDFNELRKWLQKVLSKHQDNMLICVENTGLYDDALLYFLRDQGYSVCLENAALIKKSIRDTRSKNDRLDSRHIAMYALRHHDELELWEKPRQVIDTIKQLLAYRSNLVESLKRVKQAQKEPEYFKWARVKKTKSYDSGMKGLEKDIRQIEEDIWELIKKDKALLTMFTLLISIPAIGKITACHFICYTNEFKRVKSGKHLASYCGVVPFEQESGTIKKPARLSKQANKALKRLLHLCAVTAIRMKGEFTQYYQKKIAEGKHVLQALNGIRNKLALRIAAVIKNQRPYDENYIYQP

SEQ ID NO: 374488 - protein, 328 aa, unidentified
MFYLGMDVAKTKLDCCLLLDEASGKRKTKVVKNTQSGIVDLLAWVAKQNVSPEALHIVMEATGVYHEQAAMALADAGVMVSIINPAQVKDFGRGLAVRTKTDGVDSFVLARYGALLKPKAWVPPPLEARVLQALLARREAIAQDLQRERNRQEKAGATDTPALIHKSLEEGIAFLAKQLAQIQKDIDAHIDKHSDLQKDRALLQSIPAIGPQVGRNILSVMHNHDFGSAEQLAAYLGLVPVERQSGSSVLGRARMSKAGPTRIRAVLYMAAVMGTRYNPHVKAVYERLLARGKSKMSSLGAAMRKLVHLCFGVLKTQQPYQHDYLKNV

SEQ ID NO: 374489 - protein, 398 aa, unidentified
MTESSDYESVQVFIGVDVGKDTHHAVAINRSGKRLFDKALPNDENKLRSLISDLKQHGQILLVVDQPATIGALPVAVARSEGVLVGYLPGLAMRRIADLHAGEAKTDARDAAIIAEAARTLPHALRTLKLADEQIAELSMLCGFDDDLAAQTTQASNRIRGLLTQIHPAPERVLGPRLEHPAVLDLLQRYPSPEKLASLGEKKLAAQLCKLAPRLGKRLAADIAQALAEQTVVVPGTNAAAVVLPRLALQLITLRKQRDEVALEVEQRVLAHPLYPALTSMPGVGVRTAARLLTEVACRAFASAAHLAAYAGLAPVTRRSGSSIRGEHPSRRGNKALKRALFLSAFAALRDPLSRAYYTRKMSQGKRHNQVLIALARRRCDILFAMMRDGTFYTPQGS

SEQ ID NO: 374490 - protein, 348 aa, unidentified
MTEIIRIGMDTSKSVFQLHGVDAAERVVLRKKLRRREVLAFFAKLPPCRVGMEACGGSHYWARELQALGHRVELIPPQYVKPYVPRGKHDAADAAGICEAMSRPHLQRRLVPVKSAEAQAALMLAGLRERLVRQRVQLGNTIRGYAAEFGVIAATGKAKIAALLRRIESEAAVPEAARALFAELAEEHARLEAQIETIEAKLMAWHRQDELSRRLAQIPGVGPIGASFLVLKAPDPQRFRSGRDFAAWIGLTPKNHSTAGKQRLGVITRAGDETLRSLLVVGATSVVWQARRGTSRSAPPWLLALLARKPPKLAAVALANKVARIAWKLMVTGERYDPSRLATVPATN

SEQ ID NO: 374491 - protein, 338 aa, unidentified
MALYTGFDLHSNNSYVGIIDETGGRVWKKKLSNDPRLISEMLKPFKKDIEGIVVESTYNWYWLVDHLMEEGYRVHLANPSKIQQYSGLKHGDDEYDSFWLAEMLRLQILPEGFIYPKEQRPLRDVLRKRGHLVRLRTSLMVSLQNILARNTGAKMKTNHIKVLKEDRVTPLLASDDDLSLAGSVSKDAIDSLTKQIIAIEKALEKRINLQLPYDLLLSLPGVGRVLGLTIMLETGPINRFADVGNYVSYCRKVPARRFSNDKKKGSTNRKNGNKYLSWAFAEAGELARRFDHEARAYYDRKRKKTNAPIAHSALSNKLARAAYYIMRDGVPFMSEKAF

SEQ ID NO: 374492 - protein, 338 aa, unidentified
MFVIGIDPHKRSHTAAVLDDSEELVGQVRVDADRWQRDRLLRFAAPFEPRTWAVEAAGGLGALLAQQLVAAGERVVDVPPTLSARVRLLDSGKTDKSDPHDARSAAIVALRHAQLRPVRPVDHSAVLRLLANRHHDLTASRTRTICRLHALLCLLIPGGFSGRLSAQRAGEVLRRLRPVDLVDDERRRVALELLGDVRRIDNQLEALVKRIGVAVVASGTTVTDVYGIGPWTAAVIVGHTGDVTRFPSAGHYARYNATAPLEASSGPRVRHRLNPRGNRQLNHALHVAAITQVSHDTIGRAYFLRKIDEGKTRKEALRALKRRISDAVYRQLVADTQP

SEQ ID NO: 374493 - protein, 335 aa, unidentified
MTKVTTVGVDLAKSVFTIHGVDAAGRTVLRKTVRREKLLELIAALPPCLIGMEACSGAHEWARRFERHGHRVGIMMARFVAAYRKSSKNDGNDAEAICEAVARPNMRFVPVKSVEQQAILSVHRVRQGFIEQRTATINRMRGLLAEFGVVLPQRADQVRRTAIVVAEALPVLAREAIADLRAHLTYLDARISHYERQLISLARQHEPARRIQDLCGVGPLTASAITASMASGHEFANGRQFAAWLGLVPRQYSTGGKMRLGHITKRGDGYLRTLLMLGARAVLQSAARRTDRLSRWALALRARRGYHRAIIAVAAKNARIIWALLARDREFVLAV

SEQ ID NO: 374494 - protein, 460 aa, unidentified
MNRKRSKSRVDRTMPMMHPNAAAIDVGATLHMAAVRADRATEPVRSFGTFTTDLHRLVDWFTECGVETVVMESTSVYWIPLFELLDARGFTVFLVNARDAKHVPGRKTDVSDAQWLQRLHSYGLLRASFRPKGQIAELRAYVRQRERLLEYAASHIQHMQKALTEMNLQLHHVVADITGSTGLRIIRAILAGERDPEVLACLRHYSCHSSAETIAKALTGSYRTEHLFALEQALALYDAYHEKASACDVRIEAVLKELCIHRGRGIGSVAPAPRRRHRTDQANALAFDVRAALFALLGKDITTIDGLGPYLSLKLVAECGDDLSSWPSAKHFTSWLGLAPSNKVSGGKMLSSRTRRSGGRAAALLRLAAVTIGRTDTALGAFYRRLSSRIGKAKAVTATARKVAVLFYNAVRHGMEYVDPGASSYETRYRTRVVNNLHRRAKAFGFVLQPLEPKAGAVVS

SEQ ID NO: 374495 - protein, 428 aa, unidentified
MNQPFNNDDTQNDYAAFIAIDWADRQHVFSLQVAGQSTKETGTLEQKPEVIGPWVAKLRERFGGRPVAIAVEQSRGALIHALLTYDFIVIYPLHPTTVAKFREAFKSSGAKSDPLDTDQILQILTKHRDLLKALNPDTEQTRLLARLVEDRRKAVNLRTSHVQALTAALKEYFPQALELVNGNLTSRLACDFLIKWPTFEAFQQAKPSTIKRFYYGHNIRSPEVMEKVLGLVRTAQPLTTDSAIVQSGSRLSQMYAQLIRTLNPVIVDYEERIEKVFHDHPEANLFNKLPGAGPALAPRLLSFFGTDRSRYEAAGNVQSFSGIAPVTKSSGKTRVVYFRHACPKFDRQTFHEFARLSLSKCQWARNYVDYYTAKGKKFHTIIRALAFKWIRILFRCWKNRTPYDESKYMETLKKRGSIFATLHLEQKP

SEQ ID NO: 374496 - protein, 388 aa, unidentified
MIYLGIDIAKLNHFASAISSDGEILIEPFKFTNDYDGFYLLLSKLAPLDQNSIIIGLESTAHYGDNLVRFLISKDFNVCVLNPIQTSSMRKNNIRKTKTDKVDTFIIAKTLMMQDSPRFLTLEDLDFIELKELGRFRQKTVKQRTRLKIQLTSYLDQVFPELQYFFKSGIHQNSVYALLKEAPTPNAIASMHMTHLASLLTRTSHGHFNKETARNLRVLAQKSVGINDSALSIQITQTIAQIELLDSQLFHTELEIANLVTCLHSVIMTIPGIGSTNGGMILGEIGDIHRFSTPNKLLAFAGLDPSVHQSGNFQAQRTRMSKRGSRVLRFALMNAAHNVVKNNLTFKTYYDKKRAEGRSHYNALGHCAGKLVRVICKMLTDNVEFNLE

SEQ ID NO: 374497 - protein, 482 aa, unidentified
MKKRSIYQNRSQELYALFESACSNLKIMCIPMDFAKRHHVVMFCNGYGDILRKPFPVKNSPEGLDYLVDQVKRSCAHRSIKLQHVFFGGEDVSSCSENFVHSLRSKGWLVASVNAHEAKKQRENLQASTDRLDLMGIASMLLSRRANTRPAQSGIYKNLRTIVRHRKKLVKMKTEVKNRIHAVVDQLFPGFLDEKRSGIMPFSKSSLYLMSDRFSAHQMTRRQLNPLTKALKRFGTQNPDRAALKLKSYAAKAFSAPQPHMHTLQLSPSSHVKHYSCLLECIQHLEKEIALVLSQTQGAFLTSIKGIGIVLAAGICSEIGDPFIQGSAANLASYAGVVPRVKQSGGPDSEPRVGRVSKRNNHMLKDYLVQASNHIGRQGPEDLRQDFKRRQSQGQNAEFGMARRLMRITMCLMKTWQIYLPDNLRTERADKKDRALYYLSIWPSITEKWCKLTALDKVFAKEQPLGQWRDAVQKIYEVKLDL

SEQ ID NO: 374498 - protein, 319 aa, unidentified
MKKTSTVRVNGNMIFKGHKLTIGLDLGDRWSFYCVLDEAGKIILEQNVPTTPEAMKQTFSRIPQSRMALETGTHSPWVSRLLTELGHKVIVAPAQKVQLSTKSNRKDDRRDARTLARLARIDPELLGPVRHRSVQAQIHLTVIRARAELVSARTALVNAARGLVKSYGQRLPKCGTQQVSRELAAELSTELRDVLEPLLKEVESLNERIQEYDERMEKIAKEVYPEVSLLKQVKGVGTQIALTYVLTIEDPHRFRKSREVGCFLGLRPGRRNSGESEPEKRISKEGDRYLRTMMVQGAHYILGPFWGPLDKTVTCGAGD

SEQ ID NO: 374499 - protein, 385 aa, unidentified
MQKLNDLSRSPSPLDPDGTLIAVIELSLSSWLVAGIVPGVERQPLKKLAVDESALLKLLHRWREEAAKAGHRIKRIAVAFEAGRDGFWLARWLSARDIEAHVIHASSVAVSREHRRAKTDRLDTELLKRSFLGWLRGERDHCKMVAIPTTKDEDAKRPNREHESLVGEQSRIVNRMKATLIRLGIRGFNPKLKKAAERLDGLRTPEGEPIPPNTLAELRRDMVRRRLVSDQIRQIEDARLERLKQAPSDGPHAMVRLLARVIGVGVETADMLVQEVLSRSMRDRRAVARYAGLTGSPDESGRKRREKGLTRSGNARVRRGMIQLAWRFLMFQKDSTLAQWFRARTESARGTRKTMIVALARKLLIALWRLVREGVVPDGVVLRPA

SEQ ID NO: 374500 - protein, 330 aa, unidentified
MPRISSQVHGIDACGKVVVRKPLRRGEVMKFFASLPPCLIGIEACATAHHWGRELGKLGHTVRLMPPAYVKAYVKRGKTDAADAEAICEAVARPTMRFVAVKSMEQQGVLMLHKTRDLLVRQRTMLINALRGHLAEFGIIAAQGTAGVKAAIEAFHAMQDSLPTLAGKALHGLIKQMRVVASEIDKIEEQILAWHRNNAASRRLAGIPGIGPITASAIVATVSDATLFSSGRSFAAWLGLTPRAHSSGGKEKLIGISKQGDGYIRRLLVIGATAVIRRARQDNASKSWAAKLLTRKPARLVAVALANKTARVAWALLARNQAYIAHVGAA

SEQ ID NO: 374501 - protein, 339 aa, unidentified
MGEVSTIGLDIAKNVFQVHGVDAAGAVVVRRALRRRQVLAWFAALPSCLVGIEACATAYYWARELRRLGHEVRLIPPAYAKAYVQRNKNDPADAAAICEAVGRPSMRFVAIKTERQQAAIGLHRVRNLLMKQWTMLRNHLRGLMAEFGVVAPQGRRGLNELLAILADADDRRIPSPLREGLAAIATTLRDVERRLAAIERQLVAAGRQDATYRHLITAPGYGPILSSAMAAIVTDPSVFRTASDFAASLGLVPRQEGTGGKVWLGPISKRGNGYLRRLMVNGATALLNSKSAKQDPWLARLLATKPRKVAAVALANKMARIGWALMRRQEDYRNMPAAA

SEQ ID NO: 374502 - protein, 407 aa, unidentified
MRVVHERCAGLDVHKKTVVACVLTPQGREVRTFSTVTEELLALVDWLQEWGCRAVAMESTGVYWKPVYNLLEAAEMEPMVVNAQHIKAVPGRKTDVRDAEWIADLLCHGLLRASFIPDRPERELRELVRYRRSLVEERTREANRLQKVLEGANLKLSSVASDVLGRSGRDMLTAISQGQEDPVELAGLARGRLKEKSDQLQRALRGVVGSHQRFLLHEQLSHIEELEARIHRLSAEIEARLAPFEAALQRLQTIPGVGRRVAEDLLAEIGTDMSRFPTHRHLASWAKICPGNHRSAGKSKPEHIGRGNRWLRSILVEAARAAGRSKNTFLAAQYHRLAGRRGNKRAAVAVAHSILVIAYHILKEGTSYQELGATFHDQRSSKAVARRLTQRLEALGFEVTLQLKEAA

SEQ ID NO: 374503 - protein, 337 aa, unidentified
MKQIKFFVGTDVSKDWLDMCIMLEEEILHRQRIDNKVAAIRKWLRQTRQQYGYLMENTLFSMEFTGIYNNHLLEVLDAAAANIWLIPGIEINASRGLQRSKNDQEDARLIAEYAAGNRKKIRLWKKPRIVLKQLASLLMMRDKLMLTKHQYETTFRESRGYSAKEEYQIVKGHSDPVLKTIHKELEKLEKQLAALIKGDERLKELHGYITSVDGVGIIISANTLVETNEFLDINEGKKFSNHSGVVPHTDDSGKKIKKARVSNKANKKLKKLLHLAAMSTIRMKGEMKNYYERKLAEGKNKMSVLNAIRNKIVLRIFACVNNKRKYDKNYVYSLAIP

SEQ ID NO: 374504 - protein, 339 aa, unidentified
MKKVFIGIDFSKLKFDAAIYSVDTKAIVATEVFDNEQSGYVDFLQWVKATTRCQKSGMLFCGEHTGYYSGNLSVFLYDSGYDMWLVSGLEIKLTQGIKRTKTDRVDACKIAEHAYRYQDKVVLFQPVCKSLDEIRELLSYRERLVETRKMLTTSAKEMKRVKDNASCDYIYRDSIEYIKTLNASVRDCEKRIEALLKQDISLKTNYKLVSSVVGIGLVNAALILVATDNFTKFDNPRKFGCYCGVVPFEHSSGTSVRGKTRVSKMANKDLKTKLTLAAQNAVRFDPDLKEYYQRKRSEGKNNWLVLNNVKNKLIHRIFAVVRDGQMYEKQYVHPLKQVA

SEQ ID NO: 374505 - protein, 502 aa, unidentified
MTCPVRARLFVTQMRRGRLHARSCRHVRVHGPNRPSGRNASPSGTIPPTIMSPTPGSPGSSTEIRLSARAHINPIDRAHGPPAPATVHRFRPLQPRGTCVGMHAQIRSVASPQLRCVRRRSAPSATTNEGTVQMIVIGVDTHKRSHTMVALDAVTGATRGQLTIPASDEGTLDALRFAAELDTERVWAVEDCRHVSGRLERGLVASGDRVIRVAPGLTETSRRAVREPGKSDPIDATAIARAALREGIDSLPVAFLDEQALEIRVLNDYRAQLVNERVRLASRLRWHLVQIAPELEAQVRPQGLIGPQIRAKVARGLARLPRSPQVRVTRAILKRINEIYREEGELLAEIKALIEAHYPQLLAEHGCGTVTAAIIVGHTAGAKRFPSDACFARHAGTAPIPASSGNTKRHRLHRGGDRQLNRALHIIALSRARTDPSTRAYLDRRHSEGKTKREAIRCLKRHLARRIWRLLYTTQTPPSPPPPSRPISTITGAAPALTPCTR

SEQ ID NO: 374506 - protein, 365 aa, unidentified
MKEEKQAETRFVGIDLGKRTYEVAIVGKGGKVTMSNGKTFVAGRQSLYKKLRPSDKVALEAGNMAFMMAKEIEAAVGCRVYVLNPSQLAVIYCSMKKTDKEDALKLAHILEDCREERLPVVPVPSDKEMYRRKLLANYRRAQQSRNRDINQLHALFVAQGITTKVKKDLCTCEFRQGAVLELAGLEREEAEYLLKRLALCEQRRADLEKQMDKEAAGDEVIELLQSIPGVGPKTAFAFTAHVAPERFENAGQVGNYLGLVPRVYKSGDTVRYGRITKRGNGYLRALLVQAAWALTNTKGGEKLKLRYLYMTVEKSKSKKKAIVAIARRLAEMMYAMMRDKEWYASRPFKPGKQDIEKQAELALGV

SEQ ID NO: 374507 - protein, 361 aa, unidentified
MGMELSSKTWKVAFGDGQKHREVDVEAGDMGGLLRAIEKSKDRLGLPKDCPVSSCYEAGRDGFWLDRFLVAHGVENVLVDAASIEVSRQARRAKTDRLDAQQLLGKLVEHGAGKKVWKVVRVPSEEAEDERRGHRERGRLLKERTGHRNRIRSLLVLQGIRRMPRVEDYEKDLGRMRRWDGQELPGRIQEELLRECRRLAVVEEQLRELKQKRRREERQPQSVAQSQAVKLKQLKAVGTVSAEILTTEFFGWRQFQNRRQVGSLAGLTGTPYDSGGSRREQGISKAGNPRVRATMIELAWSWLRWQRGSALTKWFWERFGHGSPRMRRVGIVALARKLLVALWKYLERDEIPAGAVLRAAS

SEQ ID NO: 374508 - protein, 500 aa, unidentified
MSIGQHAYASVQIHTGVSPMNSKQVFKKQNQDICEIFNHAEHPKKVMIVAIDYAKHAHFALICDGCGTSLKAPFEVENSSEGLRFLQQQIEASLRRHFIPAKQIIIGGEDCGSFSLNFVHALGRTGYLVIGVHAQEAKLQRENYQASTDKLDLLGIAKMLLDRRGSTRSGKVPHERNLRNITRHRAAMVNNKTALRNRIHSLVDQIFPGFLDERKSGITAFSAASCHLMHDRFSPAHFRRRKQKVLVRELQKFEVKEPEVKAAKLLAYATEVIESPSELVGTLQSSLRNEIILYEGLIRCIEQIEKEMALLLAPTPGALLTTIKGTGITLAAGVTAEIGPMAFQNSLRRLTSYAGIVPRVKQTGGSENAASHGTVSRRCNRILKNYIVQCGCHLGLHGPDDLREDHQRRTSNGQHADFGMARKYLRIGSYLMRYNQVYLPPELRKHADRDVLKNYYLKQWPIWRKKWQQSGAISQAFSPENPLGIWRIAIQEIYEISLPL

SEQ ID NO: 374509 - protein, 479 aa, unidentified
MTPYKDAFPEPCPPAPTIPEPLVLRPSSSLQLYNPHAAGIDIGEAEHWVAVPPDRAPQPVRRFGTFTADLDALADWLLDCGITTVAMASTGVSWIPLFELLEARGVQVFLIDPRQAKRAPGRPKTDRLDCQWLQRLHAYGLRAAAFRPDAQVCGLRASLRHRQMLLTYGAHHIQHMHKALQQMNRKRSQVVSDRTGATGMAILKAIIAGERDPLTLAKLRNPHCQHREDEIAKALQGTWRAEHLFALQQAVELYQCYHQPLTVCDQQLQAHLGTFADQSAGQPLPPKPRRHKKANEPRFDARTPLYRLAGVDLTTIEGIEEGTALVILAEIGTDMSRWPSVKHFCSWLGLSPQHKISGGKVLSRRVRPGAHRVAVALRLAARTVQQARTALGAFYRRLRSRLGAPKAITATAHKRARLVYSLLKHGSASVQQGLDDYESQYRERTVKAMARQAKALGYTLVELTVPATPRNDAVAPATP

SEQ ID NO: 374510 - protein, 340 aa, unidentified
MQITTKFYLGIDVSKHWFDLSLLTVINHQKQIMVTERFDNNETGIKEMEQWLKKQSVSFNNNTLLVIENTGIYHRLIWEFCSTHKLPIHIGNAAHIKWSFGIARGKNDVIDSQRLCNYAHKHADELKATPELNPVFIELKDMMTSRSKLVSQSGSIRSHLKELKLSNNKATQKLIEQAHKPVLDGLKKSIALIEKQILNIIHKDDTIKTNYDLLITVPGIGHLTAVYILCCTNNFIDKISGKQLACYAGVVPFQDKSGSSIKGRNKVHKMANKELKKMLHLCALSAIKCYPEFKQYYERKKKEGKHVMSILNAIRNKIVLRAVAVVNNQKPYVENYRKAA

SEQ ID NO: 374511 - protein, 344 aa, unidentified
MHYKLISIDLAKTVFQVAAFRDDNSIAFNKRVKRAQLLDTLRQCEPTRVVMEACYSANYWGREIAKLGHDTRLVSARVVKAMLVGNKNDSNDAVAIGEAAQRPRVQLLRVKGLHQQDIQSLLRARELLIKERTALINQTRGFLAEYGIIVAQGLAQLQQALPALLEDAENGLTTTIRSLLKRWHERWLQQNQELETLTHELIALISHDEVFKVLQSIPGVGPIVAAAIMASVNEITDFRNGRQFAAWLGLTPTQYSSGLVNRLGSISKRGNEGLRRLLIHGARAVLNWCEKKEDGLSKWLQQLKARKHSCKVTVALANKLARIVWAVLTTRQEFDITKACQAVK

SEQ ID NO: 374512 - protein, 409 aa, unidentified
MKDSTTYVALDTHKKEHAVALLLPGVDDPEVWTIPNTKRDVRRMVRRILARAPGGVAFCYEAGVCGFALQRQIEAAGAACQVIAPSLVPVQAGKRIKTDRRDARKLAKMFRAGMLTEVHPPTEEEESIRDLCRSRQAAQQDLVRIRHQLSKFLFRRGWIYQAGKQWTQKHQDWIAAIRFDRARDRWMLSEYSLELQHRQERLRALTQAVEQAAEDSPWTEQVGWLRCFRGIDTLTALTILSELHGVGRFDSPRQLMSYLGLTPSEDSSGEKDRKGSITKAGNRRVRRVLVEASWHQAKTPRISRPLRKRREGQPAWVIEVANRAMKRLYDRYWRLVHRGKLPTKAATAVSRELCGFLWAVLHLEDRAVQRRRILRRPAAAAAGPPEPAAKRMTAREFFNAKDLKASQTG

SEQ ID NO: 374513 - protein, 342 aa, unidentified
MQVTTIGLDIAKNVFQVHGIDAAEKVVVRKQLRRRQVLEFFKALPPCLVGMEACATAHYWARELTKLGHQVRLMPAKDVKAYVKRNKNDAADAEAICEAVRRPTMRFVQIKSTEQQGRLMLHRARDLLMRQRTQVINALRAHLAELGIVAAQGREGIKELLKIIASEGDAGLPVDAHASLVVLAAELQAMQTMIGSIDKRIMAQHRSSEASQRLESIPGIGVTGATAIVATVSDPKVFRSGRDFAAWIGLVPREDSTGGKQKLGPISKRGDRYLRRILVVGACAVLRYARQQPQKYPWLTQLLARKPFKVVAVALANKMARIAWALLANGGTYRAPVLVAAA

SEQ ID NO: 374514 - protein, 350 aa, unidentified
MVVVGADVHKRTHTFVAVDAVGKKLGERVVSATCSGHHQALRWAWERFGAEVVWAIEDCRHLSARLERDLLTAGQQVVRVPSKLMAQTRASARTRGKSDPIDALAVARAFLREPDLPIASHDEVSRELKLLVDRREHLVGQRTSTINRLLWRVHELDPGHAPKPRSLHLAKHRTLLSQWLATQRGLIAELARDELADITRLTEVIDALAKRIGERVRKVAPVLLALPGCAELTAAKLVGEAAGVTRFKSEAAFARHAGVAPIPVWSGNTAGRVRMTRSGNRQINAALHRIAITQARLPGMGQAYYHKRIASGASTTEALRCLKRRLARVVFHHLHTDHQNGIQPCQPAAA

SEQ ID NO: 374515 - protein, 423 aa, unidentified
MSYKIAGIDVHKKMLAVVVSDVEVDGEYQFERVRYSSSPEHLRLLAEWLIVQQVEEVVMESTAQYWKPVWGALERYWKPSCQEREGAGPKSGTLHLAQAQSNRGRRGRKKDFPDAERLVKRLVADELVLSFVPDTEQRLWRAVTRRKYQLTRNHVRLQNQLEGLLEECHIKLSSLVSDLLGASARRMLKALAEGETNPVALAVMADKNLRATQAQLCDALGACTELKPIYRRLLKMFLEELQFIDQQISQLDQELANLLSRHHDAIVHLAEIPGLGVDSAQQIIAEVGAAAATFSSAKQLSSWVGACPGEEESAEVSKSHRSPKGNRHMRRILNQAANAAAKSKGTIFEIVYRRLVSRLGHNQTIGAIAHRLCRLIWIILHRGVRYEERGPSVSAKTRRHRTNRMIRELRNLGYRVEPLVTTV

SEQ ID NO: 374516 - protein, 350 aa, unidentified
MVKMKRIVKQVVGIDVAQQELVVCLGRMYDDWTPELYASKTFANTANGFAALTLWVKKLTEESSPVRYVMEATGVYHESSAYYLEGKGFEVSIVLPNKISNYFRTLEVKTITDKTASETIARFGLERKLDTWKRPAEIFRKLKQKTRERDQLVGERTLVKNQLHAEQTEAYPDKESITRMKARINLLNKQVMQIKEEMNALVKGDKEVKKSVEVISSAPGVGTLTAVTVLAETNGFELIRNKRQLTSYAGFDVKEKLSGTSVKGKPRISKKGNRYLRKAMYMPALAAIRDDGRFKVLFTRLVSKHGIKMKAAVAVQRKLLEMIYTLYKTNTAFDKDYLKDEVMALSTQAA

SEQ ID NO: 374517 - protein, 369 aa, unidentified
MKKTIKNIGLDVHKNSISIGIADDGRDGDIRYYGKIDNDMNQLDKVIRKLISKGAVLRFAYEAGPCGYGIYRYLINNNIDCVVVAPSKIPQQSGNRLKNDKRDCLSLAKLHRAGDLTPVYVPTEEDEALRDLVRGREDTTHALRTAKQRLGAFLLRHDIIYSGKTKWTKAHFNWLSDIAMPHPAQQIVLQEYIDTVTDCSNRVQRLTEQVRQQSQQSRLHELIKALQSMRGISLIVAATIAAELGDLTRFENPGKLMAFLGLIPSEHSTGERVKKGPITKTGNGHVRRALVEAAHAYRFAARKSREIRKRQEGLPKEVLDISWKAQCRLCTRYQYLMAKGKKSNVAKTAVAREIAAFSWAIAQVLPKAA

SEQ ID NO: 374518 - protein, 387 aa, unidentified
MYYVGIDIAKLNHFASVVSADGEVLIKPFKFTNDNDGFCKLLSVLASYERGSLIIGLESTAHYADNLVEFLVSKRYQVCVINPIQTSTMRMNNIRKTKTYKVDTLVIARTLITRPHRFFSQEDIDLMHLKNLSRFRQKNVKERTRLKIQLTAYVDRVFPELQYFFKSGLHQKAVYALLKEAPTPELIASMHLTHLTHLLEASSHGHFNKQQARELRILAQKSVGSSDRALSLQVTQSVEQIELLDRQIKNIESQMTEIMLGLDSVIMTIPGIGYINGGMILGEIGDIHRFSKPCQLLAFAGLDPSVYQSGNFNASHTRMSKRGSRVLRYALINAAHYVVKNNATFKAYYDTKMAEGRTHYNALGHCAGKLVRVIFKMLSDDVTFNLE

SEQ ID NO: 374519 - protein, 342 aa, unidentified
MKKQSGIFCIGIDVSKLTLDVSLVLTEGHLRHARGSITISNTPEGLKELKRWLKQQGVCFNETTVVVMENTGMYHRLLVKWAIKTGLRYCVDNAARIKWSMGITRGKSDKVDSQRIALYAAKNLQELHWNNVSEESLMLLKDLLTTRESVLQQIQQLRVPLNERKQYLEEKQIREMEKLLAPAIEGLKESLKKLNAAIQKAIAADAELLRLYKLATSVPAVGPQTAATLICDTRGFTGYDNAGQLSSYCGVVPFGYRSGTSIRGKTKVHPMANKNLKRLLHMCVLSGIQKYQEYKEYYERKTAEGKHPMAVINALKNKLVIRVAAVVKRGEPYVDNYVSKVV

SEQ ID NO: 374520 - protein, 355 aa, unidentified
MSQKLDTSPAVIGIDIGKNSFHIVGQNQRGAIVLRQKWSRGQVEARLANLPPCRIGMEACVGAHHLSRTLKALGHDARLMPAKYVRPYSKGQKNDYRDAEAIAEAVQRPTMKFVATKTADQLDLQALHRVRERFVGQRTGINNQIRAFLLERGIAVRQGLRFLRAELPGILATRSDALSPRMLRILEDLSADWRRLDARIEGLSSEIEALARQDKGCERLMTVPGIGPIISSAMVAAIGTGDAFSKGRDFGAWLGLVPKQLSTGDRTILGSISRRGNRYLRSLFVQAAWVVLVKVGPSHWERYGLKSWIEAAKRRLHHNVLAIALANKLARIAWAVLHKGRAFECVKTETASRPA

SEQ ID NO: 374521 - protein, 314 aa, unidentified
MEESVFVGIDVSKATLDIVMRPGGSRESIPNQEAQIGELVRRLSTLRVTLLVVEATGGVERRIVRALAAAELPVIVVNPRQVRDFAKATGRLAKTDKIDAEILAHFGEAVRPALRAVPEPASEELRALIARRRQVTEMLTAETNRLGHSAKAVRKRIEAHIRWLEAELDRVDGELDHSIQQSPIWREQENLLKSVPGIGPVISRTLLAELPELGKLNRKQIAALVGVAPLNWDSGMMRGRRAISGGRATVRAALYMAALVASRCNPKIREFHRRLRAGGKAPKVALVACMRKLLTILNAMIKHRTRWSVIVEAQ

SEQ ID NO: 374522 - protein, 344 aa, unidentified
MGVAVGIDSHKSSLAAGAVDELGRSIAASEFRNDPAGHEALMAWISRLGDDRMVGVEGSRHYGSAATRCLIENGEMVFEVPAFMTHRERSKRPSRGKSDPGDAHAIAMVVAREERLTPSALSGVNDDLKLLVDRRDQLVRHKTKTANRIHKHLVVVVPGYEKLIPRITRRCHVVRVRRLLRGDRGVRAEIVRDLLDEFVALERKVADITRDISRAVIATGTTLTQLKGVGFLTAAKILGEVGDIGRIRSKAAFAMLNGTAPIEVSSGYSKRHRLNRGGNRQLNHALHVIALTRCRTDDETKAYRARLIARGASKRDAMRSLKRQLSNRVYRHLMMDLAVVQRAA

SEQ ID NO: 374523 - protein, 342 aa, unidentified
MTIMIGIDPHKASHTAVAIDGNEHVLDEIRVRSSSTQTDQLRHWANNFEDRTWAVEGAQGLGHLLAQQLVAVGEVVLDVPPVRASRVRTLSSGRSQKNDPNDARSVAIAALRADDLAEVCPDDHSRILRLLAKRHRDLGRSKNRECCRLHSLLLEMVPGGAGFKMSSATRAEALIETFEPTDAMGRQRLEIARDLVDEIGRHDELLKASQRRIRIAVTASNTSLTTIGGLGPITAAVIIGNTGNVDRFPTKHRFASYNATAPVEASSGPKVRHRLNPRGNRQLNWAIHVIAISQLRHDTLGRVFYDRKVAEGKTSKEAIRALKRRISDVVYRHLVADARQLR

SEQ ID NO: 374524 - protein, 406 aa, unidentified
MVGVIIGVDPHKGSHTAVALDEVENKLGQLRVRATPGQVDQLLRWSGTWPQRTWAIEGARGLGQLLAQQLLGAGERVLDVQPKLAARVRLLNTGQVNKNDPNDARSVAVAALRASDLREVVVEGDTAVMKLWARRYRDLGSARTQLVCRLHAVLCELVPGGFAREISAAQAIQVLDDITTHGPVAGARLELARDLVDDLQHIDERRREIKRRLTRTVTASKTTVTEIHGVGPIVAATVLGYVRDIHRFPTRDHFAAYNGTAPIDVSSGNRKIQRLSRRGNRQLNHAIHMAAVTQIRNRGTAGRNYYERKLAEGMTGKSALRALKRKISDAIWARMITDARRVANEAEKDPGGQSGNDSASSAAGSHPETPALRTSHSRVATNPTSDSARPQPAKSNRTSTPRRRTP

SEQ ID NO: 374525 - protein, 348 aa, unidentified
MKEISTIGLDLAKSLFQVHGVASAGHVVVRRQLRRGEVLSFFGKLAPCLVGMEACGGAHYWAREIAALGHEVRLIPPAYVKPYVKRGKTDAADAEAICEAVTRPTMRFAPVKSAGQQASAMVLKTRDLLVRQRSQTINALRAHLGELGVVTGTGVAKVASLIVIVRDHEDARLPAAARFALTALADQIDRLTNEVEALERQLVAEVRRDNDMRRLTTIPGVGPITAAAIKALVPDIAGFTSGRHFAAWMGLTPKPHSSGGKERLGSISKMGNATLRTLLVVGATSVLRHVRNGANGPEWLVGLLARRPAKVVAVALANKMARIIFALLTKGGEYRKPEWASGMEPVAA

SEQ ID NO: 374526 - protein, 372 aa, unidentified
MPDVICTAPADVRLWVALDVHKFSIVAAVLPPSGGRPEVSRIETTEKAIRRFIKTLGGPEGLAVSYEAGPGGFALWRLLTSIGVACDVIAPSLVPVRAGDRVKTDRRDTKQLVSLFRAGPLRFVQPPTPETEGLRDLLRCRDDIRCARTAARHRVAKQLLRHGRIYRDGKQAWTLRHRAWVLRQRLDDPLAHEALSQMLTHLDSLDRQLAALDAQLEQIAEREPWGWQVHKLRAFRGIRTLTALGLIAEIGDFARFGHPRELASWLGITPSEYSSGDQQHRGHITKTGNRHARRLLTEAAWHYRHAPRRPTKGPEPSARAWQAQIRLHARQRHLTQQGKRSTVVTVAVARELTAFLWAEMTDQPAREEPQAA

SEQ ID NO: 374527 - protein, 350 aa, unidentified
MELQTIGIDLGKTVFHLVGLSPRGEVVVRKKFSRKQLLHFTANSRVELIGMEACGGSHFLGRALRDQGHEVRLIPAQYVKPYVKTNKSDYIDAEAIAEAVGRPRMRFVPIKTDDQLDLQSLHRVRERWVMRRTAVVNQIRGLLLERGITLRKGRCHLDAALPGILEDATAKLSGAVRLLLAQLKLELDQLAIRLDEADTLIQKTAQENEVCRRLDAIPGIGPLTATALIAAIGNGAAFRKGREFAAWVGLVPREHSTGGKQTLLSINKRGNAYLRRLFVQGARAVLQFRDKQSPGLSAWLAQLTSRTHYNVAGVALANKLARMAWAVLTKGDIYRPPVLAGSGSACLDRR

SEQ ID NO: 374528 - protein, 323 aa, unidentified
MSQPNPLCVGIDVSKTTLDIATANNEFAQFTAGNDTDGFELIIAELRKHSVALVLMEATGGLEAAVACSLQAEGFDIAVINPRQARNFSRAMGYLAKTDRIDAKVLSQMAEVINRHPERERFIKAIPDAERQILAAMVVRRRQLITMLVAERNRLHPAHPQNRKSINTIIKALEDELSRIDEAMNNHIKTHFKELAARLSSIKGVGAMTVATLLSEVPELGSLSRREISALIGVTPVNRDTGTMRGRRTIFGGRAGVRTALYMAALVATRFNPVIKDFYTRLITAGKVRKVALVACMRKLLTILNAMIRKNEEWSDSYHKFSL

SEQ ID NO: 374529 - protein, 382 aa, unidentified
MQASTLDTPTAGHCGTIFVAIELSQKTWLVTLHSPDRDRISRHKLEGGDHAGLLELIGKVRTRVSEKLGSMPRVVSCYEAGYDGFWLHRLLAAAGILNFVFDPASIAVEQRSRRTKTDRIDGELLLRTLMAYLRGEPRVVRIVRVPSVEQEDARRTSRERDRLVKEQTAHTNRIKALLRLVGMTTGNPRRRDWLTWLARQRDWQGQPLPVALLAEVTREHARLMLVRDQLAALEEAQATQACAVPAAMAERRDLLQRVKALGPAFAGTLTNEVFYKDFRNRREVASYCGLTPSPWQSGGIDREQGISKAGNPRARLKAIELAWLWLRHQPDSELSRWFRTRTANAGKRARRIAIVALARKLIVALWRYLTTGLVPEGATMKA

SEQ ID NO: 374530 - protein, 411 aa, unidentified
MHNRQNYLYVGVDLHKEHHTAVIINCWQEKLGEIQFDNKPSAFSKFLLEVETYVSAGITVVFGLEDVGGYGRALAKYLVDHEQVVKEVNPALSFLERKSHVTTQKSDSWDAECVARILINKLNQLPDAKPNDLFWSIQQLVSRRNALVKAQSALKNQLHIQLNHHYPSYKKFFSELDGKTALAFWQQYPSPFCLEGANIKQLTAFLLDVSNNTCSVKKASDILKLVKEDGQTMKEYQETRDFLVRSIVRDIEFKKKEMKYIERELKRLVNLLDYQLETMPGIELVTASALIAEIGDVRRFPNANKLARFAGIAPVYFGSGGKGKTHKSKQGNRALHALFYNLAVQQVQVAKGSKMPRNPVFHAYYQKKLKEGKTKGQALVCIMRRLVNIIYGMMKYKIAYELPIVEEKEVV

SEQ ID NO: 374531 - protein, 355 aa, unidentified
MVGSISEAKSSVSGVTDPYCRTEHCGKIHPYRCDKEVGVLGIDVSKDNLITSRGGKYENNLKGYEKILDMKPCTIVLEPTGVYSIKPSQYFKERGVRVLQVSPNVLSREKDFREKKTDFYDAEKLENMVDKAKEYEYNVLRELVTLYLFLKDMEVKQKNRLKRALFLVSDNDKINKERLERLASGDFAQEVLYQLEYTPIVLEEVKILAKALFETQEKLKEVKEMIESQVPEDHVLLTIPGVGKLAAGIIIGVVGDIRRFPKPESFVAYCGLDPVVERSGKAVVSKGISRRGNKYLHSLFYFLAQMNCSKNPTLLRFYEYHKDKLHGRKLYTALARKLAKVVWSVWYNNKPYEPK

SEQ ID NO: 374532 - protein, 357 aa, unidentified
MGKSIQKLSSVTRVGLDLAKRVFQVHAVDANGEIVVARKLDRGRLVSFFSELPRCVVAMEACPSAHHWGRQLLALGFEVRLIPPAHVKPYVRRNKNDAVDAAAICEAAGRPGQRFVPVRSVENQAELMRHRVRELLAGQRTAALNALRGHLTEIGVVAPQGARHAYDLKRLAVDGFDEYGEVVVPDCVRVALRPLVSQIDALDEAIGAIDKEIAMAVKADETAKRLMTIPGVGPVTASAIIATIQDMGDFASGREFAAFLGLTPRQSSTGGKPRLGRITKMGDRYLRKLLVVGACATLRHRKGHNDALRLWASGMLERKTVKYKFKLTAVALANKVARIVFVLMRRGGQYDGRPVAA

SEQ ID NO: 374533 - protein, 371 aa, unidentified
MQTLKEYTLEATPVASAEELKNRKGPKAKRIAIGTDTHLRGYQAARKVDNAAIGAVANLRSETELLLYVEKQCEQAEEVVVAYEAGPLGYGLYRKLAERGVKCLVCVPDSTQQQKKRRKNNQIDARTLTSHLFNYLNGNEGALQLVRVPTPEQEQARLASRQHDQLVEERKRLGAEGNSLLLSQGFGSCKHWWRPKALSRLEQLLPGWLFEMLRTWVDLLRALDEKIQRAKAALSKGYSGPRPKGAGANSLVQLRSEVLDWNLYKSRRKIACLGGMVPSEWSTGESQRRGSITKVGVPAIRRIMTEMAWRIIQFQPQYPPVQKWQEVLGGTNRTLKKKAVVAIGRQLIVDLWRLETGRATAKELNLVMIGG

SEQ ID NO: 374534 - protein, 413 aa, unidentified
MDKIYDICCGIDVHKKLIVACLNHKRKKELREFGATTRELMELAEWLQKNECEIVAMESTGSYWKPLYNIMESYGLHAIVVNPAHMKAVPGRKTDVKDAEWIAELLQHGLLQPSYIPSKDQRELRELVQYRKSLVGERTRELNRLQKMLEGANIKLSGTVTNINGKSARKILEYILSGNEIDEKKYDEMYEEKLIAHNLKASKEQILDDLKGFMSPLQRRMLKELLQHLDELNVHIENLNDEIDNFMKPEEKQASQVIQDVTGIGNTSAQTIIAVIGTDMERFPSDRHISSWAGLCPGDNVSAKKRKSGKIRKGNALLKSTLVLCAHAAVRHKSSYFHAQFKRISTHRGKKRAYVAVAHSILIAIYHIMKDGVKYQDLGAEYYNQFNAERKIHAYLKKLKALGWEPPKEAVPA

SEQ ID NO: 374535 - protein, 293 aa, unidentified
MYFGDGSRTLFLKINLKSAYCLYKHLIEVIKNMELYGGIDIHKEKLAGCIMDKDGNIAREHIFPSSKKAVEKFLCNISSSEITIAIEACGMWRGVHKVITELGYEVKLANPKKIHDIAGSKKMDPIDAKTLADLLRTKYLPEVWIPDEQTLQFRDLTRHKATLTRLKTQVQGKIRGYLLRKGAKYNKLSKEETLTTLAEEDPDIKNLVHVYNCLKQEEREVMRRIKRIAQNMKQTTMLMSMPGIAEFSSLMILAEIGDIRRFSSPKELVSYSGLCRGIYQTGSTERSVPKTLP

SEQ ID NO: 374536 - protein, 365 aa, unidentified
MTQQLHTVAIDLAKKVFHLVGADATGKILWRKRLTRHALMPFIAQLPPVRIGIEACGGAHDWARRFREHGHEVKLMAPQFVKPFVKSNKNDMRDAEAIAEAVTRPTMRFVPTKDIGQQDLQALHRVHERLIGERTALINEVHGLMNEYGIVIPTGVSKFRHAVVEKLASAKDTLTALGQEMFGKLVEEFVALEEQIAYDQQKLESLAQAHPECQRLMTIPGIGPMTATALIAAVGHVGVFKNGRQFAAWLGLVPRQHSTGGQTRLLGISKRGDRYLRKLLIHGARATLRWVELRTDSRSQWIRGLLKRRGWNRTAVAVANRTARIVWALLSRGGTYGETVSRPQRVTAQGGDERQARVVVRSVHG

SEQ ID NO: 374537 - protein, 317 aa, unidentified
MAKDCGVGIDIANATLDVALSTASGQPWQTTNDEAGWAAVVAYVAPLPPRVIVLEATGGYETGIATALTAAGLPVAIVNPRQVRDFARALGSLEKPDRLDAAVLAAFAARIQPTPRPLADDLQADLHALVTRRRQLVEMCTAERNRLPLARGAVRKNLLAHIAWLENQVSQTDRDLRRRIEASPIWRVRDQRLQSVPGVGPTTSACLLAYLPELGTLTHRQISKLVGVAPLPDDSGPRSGYRRVQGGRSDVRSALYMATVTAITHNPTIRAAYRRWRAAGKLPKVAIVAAMHKLLIHLNALLKHQTDWHARPVAPTA

SEQ ID NO: 374538 - protein, 334 aa, unidentified
MKQVNQIGVDVDSEELVCMMQREWKRLPLARFANTAGGHKKFIRWATKDARPARVCLEATGIYSLELALALHEAKNVAVMVVNPRAIKDFGRACMQRAKTDAVDAGGILDYLERMPFVAWQPPAPEILELQAINRRIDQLHTELTREKNRRHAAGFAGASADAIAHDIEVNIRHLERRIERMHESGLQLVRGVPALTAKLAHLVSAKGIGEASAMRILAELLVLPDDLAAPQWVAHAGLDPRPYESGTSVHRPRRISKVGNRHLRAALYMPALVAIQHQPNVKAFYDKLIAAGKKPMQAVVAVMRKLLHAIWGMLKHDQDFDGNKFFNIAAKTA

SEQ ID NO: 374539 - protein, 459 aa, unidentified
MGMTLGIDLACRAAHVASLAGPDGALVWLGRSFFTRPADLEKLWRDVDCVPAELTVVMEPTRNAWIPVAAWFRRRGAKVVLVPTTQSADLRAYYSKHTKNDRLDSAILARLPLLHPEGLREHVGDGPADPLRLVVKQRSSIAKRRSAIFHRLDAQLELLGPAWYDALGTDYGKATLQFLAHYADPATVIRLGQARLARFLQRYSHGHWREGKAAELIAAAKESLQLWDTDGMDFAELAADIAVEAEQAMMLTAQLADLDERIANLYAEADPAGIIRSAPGVGPVIAGIIAGRLGDPHRFTSLAAVRSYSGLVPKVNQSGKAEHVGGLTKAGDPLLREAMWMAAEQARKLDPQLAAKYKRLMDAERHHGTAVCHIATTLLTRIATSWRNNEPYQIRDLNGTPLTQDEGKRIVQEQYQVKKNPKKQYKRATNHKAGREPQESPSAPTSRPVTTKPTSPRAA

SEQ ID NO: 374540 - protein, 370 aa, unidentified
MKQYTEAFVGIDTAKNKHALAIADPGRDGEIRYLGEIDSAPAAVQRMIRKLAGRYEKLYFCYEAGPTGYGLYRQVRALGHDCIVVAPSLVPKRPGERVKTNRRDAVTLARLLRAGDLTPVWVPDVVHEAVRDLVRARAAASEDLRRKRQQLLSFLLRHGRIYSGRKHWTKMHLHWLAQQKFDHPAQQIVFQDAVDAIEDAVTRLRRLDQQVAEIVPSWSMAPVVEAYQAMRGVSFGVAVTFVAEIGDLRRFDNPRQLMAFLGLVPSERSTGDRVRRASLTLAGNKRARRVLIEGAWSYRYPARVSQTLQARLEELPKTVRAIAWKAQIRLCARYRRLTAAGKKRPLVIAAIAREMAAFLWAIAQHVAPTA

SEQ ID NO: 374541 - protein, 339 aa, unidentified
MGILYVGIDLAKNVFAVHGVDEHGKAVPVRPSVARAKLHELIATLPACTIGMEACSGAHHWARLFLQHGHTVRLMAPKFVAPYRLSGKQGKNDAADAMAICEAVQRPNMRFVPVKSQDEQARLCVHRVRQGLVEQRTATINRIRGLLSEFGIVLPQRAATVRREATVHLEDLPGWANTAIGDSLSDVHRLDERIAEYDHHVRQMARDDQRSRALMQLSGIGNTTASALVSTIGNAHDFKNGRQLAAWLGLVPGQYSSGGKTRLGSITKAGDRYLRTLLVLGARAVLAAARTKVDRLSRWALALEERRGYWKAVVAIAAKNARMAWAVLAKGENFKLLEA

SEQ ID NO: 374542 - protein, 390 aa, unidentified
MQALHPRPDEHAAVRTDLKAIFVSLELSRSTWVITSLSPGGGEKMSKHAVPSGDIPALLARLSQLQEKARARTGQVFPIIVIQEAGLDGFWIHRVLQQEGIESHVVDPASIATSRRRRRAKTDKIDGEALVRALLAYKRGEPRVCAMVQAPTPHEEDRRRISREREVLTAERVQHVNRIKGLLLAQGIGDYAPLHRNRRERLEELITGDGCPLPECLKAQISRELDRLELLIEQVKAVEAERDAVLAQAQASPGVPAPAAQLLTLRGIGPEAAATLWTEGLFRTFSNRKQVAAYAGLAPTPWQSGSVHRDQGVSKAGNPRLRTIMIQIAWLWLRHQPQSALALWYRARIKRTGGRLGKTMIVALARRLLVALWKYATAGVLIEGAVLKPA

SEQ ID NO: 374543 - protein, 423 aa, unidentified
MENTAARKRKQVPEGYLLIGVDPHKKRHAAVAITQDFTTRDKFKFDNTREGLEIMLRRVRTEMTKSDCRGVMFAIETGGHYWRNLAYALDEQGIPFRFINQFTLKRRREGKDLNRRKNDYRDSEVAAQLLCTGGFTETKVPQGVYAELRTAHNAYRRLVKERTRIINLVKGLLDALFPEFTHVFKDPCGLTSMSVLSICPIPRVIAGMTEVEFVATIEAQHQGHLMRRKLRALHYMARTSIGIEAGARSVSSEISFLVEKFELIRRHIRIIERTLVRLVDETEEGKYLLSIRGLNYISVAGLVAELGCFKAYRSAKQMIKMAGSNPTESESAGKRGTHTPMSKQGRPVLRYCAWTSVIPMLRLNPDFRAWAKQRRERPAHANPLNGREVVGAALNRLLRLAFAMVKSQTYYQVSKPELAPVAV

SEQ ID NO: 374544 - protein, 430 aa, unidentified
MGCCAAGALAISEPLFSSGLTTDNTGEHMIYIGVDWASDHHDVCVMAEDGSVLTECRISDTLDGVNRLRSLASHHDDQSGAVAVGIETAHGLMPRALVVAGYEVYAVNPLAASRYRERHTVSGAKSDAADARMLANLVRTDRLNHRRYVPDSDLVEELRVLTRSHKDLIWAKQRHLNQLRTALRQYYPGIHVAFPELSSEALMVLRRAPTPAQGRTLTAAQILAALRQGGRQRRLRERADAVREALRLPQMETSPALTSAYGRTVSGEVAVLIALGDEIASLEAHVCQRFEQHSDAPILSSMPGLASVLGARLLAEFGDSPSRYVDAKARKGYAGTAPITRASGTKTLVLVRRARNNRLVDACSRWAFSSLTSSPGARRCYDAKRRRGQSHNEALRALANRWVGILHGCLQHHQTYSEQVAWPVPSEVAA

SEQ ID NO: 374545 - protein, 356 aa, unidentified
MHNKNNTIDFTGQYIYVGIDVHNKQWNVTVCTDEIICKSISIPSDVDNLIRYLNKQYPRARYKCGYEAGYNGFWLSKALKEQGIECIVINASDIPRKTKDRMRKTDRIDSKNIAVAIRDSTVKGIYIPSREAQENRDVIRLRESLVKKQTRVKNQIKSRLAYYGIKLPDGISDKHWSKNYINWILSNKMVTESGDLTIRIFVEELLTLRAKILEVTKHIRYLSEQIPYKTNAMRLKTIPGISVLSAMIILLELADINRFKDITKLKSYVGLVPGEHSTGERQIMLPMTHHGNSLLRKVLIESSWVAIRYDVGLLYSFKQYCKRMPKNKSIVRIATKLLNRILYLLKSEQDYKLGYP

SEQ ID NO: 374546 - protein, 348 aa, unidentified
MEVLIGVDPHKGSLAVAALDEATGELLERAGFVQNRADLRSLERWAKRFPERRWAVENAGGLGRHLAGRLAGSGESVVDVPPKLSARVRLLSSFAGNARKNDELDALATALAASRNERLARVDPESASEAMRLLSERREDLVAERTRALNRLHALLRDLLPGGVAGKLSADRAGRFLRGIRPKGTSARLRRRLASEVLRDVRALDRKIADLNRRIEAEVEASGNTLTQIFGVGPILAARIIGTVGDVRRFPTKAHFASYSGTAPLEASSGEVVRHRLSLAGNRKLNYALHMVAVCQARSDARGGAYYRKKIGEGKSSKEALRCLKRRVCDAVFRSLMADSQAPSHSAA

SEQ ID NO: 374547 - protein, 403 aa, unidentified
MPMFVGVDWASVEHAVCVVDARGRVRAQFAIAHSAVGLTRLITALRRFGEPATVPIAIERPTGLLVDTLVDAGFALYPVHPNAVKACRARYRAAGAKSDPHDAFVLADMLRTDGHRLRRLRPQRDGTRALRALVRGRDDLVATRVALANQLRALLESFWPGAAAIFADVDSPIALAFLTRYPTPHSAGRLGTKRLAAFLAQPAYCGRRTPEELLTRLHHAPVGHAGASEAAAKGETVRALVAVLTPLVAELQRLSAAVEHAVSTHPDGPLVMAFPRAGRINAAQILAELGDDRTRFLSDAQLAAEAGVAPVTYTSGKHHGVGFRWACNKRLRQAVVCFADHSRHGSPWAAAVYARARARGCDHPHAVRILARAWLRVLWRCWHDRSPYDVTQHRAAKQLLDVA

SEQ ID NO: 374548 - protein, 375 aa, unidentified
MTRPILYVGLDVHADSISIATADARRDGEVRHYGTIPATLRALDSVLNKLGHPGTELRVCYEAGPTGFVIARHLTKKGIACLVAAPSLIPSPKGNKIKTDCRDSIKLTRLHRAGELTAVHVPDATDESIRDICRARTDAVDDKRRAMCQLKAFLLRHGHGIADKTPWSEARMRTLRSIALQLPAMNIVLEEYIQAIDTAHQRIARLEHQMENVLETWEQAPVVRALMGLRGIRLVSAMILVSELGDIHRFAHPRLLMAYLGLVPSEASSGGKRRVGGLTKTGNAHVRWLINESAQHYRLPPRVSPNLSKRQEGIAREHRAEVQKISWKCQQRLYDKGRQMAGRLKIRQKVQIALARELCGFVWAIMKAVQPVTAR

SEQ ID NO: 374549 - protein, 354 aa, unidentified
MAVMPPDDQDVIGGVDTHKDVHAAAALSPTGRLLGTALFPTTHAGHIQLLSWLQSHGRVICVGVEGTGSYGAGLMRHLRSAGISVVEVNRPNRQLRRQRGKSDTVDAEAAARAALSGTATGTPKSQDGKVEAIRLLRLARRSAMKARTQTANQIQAIVEAAPPALRESLRGLSFAKLIPIARRLRWRAPMTPLSAARLTLKGLADRWAVLDAEIRQLDSQLESLVQDAAPRLVALPGVGSETGGALLVAIGDNPDRLRNEAAFAALCGASPVDASSGRHQRHRLNRGGNRDANRALWVIVMCRMAKDATTRAYVERRTGEGLSKREIVRCLKRYVARQIYRTLLPALPVATATA

SEQ ID NO: 374550 - protein, 344 aa, unidentified
MNELMRIGVDLAKNVFQVHGVDRQERPAWCKRFPRDRWLQAVVVAAPAGCEIGMESCSRAHHWARRLQALGFRVKLIAPQFVKPYVKGNKNDANDAEAICEAMGRPCMRFVSVKSVEQQDIQAAHRIRAGLVEQRTAKANQIRGLVAEYGLVAPKELLSLRRAIPRWLEDADNELSDRFRHLLEGLWRDVRALDERVAELDTDIAAIAQNDPDARRLQQLRGVGPMIATALVAAVGDARHFANGRQLSASLGLTPRQHSSGGKERLLGISKRGDAYLRSLLVHGARAMLRTARGKEDRLSRWACRLAERSHPNVACVALANKTARMAWAMLRNGTDYQPDLAAA

SEQ ID NO: 374551 - protein, 316 aa, unidentified
MSAPLLFVGIDVAKAECVVAVRPTGATWTVPQTEAGWTALAARLQALAPTLVLCEATGGLELPLASVLAAGGLPLAIVNPRQVRDFAKAKGLLAKTDALDAAVLAHFAEAIRPLPRAVPDVTTQALAALVTRRRQLVEMATAEENRLGSAPPALRARLQAHLRWLRRELAALDADLATTIRTHPGWRVQDQLLQSTPGVGPILARTLLGGLPELGTLSRGAIAALVGVAPWARDSGRHRGPRRCWGGRADVRAVLYMATLAAVRCNPVLRAFYQRLLAAGKLKKVALVACMRKLLTILNAMVKTQTPWAPRVAGAN

SEQ ID NO: 374552 - protein, 337 aa, unidentified
MNEVTTIGLDIGKRVLQVHGADAVGNAIIQRKLRREEVLPFFAKLPPCLVGMEACGTSHHWAREIGKLGHDARLIPPNYVKPYVARQKNDAADAAAICEAVTRPAVRTTPVKSVDQQAARVLQRAHELLARQRVKLINAMRGHMAEFGVIVPSGTQNLNRLMERISDPDAALPASVRVVLNILADQMVGLTKQLDAMEAQMRKRCREDADAARLITIPGVGIITACTVLASVPNIHAFRSGRGFAAWLGLVPRQTSSGGKARLGRITKMGDPAIRRLLVVGATSAIRWAKQKDGYDESWLGKMLARKPVKVAAVALANKNARIIWALLTRQEAYRPA

SEQ ID NO: 374553 - protein, 340 aa, unidentified
MKLYSAIDLHSSSNHLAVMNEDMKRVLVKKLANNTQLILDTLAPHREEITGVVVESTYNWYWLVDALMEAGYQVHLANPSAIQRYKGLKYTDDAHDACWLARLLYLGILPEGYIYPKQDRPVRDLLRKRGHLVRLRTSLLLSLQNIITRSSNVKVASKDLKKLTEDCVSAHMRGHDALELCGTVSKETIDVLTRQIQRIEASVLKTLKPTVSYRDLITIPGVGPVLALTIALETGPISRFCTVGSYASYCRKVASIWLSNDKRKGTGNRKNGNRYLAWAFSEAAEHARQSHRPSKRFYDRKRSQSNLWVAHNALAHKLSRAAYYIMRDNVPFAEHKLYCS

SEQ ID NO: 374554 - protein, 344 aa, unidentified
MEHYAGLDVSLKLTSVCIVDAQGRVVRETKVPSDPEDLVRHFRSLDHPITRVALEAGPLSQWIHAGLTDAGLDTVLLETRHVKAALSAMTVKTDRRDARGIAQLLRLGWYRPVHAKSGNAQEIRALLTARKLLQGKLLDVESGVRGVLRGFGLKVGPISRGRFEARIRELVDGHTMLETVIGSMLSARTALQQEFASLHRTMLTLVRADPVCRQLMTVPGVGAIVAITFKSGVDDPTRFRRSRDVGPHFGLTPRKYQSGELDVTGSISKVGDRMVRTALYEAASVMLTRTVRISPLKSWAMGVAKRRGTKKARVALARKLGVILHRMWVDGTTFRWSNDAAVVA

SEQ ID NO: 374555 - protein, 403 aa, unidentified
MRRSSERYCRFCGIDVAKDKHVACILDAEGRLVAAKQSFTNDAVGYDRIIQRLRQAGQRSQILIAMEATGHYWYSLHDFLQRHGYHVVVVNPIQTAQQAKKGIRKRKTDKIDARHIATLIKNGEHRPTIIPGEPAMTCRQLTRLGYSMVRQRARIKQLIHSRLHPVWPEFESFFADPLSITARALLRAAPTPEDLIAMTLDELAQLLRKASRGRLGAERAQRIRTATETSIGMRRGLDGTRIAIGTLLDQLDALRPVEQKLQEQIERLAAQLPTYLLTLPGANAIRAVSLFGETDPIESFPSPDQLVAFTGLDIDVFQTGQYTAPQRHVTKRGSPFLRRTLWAMAAIAVRTEGELRTYYLRRRRHGLHYLAAVTAAAIKLTRITWRILTDRRDYIPDGRSIQS

SEQ ID NO: 374556 - protein, 465 aa, unidentified
MAGKHEIESSEGRRRQLQGLPVIRRNVAGIDLGSEQHWLCAPTADGSGREIASFGATTAELIRIAEWLKARQVESVAMESTGVYWIAPHEVLEAQGLQVLLVDTRQLARVPGRDKKTDPTDCEWIQRLHSCGLLQGSFRPEEAVCMLRTLVRDKANLVAERGDWLRRMQKSLDQMNVRVHRAVSDLDGVTGMAILRAIAGGERDAQKLAKLRDPRCSKTEQEIAEQLRGHWREDHLFSLQQALQMYDAVEERIAAYEKEILRKLGDMEREEQRGQKAPPLPNANKAKAIKKRGQEPMRQALYRMSGVDATHIDAIGVETLEVILSEYGPDLSRFPTEKQFVSHVTLAPHVPTSGGKPLRKRKRNSASTRVAAALRMAALSLRHSQTALGAYYRKMAQRLGGDIAVFATARKLATLIYRLLRWGQPYVDEGANAYETRYRQQRIGRLAATAKQLGYQLAPINASIA

SEQ ID NO: 374557 - protein, 319 aa, unidentified
MEGSFASFVGIDVSKASLDVHRLPEDRRQRVSNDKPGIQELLGTLPAAGSCLIVVEATGVYHRRLVTDLVDAGHQVAVVNPRQARDFAHGLGIVAKTDPIDARCLAHFAKHVQPRAVAQNSQKQAELQELVTRRRQLVDLRRVELNHKESASSKIVRKNVQRMVDLLRKQIEQLDKEILRLIEEDDDWNQKAKLLDTAPGIGQVNIVTLLGQVPELGQLNRQKITALVGVAPFNRDSGRFHGKRSIWGGRASVRSVLYMAAITARTHNPVIREFAKRLEAAGKPFKVVITACMRKLLVILNAMLRNKTEWSPKKCLANA

SEQ ID NO: 374558 - protein, 371 aa, unidentified
MEHTRFVGLDIHKERISIAVAESGRSGAVEYLGEVANDPGAISKLCDRLGRPGRPLAFCYEAGPCCYGVYRQLTSLGHRCDVVAPSLIPMKPGDRVKTDRRDATMLARLHRAGELTPVWVPDADHEAMRDLIRLRSVVRQIVTRTRQHLQGFLLRHGRKHGQGTAWRMAYRRWLSTLAFQHPAQQIAFQDYVDAVMDAERRLQRVEEQISCLLPEWNLCPVVDAVQAMRGIALINAVVLVAEVGDFTRFSNPRQLMAYFGLVPGEHSSGETIRHTGITKTGNSHARRALVEGAWAYRMKPRIGRHKVDRIEALPKIIRDIGWKAQVRLCARYRRLSARGKNANVVNIAIAREMVGFIWSIACTIQSAPRTA

SEQ ID NO: 374559 - protein, 355 aa, unidentified
MDSVKYIGMDVHKESIAIAVRNGAGKIVMECVIETKASMILQFIDGLRGDLQVTFEEGTSAAWLYDLLKPHVTKLVVCDPRKNASMREGHQSDKIDARRLAELLRLKHLHPVYHGEHGLRSLKELVRSYLTITKDLGRVMSRVKAIYRSWAIPCTGKQVYAPRHRAAWLGKIGEPGVRRRAEFYYQQLDALRTVRQQVRRELLAESQKHKAWKLLCQIPSIGPIRAAVLLGILQTPHRFRAKRHLWTYGGVGIETSSSADHHVVEGQLERKKKQVGIRGLNRNYNHDLKNLFKGAAIVAATKPGPFAEFYAELLAKGMRPEMARLTLARKIATIVLIVWKRAVSFDAQHLKPQTA

SEQ ID NO: 374560 - protein, 413 aa, unidentified
MEIIYQCCCGLDVHKRSIAACLRRLLETGGIHQETRTFGTMTRDILELADWLAAEGVTHVAMESTGVYWKPIYNLLEGRFTLLLVNAKHVKHVPGRKTDVKDCQWLAQLLQAGLLRGSFIPDRPQRELRDLTRHRSQLVGERSRAANRIQKILEDANIKLASVATDILGASGRDMLRALIRGETDSEKMADLARRQLRSKIPELRPALEGKVTEHHRFMLGELLNHLEYLESRIEGFSRRIEEVSRPFAPAIAKVATLPGFDQRSAQNVVAEIGADMDTFPSAQHLASWAGVCPGNNESAGKRKSGKTTKGNRWLGSALSQSAWAAARKKDSYFQAQYRRLAGRRGKKRAIVAVAHSLLTVIYHMLKDASEYRELGSHYFDKLNAHRLLPHLLKRIKDMGYQVTLQELSQEAA

SEQ ID NO: 374561 - protein, 458 aa, unidentified
MRKKVKRTKGMEEARPFDGLSKVNLNAAGVDIGATEIVACVSRQDGTQLVRTFGNYTADLRAIGEWFREHGVKTVAMESTGVYWIPLFEELERQGFECLLISSRSLRRVAGQKTDVEDAQWIQTLHSYGLLKGSFRPQGDLVALRTLLRHRTQLLEHRAPHIQHMQKALLQMNIQLTQAVTDVMGMTGQKIIRSIVAGERDARVLSGFRDPGCKHSEEEIGKALTGTWREEHLYVLKQSLELYDFYTEKIEACDAEISRQYGMTRPDWASGELPVVPDKKRHAHSKNAPKDAREIREHLYRINGVDLSLVDGFGVSLAQTVTMEVGSNVGEKFPTEKHFCAWLGLAPKHDITGGKILSNRTLKTKNRAGQAFRMAAQSVKKADCPFGLMYRRLRARLGPAQATVATAHAIARVVYKMLKYKVEYDPLSVNEYQKKYEEQQVKYMKKRAAKLGYQLIPS

SEQ ID NO: 374562 - protein, 400 aa, unidentified
MLPHKSLDIRVSIDVGCYQHSVAVGLSTGELIDEFEIDHNQQGFDRFFDKIHDIESRYLAPVSVAMEGYNGWARPLDQHILSHGYTLFNINNLKLARFKEVFPSAAKTDAIDARKGLELFTLSDHLPLAKNCLQRIEKPDQINIKLKRYSRRRRRLVDEKVRIKGAMHSDLQSISPELLSLTKNIDQSWFLNLLTSVTELSQLAKKQQRSLAKIKGVGTRYLARIKEWQQVASFSEDISWVSPMLIEDAYKMLELRALIKSLDDTMEALCEASEIGRLLKTIPGFGKTSCAELAGEVDDIRRFESEASLAMYLGMAPLDNASGVYRGSKTPKQINRRAKKAMMTAVDRHRANVTESQVFYDKKRKQGKKHNQSVRALGRYLTKVIFKMLIENRAYEIRLL

SEQ ID NO: 374563 - protein, 323 aa, unidentified
MTVYLGIDIASKKFDVAELCDGNYRCKAFENTSAGFLALYKWLGQSTMPDIHACLEATGDYVTSLATFLYENKIKVSVVNPARIKGFGASELSRTKTDKADSKLIARFCKAAVPDGWKPTPAPVRKLQALVRRISALNGMLRMECNRRENADANIQASLDRIISLLKTEIEVVRQEIKDHVRSDDELKKQDALIQSVPGIGAVSSNLILSFMSGKGFRKAKEVTAYLGLNPRHHQFGSSVRGKTRMSKMGDARLRSALYMPALVALRYNPDIKAFGQRLLLAGKPRMLVVGAVMRKLIHIVFGVLKSGTAFSSRIAVHSVVTS

SEQ ID NO: 374564 - protein, 447 aa, unidentified
MPKRTTGDRPELNPVNVGAAAIDIGSKMHMAAVDPTCTDAPVRAFGTFTQDLHDLADWFKACGVTSVAMESTGVYWIPAYEILEQRGFEVILVNARYAKNVPGRKTDVSDAAWLRQLHSYGLLRGSFRPDGEITTLRAYLRQRERLQHMQKALMEMNLQLHHVVSDITGATGMRIIRAIVAGERNPDVLATYRDVRCHSSVETIRAALVGNDRDEHVFALTQSLELYDTYQAKMLDCDRKLESLITALTDKGAKTVGKLSRPRVKTKQVNTPSFDVRTALYGVLGVDLTEIHGLGPSLALKLIGECGTDLRAWPTAKHFTSWLCLAPGNKISGGKVLSSRTRRSSSRAAALLRLAATTIGRSGTALGAFYRRLSSRAGKAKAVTATARKIAVLFYNTLRHGMAYRNPGADHYEEQYRSRVLANLKRRAKSLGFVLQAVPCDAEVAVS

SEQ ID NO: 374565 - protein, 412 aa, unidentified
MSYKIAGIDVHKKVLMVVVLDASTPEEKPERRRFPTMPSDLRRLSTWLREQGVEEAVMESTAQYWRSVWLELEPYMRLQLAQAFSNRAPRGRKHDFKDAERLVRRLIANELILSFVPGGEQRIWRNLTRMKLQLTRDRVRLQNQMECLLEEMRIKLSIVVSNLLGASGLRILRALAEGETDPKKLAELGDQRLQCSEEQLVDALTGRPQPTHREMLALQLERLQLIDTQMAKLNGMIAQAMKPHQEAVIRLAEVPGLGVDSAQQVIAEVGVKAGTFPSAAEFTSWVGTCPGKDESAEENHSSRSAKGNKYLRRVLNQAAHAAVKKNGSHFQAVFRRLLPRLGYQSAIWAIAHRLCRVVWKILHEGVRFIEQGHELDPKAKKQRARMLTRALRKLGYEVAIRPINPATAENAI

SEQ ID NO: 374566 - protein, 357 aa, unidentified
MGKVTGNLARVTRIGLDLAKTVFQVHGVGAEGEVVIARKLRRRTMLEFFGRLAPCVVAMEACGSAHHWGRQLVALGHEVKLIPPAHVKPYVRRNKTDAADAAAICEAAMRPGQRFVALRSIDNQAAVMRHRVREQLVGQRTALLNALRGHLSEIGLVAAGGAQHAYRLQRMLADGADENGEIVIPERVRVALAPLAAQIDALDQAIAAIDDKLIETVKADEKVRRLMTIPGVGPVIATAVVATVGEVASFASGREFAAFLGLTPRQHSSGGKKRLGRITKMGDRYLRKLLVVGATTVLHHAIGHKDSLRRWARRMLERKGGRAGFKLAAVALANKLARIVFAILRSGEVYDDRPVAA

SEQ ID NO: 374567 - protein, 353 aa, unidentified
MVNSRDCITFELDKIMKKKLFIGIDVSKSWIDVTMFHEVDVNKTDYQQFDNSVEGFKAMIKWIKLLHKTTKSEMLFCFEHTGIYSFSLCEYLTDNDYFAWVENPLQIKRSLGIKRAKNDKIDSFEIAKYAWRFFDKAKAYTMPSKHINELQNLEALRKRLMKSKLAFSVAANELKHSETNDYIKEKSDLLVAELDKQINEIEKKMQTLIKADEQINEQYKLCLSVPGVGPQTAIFLLIYTRCFTSFENIRQFACYCGLAPFEQTSGSSIKKRSGVSHLANKKLKSLLHLGALNLLRYNKETQLFYERKRKEGKSHNSIMNVIKYKTISRVFAVIKRGENFMDPVTFEVYKRAA

SEQ ID NO: 374568 - protein, 403 aa, unidentified
MNAVGIDVSKGKSMIVILRPLGEVVSGPYEVHHTFSEVNEVIKDIKNLDGDTKVVMEHTGRYYEPIAERLTQAGVFVSAVNPKLIKDYDNNSLRKVKTDKADAIKIARYTLDKWHGLKQYNLMDELRAQLKTMNRQYGFYIKHKTAFKNNLISLLDLTFPGADNFFDSDVRKDGRQKWVDFVSTYWHVEVVRGMSLAKFTDHYRKWCQRNGYNFQDYKVNEIYAVAKNKIAVLPKNPISKSLIKEAVEQINAASVTAVKLRTQMNEIAAKLPEYPCVMSMEGVGEALGPQLIAEIGDIRRFTHRSAITAFAGVDPGVNDSGKHSQKSVRTTKRGSSSLRHTLFLVMRSLLLLAPEDDPVYNFMMKKRDEGKDYYVYMTAGANKFMRIYYGKLKDYYVRHPEVE

SEQ ID NO: 374569 - protein, 351 aa, unidentified
MPMVVLGIDAHKRTHTVVAVDEVGRQLGVRVTKTTSTAAHLELVVWADRFGAERRWAVEDCRHLSRRLERDLLAAGEEIVRVPPKLMAHARDSARTYGKSDPIDALAVARAALREPGLPTARLDGPERELRLLVDHREDLVAERTRAINRLRWHLHELDPGWDPRPRSLSRRKHLDAAAARLAGMEGMVARIAADLTARITTLTADINALEKEITTRVRQLAPSLLAMAGTAELTTAKITAETAGVGRFRSKDAYARHNGTAPLPAWSGNPARHRLSRTGNRQLNCAIHRIAVTHKRCHPPAQAYLKNRIASGDTSTEALRALKRRISDAVYRNLKTDAESSPAAPPGRAA

SEQ ID NO: 374570 - protein, 371 aa, unidentified
MDLPKLSFYELKSLRMYAKQNGFVIGVDLASRVFQICYADLKTGQLVNRSISRSEFENMITDSQFGKCVFGIEACGQCNFWGRFINENGHICRVIPPANISSFGNLRDKSDSIDAVKIFKATFSPSVPESILKDEAAQALATLFAHRAMLMKARIQLENSFRSASYEMGFISARGLEAILQSSKELLSQLDSQHKRRSFKAYKLISTDCYTIIRCIREKIDKIDLFLKKFAMNNRMCKHFMTIDGVGPIVAAALYSAMNGNPKMFKNGRKFAGFLGLVPKVTGTGGKIIVTCVRKGGATHYKQLVYIAAVALISRFRRTKATEESSLLKKLDKAKIKRKIVLSVANRISRIAWALAYYDMDFDIEKCKFLS

SEQ ID NO: 374571 - protein, 430 aa, unidentified
MAFLVILRISYEVVALISSEEHKHYLILIKIGVYTMLYLGIDIAKHKHYASIMDSNGNSLEKPFPVYNHRKGGQALLTKIYQHIEFPKEIKIGMEATGHYWLALYSFLLDHGFSVIVLNPIQTNAWRKGTEIRKRKTDAIDATMIADIIRFGRFLETPLVDEKMFSLKQLSRFRNSLVSNMGDLKRKSLVILDQTFPEYQKMFSDVFGKTSTQILLAYASPSDYEQVSIDDLTQIIEQASRNRLGPEKAHQLMESASHSFGITFGKEAFSFQLKMLMEQIHFIAAQIKQCEEQMDQLLIELDTPITTVPGIGPILGATIISEIGDIKRFDRPSKLVAYAGIDASVSQSGQYNSTSMSISKRGSSHLRRALFQAAISGYKHDPILKAFYEKKKQQGKHYYVCICALARKLCHIIYAILKNNKPYKIPIQIA

SEQ ID NO: 374572 - protein, 369 aa, unidentified
MTSIIYVGMDVHTTNYTLCSYIYGEDDVFAQVQVGPDYRNVLKYLQQVREIYSDCYIKCGYEAGSLGYSLYRQLASQGVDCIILAPTSMPETRRKGVKNDKRDAKKIAKCLANNTYSPVYIPTKEDDAVKEYIRMRDDQKDAVKKLKQRILSLCTRHGKFFGEGSNWTQKHLAWLNKLDFGNAVLRETLQEYLILYHQASEKVRAYDNRIEEFAKQEAYAEKVKKLSCFIGVKTHTALALIVETGDFARFAKAQNYSSYLGLVPGEDSSGSSIQRTGITKAGNSHIRKLLTESAHSYNRGTPGKKSKTLAARQAGNEPKVIAYADRANERLRRKFHRLMYRKTKYNVAITALAREMSCFIWGMMTDNIA

SEQ ID NO: 374573 - protein, 408 aa, unidentified
MNPLYVGIDVSSKNNVIYLMLPNGDKHSSFSLANSHDGSTQLVKRIFTAMTSNNIDSVLIGLEATSVYGDNLVYFLKEDTTLASFDRKIHVLNPKQVNKFKESYNDLPKNDYVDAFVIADCLRFGRINKEVYMDDYRYKALQNLTRARYFAVTNLTKEKQRFINVLFKKYSTMTQEKVFSDTFSTTALAVYEKFESAETLAKMDLQELTAFIMEKGKNRFPDPDAVAKALQKAARSSYRLPKTVNDSVNQVLAISITSIRALESQIKAFDKAITKQMELLPNVLISIPGIGPVLSAGIMAEIGDINRFQNQAALAKYAGLAWQQHQSGNFKAQTTRMIHSGNRFLKYYLCEAAFSLVRCDKEYSRFYHLKYKEVNRFQHKRALALTARKFVRLVFALLKDNRLYRPAE

SEQ ID NO: 374574 - protein, 334 aa, unidentified
MDIRLYVGADIAADSIQIDWLNQSNQQHQQMTLEQHKRDYARLVKLLRRQVAAEQIHVVMEATGNYWMAFAEYLHQAGLVVSVLNPSQAKYFAQARLQRTKTDRVDAYLLREYGRVMEPAAWVPPPPICQQLQQYLNRRDDLILMHNAERNRLHALKHHPHALPDLLKPLQTHIANLKQQIKTLEQLIRRLLLSQHDWAQAVRRLRTVKGLGYLTIARILTSTHAFARCATPEEAVSFAGLAPHVRQSGKWKGKSVVGGGGHAALRQALYMAALSASRFNPRLHTFYTHLRQRGKLEKVDLCAVARKLLHLAWALVIKQRDFDPNWHSQAQPAA

SEQ ID NO: 374575 - protein, 316 aa, unidentified
MTTTAVVVGVDVAKDRLDVAVRPSGEVWSEANDETGITTLVARLRPLGPALIVCEATGGFERAAIAALAAAGFPVVVANPRQVRDFARATGQLAKTDQLDAGILALFAERVRPTPRPLPDAAAQLLDAVLTRRRQLLEMLVAEKNRLGFAPKPLHRGIQAHIRWLERQLDDVTKELAGLIEASPVWRAKDDLLQSVPGVGPIVSSTLLGELPELGTLSHKQIAALVGVAPLARDSGTLRGKRLVWGGRASVRTALFMAALCGRRWNPTLKVFYERLKAAGKPTKVALIACARKLLTILNAMVRDQSRWTSNVQYSC

SEQ ID NO: 374576 - protein, 324 aa, unidentified
MKHYAGLDVSVKETSLCILDETGKVCRELKAPSHPDDLAQVLQDPAWRLERVGLEAGPLSQWLYSGLAAAGLPVICIETRHAKAFLKAQVNKTDRNDARGIAQMMRVNLYRPVHVKTLASQNRRALLTARKLLQEKAIAIENDIRGLLRNFGLKVGIIGKVRFEDRIRELVAGLPELAEIMACLLEARQSLRERFAILHRKVLVTVRDDDVCRRLMTIPGVGPVVSLAFSATIDIPARFKTSKAVGPALGLTPVLNQSGESNRIGRVSLCGDAMMRALLYEAAQVLLTRVQKWSWLKAWAMNVARRRGLQKAIVALARRLAVAC

SEQ ID NO: 374577 - protein, 410 aa, unidentified
MLKIVYPVCCEIDVHKTFIYCCIATTDNKGITTYKSNRFSTFTNQLKRCATWLKEKDCKDVCMESTGKYWITVYNILELSCNIVLTHPKYVKAIKGKKTDKRDAKWIADLFKHDLINGSFIPPADIHQLRDLTRYRNKLTNFIVGEKNRAQNCLTVSNIKLDYVFTYVFGKASSSIINALLLNPSEKITDVSKFRTRGMKSTDEEILAAIDGNICNEQAEKLKIIRSHMDSIEECKANLESVILNLAEKYLPKLNLILSVLGIKSFSAVSIILEIGVDMSVFPTSKHLCSWAGLTSQNNESAGKKKTTRISRGGAYIKPLLVQCALAAVKSNKHPKIRNRYLALKKRRGHKKAIIAIARTLLTAIYNILKKNEPYNPDLYKKSDLPPQHKTVSFDEAVFILQRQGYIITS

SEQ ID NO: 374578 - protein, 345 aa, unidentified
MNATTVAVDLAKNVFELAVADAHWKVTERARLTRSQFERWFQNREVALVVMEACGSAHYWGRWLRTRGIEVRLLPAQYVRAYVKRNKTDAADAAALLEAARASDIKPVAVKSVEQLALQALHRIRSAWMAGRTSRINMLRGFCREFGLEVPVGAVRGLAQMARFIADEHSGLPAILRAPMRLVLEEIRLMEARIESLERELATLARQSPACYALASVPGIGLLTSTAMVAAVADPRSFDSGRRYSSFFGLTPREFSSGSSRYLGRISKRGNRYIRMLLTHGARSVLRAATVARRMGREVDRLRAWALAVQDRTNHNKATCALANKLARIAWAVWVKHERYHSEAA

SEQ ID NO: 374579 - protein, 347 aa, unidentified
MRFYTGQHQYYCGVDLHARTLYLCVLDDTGTVRLHKRLPCDRARFVEALEPYCCDVVVGCECIFCWYWLADLCVAEEIAFVLGHALYMKAIHGGKAKNDKIDSHKAATLLRGGAFPMAFVYPPEMRATRDLLRRRLYFARKRGELFSHIRMTFQQHNLSLPSTGQLRYKKHREGLVEAFEDPVLGATIEADLALADRYDTVLRDLERTIEARAQVHDPDALELLRTIPGVGNILALTLLYEIHHISRFDTVQDFSSYCRLVKSEHRSAGKRTGSGGAKIGNAHLKWAFSEAAVLFLKGNPRGRAHLKRLQRKHGKAKALSILAARLGRSVYFMLKNQEAFDMDRFFT

SEQ ID NO: 374580 - protein, 381 aa, unidentified
MDKVCGLDVHKDSVFACILDENGEKIFEDRFGTLTPDLDRLRDVLVEHCAGRVAMESTSIYWMPVWRVLEFDFELTLVNPYLIKQMPGRKSDVKDAHWIAMCLQKDMLRGSYVPGADLQQLRQFARRYRYLTIQTVRVEQRLDNHLQRCNIRFSNYVSNQGSNVSIRKVIKAMIGGERDSAKLCKLVHGRIKNKHGAEIISAALTGVITGADVEMFRQCMEELELLEKQQLLCIKLLEELATKYYAKEISLLCTIPGINKMSAMCILAELGGDLKAFYTSAMLVGWAGLRPRNEESAGKIRSRKTLHGNNYLRQMLVQVSWVAARSNKSFLGKKYCQLAQRMKPQKALLAITRKLLVIIYNVLSKKQPFDPYRNMQVQKPV

SEQ ID NO: 374581 - protein, 352 aa, unidentified
MQDFIGCDVHTRNQMVAWIEEETGEIKKRRLEHEGQEVREFYAQFPRGTVVGIEATFPAYWFERLMGELGHELWVGDAARIRASEVRYQKTDSRDAELLLDLLRTGRFPRIWVPSLRERDLRQLLVHRMKQVRARTQVKNQLHALAISQGVCRKGKLWSVKGRKELESLALLPWAARRRKELLESLDRLDEQVRELDRAVEEAGREREEVALLRTHPGVGMVVGLAFVLTVGPIKRFSNSRKLVSYWGLNPRENSSGARQRLGSISKQGNTMMRWLLVEAAQTAARLDPQLRRIYQRLKKQKTSGVAKVAVARRLAVRLFWMLRTRNNYAQLVHMSGSPSSAVVPPTAEPKL

SEQ ID NO: 374582 - protein, 424 aa, unidentified
MKVTYPTCCGVDVHKSFLVATIIKTTAGIEPSYQKKRFSTFNNSILDFKSWLLENECHDVCMESTGKYWVPVFNLLEDQINVTIANPKWVKAVKGNKDDTKDSKWIGDLFRLGLVKGSYIPCKSIRILREYTRYRYKLVSCRSSEKNRYQNALTVCNVALDSVVSDIFGKSSSSIIDYLLEQSGTTINHEEIASKLLKRLKSKEDVVIESIEGYQMTDSQKYRMRLVRAHIDYITAEINDVDKQIESLISSVPDYVKAIRFLTTIPGVKHDSAITIISEIGIDMSQFCNSKRLCCWAGLTPGNNESAGKKKSVRITRAGIYLKPALVQCAHAAVKSDKSPYYKKKYESLVKRRGKKRAIIAIARMILTAIYRMLSTGEVWNPSDLYKIDMPAPLVERQKAKAIKQAKKLLQKEGLLPPDEPLAS

SEQ ID NO: 374583 - protein, 411 aa, unidentified
MDTSYCVGIDVALHDHRVAILGPDGEARGKSFSILASQEGFAELVRILHARAAAPGHTLVGLEATGHFWENLEAFLSGAGYRVVVLNPLQTRRYRDVLRRKAKTDDIDAYVIAGLLRSEVAAACYVPDEQIQSLRELARLRARLMRERQDYLRQLVAQLDVVFPEHRVGLGDATTARARGLLAAFPTARHLAHATPATLRRTAAAAGARGFSLQDATALRDRARQSTYSGKAADARGHVVRTLLAQFERLTASIDDLDQALHELLPPANSDGGPSDAMLLQTLPGVGPYTAGTLLGELGSLTRFTDARALVAYVGFYPVIRESGEHAATPSLSPAGSRIARHALYLAAVNAVRRSTEWRLLYQRKLAQGKKPKQALIAIAVKWLHTAYAMLKHRAPYDPSRLGATPATIST

SEQ ID NO: 374584 - protein, 339 aa, unidentified
MPLQTPQTVQEPKPSFAGIDVGAEELMLTVRKNGTSYKAQKFTNTPADRARLVKKMVGMPGIVVCLEATGVYHFDLSIALHDAGVALMVVNPKSSHNFAKVLMKNSKTDAVDAETLAQYAERMDFVAWTRPSDEKIALRSFARRVDALTRQKAAAKNQLHALTASQETPKGVLQDVKLSISQLEKRIARLSEEARVLIGKHADLERVFQLLTGIKGVAQTSAIALMGELLLLPPGLSPREWVKFAGLDPRAFESGKSVHQQARLAKAGNRHIRSALYMPALSATQHDPYVRAYSRHLVDNGKKPLQALCAVMRKLLHAIHGMLKHDKPFDNTRFYAIPA

SEQ ID NO: 374585 - protein, 339 aa, unidentified
MKRFLFIGIDFSKSKFDVSLIERAEQNSYVQASFANEEQGYKELLKWIGKQTRIKHEDWRFCGEHTGLYSRGLSNYLVKKGFFIWLENPLQIKQCSGMKRMKNDLFDSLVIAQYACRYTDKAVAYKPAEKEIETLQLLVAYRSRLIKSKVSLEVSAKEMRRVIKRDATARFIYESSMREIERIKKQISGIEQKMHETIMNSSLKENYLLINSIKGVGMQTAIVLIIHTNNFVGFDNARQIASYCGCAPFPNQSGTIDKGNHISRLANKELKVLLSQCALCAMMHNKELSAYAERKIAAGKPKRVVINNVRNKLIQRIVAVVNSKIPYREDYLNPFAHCA

SEQ ID NO: 374586 - protein, 309 aa, unidentified
MEIVVGIDVSKERLDVAILPQEEVFAVGNDHAGIDELAERLKGIGVDAIALEATGGFEMLAVAGLSAAGLTVLVVNPAQVRAYAHAIGRRAKTDPIDAAVIAAFVLATKPEIRPLRDAETQALSELVARRRQIVQMTVAEENRLRMALAKQAQKSIKRLLTALRRELESLDADLDSHIRKSPVWRVREALLTSVPGVGPTTARTLLAELPELGSLDRRQIAALAGLAPWTRQSEKWKGKSFIGGGRGKVRAVLFMAALVASRYNPDLKAFRDRLVAAGKPKIVATVATMRKLLTILNAIIRDGRPWQNA

SEQ ID NO: 374587 - protein, 427 aa, unidentified
MAFRLEVPDHESEEEDQMIFVGDDWAEAHHDVYLCDEAGTRLAAKRLPEGIEGMTRFHDLVATHAGDPGEVIVGIETDRGLWVQALVEAGYVVYAINPKAASRYRDRHTLSGAKSDPGDAKMLAELVRTDRHNHRQVAGDTALAEGVKVIARAHQTLIWERTRVTNRLRCSLREYFPAALDTFDELAGRDTLAVLATAATPTQAAKLTPAKIRTVLRQAGRQRNIDTRADTIAAGLRTDALRAAERVEAAHGATTRASVAIIAALNTQINVLADELANHFEQHPDSDIYLSLPGVGVVLGARALGEFGDDPNRYANTKSRKNYAGTSPITRSSGTRSVALARFARNNRLADALDQWAFSSITASPGARAYYDRRRAAGDSHHKALRALANRWVGILHGCLDHRTHYNENTAWAHRIDSDLKRIAQAA

SEQ ID NO: 374588 - protein, 433 aa, unidentified
MQDVQDEPLFADRVAGLDIAKAEVEVTIRVPSDTAPGRRQQESRTFGTTRRQLDALADWLRSWGVTKAGMEATGDYWKPVFFLLESRGLDCDLYHAGQVKALPGRPKTDRADSVWLARITERGMISSSFVPPEPIRRLRTHTRYRRHLTQARTAEKQRVEKLLEDGHLKLSSVITDIHGKSGRAMLEAIAAGQRDPRALAQLALGKMRPKIARLEEALDCSFFTEQHAAVLAMMLTVIDHYTAQIQTLTATIEELAEPWLHQISQLDAIPGFGTITAQDIIAETGTDMTVFPTAAHLVSWARWSPQVKQSAGKRKGSNSTGRGNPYLSAALGEAMTSASRTQTFTGAKYRRLAKRMPKKKALVATGNSTLAIVHTLLSDPAATYHDLGPDYYEQRAHARRQARNHVKSLERLGYKVTIEAINPDTGELIPQAS

SEQ ID NO: 374589 - protein, 412 aa, unidentified
MEVVYPCCCGLDVHKKSITACVLWAEAKGKSRKEKKRFGTFTHDLLQLADWLAQCGVTHVAMESTGVYWKPVWNVLAEQFEALLVNAQHIKAVPGRKTDQKDSEWIADLLQHGLLRGSFVPPRPTSELRDLTRYRVSLVQEINRIANRIQKVLEDANIKLASVATDALGASGRAILEAMLAGERDSARLAEMAQGKLRNKIPELQLALEGRMTEHHRFLLRQLFHHLRFTESKRSEIEQEIDKRMRPFQDEVIRLCTIPGVDRVTAWGLLAEIGLDMNQFPSSGHLASWACLCPGSFESAGKRLSGRMRKGNVSLRRCLSQAAWAISMMKNNYLSALYRRIAARRGAKRAVMAVAHALLVIAFHMLKRKENYRELGADHFDRIDVNRIRRSLVRRLEHLGHRVTLEPLAQTA

SEQ ID NO: 374590 - protein, 339 aa, unidentified
MQVTTIGLDIAKLVFQVHGVDAFGAVVVRKRISRGQLIEFFTALPPCLVGIEACGTAHYWARRLKTLGHDVRLMPAHYVKPYVKRSKNDAADAEAICEAVTRPTMRFVPPKSEEAQALALMHRLRSQFVAQRTAMLNALRSGLGEFGIIAAQGLAGATEILKIAKMGDSRLPDVIHATYRSLVDAVKSVEERIKVLDKQIAANSKFDDTCKRLSSIPGIGPVTSTTIVALVGDASRFPTGRDFAAWIGLVPRQNSSGSKLRLGRITKAGDRTLRTLFVLGAFAVIKRARINPTKASPWLIALMGRRPPLVAAVALANKIARIVWAILTRGGSFKVVAAA

SEQ ID NO: 374591 - protein, 353 aa, unidentified
MFHQPGEATEMKSTTIGIDLAKNVFQVHGVDERGKTVLTKQLKRNHVAAFFANLPPCLIGMEACASAHHWARKLESFGHTVKLMAPQFVKPYVKTNKNDVADAEAICEAVSRPNMRFVPIKNAEQQAVLALHRARQGFVKARTAQANQIRGLLAEYGIVIPQGIGHIAKRLPEILEDGENDLPGSFRQLLDRLGDHLKELDRQVGELEVQIQIWHRDHEASQKLAQIPGIGPITASALVASIGDAKSFENARQLAAWLGLVPRQHSSGGKQVLLGISKRGDTYLRMLLIHGARAVIRVAEGKAGYADSWLARLMGRRNKNVAAVALANKNARTVWALLAHGRDYQADYEPAAA

SEQ ID NO: 374592 - protein, 312 aa, unidentified
MDVSVLGIDLGKNSCSVVGLDATGKVVVRRRMRRETVITYAATLPACVVAMEACCGAHHMGRALARQGHAVRLMSPEYVRPYVKAQKNDDRDAEAIAEAATRPTMRFVELKTEQQLDMQTLHRIRDQLVGDRTSLMNQIRSLLLERGHIVPQGRAKLAVRLGEMLDGDEPVLGFRIHRLVGDMRLRWIALDERIADLDAEFAEAARTDERTRRLLTIPGIGALNATALVAAVGDARTFGRGRDLAAWLGLVPRQATTGGKPRLLGITKRGSRYLRKNPIQGARASLPTMSKSDTRLGAWLRGLLSRSHPTPS

SEQ ID NO: 374593 - protein, 318 aa, unidentified
MRNAAGLDISKDTIDVAVIIGDSVQIKKYRNDETGIKQIQSWLQTFEDLTVCMEATGNYYEAAADYLAESFIVHVVNPLKISKYAESRFARTKTDKQDAKLIAEYCQTAKEKDLIHRPKPTEAQYKLARLTAAYAQISQECTAMKNRHEAAKDSEVRAIFKNIIRHLQTQLKTLKTQIQKQTQTPQYQPQIKRLETIPAIGRLTAAVLLQYLTTADFPTPNKFAAFAGLSPQQKQSGTSVKGKEKITRYGNRKLRTALFMPAMVAYRMKAFPAFISRLEAKNKPKKVIIGAIMRKLAVIAYHVHTKGEDYDPTRYAGA

SEQ ID NO: 374594 - protein, 367 aa, unidentified
MAKCIMLGVDVHDETLVVKMAVGTEQPETHRCANSLRGRGQFWKALKAIVKKQGCDRVVMAYEASCQGFGLYDEAREEGLECHVLAPTKIARSVQHLRRKTDEEDAQRLFEVVRGHVLAGNELPTVAVPDLMTREDREVTRARQDVSEKLTLLKTQVQTLLKRNGLCRPKATGKGWTKFFEAWLQGQAGDSSDLQDGAHIALATLLRQKEAVEKEIELLDREVARLSRKKRYAGPVEALTAVSGVGVLTAMLLLTELGDLSRFASRKQIGAYLGLVPSSNESGKRGDRKGHITHQGLWRVRRALCQCTWTRVRTDPEAKAAYARIVARNPKHKKIAVVAMMRRLAVLLWHIGLDAQRRNDCFEREAV

SEQ ID NO: 374595 - protein, 448 aa, unidentified
MRMPQVIDDEEHERVFDTVAAVDVAKKDGVVCLRQPHRSRPGSRQSTVWTVPATMTAVSALGAELADAGVQKVTLESTSDYWRIWFYVLEAAGLDVQLVAASQVKQLTGRPKTDKLDAVWLARLTEKGLLRPSFVPPAEIRVLRHYTRARTHLTQDRTRCWQRLEKLLEDAMIKVSAVASTLATLSAQDMIAALIAGERDPQVLAGLARGRMKAKHAALVEALTGMFTSHHGEIAQMLLDQIGFLDKHIARTTMLIGEQLAMIRAAWGIDDDASTGPGAGTGDGAIVKPAVARLDEIPGISAGLAASIIAETGLDMSRFPTAAHLVSWAGLCPRTMQSGPRTRHAKGTGNTYLRGYLGQAANGAAGTATFLGERHARIARRRGGAKAQVAIARSILVIIWHLLHDPEARYTDLGPGHYQTKIDKNRKTRSHIRQLEALGYHVTLTQAA

SEQ ID NO: 374596 - protein, 345 aa, unidentified
MEIRTIGIDLGKTVFHFVGVNARGEVVVRKKGSRTQLLRFTSNLSACLIGMEACGGSHFLGRALREQGHDARLMPAQYVKPYVKTNKNDYIDAEACAEAVTRPTMRFVPIKTDDQLDLQSLHRVRERWVVRRTAVINQIRGMLLERGITVRKGRNHIEQSLPGILEDADNKLSGALRVLLTQLRLEMQYLHGQIGETDKLIGRICGELEQCRRLVAIPGIGPITATATVAAIGNGAAFKKGRGFSAWLGVVPGEHSTGGKQKLTGTSRRGNKYLRKLFVQGAHTVLLQKTKQSSGLSTWLVNLTSRKRKQVATVALANKMARMAWAVLFKGEAYRPPTAPQVIAA

SEQ ID NO: 374597 - protein, 411 aa, unidentified
METLIARCAGLDVHKESVEACVRRQEANDPRGKETRHWGTMTRDIQAMADWMAAQGVTHVAMESTRVYWKPIYNILEGRFTVLLVNARHLKQVPGRKSDIRDCEWIAQLLQHGLLKGSFIPPRPQRELRDQTRHRTQLVEEKGRTINRIQKVLEDANIKLASVATDILGASGRAMLQALIDGQDDPRKLADLARRQLRGKIPELEKALQGHLTEHHHFRLQLLWKQLAQQEELLAQLDTRIAEQTRPLADQIERLDAVPGVDRRVIEGWLAEGGPDMSPFPTDQNLASWAGLCPGNEESAGKRRRRRITPGNRWLKRILAQAAWAASHAKKSYLASQYRRLAGRRGKKRALIAVAHSRLVIFYHMLKEGTAYADLGSNFFDTLQTQRLTRYYLKRLEALGHKVILETCVAA

SEQ ID NO: 374598 - protein, 407 aa, unidentified
MDLLKTVFGIDVSSRKSNVCIMVNGQKVNDYAISNDMVGFNRLLGDLKQVTKPQIIFEATGVYSRRLQAFLDMHELRYVMMNPLEAKRKTKDDLHQNKTDKLDALYLAKLQSEHPQRLAYVQNKEYQELMANNRIYEQASHDLISNKNRLHKAVQLTFPEIEHLMANPRGKNYWSIVLRFPHPDIVLETKEADIIDFLKGLTGIGKKRANDIAQSLIRLAKVACPAVKKNSAHIRGLKMAINNILSAEEECQTALQEMAKLAPKRDLEILTSIPGIGENTALRIISELGDIRRFNNPSQLNAFVGVDPQVYESGNLTAHLSISKRGTAIGRKVLYLAINQIQSAKKAGNPCHIADYYEKRKRSSETASHKKAAIASIHKLLRTIFALIKNDQLYSYDVAKHNQRLLS

SEQ ID NO: 374599 - protein, 456 aa, unidentified
MKKTEKPGKNVELPKHLQQLNLFAAGIDIGSKSHFVAVPEGTDEKPVREFECFTADLHRLVDWLISCLVTTVVMESTGTYWIPLFEILESRGLEVKLVNARHVKNVPGRKTDVLDCQWLQQLHTYGLLEGSFRPPEQICALRAYIRNRMNQVRYCAAHIQHMQKALTQMNLLLHNVVSDITGVTGMRIIKAILAGERDTHVLAGMRDRRCKNSVVTIAKSLEGNYRPEHLFSLKQSVETFEFYQTQIGHCDQEIEALLATYDAKIVDNPPTNPDTDAGALSTDKKSAPAFNLRDELCRVTGVDLTKIDGIDSTTVLKIISEIGVDMDRWKSEKHFASWLGLSPGSKVTGGKRLSSKTKPVVNRAAAALRMAASTLYRSKCALGAYYRRMKARLGAPKAITATAHKLARLIYSMLKHGSEYTDLGQDYYEQQYKSRAVKNLKKRAKELGFELIDATI

SEQ ID NO: 374600 - protein, 348 aa, unidentified
MSTFAGFDVSQTKTHISVVDVQGNELWHGSVVTSPEALALAIKDHASGVLRIGMESGPLSPWLFHALKAKGLPIICIDAKAAKAGLQLQGPNKTDRKDAKGIARIMQTGWYREVSVKEIEGHKRQTVLTVRKQLVGMRTECINQIRGILKMYGKVLPSGQLPALQALMLADDLLAKSISAIYSTLRTLGSEIKQIDKEIELLAGEDEYCKVLQTIPGIGKITAIAFVASIGDPKRFQKSRSVGAYLGMTCRRDQSGQKDVNGRISKCGNGMLRSYLFEAAGVILARTKSFSALKAWGLRIKKRSGWKKACIAVARKLAVIMHRMMVTGECFRFSNSAAAQMDALPSAA

SEQ ID NO: 374601 - protein, 339 aa, unidentified
MREVSTIGVDLAKKVFQVHGVDAAGETVVRRVLRRARVLAYFAQLPPCLIGMEACATAHYWARELGKLGHRVKLIPPAYAKAYVRRNKNDAADAAAICEAVSRPSMRFVEIKSEAQQAAAGIHKVRDMLMKQRTMLINALRGLMAEFGIVVGAGTRHVGELTAILADPEEQRIPALLKDGLRRMAEMLRGLERQLEGIDKQIVDWGRGNAACRHLITAPGYGPILSSAMAAIVVNPAAFRSGRDFSASLGLVPRQDGTGGKVKLGPISKRGNGYLRRLLVNGAMSVLNSKRAKQDPWLVKLLANKERKVAAVALANKMARIGWALMMRQEDFRATSAAA

SEQ ID NO: 374602 - protein, 348 aa, unidentified
MMHAGLDLSRKKLDVCLLSEQAEIVEEFAVPPDLDGLRGLMRRVIAHGLPVRGVIESMTGARFVHDTLEELGWDVLIADAAKVKGLAPLACKTDKIDARVLALLSQRDLVPEIWLPDPTVRRERELARFRLHLVKHRSMLKNRVHATMITFGHPCPVSDLFGVAGRQLLDRLEIAEPWRATVDTSLVLMDDLEAQIGQINKQLRQLSPEHRYMPLLMTTPGIGFVLAYTIAAEIGDITRFASPQKLVGYTGLCPRVNQSGDRDRRGPLTKQGPKYLRWAMLEATMHALRHDAYRERYQRTKRRLGKQRGAKVAQVDIARKLTEAIWHMLTNNQPFTPSAGGSTFRLAA

SEQ ID NO: 374603 - protein, 348 aa, unidentified
MSKITITGIDLAKNVFHLHSVDRNGRQVKAIKLSRSKLNEYLHRCEPVIVAMEACASAHHWGRLCQLLGHEVRLISPQFVKPFVKSNKNDRNDARAICEAAQRPDMYFVPVKTVEQQAVLSLHRVREMLIGQRTATINQLRGLLTEFGLTAPAGRRALHNTIPAMLEDLMKISPTFLVSCIRQQWEHIGELDQRIDNVTTQIEMHARQSDVTRRLQTIPGIGPITASALEAYVGNATQFRAGRQLAAWLGLVPRQHSTGGKPMLLGTSKRGDGYLRRLLVHGARAVVSSPNVQKQDKTMMGWLARKHMNVAVVAMANRNARIAWAMMTQERNFDRNFRDQLTNQLAAT

SEQ ID NO: 374604 - protein, 338 aa, unidentified
MTSKISILAIDLAKGSFQVCAVGSDGTVLYNRALSRNRLATLLGEQPACVVAMEACATSHHWGRMAQSHGHEVRLVPAAYVKPFVKRQKNDRADAEAIAEAAMRPTMRFVAVKSVETQGRAVAFRTHQCLVRQRTQLINALRGHLAEFGLVAPKGPASLKLLENALADESSDLPDPVREMGAVYLEQIARLTDVIERLATELEDASKTDCELRRLCTIPGIGPVTVGAVAAFAPDLDTFDSGRNFAAWLGLVPRQRSTGGKARLGAVSKMGQTDIRRLLIVGAMSVIRWVVRKGGSSNRWLAALVARKPRMVAAVALANKMARMIWAMSTKQEDYRMA

SEQ ID NO: 374605 - protein, 340 aa, unidentified
MKLYGAIDLHSDNNVLVLIDEKDEVVYRKRLPNDLRLILEQLSAYQSRVEGIVVESTYNWYWLVDGLMEQGYKVHLANTAAIQQYNGLKYTDDDSDARWLAHLLRLGVLRVGYIYPRADRPVRDLLRKRSQLVRQRTTNLLSIQNLMTRNTGSSLSAKQIKGLDVQQVDALLAQGDLALAVKANLAVMLSADEQVDLLERTVLQRVQLRAQFRFLKTVPGIGEILALTIMLETGEIGRFARVGNFASYCRCVDSRKISNRKKKGQGNTKNGNKYLAWAFVEAANFAMRYNSRIKSFYQRKKAKSKGVVALKAVAHKLCRACYYIMRDQVAFDVTKAFGPK

SEQ ID NO: 374606 - protein, 415 aa, unidentified
MEGLQPLHRRVAGIDVHRMLHVATVVIEQPDGSIEQTSREFGGFRRDCRALAAWLAELHVELVVMESTGIYWKSVHAHLENAGIVAWVVNAHFIKHVPGRKTDMSDSQWLAVLARFGLVRPSFIPPKDLRELRLVSRYRRKLTQMHSAEVNRLHKVLDDGSIKLGGVVSDINGVSATAMVQGLIEGRDVASLLDMARGALKLKRDELQAALDGDLSPRHLFVLKHIHAHVESLQDELADIDAYLLAAMQPYALAHGLLQTIPGIDQIAAALILIEIGDDMGRFGCAERLASWAALCPGNNESAGKRKSGKTRHGNAIIRYILCECANAARMTKSSLAAKYRSLMVRKSHKKAIVAVAHKMIRLIYVLLTRKQAYLDQQIDYAAMSAKKNAPRWIRQLKLIGKWPATRNVPAAASV

SEQ ID NO: 374607 - protein, 328 aa, unidentified
MKEASIIGLDLAKRSFQAHGTLADGRVAFRKKLTREKVLGFFAEQPRCIVAREACGSAHHWGRAIRDAGHEVRLIPPAYVKPFVKRQKNDAADAEAIAEAASRPTMRFVAVKTEEQQARAMLFRTRDLLVRQRTQLINALRGQLSEHGVVAPQGPANVAILAQAIDDMTPSLPLLVVELARVYLDQIDGLSEKVAELEKAIACEARRGDTTRRLQTMPGVGPITAMATETFAPPMEVFRRGRDFVAWLGLVPVQHSTGGKQVLGKTSKMGQRDIRRLLITGAMVIVRWACRKGVQEGTWLHRMLGRKPRACLWRSPSPTKWPVQSGPC

SEQ ID NO: 374608 - protein, 407 aa, unidentified
MDILIERACGLDVHKKSITACVMTSEGKEIKTFRTHTVFLLDLIDWIKQHRCTHVAMESTGVYWKPIVNLLEAEEITFLVVNAQHIKAVPGRKTDVKDAEWICNLLRHGLLKPSYIPDRNQRELRELVRYRRSLIQERSREHNRVQKVLEGANIKLAAVVSDIMGVSSRDMMGAMIEGEEDPEKLAAFARRTLKKKKEELELALRGNMSAHQRIMLKTMLTHVDFLNEQILELDTEVAKRLDPFQQDIERLDTIPGVGRRTAEQILAEVGTDIASRFPSAAHLCSWAGLVPGQNESAGKRKSSKTRKGNKYLRAALIEVAHSVCRSDNYLGAQYRRIAARKGRHRAAVAVAHSIMIIAYHLLIRKEDYKDLGSHYFEQRQQEAIVRQAVRRLENLGFQVALSNSEAS

SEQ ID NO: 374609 - protein, 350 aa, unidentified
MNVIKQVVGIDVAKDNFEVRFGAISDQQEERFVGSATFPNEKRGFRKLLEWTKKQLIQVDAPVWFVMEATGSYYEHLAYFLSEHHEQVVVVLPNKIKHFAKTLEAKSKTDRLDARSICQFGLERPLSPWQAPTPQMKLLRELVREHNTLQQMATQVKNQLHAKDHTYQPSAETTKRLHTQLRLFQKQLKSVEQQLHSLVDDDDNLRRRITNITAAKGIGFMTVITAVAETNGFALITSEKQVTSYAGLDIVVKESGTRQGKPSLSKKGNKHLRRAVFMPALAACRFNPTLREFYLRLVRTKANKKVALLAVARKILCLIFTLWKKNVQYDPNYRHQNIRSVPNYLPQVTT

SEQ ID NO: 374610 - protein, 433 aa, unidentified
MLKLNYMSTLFVGIDVSSKTNAVYAMDFEENKYISSSFGNNQPGADKLVNMIAECMHKHKNLNTILIVLESTSVYSVHISNFLSASEVLMPYRPYVFCVNPKAASNYRKSYIGMEKTDPTDAYLIADFGRVGRTKKLEPWRGGQFISLKRLTRHRMHLSECITREKTYMVSNLYLKFSELQLLEGDDKPFGSLYGATSSAVLTEFLSPQEIIDMPEEELLTFLAGKSRNRISDLSKTSELLRKAARDSYRLDKCMYEPLNISLASSFNCIHAYQKEIKLIEQAIEKCINGMNPNALLILQSIPGIGPIWASGILSEIGDITVFHSSDALAKYAGLYWPKGDSGDFTSEDNKMSKAGNPYLRCYLGEAANSVRKHIPEYADFYARKYAEVTKHQHKRALALTSRKLVRLVFGLLVKNQLYTGEKLDTEYNIESN

SEQ ID NO: 374611 - protein, 403 aa, unidentified
MNMNAVGIDVSKGKSMVAILRPFGEIVSAPFEVKHTVSGIRSLIERIQAIDGEARIVMEHTGRYYEPLIRELSQAGLFVSAVNPKLIKDFRDNSLRKVKSDKADAVKIARYTLDSWTELRQYSLMDEIRNQLKTMNRQFDFYMKHKTSMKNNLIGILDQTYPGANTYFDSPAREDGSQKWVDFATTYWHVDCVRKLSLNAFVDHYQKWCKRRKYNFSQSKAVEIYEASKEIVSVLPKDDLTKLIIKQAVEQLNTASQTVEQLRTMMDEAASKLPEYPVVMAMKGVGRSLGPQLMAEIGDVARFTHKGAITAFAGVDPGVNESGSYEQKSVPASKRGSGTLRKTLFQVMDVLIKTKPQDDPVYLFMDKKRSQGKPYYVYMTAGANKFLRIYYGRVKEYLSSLPK

SEQ ID NO: 374612 - protein, 373 aa, unidentified
MKKRSSSQKSQKVAVKAKVAQEHVTIGMDLGDKTSRYCMLGNEGEILREGQVATAKTGIVETFGSLGRVRIAIEVGTHSPWVSRLLLKLGHEVIVANPRQVKLITESSRKDDRLDAQTLARLARIDPQLLRPIQHRSEKAQGALMIIRVRAALVAARTSLVNTARGLVKSMGERLPQCDADQMGVARAISLPPQLRQVLEPLLKEVESLTEKIKNGDREIEQIARKDYPETALLQQIGGVGPLIALTFILTIGDKNRFQKSRDIGCYVGLRPRRSDSGQSQPQLRITKEGDPYLRTMLVQGAQYIISRRGPDTDLKRWGLNLAKHGGKRGKKRAVVAVARKLGILLHRLWVTGEVYEPLRNHNARQEQKKAAA

SEQ ID NO: 374613 - protein, 315 aa, unidentified
MTEPKSSKVSVGIDVSKKMLEIAIHETNESWSCNNSTEECAALVPKLKQLQATSIVLEATGGFETLVTATLAAADLPVTVVNPRQVRDFAKATGQLAKTDRIDARILAHFAAAIEPQPRPSKSEEAQHLEALLARRRQVVEMLVAEKNRLANNRDRAVVKDLKIHIAWLERRLKLSDDELQRVLKDSPAWRQHDVLLRSVPGVGPVLSLTLLAQLPELGHLNRREIAKLVGVAPFNCDSGRWRGARHIWGGRAAVRSPLFMATLCAIRVNPTIKSFYQRLIKFGKAPKVALTACMRKLLTILNVMIKTQSSWRTV

SEQ ID NO: 374614 - protein, 405 aa, unidentified
MNAVGIDVSKGKSMVAILRPYGEIVAAAHEVKHTPEQIDELIHEIQSLEGDSRIVLEHTGRYHEAIARRLSDAGLFVSAVNPILIKNFGSGKVHDVKTDKADAVKIARYTLDSWTNLKQYGLMDELRDQLKTMNRQFAYYMKLKVSMKNNLISLLDQSFPEANTFFESPVRSDGSQKWVDFVYTYWHIDCVRDMTLMSFTGHYRKWCKRRGYIFQSEKPKEIYKTISNLIPILPKDDMTKFLIRQAVEQLNAVSAAVETLRTNMNDIASQLPEYPVVLDMKGVGTSLGPQLMAEIGDVTRFTHKGALAAFAGVDPGVKQSGTYEQKSVRTSKRGSPLLRKTLFQIMECLIMTMPEDDSVYAFMNKKRSEGKPYYVYMTAGANKFLRVYYGRVKEYLSEHKVKEEN

SEQ ID NO: 374615 - protein, 373 aa, unidentified
MAKSIRYVGLDVHADTIAVVVAEGGRGEVRSLGTIPNRPEAIRKLLRRLEPASTLRVCYEAGPTGYALYWQLTRLGVSCEVVAPTLVPAKSGDRVKTDRRDAEKLARCYRAGDLTPVWVPDAAHEALRDVVRAREAAKKDELRAKHRLGKFLLRHGYRAPGGTNAWTKKYWTWLNSVHFEYRAQEATLVDYRAEVEHAASRIQRLDKAIDEAVLAAPAKMKAVIEALQALRGVAKITATTLAVEVGNFSRFAHARELMGYGGLVPSEHTSGKRKRQGAITKTGNAHLRHVLTESAWSYRHRPNQGGELRRRQEGVSEQVKAISWKAQNRLHSRYWRLTSKGKVPGKAITAVARELLGFVWAIGVQTEAAETAA

SEQ ID NO: 374616 - protein, 434 aa, unidentified
MNCDHVSRVERFRQFKRGVRGSAKHLIVGIDIAKDKHHAFLGDANGKTVLRRLIITNDKEGFERLIAHVRQYMTRDGFDEAVFGVEPTSVYHKPLAEFLIDRGYLVVYVTNDAIKKNRSLIDGRWDKNDTKDSANVADLISQGKCHFYDLPQQGLRDVRNLLLLRKRLKKQEHGQRIRIRNNLVAQYFPELDRFWNKSEAENLAIVRWCLSPIKIRDLEFDAFVRMVTSKNRGLKQRNRLRGVWETAAHSVGCHLGTSAELEAEILVDDLEKIRARINQIERRIHEICLGFEHYQLLMTIPGFGPYISALALASIGDPNRFENASQVIRLAGLDLNAVRSGKKSQSAVAVISKRGKSDLRYGLYQAGLIASSKNTRFMTYFENLLRGREKEKGIRTKMRVKLSAKMLVIAWTMMKKAQEFNPDLLKIEYPVGGR

SEQ ID NO: 374617 - protein, 382 aa, unidentified
MSMTTTTRSDDRTETLHLAFELGNGTWRLGFTTGFAQKPRERTVAARDAEAVLREIARAKERFELAPGCRVASCYEAGRDGFWLHRFLVAHGVENFVVDSSSIEVNRRKRRAKTDRLDVEKLLRLLLRYEAGERKAWSVVHVPSDAEEDARHLHRELLTLKRDRTRVTNRIRGLLANQGLEVDPRKDLPAQLERLRRWDGSALPDGLRRRLIREWEKAGFLTQQIQALSQERRRLIREAADPAMGKVMQLARLKGVGINSAWLHTMELFGWRAFRSGRQIGRLAGLTPTPHQSGDLQRELGIDKAGNKLVRWMAIEGAWAWLRFQPHSALSRWYEERFAHGGARIRKIGIVALARKLLVALWRYLETGVVPEGAELKERVVI

SEQ ID NO: 374618 - protein, 349 aa, unidentified
MTVYVAVDFHARQQTISYCDLADGEIHRLELRHQRDDVRAFYAGLSGAVIVGLEASGYSAWFEQMLAELGHTYWLGNPAEIRRKAPRRQKNDRRDADHMLDLMLKGDFPRLHTFSNESRLVLRQLRYRHKLVKVRTIAKNSLQAIGINAGLPLKRQLLSEKGIRQLQALPLSPVLAQQREEWLQLIAFVNQRITKVEAALQLIADKDAAVVLLQTHPGIGLLTSLALRYTLMPVSRFRTTRQVTAYAGLDCMEEQSSERRRMGSISKAGSRLLRYLLNEAGQTACRKDPELKRFYQRLLQRRERPKAKVAVARKLLVRSFIMLRDQIDYAEFVRRGVAARVAREAHSLP

SEQ ID NO: 374619 - protein, 390 aa, unidentified
MERSMQKLNDFSRSLIALEPDGTLIAVIEMSLSSWLVAGIVPGVERQPLKKLAADESALLKLLHRWREEAEKAGRRIERIAVAFEAGRDGFWLARWLKARSIEAHVIHAASVAVSREHRRAKTDRLDTELLKRTFLGWLRGERDHCKMVAIPSIKNEDAKRPNRERENLVSEQSRIINRMKAALIRLGIRGFNPKLKRAAGRLDDLRTPEDEPIPPNTLAELRRDMERRRLVRDQIRQIEEARLQRLDHAPGDGPHAMVRLLARVIGVGIETADMLVHEVLSRSLRDRRAVARYAGLTGSPDESGRKRREKGLARSGNGRVRRGMIQLAWRFLLHQKDSALAQWFRARTENARGTRKPMIVALARKLLIALWRLVRQGVVPDGVVLRSAQ

SEQ ID NO: 374620 - protein, 318 aa, unidentified
MEAVLGIDVGKADFHCSLLVEGRSRSNSFPNSKKGFDQLAGWLENRKVGKVHACLEATGGWSEELAIFLADRGHTVSIVNPMAIKGFGQSELSRTKTDKADAALIARYCLAMKPRLWQPPSPSQRRLQRLGRRRVALIEMRVQEENRLKGPGVDEVRASIETMIATITRQIAQLDAEIADTIDQDPNLRENRELLESIPGIGERVATTLLGELPNLKEFRSGKAVAAFVGLCPRELRSGTSVSASWVSKAGNAQVRRVLYMPAVVAMSHNPVLAAFATRLRENGKRPKQIIVAVMRRLLVLAYGVLKSGKPFKAALPA

SEQ ID NO: 374621 - protein, 324 aa, unidentified
MQHEPSFQPFVGIDVSKKKLDIFISDHSDQPQRLSILNQDEPIAALIDRLRAANVRLVVIEATGRYHRRVAAMLLMAGIPTSVVNPQRVREFARAMGRLEKSDSIDAAVLADFARLVNPRPDPVQRENQTILSDLVSRRRSLVQLRVAETNRAQEDLPKLARDQSKKLLRLIEQQIEDLDREIAKHIQADDDWHNKSQIIDSVPGIGPDSANQLVVDLPELGKLNRQQIAKLIGLAPLNRDSGQFQGQRRIGGGRRDVRTTLYMLAHNAVLHCPRFKRYFVSLCVRGKKHKVAMVACMRKLLVTLNQMIKTNTHWNLEPLPKTA

SEQ ID NO: 374622 - protein, 345 aa, unidentified
MPIVGGLDIRRKQLTFDYLDTETGEVKRGQVAPADRAQLRAWLARFAGREDVAFALEGCTGWRYVTEELAAAGVAAHVAEPADTAFARGRKRHAKTDKTDSRHLRQLLAEGRLPECWIPPGHILECRALLELYHDLRAEHTAWVQRIHAVFFHQGAPALGDGALRTGKDLAALRAAAAAHLSPVGQLQVAVSLEVLEALEARMHQVRHQMLAAARHLTGAKVLAARLYGVGPVTALAMTCWLAGKDRFSSSRKAVRFAGLDVTVWSSDRKGPPGRLSRQGPPVLRWAVYEAGKTHARSSAPDHRYYAQVKDRQDGKRAALSEARKILRQACHILAELGDDALTAA

SEQ ID NO: 374623 - protein, 423 aa, unidentified
MTDPPVQGFSRFIAIDIHKHYLMIGGIDAEQQIVLQPRKVELHRWLDWAEANLHPTDAVVLEATTNAWTIYDQVVKLVGRVVVAHPAKVKLIADARVKTDKVDVLTLAKLLRADMLPEVWVPPTHVRELRALLSHRRRLVGLQTIAKNRLQSVLHRLNIKPPKGNLFARKQQEWWNELGLSTTERLRVEHDLATLTHLEPQIEQVDAELQRLSTSEEWAEQVPYLVQLPGIGLLTAMTLLGAIGDVTRFGSSKQLVGYAGLGAGVHASGKTHRDKGITKQGRRDLRFVMVEAARVAVQSHPYWKRQYEGLAKRIGEHKAVVAIARKLLIVVWQVLMAKSADRQADAEQVAFKLMVWGWKLSEAQRGGMTTGQFTRAQLMRLGLGEELKHVTRGGARRRVADREEVLALQAAQRERKEREQATD

SEQ ID NO: 374624 - protein, 395 aa, unidentified
MFIVGIDVAKRSHEVCMITSDGQTVQRPFSIRNNCTGYNLMLEKIRKHTNIKSQIVFAMESTAHYWLALFTRLRKDGYHVILLNPIQTSAMRDMFIRKIKTDAKDSFIIAELIRFGRYAESNVAQDRLLALKELCRNRFYLVDMAGDLKRKLIALIDRVFPEYEAQFDTIFCKSSVALLKKYPTPQRLSNAHLDKLTELLWNSSNGHFGEWKARELKELARNSFGVEDCDGAYSTLILLMLDQIQSLSGKADALEKEISRLFQSFDTTVTTIPGVGPIIGAVILSEVGDISRFSSADKLAAYIGVDPSVNQSGEFQAAHAHMSKRGSPYLRRCIWMASQVAVQRDPMFRAYYEKKAAEGLKYMTIIGHVTRKMTAVIFAILRDHKVYEPVLPTAA

SEQ ID NO: 374625 - protein, 376 aa, unidentified
MGDYSEAFVGIDTSKLRNAVAIADAGRGGEVRFLGEIENTTAATAKLVRKLTARYERLTFCYEAGPTGYGLHRQIKGLGFECVVVAPSLIPKRRGDKVKTNRRDALSLAKLLRADELTAVWVPDGGHEAMRDLTRARETAMLDLRTKRQHVSAFLLRLGRPYPESRKTWTKAHASWIASQKLEHPQQRLVLEEMLLAIRQAQERLQRLEQAVAAAVPEWSLAPVVTAVMAMRGMDLISATTLLAEIGDLSRFQTPTELMAYLGLVPSEDSTGDTVKRGPITKAGNRRARRMLVECSWSYQHPPRVGQAKQSKVDAAPPAVREIAWKAQCRLYRRYRALIRKGKRKTVAIVAIARELAGFIWAVARAVSATRIAAAT

SEQ ID NO: 374626 - protein, 347 aa, unidentified
MNHYAGLDVSLEETAICVVDESGQVVKEVRAPSEPEPLIIALTAIGLPLERVGLEACSLTAWLYDELHSAGLPAICIETRQANAAMKTMPNKTDRNDARALAQIMRTGWFRQVHVKSRPCRLWRSLLVARRTVLNEMRTIENVVRAVLREAGFKLGTPGRAAFAGRVRELAGDDQAVMPIVAPLLTILATMLGELAQLTKQVLELARGEQVCRRLMSVPGVGPITALAFRATIDRPDRFRRSRDVGAHLGLTPSRYQSGETDISGRISRCGDELARTALYEAAHTLLVRSRKWSALRAWGMKVAKTRGMARARVAVARKLAVILHRMWSDETEFRFGRNPANALATV

SEQ ID NO: 374627 - protein, 367 aa, unidentified
MKKISITAGKQIRNCSEQKLTIGLDLGDRSSWYCVLDEAGEVRLAQKLGTTPKAMREVFGAIPRSRIALETGMHSPWVSRALSELGHEVIVAHARNVRLIGESRKKDDRLDAQTLARLARIDPQLLCPVKHRSARAQADLTVIRARAGLVRARTALVNTARGLAKSYGERLRGCNVRNMNAEKAQELSPELRTALQPLLAGIESLSERIRECNEGIERLARESYPQVAQLKQLKGVGTLIALTFLLTLEDAHRFRQSRDVGCYLGLQPGRRNSGQSEPQMHISKEGDPYLRTLLVQGAHHILGPFGADSDLRRWGLKLAERGGKSGKKRAIIAVARKLAVLLHHLWVSGEVYEPLRNSKQRAMPAAA

SEQ ID NO: 374628 - protein, 418 aa, unidentified
MNVKTRRTKKQVNVENQAINLLSKEELNKKIEVVEKELRSYTWRELETNGKFAKNDKLSFITDDMLIVGCDIGSENHYIRAIDVRGRELSRGAFEFSNTSEGFENAKAWVLALAAKHDKKQIVLGLEPTGHYWFALAAWMISNGISVVQVNPYAVKQSKEIEDNSQLKDDRKDPKLIANLVKDGNYGMPYLPEKVYADMRRLSMFRDQLTEDRIRNINRLHRELKIYFPEYMDAFGKIDGAFTLQVLKVSAIPSDITALGAEGIKNIWHNEKLRGRGYSRANEIVSYAEKSVGLMDGIDAGREAVKWYAEQILKLVACSSGKHKGQTKISHRGRKRLRYWLFQAAKSAVSHADEFKQLHEYYTTRTNNPLKKMQSLVVIACKILRVIYTILKTGTTYDPQKLLEDIKRPTASHAPMAA

SEQ ID NO: 374629 - protein, 335 aa, unidentified
MYYVGLDVHYRTSTYCILDKNGREVKCETVRGHWPKLLERLAMIKGAWTICFEATCGYGYLHRELSHMARRVAVAHPGQLRLIFRAKRKNDRVDARKLAKLLYLDEVPEAYVPSEDVQSWRELIEHRRRVVDRQTTCKNAIRSLLRSHGVLPPKGLWSKQGLAWLEGLGMPTPVAQLKRDLLLDELGEAKRRVRTMTKALDEIGGRHPAVILLRTIPGVGIRTAETMVAYIDDPKRFRRSAQVAAYFGLIPCQDASAGTNRLGHITRQGPGTARKYLVEAAWQGVYRSPTIRAYFERIRRGKKERRKIALVATAHYLLRCMHAMLTRGQSWREAA

SEQ ID NO: 374630 - protein, 350 aa, unidentified
MRRPKEKLIAGIDLHGNNVMIGVMNQEGKRIAHRKLDCDLKDVTGFLEPMKSQLQSMAVESTFNWYWLLDGLRERGYPIDLANPAKIEQYNGLKHVGDKDDAFHLADLQRLNILPKAHVYDPQLRPVRDLLRRRTNLVHQRTALILSFKSLYTRTTGQSLTGYEAKTMDPKEAPKLYEHPANQLIAQIQTEHIRALEKSINRIEKAVLACAREIPLYAKLTTIPGVGRILGMTITMEVGDIKRFQTDGDFASYCRMVDAKRLSNGKVKADNNQKCGNKYLAWAFVEAANFSRRYDEHCRRWYDRKAAKTSKVIATKALGCKLAKAAWHVMANESDYDASRMFPELATNKK

SEQ ID NO: 374631 - protein, 526 aa, unidentified
MMYATMINGSNRWPDGGRFTLLAAPAQGRRPLRKIGAPCTGRGTANTQPAPRRLRRRNPPGKQRPGRGFRTLHFPFGSAHHEAAAQPSLLRAVFRLLHPWIHSEGVMYLANATLYVGTDISGKANRTRFYDESGKEVGGRLESANDLPGSKLLAGEALWRAEGIGAEEVLWGLEATNLFWWHLATFLTTHPELLARGLRCYTFNPRQVKKFKESYPDIGKDDWTDAMVIADRLRFGRLPAECYLDERYQPLQRLTRYRRHLVTQLVREKQLALGYVYLKLSAYSTLERPLSDTFGATSQELLESYLTPDEIVAAPIEELAALLKERSRGRVADPEQVAKVVQQAARRSYRLSTSMVEPVNLILSSSLTTIRTLAAQLKPIEKAIAAELEATPPQTLSTIPGLGPVFTAGIVSEIGDVSRFEREESLAKFSGLTWRRHQSGEFEGEDRPLTKTGNAYLRYHMVEAANSVRLSCSEFGSYYQKKFREATSHKHRRALVLTARKLVRLIHSMLRSGRIYQPTGPRRASS

SEQ ID NO: 374632 - protein, 343 aa, unidentified
MQVSTIGVDLAKNVFQVHGVDSAGKVVITRQLRRKQVIDFFSKIPPCLVGMEACGTAHHWAREVSKLGHTVRLMPPSYVKGYVKRSKNDAADAAAICEAVTRPSMRFVPIKSVDQQALLMLHRTRDLLIRQRTQLINALRAHLAEFGLVAETGREGLAQLAAIITDESNCEALPSAMKQALQALVDQLAALELQIGALDRAIHAHHRANDMSCRLETVPGIGVIGATAIASTVTDPSDFKSGRDFAAWIGLVPRQHSTGGKQRLGGISKQGDRYLRRLLVVGATAVVRHARQHPQKHPWVMRLLAKKPAKLVAVAVANKMARIAWAIMAKGGYYRAPELAAAA

SEQ ID NO: 374633 - protein, 384 aa, unidentified
MKKDITEKTKRANKGAKALTKSKRKQIREKAAEQRLTIGLDLGDRTSRYCILDAAGEVVSEGQLPTSKTGLNSLFEKMPCSRVALEVGTHSPWVSRHLSGLGHEVIVANPRRVKLITQSVRKNDRIDARQLARLARVDPKLLSPIRHRGEQAQADLAVIRARAELMEARTALINSARGLVKPFGERLKKCDADQVEQALAAPLSQKAQAVIGPLLKSVEAISKQLRVYDQKIAEIAERYPEVELLTQVYGVGRLIALTFLLTIEDPGRFGRSREVGPFLGLQPRQRESGESQPQLGISKTGDRLMRSLLVQAAHCMLHKRAPDSDLRAWGLAKMGQGGKNAKRRALVGVARKLCVLLHRLWVTAEVYDPLYNRKAAQARPATAA

SEQ ID NO: 374634 - protein, 337 aa, unidentified
MHKQPRKDKTETVLYCGIDVSARELAVAVDAGGVWQHLVVANTAAGHRQLLERLTRPGQAVHVCLEASGTYSLDVALALSGRAQVKLSVVNPRRVRRFAESLGERSKTDPVDARVLAEYARRLQPEPWQPPSRGALALRGITRAIQALVHMSTQQQNRQHAAGASRALPRLVVAELARHENYLAKRIRRLRQAALRLVQADPELRRCYQHLLSVPGIAEASGLAILGELVTLPATLDARQWVAHSGLDPQHFHSGSSVHRPPRISRAGNHRLRAALYMPALVAVQHDPHLAAFYSRLLARGKAKLAALTAVMRKLLHGIHAMFHLDQDYCGDKLCSA

SEQ ID NO: 374635 - protein, 387 aa, unidentified
MGHVVIGMDPHKRSATIEIIDDRQKVLFAGRFGTDRDGYKAMLAAGRKFSDRIWAVEGCNGIGRHIAQRLVADGEPVVDVPAKLSARARVFSTGQGRKTDPVDAHSVALAGLHSTGLRVITADDATVALRLLADRRDELGVARAQAVNRLHRLLLELFPGGAKKFLSAAQAKELLATIRPRDIAGKTRRRLAAELITELTRADKRIKTADAELKALVAATGSSLLQLHGIGPSSAARLLGDVGDIARFADKGRFASWNGTAPLEASSGDQVRHRLSRAGNRRINRVLHIMAIVALRNDTEGRAYYRRKLATGKTTMEAMRCLKRRLSDIACQQMRADAKRLATGPGGHAGATLQSSAADPIPTVSTSEQSLPGPASHEPRTLFLSAS

SEQ ID NO: 374636 - protein, 335 aa, unidentified
MKNYLFYVGIDISKSKLDVVILQKDTSLVSNHFIVENNVKGIKVILKNLIKQKIDLTTVLFCCENTGVYTSVLSSCLSENNLDYWVVPAIEIKRSKGISRGKNDKSDAKDIALYSIRNIDKLKLSTLPEKVIQQLKLLNTEREKVMKSYKLFEATKENIDFMPKEVYKSIATINNKTVKFLKATLKSIEKEMIELISNNIDLKNQFELIKSVPGIGDKTAIYMLIATRGFSAFDNARKFACYSGTAPFEYSSGSSIKGRTKVNHMADKKMKSILQMCALVAVKHDPQLKEYYERKKDDGKNAMLVLNNVKCKIIGRVFSVIKRQTPYINTYKFAS

SEQ ID NO: 374637 - protein, 392 aa, unidentified
MQAAADRAEAPTAIQTDLRAIFVSLELSRSTWLITSLSPSGGEKMSKHSVPAGDIAGLLRRFAQLKEKARARTGRDFPIIVIQETGLDGFWIHRMLQSEGIESHVVDAASILTSRRGRRAKTDRIDGETLVRTLMAFKRGEPRVCSMARAPTPQEEDRRRVCRERRTLVGERVTHVNRIKGLLFAQGVFGYQPLRKGRREQLEELRTGDGRPLPVHLMAQIVRELDRLEVVLEQLKTVEAERNALLKPATGAAASPPAMLLELKGIGPETAAVLWSEGLFRQFDNRRQVAAYAGLAPTPWQSGSIDHEQGVSKAGNPRLRTTMVELAWLWLQNQPASALSLWFHERVRRLGGRMRKTTVVALARKLLIALWRYTTAGVVIEGAVMKSAPATI

SEQ ID NO: 374638 - protein, 347 aa, unidentified
MDHYAGIDVSLEASSICVVDGAGKIVREAKVASEPEALIRWFASLRLDVMRIGLEAGPLSQWLYAAMKQAGLAVELLETRHVQIALKTMPVKTDRNDARGIAQLMRLGWFRPVHCKSMAAQETRALLTARKLVQSKLYDIEMSLRGLLRGFGLKVGPTTPKRFARRIAELVAGHATLELIAKALLAAHAALLREFGVFEKRVRAMARADKRARLMMSAPGVGAIVALTYVSAIDDPSRFSSSKRVGPHFGLTPKKYQSGEKDVTGRITKIGDAGVRTALFEAANVILTRPVRGGGLKSWAMKLAGRAGMKKAKVALARKLAVILHRMWVDGTAFDARRAACAAPAAA

SEQ ID NO: 374639 - protein, 332 aa, unidentified
MVAGTHGSLNKAGSTKMTQISTTAGIDTSKAKLDIAVHGRIEHWQVENALVGWRRLVAALTGAEVTRVGIEASGGYECGVVDYLRHKGFIVLVLQPTQVKAYARMCLRRAKNDKIDAVLIAACAAMIDQARIDPDHRLAKLAQRLTFVEQIEEDIARFKVRLEHVGDRRHRRMVVTDIARLKARREAELARIVTALRAHDDLAHRLDLVLSVPGIGERTAIALIVRMPELGRVSREQAAALAGLAPFDDDSGKHRGERHIAGGRSRLRRSLFAAALPAAFRWNKALIELYSRLTKRGKAHNEALIACARKLLIYANTVVQRGTPWTERPAAA

SEQ ID NO: 374640 - protein, 385 aa, unidentified
MSQFSGSPQAAIDYNSTIIGALELSEKKWVLAVQLPGVDRHSRHVLDGGGETLASFVERLKVRCVSAGRKIARVILTHEAGRDGFWLARFLARRGIEVHVMQPSSLPVDRRARRAKTDMIDVEMLLRTLMAWLRGEPRVCSMVPIPSEADEEARRAHREREDLTRERRSIVNKIDGILATLGVKGYKALRRDRREQLNYARQPGGDPIPQKARARIERLLDRLDLVLKLIDQVESARDAVLKKDAPADEAEEMIRSLTELRSIGPDVATLLVREAFVRQFRNRRALAGYVGLGGTPFSSGGSEREQGIGKDGNRRVRAAMVELAWMWLRWQPDSALSVWFRARVGAMGGRIRKIMIVALARKLLVALWRYVNDGVVPDGAKLKVA

SEQ ID NO: 374641 - protein, 401 aa, unidentified
MNPVIGLDVSKGESQVQAFLDKGKPYRKSFSIKHNTDGLGSLLEFLHEVESSAGGHQPTVVLESTGHYHFPVIQFLEEQSFVYIVVNPLISHRAKSSSLRKVKTDAIDAYHLCELFYKEELEPYKKRGIQLLNLRNLTRQQESIAEVSAQTKIQLHTLLDQVFPEYRGVFGSLYSKVSLLTLLAFPTSEVVLSVSEREITEKIASLCMSRSDAWANEKAKKLREAALRNPFQNKLYQSNIFNLELLVKIVLQYQEHLSKIAVEIDALAKEIEEYYIHQSIPGIGEKIAATIISEIGEIDRFNDAKKLVAFAGVDPSVCSSGKFTASVNRITKRCSSRLRHALYMAVQSGIRDARKKKTTGEIIARNKKLREFYDKKREEGKPFRVQLLHVLISSYIGFLPY

SEQ ID NO: 374642 - protein, 340 aa, unidentified
MKIIGCDLHAAQQTIAMLDGETGEIVEKTLKHEAGTVREFYAALSAPVVVGLEATGSMGWFLQLLDELGITYRVGHPATIRKAETRKQKHDRRDAALLLQLLTENRFPAIWIPSTELRDLRALLMHRHQWVRLRTRVQNALHAIALGYGVQRGHALWNRDGQAMLAGLPLPPHAAHRRDELRALYQQLDEHVDRLDDRVQHVAGQRPRATELMTHPGVGHVTALATEVFLGDPSRFADGKALASYVGMIPSEYSSGRRQRLGGLSKQGNPLLRFLWGEAAMHAVRRDPELQRFYRRKLQQKGLGKARVAAARKLGIRLWIMLRDQINYDEFCRRSPRRQS

SEQ ID NO: 374643 - protein, 316 aa, unidentified
MATRSSVFVGVDISKKSLELATHNGNSLQNFSNDDKGIPQLVYLLLEIKPVLVVVEATGGYEQALVHALHQASIPVAVVFPKLIKNFARARGLIAKTDKLDARNIALFGFSINPRPTPTVSSPRDRLATLVDRRRQIVNMIKVEKNRLKMTSPDMQPSFLDHLEWLQEEEDHLSSEIWMLIENQPEMKAKSEIVQSATGIGVVTASTLVAELSELGALDRKKISALVGVAPLNNDSGNKHGKRKIHGGRRDVRSALFMATLVAVQYNPVIKSFYERLLARNKEKKVALIACMRKMITILNAMVRDNQPFRYQASMT

SEQ ID NO: 374644 - protein, 343 aa, unidentified
MDVEVLGIDLGKNSCSVVGLDPTGRVVLRRRMRRESIVALAAKLSGCVVAMEACCGAHHLGRLLAAQGHEVRLMSPEYVRPYVKAQKNDDRDAEAIAEAATRPTMRFVALKSEAQLDVQVLHRVRDRLVGHRTALMNQVRSILLERGIVVPQGRRRLLDALQALSDQPDGSGVGPRVRLLLDDMLDQWRGLDRRISALDDEFAAMARNDPAARRLATIPGVGVLNATALVAAIGDGRTFSRGRDLSAWLGLVPRQASTGGRPKLLGITKRGSKYLRKLIIQGARAALPGLSRMTTPLGSWLRGLLGRAHGNTVVVALASKLVRIAWALLRKETAFAAGGFAAA

SEQ ID NO: 374645 - protein, 371 aa, unidentified
MDESSKTLYVGLDVHKDSIAVAYAPEDRGAEVVSLGAIGTRQSDIDKLIRRLESKSATLVFVYEAGPCGYWLYRYLTGKSLACHVVAPSLIPRKAGDRVKTDRRDAITLARLMRSGDLSSIYVPGIEDEALRDLSRGRDDAMQDLKRSKRRLKSFLLRQDIRYEGRANWNAAHLRWLSEVVCPTPPQQIVFQEYVRAVTEQQERVQRVERELHEAVKPWRLYPVVEAIQALRGVELTGAVILMAELGDITRFESPRQLMSYLGLTPSEYSSGARRRQGGITKAGNSHARRALVEGAWAYRYPAKVSRHLQLRLEKLPAEVQAIGWKAQVRLCRRYRQLTARGKHVNQVVVAIAREMAAFAWAIARLVPLAS

SEQ ID NO: 374646 - protein, 362 aa, unidentified
MEFFSGLDVSMERTAICVVDDKGEVQMQTEVVTDPDAIAAALKPFLPRLRRAGHEAGSLSPWLQPELVKRGLPAVCLETGHVRAAMSAQRNKTDATDALALAHIVRTGWFRQAHIKAESCYRLRLLLTQRRNLKRKVLDLENTIRHSLKAFGIRIKGTGRTGFDAAVREAVADDALTSELMDAMLAARAMLWKQYRRLHDLVVKFVARHELCRRFMAIPGVGPVTALSFVTAIDDPSRFRRSRDVAAYFGLTSRRWQSGTSIDVQGRISKAGDGDVRRALYEAASALMTRFKGRDKVQTWGLALARRSCHRKATVAVARKLAVIMHAMWVDGSFYVGDAGTSDADVAARAAVKDRRLLGAHA

SEQ ID NO: 374647 - protein, 316 aa, unidentified
MVGIDVASAHVDVAAIGAALPAALSHVGNDADGHSVPADGLARLKPELVLMEATGGYEAALACALQAAGLRVAVVNPRMARDFARAMQRLAKTDRIDAATLAEFAGVLARRPDCERFIRPLREPEQQDLAALVTRRRQLVSMQLSERQRLRLARPVARPSIEALLEAIARQLDDVEAEMARHVEQHYAQMTKLLQSVAGIGRVAAATLIAELPELGRLNRRQICALVGVAPYAKDSGASRGRRRIGGGRFEVRRALYMATLAATRYNAPIRAFYQRLVAAGKLKKVALIACMRKLITHLNAIARDHLKDQDRPTIA

SEQ ID NO: 374648 - protein, 377 aa, unidentified
MHSENIAAYVGLDVHKETLAVAIAAPERLGEVRYYGTINNEAQAVRRLFQKLQGLYGNILSCYEAGPCGFGLYYQLTAMNIKCQVIAPSRIPKSPTDRIKNDHRDAISLARLLRAGELTPVWIPDLTHEAMRDLIRARAAAKRDSRVARQRILSMLLRTDKHYAGKHWTGKHRTWLANQSFSQPSQQIAFQHYCQSLEQIEDRILQLDQEISRLLPEWSLCNLVCQLQALKGVGQLIAITLVAELGDFSRFSNPKQLMAFLGLVPGEYSSGNSIRPRGITKVGNSELRRLLYEAAWSYRTPAKVGAWLIYYRPDSVTQYSKDIAWKAQQRLCSRYRSLTAKGKKSQVAITAVARELTGFMWDIALAAQSSFSQQKQN

SEQ ID NO: 374649 - protein, 341 aa, unidentified
MSESALIGIDLGKHTFHLHGQDKSGREVFRKKCSRAQMMQFFASSQSCVVAMEACAGSHCVARQLAAIGHTAKLISPQFVKPFVKGNKNDFVDAEAICEAASRPSMRFVTPKTESQQALSVLHRMRESLVHDRTKTANQMHGFLLEFGISLPKGLAIMKRLASVLAEHELPVRLTVLLQRLHDHFAYLDEQIKVLDKELAGQLADDDLGSRLLSMPCVGPITASLLAVEMGDGKQYRCSRDFAASVGLVPRQYSTGGKANLLGISKRGDKHLRQLLVQCSRVYMQNLEHQKGALADWVRSLLSRRHSNVVACALANKLARIAWAIAAHHTQYEAGPDALSA

SEQ ID NO: 374650 - protein, 386 aa, unidentified
MMNIVRPNLSIEVANQITCFMAIELSKTSWVVGMLTPLSNKISLRSIPCGAVEKLMAIVDQTTNRVIQATGGPVQVVSCYEAGYDGFWLHRFLAAHRIINHVLDAASLLVNRKARRAKTDRLDAEKLVRVLMAYWRGEPKVCSIVRPPSVEDEDAKRLHRERQFLMKERVQHIGRIKGLLAAQGVYDFRPERKDWRNRLAEIRTGDGRPLPSRLKAEIDRQCQRLALVDTMLKEIDQQRDAAVESKSAPSETVVRIQRLTHLKGIGPQIATVLGTEIFYREFANRRSLGSYLGLTPSPFKSGGMDRDLGISKAGNPRGRTTMIELAWLWLRYQPGSKLARWFEQRTNGLKGRVRRIAIVAVAHKLAIALWRYVETGLIPADAELKA

SEQ ID NO: 374651 - protein, 348 aa, unidentified
MALTIVETRAVTGGVDTHADVHVGAALDPIGGLLGVGEFPATPAGYAGLLGWLRGFGTVCLVGIEGTGSYGAGLARHMATAGVRVVEVDRSDRQDRRRQGKSDPLDAVSAARAAQSGRARGAPKGRDGQVEAIRALMVAKRTARSERTQTINQARALVLTGPDDLRTRFSRHTPAGLVAQLAALRPRPGDVVGYATRISLRELGRRAQFLDSQLERLDELIVPLVTARAPGLLALHGVGPDTAALLLIAAGDHPGRLRSEAAWAHLCAAAPIPASSGKVTRHRLNPGGDRQANHALWRIVITRMGSHPPTRAYVERRSAEGLSKTEIIRCLKRYAAREVYPHLRPGAG

SEQ ID NO: 374652 - protein, 412 aa, unidentified
MEGETVIAGVDTHKDVHVLCLLDGLGRKIRSGSFGADPEGYDRLAEAIGDPGSCAVVGVEGTASYGAGLTRRLVELGYNVVEVLRPKRDKARPGEGKSDPLDAERAARKAASGRGCSVPKSQDGWVEAVRQLYVARRLAVATSTSCVACAKSMLTTAPSALRERFRGRERPKDLMPLLARGRKAGDALEESVLASLRSVAAVWKEARSQVESCDERIRALLEANAPALLGVEGCGTTTAAALVVAAGDNPGRLKGEAAFSMLCGASPIPASSGKTERHRLNRGGNRQANWALYEIAIKRMAYDERTRRYVARRTSEGKSRREAVRCLKRYIAREVYRVLMDPNPDGAAPEGPELAKMRKAMRVTQKQAAEGLGLSAATLGHLEHGRRRSTKLERRYYELLCELKGALPQTAS

SEQ ID NO: 374653 - protein, 358 aa, unidentified
MEQISKKLRDFSGQNLYVGMDVHHKSWKIHIYSDEFELKSLSQEPGVERLSNYLHNHYPGANYLLAYEAGFCGFWIQRSFAAKGINCKVVHAADVPTNNKEHLRKTDKVDSKKIAKGLKNGDLNFVHVPDIDLELDRQLLRSRENLIKDSTRIKNRVKAILKLHGIEVPETYKEGTWSRAFVQWLQQIDFKSSSGKLAMQTQIDEFLFLQGKKKSIDAAIKALSQTGRYSTNIKLLQTVPSVGLLTAMTLLTEIGDINRFKRLDELCSYCGIVPNCHDSGETEHKGGLSRRGNSTLKRILIECAWVAVRKDPALLLYYKQQITHLQGQKAIIKVARKLLSRIRYVLINQKEYVTGIIE

SEQ ID NO: 374654 - protein, 430 aa, unidentified
MKSNTQNTKIEAVTENTLVVGIDVGSEFHYARAFDWRGIEFSKKPFKFSNTEPGFTEFKAWILHIQTEHDKDAVVPGMEPTGHYWFNLGKFLQDNGMKPVLVNPHHVKKSKELDDNNPTKNDRKDPKVIAGLIKDGRYSYPYLPDGVYADLRTASNLRFQMQSELTRIQNRISRWFSIYFPEYKDVYGNPDAKSGMMILKVAPLPEDIVTLGVEGVNRIWREAKLKGVGLKRAKTLFEAAEHSIGSREGATAARPEIRMLLEDYESRTARLDEIMTLIESLIKQIPMAEKLMEIKGVGIKTVSGFLAEVGDISRFDNPKQLQKLAGLAIRENSSGKHKGETTISKRGRKRLRYLLFEVAMSLVARNEEFAQLHHYYTTRRINPLKKMQSLMAVACKLIRIFYAMLTKQVDYDPQKMISDIRRPEIYLQAA

SEQ ID NO: 374655 - protein, 343 aa, unidentified
MYNAVGIDVSKGKSTVAVLQPGGTVIRKTFDVSHTSQNLNELADYLSSLDGTTKIVMECTGRYHEPMVKALSEAGLFISIVNPHLIKNFGNNSLRKVKSDPADARKIARYTLDNWTELRQYSGMDNTRTQLKTLNSQFSFFMKQKVAAKANLIALLDNTYPGVNKLFDSPTREDGSEKWVDYAYSFWHADCVRKIGLKAFTERYMSFCKKHHYIFQQDRPEKLFNASKELVAVFPKEKTYKLLIQQSIQQLNLASEHVERFRREMNELASTLPEYSTVMGIYGVGKTYGPQLIAEIGDVSRFTHREALTAFAGVGSGVDESGQHKSKSNRASKVGSARHCFRS

SEQ ID NO: 374656 - protein, 334 aa, unidentified
MENIALIGIDLGKNSFHIHCQDRRGKAVYRKKFTRPKLIEFLATCPATTIAMEACGGSHFMARKLEELGHSPKLISPQFVRPFVKSNKNDFVDAEAICEAASRPSMRFVQPRTESQQAMRALHRVRESLVQDKVKTTNQMHAFLLEFGISVPRGAAVISRLSTILEDNSLPLYLSQLLLKLQQHYHYLVEQIKDLESQLKRKLDEDEVGQRLLSIPCVGTLTASTISTEIGDGKQYDSSRDFAAATGLVPRQYSTGGRTTLLGISKRGNKKIRTLLVQCARVFIQKLEHQSGKLADWVRDLLCRKSNFVVTCALANKLARIAWALTARQQTYVA

SEQ ID NO: 374657 - protein, 344 aa, unidentified
MNYVGIDHHRQYSHITWLDEKGEVVKSGRVANLRRELEEFLQGVRDVKAVIEAGRSSYTMVDVLADLGIETTVAHPKDVKAIAKAKVKTDERDSYKLAHLLRTGYIPEVQKRSRENRSSQRVLRQRAFYVGKQTAVKNRLRALLAQQGEEIRLEVERVENLFTEKGMKVLKGLALPEREAKMVGALLRTYHHLEERINETNGLVKELYEKTPSAQLIQTVPGFGIFLAVLVAVEIEDLGRFEDVSKLHAYAGVIPSTHSSGERSYHGKIIKEGNRWLRWAAVEAVWPALRADFDIRCFYDRLKKRKGANSAKVATARRLLTIIYRRCTAFPAFSLESLAPFTKK

SEQ ID NO: 374658 - protein, 315 aa, unidentified
MSDVPCFVGIDVAKAQLDIAVRPSGERWAVPNDAGGVVMLVERLQALHPTLIVLEATGGLERAATAALATASLPVVVVNPRQARDFARATGQLAKTDALDARALAHFADVIRPTPRPLPDAQTQELRALLGRRQQLIIMRTAEQNRLAGTSERLTQDTTAHITWLNARIATLDDALETLLRASPLWRANDELLQSAKGIGPVCAHTLLLELPELGTLTRQQIAALVGVAPLNCDSGTLRGRRTIWGGRAHVRTVLYMGTLVATRFNPRIKAFYERLLAAGKVKKVALTACMHKLLTILNAMLKHRMPWQAQEVQS

SEQ ID NO: 374659 - protein, 334 aa, unidentified
MLLNSNPKRVALPQMTIIGFDVSKKELVGVRTDKSTLVRDKITINNNSESIQTFIEEAKNKYPHLLVASEATADYHRSLAEHCLKLNIPFRLINPILTKQFTRATIRKKKTDLTDAWIIAKLALQGEGTLLNVKSLDPLKSVNRTAFKIQRLVGMLSAIYQRFERVFPEDKDMLEELAKPLPLLKAAVKNIRWRVSEQADQTIKKLLVSIPGIGPTIANTLIAEIGDINRFSSGKSLVAYAGLDPKVKQSGVSLKHNTKITKRGSPYLRKSVYISAYIAKRHDPELKEYFDKKISEGKRYKEATVATARKILYRVYAVWKRGTPYIKYPQKMLT

SEQ ID NO: 374660 - protein, 351 aa, unidentified
MIHLGIDHHKKYCHVVALKDSGEIVWEGQVNSDREAFQELKSLLPAGEPVQSVLEAGRNWGVLYDALEELELHPKLANPLKVRRIAESFVKTDKIDATVHATLLKAGMTPAVHVPSKEVREQRNLVRQRTWLVRMQTALKNRIHMLLDRHQFVPPVKSDLFGLMGRAWLKTVSLGTPDQWLLEQDLALLDILKAQIRQAERWIDQTLQSHPYFWILQSLPGIGPTLAPLIALEVDTIERFAGVHKFVAYCGLAPSTYSSGGKTFHGKLIPTCNRQLRYAFVEAAWGAVRSSIYFSTFFKRLKYRKGPQIAIGAVARKLCEITYFCLKNKRVYREKIYCFHAGRPGEGLARR

SEQ ID NO: 374661 - protein, 486 aa, unidentified
MNSIVLTANVQPNLDVNYIGMDVHSDNVVVCVRRNTINSSGQLVGKTIKTKKVVIKNSQEPLVELLSKYADGQQHIMTAESTFNWYWLADIAEDHGWNFRLADPCTVSQANIKAANDETDAEYLADRLRTGSLKSTSVLPRQLRGVRDLMRHRLRVMQEVSDKKVRLSNLYHNHCAHPMHGKLLAALQDAYDEINIDAVLESGICNNGSELIIGDLLTGLREAETRLAKIEAAVYGRIDEIDSYKAERMLLKTSMKGCGDVLSAIIVTEIGDISRFRTMGDFVSYCRLAPTSKLSNGKSKGQGNAKNGNAYLSWALTELATLMARFNEPIRQYLERKQEKTGLRVVAVRALAAKLARCVYQVLRKKESFDLGLAFGSKPTHGQMTAAAEAAQTPPEPALPPVPAVAGEHHCPAEESDAPIVVKEPVPVKSKRSTRKKAVSAASSEPAVAAEGRQTARKADRVKARCALTATPPSCAGTSCVKSRRE

SEQ ID NO: 374662 - protein, 371 aa, unidentified
MKSIIYIGMDVHKKTYSLCALLKETGEIIGETKIPADVSLIIKFIENAKKSVDSDDVQIKTGYEAGCLGYSLYWQLAEKGIECDILAPSTMHRSAKNKVVKNDRRDAKNIAANLANGTYKSVYVPTDEDVEIKEYIRMMHDFKIELKKVKQHINAFLLRFGHQYPGKSKWVPAHIKWLKELELSDMHREILDEYLSQLEILSEKIERFKHRLEELSQKETYNEKIGQLRCIKGIDTTAAMTMHAETSDFDRFPTANAFASYCGLTPGEDSSGESYHRLSITKQGNSMIRTTLIEAAQVLVRGTIGKKGKKVKSKQKDQDVKVIDYADKAVIRLQKKYHRMIFRGVKRNIAITAVARELACFVWGIETGHIS

SEQ ID NO: 374663 - protein, 372 aa, unidentified
MEKATSVECAAGVREVVVGVDTHLDVHVAVALDELGRRLGELTVPTTTRGYEKLLMWAKSFGCVGCVGIEGTSSYGAGLTRHLGAAGISVVEVERPKRRHRHASGKSDPLDAEAAARAVLAGEAIGEPKTGDGRVEMIRALRSARRSAVKARSQAANQLQSLLVTAPEELRRGLRGLKAKELAAVAARFRMGSDPADLQAAIKFALRSLARRYEALSEEIAQLERQLGRLVAEVAPGLISLPAIGTNHAATLLVVAGENPERLGCEASFASVCGVSPIEASSGKVVRHRLNRGGNREANCALHMICVVRMGSDKRTREYVRRRTAEGKSKWEIMRCLKRYIAREVYRVLVPPTASRVPIRTVPHDVLTKDIT

SEQ ID NO: 374664 - protein, 337 aa, unidentified
MMYSGIDLHSNNSVVAVIDEADRIVAQKRLPNDITKIVGFLARWQDDLAGVVVESTYNWYWLVDGLQDAGLHVHLANTAAIKQYEGLKHSGDETDAQHLAHLLRLGILPTGTILPREHRVVRDLARKRMQLVNCRTTHVLAVENIMSRQLGERMTSNQIKRLTDDAIDSLPLAADVGLAIKANVAVIATLQSQIEVLEKRLQERVKPRPQYGLLTSVPGIGQTLATVIFLETGPIDRFADVGNFASYARCVDSVHTSNRKKKGEGNVKNGNKYLSWAFVEAANFAKRFCPEAKRFHERKKARTNNIVATKALAHKLARASYHILKEGKPFDVARCFA

SEQ ID NO: 374665 - protein, 368 aa, unidentified
MVVVGVDAHKATHTMVAVNHVGAKLGQKTVAARTAGHRQALSWAHSAFGADITWAVEDVRTVSRLLEQDLMDAGQKVVRVPTWLMARVRGTGRQSSGKSDPIDALAVARSVLQEVELPIAQHDDESRECKLLADHRDRVVSQRTGALNRLLWFMHELNPDHDLTARRLYTGRNRDTLSVWLAQQSGPVARLAREELADVARLTDIARQYESDLASIAEKVAPSLLEVPGCGPLLAARIVGVTANVSRFRDESAFARFAGVGPKPNWSGSTYGRARPFLGGNRQLNAALHHIAMVQIRDGHTGERYFRKRIEEGDSAAKARRCLKRKLARVVFTRLRTDYFARHPREAALSCPSKASDTSRRNAFRSDS

SEQ ID NO: 374666 - protein, 371 aa, unidentified
MKSIIYIGMDVHKKTYSLCALLKETGEIIGETKIPADVSLIIKFIENAKKSVDSDDVQIKTGYEAGCLGYSLYWQLAEKGIECDILAPSTMHRSAKNKVVKNDRRDAKNIATNLANGTYKSVYVPTDEDVEIKEYIRMMHDFKIELKKVKQHINAFLLRFGHQYPGKSKWIPAHIKWLKELELSDMYREILDEYLSQLEILTEKIERFKYRLEELSQKETYNEKIGQLRCIKGIDTTAAMTMHAETSDFDRFPTANAFASYCGLTPGEDSSGESYHRLSITKQGNSMIRTTLIEAAQVLVRGTIGKKGKKVKSKQKDQDVKVIDYADKAVIRLQKKYHRMIFRGVKRNVAITAVARELACFVWGIETGHIS

SEQ ID NO: 374667 - protein, 346 aa, unidentified
MRQVGVIGLDLAKQNFQVHGAAADGTVAFNRKLRRGDVLRFFEKTPPCLVAMEACGGSHYWAREIRAYGHDVRLIPPVYVKPFVKRGKTDAADAEAISEAASRKTMRFVPIKSAEQQASAMILKVRALLVRQQTQAINALRAHLSELGLVAAGGMAKVAALIEIVRDESDSRLPKAARFALSELATQIEALTRQIAKIEREIVAEAKRDEDMRRLTTIPGVGAITAASVKAFVPDPAGFVSGRHFAAWLGLTPKPHSSGGKERQVGISKMGNAMLRSLLVLGASAVLRHSKNKAEGPQWIAAMLARRPFKIVAVALANKMARILWALLTKGGVYRKARPDEGLARA

SEQ ID NO: 374668 - protein, 360 aa, unidentified
MTEQSNCTESPRLWIGLDVSKKTFTAAAKLPWEEKAIYPTDCDEFENNRTGTRRFCKWLGELEKEFEGPFGVAMEATGPYSFRLYDNLKKIRPELHVSICNPLSVSYYMRSIGPNKTDRADAAAIACFAAHRRPARYAEPSADQSELRRLTRDRTFLVDSRTEYQNRIETERDASSRRRMKTVVAAIDRQIDDIDAEIEKYLSAKASSDCRQEIELMRTVPGVGRFSATVIYGELGSLANYTRKQLSAMSGICPTTQQSGTSLHKGGLSRRGSRWLRRILYLDTRQTILKSPAMGEFHERMLKKPDSSKKGARCACMRKLLLILRGIVVSKKTYDPNHISVRPALPDKNAEKTEKSEMHA

SEQ ID NO: 374669 - protein, 414 aa, unidentified
MIDERRWYAGVDWASESHHVFLTDENGRRIGEKIFRHSGEGLAEMAVWLSSTSGGVPAQIHIAIEVPHGPVVETLIERGFKVHAINPKQMDRFRDRFTLAGAKDDSRDAEVMASALRTDLRCFRPLAVADPVVIELREWSRIADDLGAERNRLTNRMREQLWRYFPAMLDLESDLGAEWLLDLWEIAPTPHKAIRVREATVAKVLKRNRIRRFDAAHVLDVLRKPPVQVAAGTTEAAAAHIKTLTARIRLVNHQLGEAHRQLDALTARLIPSEETGPGQRKQHDVEILASLPGVGRIVLATLLAEAFDALQRRDYAALRSLTGVAPVTKRSGKSCIVVRRQACHDRLANAMYHWARVAVQRDPRSRSKYAALRSRGHSHGRALRSIADRLLNVACAMLKTGTTFNPSLAAEKTP

SEQ ID NO: 374670 - protein, 368 aa, unidentified
MQAMNTAAYIGLDVHKETLAVAIASPERLGEVRYYGTINNQPQAVQRFFKKMSDIHGNIMACYEAGPCGYGLYNLLTSMNIECQVIAPSRIPKSPTDRIKNDHRDAVSLARLPRAGELTPVWVPDPTHEAMRDLVRARAAAKCDCRIAKQRIQSMLLRTGKRYDKKPWGYRHRVWLADQTFPLPSQQIAFQHYCQSLEQIENRIQQLDQAITRLLPEWSLYPLVCQLQALEGVGQTIALTLVAELGDFSRFANPKHIMAYLGLVPGEHSSGGSIRQRGITRVGNSELRRLLYEAAWSYRSNAKVGSWLSKYRPDDVTQEAKDISWKAQQRLCFRYRSLVAKGKKSQVAITAVARELTGFMWDIALSTH

SEQ ID NO: 374671 - protein, 320 aa, unidentified
MMAQDDRVVVGIDVAKDKVDACIRRFALRRTFPNTAQGHRQLVAWLRKHNVDKAVMEASGGYERDWAKVLRKAGSEVRIVDPKRVRSFALSAGRLAKNDAIDAEMIAWFAETFKQAPSQAHDAAHEELVALVKARKGLVELKTRLESQNQHAGPEPAQKAHARVLKSLSAEIARLQVAISATIKAIPDLAERAEIIESVPGFAQTTSANLIAGMPELGRVSDDIAAALIGVAPYDDDSGHRRGERHIRGGRRWVRNAIFMPCLGAATQNNPVLKAFYQRLIAKGKEPKVALVACMRKLIIILNTLIARRQKWDPGRYLLS

SEQ ID NO: 374672 - protein, 483 aa, unidentified
MKNKQPEKTEEAPCRPTQGHWHEMNRKQRREMMRKIQSDDLRLEVVHPDAAGIDIGNESHYVAVPPTRDSESVRRFGCTTAELKEMADWLKQCGIRTVAMQSTGVYWIAVYDILEEAGLEVYLVNARETKNLPGRKSDVQESQWLMKLHTYGLLRNSFRPSQEIRTLRTYWRQRNDLVRAAGRHIQRIQKAMTQMNLQLANVLSDVSGMTGQAIIKAILGGERDPQKLAEFRDSRVKASKEEIARSLEGHWQEDLLFVLQQEQSGYEFCQKQMAECDQRIEQYLKQREDRSAGDNLPEEKRKERLRKKKKGNAPQFDLRAELFRMTGADLTQIDGVDVMTAMSILSEVGWDMTKWKTEHHFVSWLRLCPDNKISGDKIIGKGRLPTNNRATSALRMAASTLRLSNTYLGAQFRRLRTRLGAPIAIKAMAAKLARLVYRVLRYGMQFVDKGAEFYEAQHRTLQINYLKWRAAKMGLQIIEAPAA

SEQ ID NO: 374673 - protein, 356 aa, unidentified
MKQVKTLSFAGQDIYCGIDVHKKDWSVCIRDDERELRSFSQPPQPAVLTDFLGRNYPHANFHAVYEAGFCGYWIQQALSHQGIDCIVTHAADVPTSDKDRRQKTDAVDCRKLAKELSEGSLKGIYIPSRQIIEDRSLVRGREQLVQDQTRYKNRILSWLHFFGIIIPEGYKKNTHFSRRFISWLEQLQLNESTKLALQVKLGGLQCIRQQLLLANRNLRKLALSDRYQKQVELLRSIPGIGITNAMIFLTELDNIARFETFDHLCSYAGLKPDIYSSSDTIIIKGITHRCNSLVRESLVESAWKAVAKDPALLMAYKQYKKRMNYNNAIIRITKKLLSRIRYVLLHQTCYVTGVVG

SEQ ID NO: 374674 - protein, 348 aa, unidentified
MLVLGMDVGKRELYACLQQGSTSSPAILGRRGPVANTAGGWAQLTTWVEKQAKGDTVHMVMGATNVYWERPAHHFHFRRVSFQVSVVTPAQIKCFALLVLRRGKTAAMDAEIIAWYGLVMQSAVWTPLAQVRTELKQLTRERETVLARRTQENNHLIALKDMEHASLLALSLPQGRLELLQRQVDEIEAALNVLVQQDAHLAQQLKLLLSVPGFALILAITAIAETEGFAQLTTGKEISAAVGMVPAPQQSGACQGRGRIFKTGNARLRRMAYLSALGASKSHSRLRTYDRSLRETGKPAKVALIALVRKRLCTELAVVRSGKPYDDAFLRPHGGAGPTSPQDLTPAR

SEQ ID NO: 374675 - protein, 356 aa, unidentified
MTEITTVGVDLAKEVIVVCGADAHGRVVFRKQLSFAGFAAWAANLPPCVVGMEACSSAHHWARYLAQRGHDARLMAAEFVAPFRMSRGAKNDRNDAEAIMVALRQPTMRFVAIKCVDQQAMLSWHRARSGFMEERKSLLNRTRGLLSEFGIWIGRSSAVLVRKLPELMDEPALPDLFKPILLHTLEHLRQLDQRIDECDARIGTHARDSEAAQRIQKISGVGVITASALVASIASPSDFRNGRQMAAWSGLVPRQSSSGGKTRLGTITKRGDSYLRGLLRLGARSTLQVALKREPQKRSRLEQWIVALRGRVGYHKTVVAIANKHMRMIWAILAKGEAYDPDAWRRYQQQKADVSA

SEQ ID NO: 374676 - protein, 353 aa, unidentified
MVYLGVDLHRKVSQVVALDTDGNVILSRRFGNERAAFQRVFGELEPEPIEVAFEATYGWSWFADLLADAGIPAHMAHPLATKAIGSGRVKNDAVDAKTLAHLLRTNLLPEAWIAPVEVREARRLVRMRVSLVRMRSRLKAQVHAICADLGMPIPVSDLFGREGRELLGGLALRPISAGRLAASLRLIDQIGVEILAADRELARLFRGDDRIRRLRPIPGIGFLSAATIVAEIGDHTRFGSPEQLTSWAGLTPTERSSADHTRRGHISKQGSRWLRWAMVEAATLHAPRDPALRRFFSPIEERRGTKIARVALARRLLTLVFYALRDPDGCRAYPPLRRPSRSTTARSPFGMAS

SEQ ID NO: 374677 - protein, 359 aa, unidentified
MNEITRVGVDLAKRIIQVLAVNAAGLRVTGRALSRDKFLAWCARLPAGCLVAMEASSGAHHWARKLIAMGLDARIIAAHLVTPYRLQGKGGKNDANDAAAICEAASRPQMNYVPAKSVEQQSMLCVHRLREGYKTDRTACINRIRGLLAEFGLVFAQKPAVLRQALPDVIEDASNELGGLARLALQRALENWKELDKHLEWCDERIAAHLKTDAQVRQAEQLMGVGPVTASAVVATVGDFRQFKDGAQFGAWLGLTPRQNSSGGKNNLGRITKRGDMYLRMLLVQGAKSAVMTAHKRDDPISRWVHQLREKSGWQKAAVALANKNARILWAVFVRGKAFDTRHVSVKPAAPVVADCALA

SEQ ID NO: 374678 - protein, 431 aa, unidentified
MSIITVGIDLAKNVFAVHGVDDNGKPALVKPKVSREHLLPLIAQLPPCLIGMEACSGAHHWARLFRQHGHTVRLMAPKFVIPYRLSGKRGKNDAADAAAICEAVTRPQMRFVPVKEEHQQIILALHRTRTGFVEERTATYNRLRGLIAEVGIVCPQKITALRRALMDHLEDLPGYLNRCVGDLLAHADSLDVRIAEYDRIIRDAAREDARSRRLMDLPGIGPNTASALLASIGGGHDFKNGRQVAAWIGLTPGQYSSGGTTRLGRITKAGDRYLRSLLVMGAKAILSGLGRSRTASAAGREAWSSVAATGRRWWRLPRRMRGWPGRCCGSARSSACARRTPERAMPKTVFRKRKGAVCAGGRRHEFTHALHALMGSGLDPRRERLIISRGRSHSRPTIEAPARVFHQGPGDMPNMTGCSFAVRHLLHRSAP

SEQ ID NO: 374679 - protein, 319 aa, unidentified
MAQNGLVVAGIDIAKDKADVSIRALSQRQTFPSTAAGRRQLISWLRKHKVTKAVMEASGGYERQWAKALRDAGIEVRIVDPKRVRSFAQSAGRLAKNDGIDSDTIAWFAEIFGEAPSQAHDAARETLQQMVNARRGLLDIRTMLSNKGEQDVPEPVQKSHARLLKTVAVELAKLEAAITALVKATPHFAKRAEIIESVPGLAATTAAGLIAAMPELGEVSNEAIAALLGVAPYDDDSGKRQGQRQIKGGRRKVRNLFYMASLGAATRHNSMLKTFYHRLIAKGKKAKVALVACMRKLIVILNTMIARGEKWDANRYPVS

SEQ ID NO: 374680 - protein, 344 aa, unidentified
MTYYAALDVSLRSVNICVIDNQGEFVAETKLDSEVTDIIAYLDDLGLEFVSVGLEAGTLCQYLTYGLQSAGFEVVCMEARQVKAALSAMRNKTDKNDARGIAQLLRSGWYSKVHIKSMASHRVRALLSSRKAVLSKCIDLENEIRGLFKVFGIKLPAKLGHGAFDAAVRDVIETDATLSESLLPLLDARLVLYHCFRELDNRTRKQAHADPVCQRLMSAPGVGFITALTDKAGVDDPSRFKRSRTVPAHFGLTPRRFQSGEIDIDGHISRCGDRDVRSTLYSAANALMTRSSKWSSLKAWGMQKAKTRGHRRAVIAVARKLAVILHRMWVDETQFQWAMEDARS

SEQ ID NO: 374681 - protein, 400 aa, unidentified
MLSIGIDVSKGKSTVCGMKPGGEIVYTPFEIQHTREGMSELVSLLRGSGEEVRAVLESTGSYHCPVVAALLENGIFVSVVNSLRMKRFCSQSIRKVKTDRIDAMQIALYGLAYWQELQPTRLPEDTYRELQLLARQYYQMTSMLIKAKVDFNALCDQVLPGMQELMSDHAGRHKLSDFVLRYRHTIHILEMGETRFRKDYCKWAEKKGYRNCERMAVHIFATAQNGIPVLPNAPSTQIVITEAIRVLHTVEASRDAILTQMQALAKTLPEYSLVREMPCIGDTLAPRLIAEIGDVRRFHSKRALIAYAGIDAPPYQSGKFCANNRHISKRGNRYLRKTGYEVMQSYVMHKPANDPIFMFIEKKRSEGKSGKLAMVAGLNKFLRVYYGKVTELYRSLPAIE

SEQ ID NO: 374682 - protein, 376 aa, unidentified
MNRVVYVGMDVHKDTYSLCAFDAQNQCFLSETTIKSEVVHVLKYVKSIENRFKDDDLAVVCGYEAGPTGFSLCRDLQKANVSCVVMAPSSLPKSPDNKRRKTDKIDARDLALHLAHHTYKAVNILSPELESIKELTRVRASATMAKKRAKQILLSFLLRKGMVYPFGGRAKYWTQKFDAWLRTLEFANPLDRYSFEEYLTEVNHQVGRVARLDEKITEIAETQLIDEDVRKLCCFSGISTYTAVSLISEVGDFHRFEKASHFANYLGLCPGVHSSGLSSQNLGITKAGNGNLRRLLIEATQSLGHSLICGKKSQRILARQKGMDPSIVAYTDRATDRVKRKRRAMIFRGVNVNKATTAAAREMACFIWGMMTNNVA

SEQ ID NO: 374683 - protein, 337 aa, unidentified
MKIANSKDGFQRLMEVVQRYGDPVHVAFEPTADYHRNLAYWLQNAGATCFLVSSLMSARAPELLFKTWDKNDRKDAQVILYLMRQNMMKPFYDPLVEGTMDIQELSNTYHQISLARTRCQHSLINHYLTLYFPEMERFYHASRSEWFCRFLCKFPTPQSITRYKIATFVKRAWVIVGRKVAKQRFLEEVHETACRSIGLPVELQGQAVKTFRIQLQRIIDLNQLRHQLEKTSENIFNAREDYQQLRSVPGVGPICAMMIIAESGDLNRFGHYRQYLNFCGFNLCSSQSGQRQSKHKVSKRGNSRLRYAYWLAATIAIRQRENSFREKYERHMKVVTK

SEQ ID NO: 374684 - protein, 375 aa, unidentified
MMEKVRFLGLDVHAETIAIAVAEPDGEVRSLGTIPNRAESIRKMIKKLGPAEKLRVCYEAGPTGYVVYWQLAELGVRCEVVAPTLVPIKAGDRVKTDRRDAEKLARCYRSGDLTAVWVPDEGSEALRDLVRAREAAKQDQMRARHRLSKFLLRSGQRPPLGVRPWTRPYLIWVAQLRFAQIAQEATRQDYLHEVEHMRERVERLEQAITEAVKLASPALQQVINDLQALRGIGDISAVTIAAELGQVSRFDSARQLMGYCGAVPSEDSSGKRTRRGGITKTGNAHLRRIVVEAAWSYRRPPCIWYGLRRRQESISEEVKEIAWKAQHRLHQRYRKLGAAGKDQRKIATAVARELLGFIWAIGTRAEAIAEQRTAA

SEQ ID NO: 374685 - protein, 377 aa, unidentified
MKKSKTPKDPTPKTVQQNRALASLIKLGVDAHSDHYRVVRQIDNGPLQPPQRMQFEKFLDWAEKQKSLAKRVVVCYETGTFGFYPARQLEKRGVECLVMVAINLDEGHTRVNNDRLDARRIAVRLDRYLSGDREALNIVRIPTEPEEEQRDLGRQRQTLAGDIKRFADRGRAYLRKWGYRVKGRWWEGRKWEKVQASIPAAMVAYLQRWVAILSSLEKVLVEIHTALIAQGEKHLNGRVLPVGMGLLSYELLRLEVCDWNRFKNRRQPGSMTGLCASESSSGPNRQQGSVTKHGNPLMRWVLVEMAWRLVRFQPQCHAVAPWRERLASGRLTRPQRKKIIVAIARQLAVDLWRVATGQSTYEKLNFVLPSPKLAAAA

SEQ ID NO: 374686 - protein, 348 aa, unidentified
MVTIGIDPHKQTHSGVAVDSLGVQVAQRTVAARREGFGQLLDWGRKLDSERVWVIEDVRHVSGGLERFLIDRGETVVRLPPRLMADARQGVRERGKSDPIDALAIARAALREGVETLPTARLAGVDLEIRLLALHRERLVDARTRLINELRWQLHDLWPEWEIPKRVLVQPGWQTKIASRLGRAAATVQVQIARDLIARVRELTRTITELYEQLAGLVKQAAPQLLAEKGLGVLIAAKLIGEIAGIDRFTTDAQLARISGCAPIPVSSGRTDRHRLDPGGNRQLNHAFHMLALCKLLHDPRTAVYLAKQRRNGKSNREAIRSLKRHLVRRVYHLLRDPGSVPITICLT

SEQ ID NO: 374687 - protein, 385 aa, unidentified
MKKNTTAKKSLKRVKAQMPEIHRLAAKQKLTVGLDLGDKNTRYCILDEAGEVVNEDQVPTTKAGMEGSFAKMPASRIALEVGTHSPWVSRHLASLGHEVIVANAHKVKLITQSVRKNDRMDARQLARLARVDPKLLSPIRHRGEQAQKDLAVIRARAELLGARTKLINSARGLVKPMGERLKRCDADQVAAGLGEGLSEGARAVIGPLLNAVEALSEQIGQYDEQIEGIAKRYPEVKMLQQVYGVGPLIAMTYVLTLEDAGRFAHSRDVGPYLGLTPKQRDSGDSQPELGISKAGDGLLRSLLVQGAHCMLRKAAPESDLRTWGLGKMGSGGKRAKKRAIVGVARRLAVLLHHLWATGEVYDPQYNRKAAEAAGAKAKGNGKVAA

SEQ ID NO: 374688 - protein, 367 aa, unidentified
MKKISTAGVKQIRNFSEQKLTVGLDLGDRSSWYCVLDEAGGVVLEQRLGTTPKAMQEVFGAMPRSRIALETGMHSPWVSRCLSALGHEVIVAHARNVRLIGESRKKDDRLDAQTLARLARIDPQLLCPVKHRSARAQADLSLIRARAGLVRARTALVNTARGLAKSYGERLRGCNVRNMNPEKAEGLSPELQRALEPLLAGIESLSERIREYNERIEGLAQESYPQVGLLKQVKGVGTLIALTFLLTLEDAHRFRKSRDVGCYLGLQPGRRNSGQSEPQLHISKEGDPYLRTLLVQGAHHILGPFGADSDLRRWGLKLAERGGRNGKKRAIIATARKLAVLLHRLWMSGEVYEPLRNSSRMTMPAAA

SEQ ID NO: 374689 - protein, 325 aa, unidentified
METKKLCCGIDVSHSKLDVCYQNNLGELFYLQVGNNNKGYSKILEHTGTNYHFVMEATGVYYIRLAFYLHQQGCKLSVVNALSIKRYTQMHLERNKSDKKDAAWICRYAIDQCPPYWEMPDSAYFECKQLYNTIREYTEQIKRFNNQLHSLKLLPVPSKDTIKSLEKIKDQLEKEIDSLDRKLETILQKWQPAQLKNIGSVKGIGKRATAMLIVFTQGFKNTHSHRQLISFAGLSPTEYSSGSSIQGKSRIYKRGGKNLRDVLYMCSMNAIKTNTACKTLYERLRNNGKTGKQALIAVCNKLLKQVFAVVKNNSLYQPNYCSAKP

SEQ ID NO: 374690 - protein, 356 aa, unidentified
MPMLAEQVDGVIGVDTHRDTLTAAAVTRLGGVLAHITTSADAAGYRRLLDFAHAQLPGRRCWAVEGTGSFGAGLAGFLQQHGEQVLEVGRPKRPASRSGAKSDALDAVRAAREALGQDHLATPRRRGQREALRVLLTTRRCATLARVAAIGQLKALLVGAPEELRAELRGRSTAGQIDYCAGLRARPTRSLEHQATVRALRATAQRIQALAAEADELEAELTVLVGAVAPWLLEVPGVGPLSAAQVLVSWSHAGRFRSEAAFAALAGTNPIPASSGQVTRHRRNRGGDRQLNRALHTILLVRLRIDPDTRAYMARRTAQGKSRRDAKRCLRRVIARQLFRLLERYDRPGVEILQAA

SEQ ID NO: 374691 - protein, 364 aa, unidentified
MSESRTVAIGLDVHAASVRLAVVRGNELLDERTLPYDHEAVERAVRRWPRARCCYEAGPTGFGLYRHLAARGIECVVVAPGLVPQRPGDRVKTDPRDARRLAQLHAGGLLEAIQVPTPELEAARDLIRAREDARIERMRARHRLSKLLLRNDRRLPTSCWGVTRRRWLSSQTFEQSARQAAFDDYLHALDLVDARIGTLEREIDELAAEPAFASLVGRLRCLRGVDTLTALGLVAEIGNFDRFASAEEFMSFVGLVPSERSSGERRRQGSITKTGNAHARRLLVEAAWSAARRPQVGERLARRQHEQDPRVRARAWRCQQRLYRRWQRMAARGKPRQKIVVACARELAGFVWAIATEQPLRAEG

SEQ ID NO: 374692 - protein, 336 aa, unidentified
MDNYIGIDISKTSMEVYIPKNRLSISVENSKEGLKKLYSKLKKIYKREKDKIIFIYEATGSYSTLFEHYCHDKQIRCYKVDAAQSASFARTTKNRNKTDKTDAMMLAQMYVVAKKEDIKVPPKNEKAARMRALIKYYQTLTKEQTRVKNYLEASQHNLEERFIINRVKKRLQQIAAEREEILYKLITLIETDENYKKIYENIQSITGIGAQSAVILLYLFIRYPNASRQHITALCGLDPIERQSGTSVHKKAKISKQGITLVRGTLFMPTLVAIRTNPEMKYFYERLLQKGKPKPLALIAVMRKIILLAHSLYKNNQTYDPQRYLKHIAQNEKTLV

SEQ ID NO: 374693 - protein, 346 aa, unidentified
MSATPARPSYQLFVGVDVAAASFAASWTRDGHACERACSFAQSPEGFVSLQTALAATGVSPADTLLVLEATGSYWVSLAVSLHQAGYAVSVLNPAHAHAFARSLPRRAKTDALDAQLLTLFAHQRQPHAWTPPEQVYHELRQRLVVRDSLLAMRQQARNQRHALAQWPVQIAEACEQLDAVIADLDTRITTLDGEVARVLRKGEWAASAALLGSIPGIGPITSAWLLVATLNFAGCSSAEGAAAYAGLVPLARESGTSVRGRATIGHGGHARLRTALYMATLTAARFNPLVRAQYERLRAAGKPAKVARCAAARKLLLVAYAVVTKKRPFDPARQMGEAAQVEQPA

SEQ ID NO: 374694 - protein, 315 aa, unidentified
MTTSSRKFVGIDVAKDKLDVAVLGEKKASQVGNDEEGIAKLIKELQKLKPELIVVEATGGYQRAVVLGLYEVGLPVAVVNPSRVRQYARASGLLAKTDKLDAFNLAEFGKQMKPRKFEAKSEGGRYISDLLVRRRQLEEMLKAEKSRLRTVAPKMRGSVERIIETLKEEIKRLEKELDQFMKENEDWQAGEQILTSAKGVGRITATTLLAELPELGKLDRKKIAALVGLAPMNSDSGKKRGYRKTKGGRVEVRNVLYMSTLVATRYNPLIQAQYQQLLKRGKVKKVALTACMRKFLTILNAMMRDQVPFKQRPSA

SEQ ID NO: 374695 - protein, 349 aa, unidentified
MNNIITIGMDLGDKFHIAVVFDGDGNELETAKVTNTKIGVGKFFKPYKSAQVAIEAGTHSPWISRLLNEMGLIVYVGNPRKLRCIWDSIDKSDTRDARMLGMVCRLEPRLLHPIHHRSSQAQADLTAIKSRDMLVKSRTQLINHVRGIVKANGDRLPKCSATSFANRCCTQISKELWSALAPLFEIITQLNQQIKELEREIERLSKEVYPETKYLRQVPGVGPITALSYVLHIEDPARFTKSRQIGPFLGLTPRRDQSGEVDKQLSITKAGNKYLRHLLVGCAQYIMGPFGPESNLRLHGLAIAARGGKNAKKRAAVAVARKLAVLLHRLWITEKEYQPFYSIHNKDAA

SEQ ID NO: 374696 - protein, 355 aa, unidentified
MERYIGMDVHAASCTLAIISEKGRKLKDFPVETNGQALVEAIRMIPGHKHLVFEEGLQSAWLYETLNPHVDDIVVAGITTSRGQKSDKIDAYGLAENLRVGSLDKHVFKAPRQFTRLRELSRSHSMLVSDTVRVQARIKALYRSRGVLVAGVNVYGVRQRQEWQKELPSSIQTRATRLYLYLDFLLEQKKQAESDLLREAKKHPIAKVLETAPGFGPIRSARLVPIVVTPHRFRTKRQFWSYCGLGIVTRSSSDWIQTPDGKWIQARVPQTRGLSLQHNHFLKSIFKGAATTVITQRNKDPIYARYERLLDGGTKPTLAKLSLARMIAATVLRMWKDEKEYDPGRASPIAKKREG

SEQ ID NO: 374697 - protein, 367 aa, unidentified
MKKNSTTTQRGKRARAGTEATVIGMDLGDKTSRYCELDRDGKEREEGSVATTKQALTQRFAGKKRCRIALEVGTHSPWVSRLLKNLGHEVIVANARQVRLIAHSSRKNDRLDARTLARLARADPRLLSPIQHRGEQAQQHLAMIRVRAALVEARTKLVNAARGFSKAQGERLPACDAAAIGVKEMAELPAGLKAVLRPLLEQVESLTGQIKKADVELEQIARTQYPETALLRQVKGVGVLIALTFVLTLDDAERFQKSRDAGCYVGLRPRQRESGASQPQLRITKEGDRYLRTLLVQGAHHILGWRGPDTDLRRWGLKLASRGGKNGKKRAIVAVARKLAVLLHHLWVTGEVYEPLRNSGAATTQAA

SEQ ID NO: 374698 - protein, 350 aa, unidentified
MIIIGCDYHPAFQQIAFVDIETGELQERRLRHREEAEKFYRELAAQGIKVRVGMEASGHARWFERLLSELQFELWIGDAAEIRTKRVRKQKTDRQDAQLILQLMLEDRFPEIWVPSWENRDLRQLLWHRHRLVQARTRMMNQLQAVALNEGLRCKKKLFREAGREQLEAFRLAPWASRRRHDLLELLDRLTPTIAELTQAIEQEVEKCPAARRLRTHPGVGPLTALAFVLIIGKADRFQCGKQIASYLGLVPLEKSSGNQRRLGHITKQGSTLLRFLLVEAGQVTARSLPEWRSQYYHLTMRRGRKIAKVAMARKLAVRLYWMMRKEWDYGQLIKFGSYAGKPENRDGVK

SEQ ID NO: 374699 - protein, 362 aa, unidentified
MNMTTQEKQQTLFVGVDVHKDTHTAVGISPFGEKLFECTCGNYESDFEELTLSVEKYRGTLSPYFGLEDCLGYGERLSSFLVKRYPVIQVHSTLVDRARKRQAHPEKSDSLDALGVAKVMMTNIDSLPTYTVSKESQYAKQIKELGHEREYLVAEQTRLKNQLHMLLHRIYNSEYTTYFKDPFSLKALKHWSRVRPGCDAVLLRSMKRKTRRLLELREDLKEIEKDMETLMTGGEYTLTTASGCGTILAASIIGEIGDINRFKSPAALAKYAGCAPRECSSGKTTRWRKTRSGNRRLTTAFHRMALSQISRMGNDKAREYFEKKVSEGKSKSQALVCLRRHMVTIVWMMLKHGTVFDIHYGD

SEQ ID NO: 374700 - protein, 401 aa, unidentified
MVSDFKKGRYNLMKIFVGIDIAKLNHFAAAISSDGEILLEPFKFTNDADGFQLLVSKLESFDKNSIIIGLESTAHYGDNLVRYLVAEFYQVCVLNPIKTCQMRKNNVRKTKTDKVDTFVIAKTLMMQDDLRFITFFDLDMMDLKALGRFRQKTIKQRTRLKIQLTTYVDQVFPEIQYFFKSGLHQHAVYALLKEAPSPKEIASMHMTHLANLLKVNSHGHFTKELAKELRVLAQKSVGANDSAISIQITQTIQQIELLDSQLEKTEAEMTDIMKFNDSVIMTIPGIGYINGGMILGEIGDIHRFSNPNKLLAFAGLDPSVYQSGNFQAKTTRMSKRGSRVLRYALVNAAWNVVRNNATFKAYYDAKRAEGRSHYNALGHCAGKLVRVIWKMLTDEVEFNLE

SEQ ID NO: 374701 - protein, 306 aa, unidentified
MSGNIGANPIALIGIDLGKHSFHIHCQDKSGKALLRKKFTRTKLMQFLATCPLSVVVMEACAGAHFMARRISDFGHETKLISPQFVHPFVKSNKNDFVDAEAICEAASRPSMRFVQPGTETQQAMRALHRVRESLIRDKAKTTNQIHGFLLEFGISLPIGDAVIKQLSLVLAEHEIPEYLSRLLVRLHTHYLYLVEQIAELESELSQSINADDTAQRIMTIPGVGPITASLLSSQLGDGKQFSCSRDFAASTGLVPRQYSTGEKSTLLGISKRGDKNLRRLLVQCARSFIMRLERKHGKLAEWVRE

SEQ ID NO: 374702 - protein, 407 aa, unidentified
MFVGIDVAKDSLVACAMDDQGEDVFHSYSVENNRPGCLKLINLIADNANLLQPDIIKIGMEATNVFWEHCYRLIKNHEQLKSNFNLQIYTVNPKVISNFKKSYTDLPKNDNVDAWVIADRIRFGRVKNSSSPEALYRPLRQITRYKFNLAQHVKAEKARALNLVFLKFSDFSQKSPFGTFTKASMALLENYTLKEIVNTEVQKLAEFLYENSNNRLGGSTPIEKILTALKKAARNSYRLKPDLDQAITQTLSMTFDNIRFFQRQNKKLNKVLTRQLKAIPQTLTTVDGIGPVYAAGIISEIGDINRFDKETNLASYAGLTWTEHQSGSFTAEETHLTKKGNKYLRYYLVEASNSLRVHNDRYKSYYYKKYNEVPKHKHKRALVLTARKFVRLVFALLSKGEIYQPRR

SEQ ID NO: 374703 - protein, 358 aa, unidentified
MQRNKKTFKGQNIYIGIDVHKKNWQVAVITESGYTEHLSTAADAKALFKFLKSHYPDGNYRAVYESGFSGFATHYALSDLGVSCVVAHAADIPSSQYELTMKSDRIDAEKLARALRAGLIRGIYVRPKDNLDDRGVLRIRKTIQIQVGGYKTRIKHLLHSNGVELPERFSRSGTHWSRAFIAWLREDVRLLSDTRRSLDLLLLQVETLRANLLEATRRVRALSMTDRYREDCALLMGIPGIGLTVAMTILTEVCDIGRFGNERQFASYLGLVPTSHSSGERVSHGEMTFRGNKHIGPLLVEASWVLIVRDQELGRMYTEYRWRMAGQKAIIKIARKLSNIIFAVLKTRKAYEPYRRDA

SEQ ID NO: 374704 - protein, 342 aa, unidentified
MQISTIGLDIAKNVFQVHGIDANETVVVRKRLRRSQVLAFFKALPPCLIGMEACATAHYWARELTKLGHRVRLMPAKDVKAYVKRNKNDAADAEAICEAVRRPTMRFVRIKSAEQQGQLMQHRTRDLLMRQRTQSINALRAHLAELGIVAAQGDKGVKELLSIVADEKDARLPIDARASVIVLAAQLQAVQTLIGSIEKRIKTQHRSNEASKRLETIPGIGVIGASAIAATVADPTVFRSGRNFAAWIGLVPRQDSTGGKQKLGPISKQGDRYLRRILVVGAHSVLRRAKQNPEKYLWLTQLLARRPFKVVAVALANKMARMAWALLAHGGTYRAPVLAAAA

SEQ ID NO: 374705 - protein, 363 aa, unidentified
MNIRKVRQGACKGKPADLPDGQSGVLRTQAGKGAVVEQYDHFVAVDWSQRVMAVAHMTRWSKTATVFERAANLRELKQYLRSLQGRTVVALEETTTAQWLYLELVDHVDHIVICDPYRNRLLCDGPKTDKIDAGKLCLLLRAGLLKEVFHSTSGLYELRRLVSAYNDLVQAGVRALNQGCALEQAHGIGGKSAPFILEQLAKTIELYRTSKEQYEQEFQKLARRNRLVKNLTEVTGIGVIGAVKIVATVVDAHRFPRSGQYLSYCGLVEHEKISGGRSYGRRRPRFNHTLKAVYKLAAMAAISGTSNPMRAYYDSLLAKGIAAHNARHAVARYIARVTYGMLKTGTRYQPYQHRSRTAQHEAV

SEQ ID NO: 374706 - protein, 904 aa, unidentified
MAKVSKTKKTKKTTKRDWDEGLSALNRNAAGIDVGNAEHYVAVPGGRDPEPVRTFGSFTADLHRMAQWLKACGVETVVMQATGVYWIALFQILESYGFQVNVVNARHTKTLPGRKTDVLECQWLQKLHTFGLLNNSFRPTEEIQVLRTYLRQRENLVAAGSTCIQHMQKTLTQMNVQLANVISDISGVTGMAILRAIVAGERDPDRLSTLKHGRVRASRGEIARSLEGNWREELLFVLEQSLELYDLYVRKIAVCDQRIERHLKTMTSKPEPVQTSDATALPAPKQEPRFSLKDHLCRITGVDLTRVAGLQVQTVQTIISEVGVDMSRWKTEKQFASWLGLCPDNRISGGKILKSGTRQVVNRAATALRLAAWSLIRSQSALGANFRRLRSKLGAPKAITAMAHKLARLIYRMIKFGIEYVDKGMAAYESRYRQQQMKWLSKQAASLNLQLIPIPEVTDPKPENETTDKLRTGPGCDPLNEGRRRKHAEEGAQRRGDRTSVAAGRGGPEGERHLPRNGRVAAGILQLETALRWIGVKRVARATPTTRGESEAENFGGGPDAGQAHPAGGAIKKGLKPAVRRGLVREVRQAHQLSERRACGLFGITRWINRYQSRRDPQTGLRMRLRELAGSRTRYGYRRLTVLLRREGWVVNAKRVYRLYRAEQLQVRTKKRAKRAAQVRVPLSGAIRPNQRWSMDFVSDRLADGRWFRVLTVLDQYTRECLCAFADRSQTGEKVVEQMKRLVALRGAPESITTDNGGEFAGRAMEAWAYRSGVKMDFIRPGRPVQNGYIESFNGRLRDECLNGEVFFNLADAREKIERWRSDYNQNRPHSALADRTPAEFVSAVECRPFVFSIVNKAEPQPHQGFAGAGQKSPALDTAAALPSEPNKKTKGLAESPVLMERFN

SEQ ID NO: 374707 - protein, 320 aa, unidentified
MQCIGVDVSKQSLVAYDGEKERVFPNRKGLPEFAKFVNHGRKVMIVFEATSTYSRKLEALCREKDILTVKLNPRLIPSLREVNNKRSKTDRTDAELLYQYGVERGKDEARKSRSVDRLAHAVSAQLAIYRVTQKARVAYQGLFEALSQDPSTPKELLEELTDMIASLKEKEQACIARAKKLIEEEESAAESLQVLMTIPGVGPVTAITLLALFRRYPNTNRKQIVALGGLDPIEYRSGSSVHKKPRISKRGSREIRKCLYEATLSAARFNPAVKGIYRRLKERGKPEKVARIAAARKLLLIAHAIYKSGERYHAPTSEEG

SEQ ID NO: 374708 - protein, 423 aa, unidentified
MKLASEQSFTALIGVDWSDKKHDFCLQGAGSQQREQGVVAHRPEAIEQWARALYQRFGGPIAVCLEMAKGPLVHALQRYEFLVLFPVNPAMLAKYREAFVPSRAKDDPSDAEIALELLIRHPEKLQALKTQSAPMRALSTLVEQRRNLVGDKTRITNRLCSTLKDYFPQALDWFEHRDTLLFCDFLQRWPSLKHVKRARQATLRSFFWAHNMRRSELIEERLCAIRCASALTDDVSVIGPCQLLVQALVAQLRVTLQAIDVFDAQISEVAKRLPDYALFAALPGAGAILAPRLLVAFGEQRERYASAAQLQQYAGVAPVLERSGNKCWVHWRMACPTFLRQTFVEWAGSTIPRSFWASAYYQRQRDKGCSHQAALRALAYKWIRIVYRCWQTRTPYDESAYLLALKRRGSPLLVALSVAPPSA

SEQ ID NO: 374709 - protein, 388 aa, unidentified
MSRPNDLSRSLTPFVQGSTLVAVIELSLSSWLVAGLVPGVARQPLKKLDPDEAQLLRLLQRWRDEAVRSGCTIERIVVAYEAGRDGFWLARWLRTHGIEAHVIHPTSVAVSREHRRAKTDRLDTAMLLRVFMGWLRGEPGHCGMVAVPTIDEEDAKRPSRERENLVGERTRIVNRMKAALIRLGIRGFKPELRRAPKKLDDLRTPEGLPIPPNTLDEIRRDLARLAMVREQIDMIEQARLTRIEQAPETGPNAMVRLLASVVGVGVETADMLVQEVLSRNLRDRRAVARYAGLTGSPDESGSKRREKGLAKSGNARVRRGLIQLAWRFLLFQKDSALAQWYRARTGGANGARKTTMIVALARKLLIAMWRMVTTGEIPEGVRLRPVAA

SEQ ID NO: 374710 - protein, 353 aa, unidentified
MIVIGIDPHKSTHTATAVDPATNTDLGSIRIDATLTGYKTLIAWAKSWPQRQWAVENAYGLGHHLAQWLLVLGEVTLDVPTTATARVRELSRGGRRKNDRIDAAAAACVAAAQGDARPVDPEGPTDILSLLDERRTNLSGSRTRIVNQLHALLRQLLAGGAPTSLTAAAATALLRGFRARSEVDRVRVGLCRDLIADVRRLDDQLAANEKQMTHALDEHGTRLREVDGIGAVTAARLIGRTGRPDRFPTAAAFANYNGSAPVQIASADTDRHRLSRYGDRQLNSALYTVAVVQIRMPASAGRAYYDKKIAEGRKPAAARRALKRHLSDHVWRIMLADEKLRLRPEKNQSARAA

SEQ ID NO: 374711 - protein, 498 aa, unidentified
MRQSGKGISLECIEPNAAGIDVGATEVYVAVPPERDSEPVRCFKTFTEDLLQMAAWLRQCRISTVAMESTGVYWLPPYEILEQVGIRVCLVNSKHVKHLPGRKSDVQDCQWLQYLHSVGLLHASFRPDEKICAIRSLSRHRASLIEIAAIHVQHVHKALTQMNLQIHHVLSDITGISAMAIVEAIVDGERDAGKLAALCHGSVRSDRQTIVKSLVGNYRAEHLFRLRQSLAAYRNYQQMMAECDRQIEQLTQQLNGKNVSGPKPSASSPSTHKHRKNQFHCDMGSELKRVLGVDLERFPNSRGLFDAAEGGIFFHPSDEDLSPGTPAGKCHSTGTVSVYTNSGTAVTSIPGISALTAHTLLAEIGPDLSRFPNVAAFASWLALCPANKKSGGKVLSAKTRQSHSRASRALRIAAQTLARSRSHLGNFYRRMRARLGPPQAITATAHKLARIVYHLITTGQAYDESVFLLEDQKLAQRHEKRLRKQAKNLGFQLVPIAA

SEQ ID NO: 374712 - protein, 343 aa, unidentified
MDYFAGLDVSVKDTSVCIMDGAGKIVREVKVASEPAALLQVLRNPAYRLRRIGLEAGPLSQWLFSTLGEANLPVICVETRHMRAVLKAQINKTDRNDARGIAQMMRVGLYRPVHVKTLRSQKLRMLLTHRKLLQSKAIAIENDLRGTLRNFGLKVGIAGRTKFEARIEELVEDVPDLAVLVEPLLVVRRVLREQIAVLHRRLLTIVRDDEVCRRLMTVPGVGPVVALTYRATVDVPARFRKSKSVGAVFGLTCSRDQSGERDRPGAISRCGDEMMRSMLYEAAQSVLVRSTRWSWLKAWAMQIAKRRGMKRAIVALARRLAVIMHRVWVDGTEFRWTREAAAT

SEQ ID NO: 374713 - protein, 351 aa, unidentified
MVVVGADVHKRSHTFVAVDAVGRKLGEKTVKATTEGHHVALMWARDQFGVELRWGIEDCRNMSARLERDLLGAGQAVVRVPTKLMAQTRKSGRTRGKSDPIDAESVARAVLREPDLPVASHDEVSRECKLLTDRRDVLVAQRTSAINRLRWNVHELDPERGPAPRALKATKHQQALQAWLQTVPGLVAELARAELGDVIRLTSEINALEQRLSQRVREVAPALLQIPGCGDLTAAKLVGETAGVSRFKSEAAFACHAGVAPIPVWSGNTEGQMRLSRSGNRQLNSAIHRIAVTQIRMPDTEGHAYHQRRIANGKTNAAARRCVKRGIARRVYRALLADHHTRTQPHQPTAA

SEQ ID NO: 374714 - protein, 341 aa, unidentified
METERHIGIDLHRNKFTCCMRLETGRTYLTDWKLEDLPRFVKKLRPNDEIAVEVTGNTRLFYEAVAPHVARVVAVDPNQFHVISHSVKKTDPNDARNLALYLEKDLLPEVRMKDKTQAQLASLTQTRDTLVKLRTSLKNKVNNILSAHGINLEREALSSEKKLSEVLAMTFDSMVKIELEVIVEEIRSLNQKVARLEKTIAGEGSKLEGHKNLTSIKGIGPLSASILLSVIGDIGDFADEGKLAAYFGIVPRVSKSNETEHSGRITKRGSKLGRTALVQCALIAQRYSPYLKRYYEKIKGRRGTGKAIIALARKLLGILYRTLKNKWVFEDFPNFVLAESA

SEQ ID NO: 374715 - protein, 353 aa, unidentified
MEQFIGCDAHKKFSVFVAVNEKGQAGEALRVAHDRQLYREFLERLPAHSAIAVEASGSYSWLVDEMERSGHHPRLCNPFEAKRRMGLTNKTDKLDARGLAILLRNGTLPEVWIPPGELRDQRELLRLRIFLVRLRTRVKNRIHCTLSRYNIQVPGADLFGVQARLELGARLPELPVHSREAVEQELATLDFLETQIDSAEHRLEAIMKVSAEADLLKTLPCVGKILSMVLMLEIGRVDRFPTAAHLASYAGLVPRVHSSGGHTRMGQVCGNVNRTLKWAFVETGNLIVINQRRFAGTHVVRLYQRIKRAKNHQKAVVAMARHLAEAAWWVLTKQEVYREPQGPRQQAVSSTHG

SEQ ID NO: 374716 - protein, 339 aa, unidentified
MKFYTALDLHSNNSFLGILDENGKRVFKQKLPNEGEKILKVLKPYQEEIVGIVVESTYNWYWLVDLLMDEGYAVHLANPGGIQKYKGLKYADDQHDAFWLAEMLRLDILPEGHIYPKEDRPTRDLLRKRIHLVRLRTSLMVSLQNILSRNNGFKLKTHDVRSLCEDRVTPHLTGNEDLVLAGTVSKESIDYLTQQIQRIEEVIVGKVKLRPAYKKLLSVFGVGKILALTIMLETGPISRFSKPGNYVSYCRKVSSKWISNDKVKGKGNKKSGNKYLAWAYSEAAECARRSYEQARSFYNRKLQKTNLMVAHNALAHKLARASYFVMRDNVFFKPEKLFD

SEQ ID NO: 374717 - protein, 354 aa, unidentified
MEKIQKNNPFRTISLGLDVDSETVMVVALDLSNGSIEFEGRLHYDEASWHKLLARFADCRVWACYEAGPVGFGLCRMLCKLGVECEIVAPSAVPKSAVSKQSKTDRRDALMLAQLFVNRPRSFVRVPTEPEEADRQLIRTRYQLMKDKVRVMTRIKAQLLNYGIRPPHRMALWTKSYREWLRTFATPYPSLRISFDCLLAELDGIERQLKIVTEAIVALGETPVYRDRVQRLLQIRGVGILTAMAFLLEVFRPGDFATAEQLACHLGLTPCEHSSAQSYRRGHITHWGSPLLRKHLVEAAWIWVFRDANAGNKYRSIRAGKERKRAIVAMARRLATAMWAMLVKEQDYAYRWAA

SEQ ID NO: 374718 - protein, 347 aa, unidentified
MRFYNNQHNYYCGIDLHARLLYVCILDSLGNKVLHKKIDADPDALLELITPYQDNIVIGVECMHCWYWVSDLCLDYAFDFVLGHALYMKAIHGGKTKNDRIDSFKIASLLRGGNFPIAYVYPKAMRATRDLLRRRTKIMRHGADLKAHVANTFSQYNQQSHNVQLRYPCAREQVRNQFDEPSINRSIDMDLNVIAFYTKELASVEHFIEKTAKQHSAQDYNLIQTVPGIGRILALTILYEIGNIERFPSVQNFASYSRLVKCKAESAGKQKGTNGNKIGNAYLKWAFSEAAVLYLRGNEPAKKYIQRLQKRMSKAKALSALAHKLGRCVYFMLRDKTVFDEKRFLPQ

SEQ ID NO: 374719 - protein, 382 aa, unidentified
MSGTEPHAWETGRMNSITYVGLDVHKATVSVALAERGRGGEIRQLGVFENRPEVLSKLVRRLSNGDRRLSFCYEAGPCGYGLHRLLTGCGHDCVVVAPSLIPMKAGDRIKTDRRDAMMLAKLHRAGELTPIWIPDAAHEAMRDLVRARATAGRVLSKARQHLQSFLLRHDRIYRGLRAWTLAYRRWLTTVCFDHPAQQIVLQDYIHAVEDAEARRDRLTRQIDELLPSWSMAPVAMALQAMRGVALVVAATVVAEVGDFRRFANPRQLMAYLGLVPSEHSSGSSIRRGGITKAGNTLARRVLIEGAWTYRMPARVSRKLHDRLEPLPAAIRDIAWKAQIRLCARYRRLAAGKPKVVVTTAIAREMVGFIWAIAQIAQPPLPA

SEQ ID NO: 374720 - protein, 405 aa, unidentified
MEVIYTHCCGLDIHKKIIVACLITPAGKVIQSFGTMTESLLELADWLLSMGCTVVAMESTGVYWKPIYNILEATGMEILVVNAQHIKAVPGRKTDVKDAEWIADLLRHGLLRGSFIPDRDQRELRELVRYRTKMTQERSREVNRIQKVLEGANIKPGDVASDVMGKSGRDILRAIVEGNSSPEAMAQMARGKLKNKTEMLEKALTGLIGSHQKMLLQAQLRHIDFLDEEIQKLSQEVQNRMRPFEEAIEALDGIPGISRTNAEQILCETGIDMSRFPTDKHFASWAALCPGNNESANKRKSGKTRKGNMALKAALTQAAISASRTKGTYFNSMYHRIAARRGKNKAIVAVAHAILITIYHMLKDGSCYRDLGVNHYDEINKAAKLKRSIKRIESMGFKVTIEPAA

SEQ ID NO: 374721 - protein, 339 aa, unidentified
MQVTTVGLDLAKDVFQVHGVTTDGTVLFNRSVRRAQLLPFFEKLPPCLVGMEACGSSHHWAREIRKLGHEVRLMPAFYVKPYVKRGKTDAVDAAAICEAVTRPTMRFVEVKDPEQQALLGLHRVRDLVVRQRTQVINMIRGLLRELGHILPKGPGAAIRFAKSCLAGDLPDIPDLAKGLVSMLCDQLTELCGRISMYSKLIERHSRLDKRAWRLRSIPGVGPMTASAIVATIGDGKQFRNGRELAAWLGLTPLNRSSGGKERLGRITKKGDRYIRKLLVLGMTSRVQHARRHPEQVDPWTAKMLERKPIRLATVAMANKTARIIWAVLMRDTEYRRSAA

SEQ ID NO: 374722 - protein, 394 aa, unidentified
MFFIGIDVAKRSHQAAVTDISGNVIVKPFNFKNSSDGFTKFLSIVESNAIEKNDCTIGLESTGHYWYPLYFFLIENGFDVKVFNPIQTAAFREITIRKVKNDNLDSLLIADFTRFGRYSETYIPDENMLALKNLTRFRLSISDICGSLKKKVIAILDQVFPEYTGVFSDVFGKTSKQLLEQFSTPDEFMDISTTKLTNLLLKVSRGRNGREKAELIKTAAQSSIGISYALDAFSFELKQLLAQIEFMENQLSDVDAEMEKLLSQSEYAVITTISGIGPMLGSVIVSEIGDINRFENSSKLVAYAGLDASVKQSGEFNSSKNKISKRGSPYLRRALWMAAFMSLQCDPALYNYYSKLRARGKTHRCATTAVARKLCIIVWAIMKSKKPYSPVLKN

SEQ ID NO: 374723 - protein, 339 aa, unidentified
MDYYVGVDVSLELSSICLLDATGRILREAKVASEPEALTAFLAGLGLPLTRVGLEAGPLSQWLCAGLQKAGHEVVLLETRHVKAALSAMIVKTDRRDARGIAQLLRMGWFRPVHCKSPPAQEVRALLTARRLLQAKMRDVELSLRGVLRGFGLKIGEISKGQFATRVRTLTAGHPTLETIAEAMLRAREALQTEFARLHRAMLAIARADEVCRRLMTVPGVGALIAVTFTSAVDRPERFSRSRAVGAHFGLTPKKYQSGETDITGAVSRVGDPMVRTALYEGAHILLTRAVRFSSLKRWALAVAQRRAKVALARKLAVLLHRMWIDGTAFRWGREGAAA

SEQ ID NO: 374724 - protein, 353 aa, unidentified
MANQTARVVGGVDAHTDEHHVAVVDLQGRLLDAAAFPTTATGYARLISWLRGQGEVDRVGVESTGAYAAGLVRALRAGSIRVVEVNQPHRHARQRLGKSDPIDAELAARAALSRTATAVPKQTSGIVEAIRQLMIVRSGALKARKAALQQLNDLIVTAPEQLRSDLRHARTLKAKAVLCRKLRPDTQRIHEPAQAAKLALSSLARRIRELDSELVELDRQLEHLAHTAAPRTTQLFGVGTQGASQLLITAGQNIDRFRSEAAFAKICGAAPIQASSGRTTRHRLDSGGDRQANRALHMIAVCRLRHCQRTQAYASKRTADGLNKREILRCLKRYIARETFHTLRADLEALNST

SEQ ID NO: 374725 - protein, 394 aa, unidentified
MITSGIDIGKNSHVISVIDQDTGVPLVKPTSFTNNFEGFKKLDKILEPYSEKNLRVGMEDTGHYHFNLLHHLLKEGYSTYLINPSKTDAERKLTGNITKNDQQDSMQIADILAYPARKKLYRKVDMTFFSMDEQKSLTRLHADLTEQLCPIGNKIQKSLDILFPEYNSLFGGHYGKTYMKILMTFKSAANIAEADISDIKEAMKHNGRGRGVSFTAEDLQALARNSVAQANKGEEYALEARLDQYTVVAEQLEKVDKKIEELSKETNSPMLTIPGISHLSCTTILAEIRCIGNFNSAAKLTKFAGVAPKHYESSQFDAKHCSISKKGNKYLRKILYQIITPVINNNKVFKDYYDKKISEGKSHRCAQGHCVRKLLRIIFHILATGEGFDPDKLK

SEQ ID NO: 374726 - protein, 373 aa, unidentified
MAVGVDPSRDALRLAILAPHGTVSKRFPLTPASLRSIDALLGQGQEVRIGVEGAATCGAIVLLHWLRQGYDIREVNPQISKRLRECFTEAHTDASDAQGLAWSVRFHPNLPQVRLTVTTAAWKRLSRLRTRLVKAQTGLYNRLHSLLAESYGAVYKRLFPKLKSKRALEFFQVFPTLDDALNDSPQVRSLLGEEKAALLEEAGRWGEGVYLETLRLEIRLTIQLLFAHRAAIKGVEAKMAELSRADPQVERLKAVPGMGTTLALTILGHSGDFSRFESHDAYAAYCGLAPTVWQSGQSRVYAKRRRRYSRPLRQAFLQLALTQLRRNPESRAYYERKRGEGKPHWVALTALAQKLCKKVYKLMSEEAPVMSAY

SEQ ID NO: 374727 - protein, 455 aa, unidentified
MSIVSSLPSEFERININAAGIDIGAQKHYVAVPRGRDSKGRDVRHFDTFTADLYALVDWLKQCHIDTVAMESTGIYWIPLFEILEKNGFEVRLVNPRSIKHAPGRKSDVVDCQWIQQLHAYGLLTSAFRPDEQINVLRAYHRQRTMLVNHAATHIQHMQKALEQMNLKLTNVISDITGTTGMKIIRSILAGERNPKKLVKHRDPRCKKSDKEIAKSLHGNWRDEHLFALQQAVALYDFYQTQIEVCDQQIQAQLCRFEDRSDGGEPPPFTGKSKGSGKRLSFDATEHLYRMTGVNLTQIVGLNTPTVLTIIAEVGLDMSRWPTSKHFASWLGLCPGSKISGGKNFSSKSKPSANRAAHAFRMAAYSLHRSQTAIGAFLRRKKAQLGAPKAITATAHKIARIFYEMLKNRTEYKDLGVDYYQARYKERMLRNLKRKARAFGLELVKTNQDQLVMVN

SEQ ID NO: 374728 - protein, 380 aa, unidentified
MAEVTWALVSRVGVDLSKRVYQVHAVDRSGRVLLAKALSPDRFFAWCAELPKGCLMAMEACGGAHAAARALKRLGLDARLIAGHFVTPYRMAGRSGKNDANDAVAICEAASRPHMRFVPVKTAEQQGQLSVHRLREGYKAERTALINRIRGVLAEFRLVFPQSREALRRVLADVIEDASNELTGIARMVLQRAHLHWIDLDPQMKWCDDRIQAHVRTDERAAKAAALHGIGPIGASALVASVADFKHFASAKQFGAWLGLVPSQNSTGGKASLGRITKRGDDYLRTLLIQGAKSAVMTAGKRSDRISQWLVQLKERVGWQKAVVALANKNARILWAVLTRDDAFDPNHLPEAPAPRCMLSQGPARRAADRFIPPADAKRR

SEQ ID NO: 374729 - protein, 388 aa, unidentified
MNKIIYIGMDVHSSNFTLCSFEPGYGFEADKIFGQTQIKEDIFNSTVKYINKLKSMRPDVDVVCGYEAGCLGYNLHRKLKAKEIESVILAPTTMAVSRNCSKKKNDYRDAITIAKCLASSAYKAVYLPDEKDEDVRDFIRMRDDHKTALKQIKQQLNAFCLRHGHHYDKTKWTGLHLNWLRKLELSKFQRETVEEYLATYEALTSKIAALDVRIEDIATEERYAEKVNKLKCIKGIKTHTALSFVCEIGDFNRFKSADKFAGFIGLVPGECSSGNTERMLGITKAGNRHLIRLVVEISNTYRRGTVGRKSAALKERQKDMPKDVVAYADKATNRCQRKYQRMMFKGKNSNQAVAAVARELCCFIWGMMTGHHSRTAQAEASVYRSELD

SEQ ID NO: 374730 - protein, 319 aa, unidentified
MAMNTQAIQIGIDVAKEELVIYRQDLDQLDSLPNTIPSIRRWLKTLPKQAALAVEATGTYHMPLTEQAHRAGHRVFVIDGYQLKHYRESVRARAKTDPCDARLLARYLAREGDDLRAWTPPPKAYRTLQSLLRRRSKLIQARVALQQSLGQEPSLKAPLKRLVAQINRIDQLIQKRMEQAVRQAGLTEQVARCEAVEGIGPLSACALVMAFLRGDFRNSDAFVAFLGLDVRVRDSGKQVQRRRLSKRGDPEIRRLLHNAAMAARRHPYWANVYQRYRDRGLQTTQALVILARKLARIAFALMKNQTSYQAKARQACGTT

SEQ ID NO: 374731 - protein, 388 aa, unidentified
MFFLGIDIGKNTHVASLLDEKAKVIFKAHSFANTLDAAEALLVKLEPYKDSLEIGMEATGHYWLSLYSFLTEHNFIVHVINPIQTDGWRKGIEIRKRKTDVIDSVLIADLIRYGDFLETSLADEDILSLRNLTRFRAYLVNSVSDLKRKAIAILDQIFPEYASVFSNVFGQTSKELLKSLSLPSDYENLSATKIEEVLSNITQKKKASETISTLSDKASHSFGISFCKDSFAFQLKLIIEQICFIEEQIASVELEIEQLMSKLGTNIKTIPGVGNVIGAVILGEIGDIERFDNPSKLVAYAGLDASVSQSGEYEASSGKLSKRGSPYLRKALYMAAQRAEFCDPVFQAYYEKKRNEGKHHLVATNAVARKLCHTIYAILKKDIPYEIQ

SEQ ID NO: 374732 - protein, 375 aa, unidentified
MKGVTKFVGLDVSKDTISVAVADDGRGEPRFLGNFPHTPEAVRKLMKKIGDPQHLHVCYEAGPTGYGLFRFLLSLGIDCVVVAPTLIPRRAGDRIKTDRRDALRLAQLLRAGELTPVWTPDEDHEALRDLVRARHDTKEDLQRARLRLVQFLLRHDLRAPKGTRNWSVKHRDWLDSLRFEKSSLRIVFQEYLHAIDEVTNRMKRIETEIHEQATSSVHAPVIQALQTMRGVAEVTATTLVAEIGQFSRFSSPRQLMSYAGLVPKEYSSGASRWQGSITKIGNAHIRHVLVESAWAYRHHPSLKGQIRARQEGQDPEAQRIAWKAQHRLHQKYHRITSRGKAGKQAAVAVARELIGFIWAIGCAIEQKQSEEFFVA

SEQ ID NO: 374733 - protein, 368 aa, unidentified
MTVTIVDAARPVTGSGEMPPDVTVAPRLVTGGVDTHLDLNVAAALDAIGGLLAVADFPATADGHRRLLAWLSGFGPVARVGVEGTGSYGAGLARFLRRAGVEIVEVDRPNRQARRRAGKSDPLDAIEAARAALSGRACGAAKSRDGNVEAIRALVVAKRSARSAKIQTLNQIRHLSFTAPEELRQRLAGVSRQQLAARAAALRPGGMPAGADPVMPATKTALQILGRRVLALDAEKARVDALLTVLVTQTAPQLLALFGVGIDTAAALLVTAGDNPGRLRSEAAWAHLCGTAPIPASSGKVTRYRLNRGGDRQANRALWGIVITRLRNDPRTQAYMTRRLAEGRSKPEVIRILKRYVAREVYHRLPRP

SEQ ID NO: 374734 - protein, 420 aa, unidentified
MLMNIPSQFPYRATVGLDWADQKHDVFVRFANGDSYRRKIDSRPEAIQEWLLELRSTCAEAKIAIALEQRRGALFYHLCTHLSWIDLYPINPHSLASFRQTFFSSRAKDDPVDSQLLEELLRTHPERLRSYQPEPTAERKLDQYCRHRRSLRDLATKTELKLISTLKQYVPLAVNLFADVGLKSEIALNFLSRWPTLEELHRAKAQTVRSFFYAHNSRSQSLIEKRLQLIAQAHPVTDDLALIEPLVLTSKCLVTQLRQFNQAISQFDQKIRELFKSHPDHFLFESLPGAGEQLAPRLFAVFGSNRSRWADATDIQKYSGIAPVVERSGKSLWVHRRLARPIFVCQTFHEFAQQSTHRCSWADQFYRRQRQRGKSHHSAIRALAFKWIRIIYACWKANKPYDESFYVQALEKRNFSVSTT

SEQ ID NO: 374735 - protein, 346 aa, unidentified
MDISRVGVDLAKNVFQLHGVNKSGKGVWKRQLPRHKWLSVISKTIEPSTEIGMEACAGSHHWSRELIARGYKVKMIPPQFVTPFVKGNKNDANDAEAIIEAMARPDMHPVKVKSVEQQDMQAIYRIREEIKNHRIAKGNQIRGLVAEYGIVAPMQLTSLRQAIPVWLEDKSNGLTSLFKELLQGLWEDLTTLDKRMKVLDKQVMVTATQNPTAKRLQQLRGVGPLIATAMVATLGDGKQYRKGRDMAAALGLTPKQHSSGGKDKLLGISKRGDSYLRCLMIHGARSAVQTAKNKDDRLSRWIVSLQIRRHNNVVVVAMANKMARMAWAMMTKEVDYNPNLCSVPVS

SEQ ID NO: 374736 - protein, 412 aa, unidentified
MEVVYPCCCGLDVHKKSITACVLWAEAKGKSRKEKKRFGTFTHDLLQLADWLAQCGVTHVAMESTGVYWKPVWNILAERFEVLLVNAQHIKAVPGRKTDQKDSEWIADLLQHGLLRGSFVPPQPTRELRDLTRYRVSLAQEINRIANRIQKVLEDANIKLASVATDTLGASGRAMLEAMLAGEQDAARLAEMAQGKLRNKIPELKLALEGRMTEHHRFLLRQLFEHLRFTESKLSEIEQEIDKRMVPFEDKVTRLCTIPGVDRVTAWGLLAEIGLDMNQFPSSGHLASWACLCPGSFESAGKRLSGRMRKGNVSLRRCLSQAAWAISMMKNNYLSALYRRIAARRGAKRAVMAVAHALLEITYHMLKRKEDYRELGADHFDRIDANRTRRSLVRRLERLGHKVTLEPLAQTA

SEQ ID NO: 374737 - protein, 381 aa, unidentified
MEKVCGLDVHKDSVFACILDEQGKRILEKRYGTLTPDLTALREALIERGCGSVAMESTSIYWMPIWHVLESDFSLKLVNPYFIKQLPGRKSDVKDAQWIAECLQKDLIKGSFVPEGILQQMRQLSRQCRRLTKSRVRLEQQMDNQLHRCNIRFSNYVSNQGNNVSLRKVIEALITGERDPSNLVRLAHGRTKNKHGHQVIAASLEGVINPTDIEMLKGCMEQIDLLEKQQAACLNHLEELAEEYFAREISLLCTIPGIQPYSAMCILSEIGNDMNVFGKASHLVGWAGLRPRNDESAGKIQSRKTLHGNKYLREILIQVSWSASRSKKTFLGKKYSHLSKRMKSQKALLAITRKILVVIFNVLRTEQPFDVNRNLQAVMPD

SEQ ID NO: 374738 - protein, 316 aa, unidentified
MQANEVFVGVDVAKDTLVICIWGVLQRQLVPNEERAIKEWLKTLSPRAVVGMESTGRYHQELARLAHQAGLRVYVLNAKDVYFYAKALGARGKTDPGDAQVIARYVAEHHRSLHAWAPGTAAQLRVQELLQRRARIAVCRASVRQALTGLDELAPAVLQLEQQFEQLLRRIDREVQALVASESQLSQGSTMLQSICGIGPQSAALLAALLSRIEFANVDALVAYSGLDPRPCDSGTKSGRRRLSKRGSPNLRRQLYLAAMAATRSKAMGSIYQAIKAKGFKSTQALVILARKLLRIVWAVWKSGKPFDPTRLQSAA

SEQ ID NO: 374739 - protein, 370 aa, unidentified
MGKYSEVFVGIDTAKSKHAVAIADSGRDGETRYLGEIDSAPATIERVIKKLAGKYEKVRVCYEAGPTGYGLYRQIVTLGHECAVVAPSLIPKKAGDRIKTNRRDAVTLARLFRAGELTAVWVPDAVHEAVRDLVRARETAAADVRKKRQQLLSFLLRHGRIYSGSKHWAKAHTRWLAAQAFEHPAQQIVFQDAIDAIEDCASRLQRLEEQLHAIIPNWSMAPVVDAYQAMRGVSFMVAVTFVAEIGDVRRFENPSQLMAFLGLVPSERSTGDSVRRAGLTLAGNRRARRALVEGAWTYRYQARVSARLQKRLEGIPKPVRDIAWKAQVRLCGRFRRLTAIGKKRPVIVAAIAREMAAFLWAIGQHIAPAC

SEQ ID NO: 374740 - protein, 337 aa, unidentified
MNYFIGLDAHSATSTFAVVDSNGQCILRETVSTSEQSLGRVLDKIHGERHLTFEESTISQWLYLQLVDKVDELLICNPTYVAQKSGAKTDFRDALHLAQELRTNHLKPVYHDNSHWIQLRVSVSGYLDIVEEIVRFKNRLKAVFRSEAIGTDENSFYKNYERVKELKNPSAKFVAENLFNQVDFLEKEKLKYQDQFEKNKKLYRPVRNLMTIPGISIIRANIICAIVCQPSRFENKHRFWGYCMLVRHIQKSGGRIYGNKRFHGRKELRNVFIGAAENAMRTDSQLRDHYDALKAKGVDHKEAKLSLARRIASVALCLLKNNDKYNDNYDEYLKETM

SEQ ID NO: 374741 - protein, 340 aa, unidentified
MNQSMTIGIDLAKHIFFVAALDGSGKPARRKKLRRHEVLPFLANHPGAVVGMEACSGAHHWAREIRALGHSVQLLPAQHVKAYLRGQKNDYNDALAIAEAVQHGRIRCVEIKTVDQQLDQSLHRLRQALVTEQTGLINRTRALLAEHGVDLPEGKYRFRQAVLAQLEDAENGLPWRLRELLGRQYQLFIALEQELAWYEREIKTKAAENEACQRLMSVPGYGPIVSSAFYGWLGSGQQFRCGRDVAAALGLVPKQYSTGGKTVLGSISKRGDRHLRALLVHGARAVARYAKERDDRLSRWVCSLIERRGYNKAVVALANKLARIGWAVVARGQAYQAVPA

SEQ ID NO: 374742 - protein, 349 aa, unidentified
MKTYYVGMDVHSATIRIAVLNGAGKVVMESVIETGAERVRGFLKQLRGKVCVTFEEGTQANWLHDVVRALVTEVVVCDPRHNKLLKSGNKNDRVDAQKLAELLRLGSLQAVYHGDNGVRTLKELVRTYDCLVSDTTRVMNRLKAIYRGRAIACAGHEIYRQDRRGQWLAKLSEPGAKQRAGFLYEQLAALKPLRRRAKLAMVKEVRRQPAYGWLMSVPKLGSVSVAQLLAVVGTPHRFRSKHQFWSYVGLAVVTRSSADHEVVNGVLRRSQRPVSTRGLNRNHNHLLKRVFKNAATSACHSGPFKAGYDLRVARGMAPSLARLTIARQLAATTLALWKREEQFDPERKK

SEQ ID NO: 374743 - protein, 366 aa, unidentified
MKIIHWIGIDDHADKWTIAHFRGNEDKPTGEFELVPGGEGYRKLIKYAKELDGEVRIVYEAGPCGYELYRRLTKAGLKIDVAAPSLTPRKPGDRVKTNRRDAAKLARYLRAGDMLTLIVVPDQGRESLRDLVRGRHAVQKDLLSVRHRITKLVLRYGHRYREGSAWTNRFWTWLSKIKLEGEHSQFVLDELILAHGHRLEQRGRYDDAIEAAAKTPQYAPYVAALTVLRGIDRLSAMTILSELGDLRRFATAPQVMAAIGLVPGEASTGDDTHRLPITKTGNAHVRHIAVEAAWQYERRISNGPVIRRRRKDQPKALLDIAEKCDLRLNRKFHRMTSRGKRSTVAAVAVARELMGFIWAIGQIVHP

SEQ ID NO: 374744 - protein, 339 aa, unidentified
MKKLYGGIDLHGNNSVVVVLDEADQVLYQKRLPNELAKILPQLAPFRAQLQGLVVESTYNWYWLVDGLQEAGYVVHLANPAAMQQYAGLKYTNDDSDARWLAHLLRLEVLPTGYIYPKEDRAIRDLLRKRSQLVRQKTANLLSIQNLLTRNTGQAMKSNQIKQLTPAKVSELVALPEQALALQVTVAVMQHLTEQITQVERAVHARVKLRPAFQALLTVPGIGQTLALTIMLETGEIHRFPTVGQFASYCRCVGSIKLSNSKRKGQGNTKNGNKYLAWAFVEAAHFAIRYEPQITQFYQRKRAKTKVVVALKAVAHKLARACYYLMRDTVPFDVTRAFA

SEQ ID NO: 374745 - protein, 318 aa, unidentified
MPQITWLVGIDVSKNKLDWCIRGAAGATAGNTAAGCAALAKELERRGVRLAVMEASGGYERPMAAALRQLAIEVLIVSPKRVRDFAKAAGRRAKNDPIDADTIAWFGEIFIRQGSARPDPAREQLAALVAERQDVVGMRVQCLNRDEHQSPALCRKLRKDMIKFLDQAIAKLDAAIAALIAQTPPLAERAALLASVPCLGRQTVAALLAWLPELGQIPNTQVAALVGVAPFDDDSGKHRGARHIAGGRRELRNILYMAVLGGATQYNPTLKAFYQRLLAKGKLAKVALVACMRKLLTILNIMVTRNQPWQPQPTPALA

SEQ ID NO: 374746 - protein, 482 aa, unidentified
MLRHRMYKPDASWCFINFIPEEIIMKQFYLGADVSKGYTDFVLIDQDKKQINMNFQLDDTVDGHVELHNQLNHFFELHPGAELFAAVESTGGYENNWYNTLLKFQGSLNIKTARLNPEGVFCNSKAELKRTITDKVSALSIAEYLIAHPGKIMYQQEDYWSPLRKQWSFISLLIKQKTQLLNQLEMLIYSANPELLQYCQDGMPQWVLKLLKKYPTASLLSRARAATVARIPYITLDRAKKLVKGAKNSIASADDDITGQLVSSTIGQILQLAKNIQVQSKILADNCSIPEIELLKTFPGIDDYSAIGLMLELQAIERFSTVKELASFVGIHPVFKASGDGSTVARMSKKGRKVPRNILYMVALTGIRCNPLIRDLYQKQVARGKEKMSAIGICMHKVLRILYGMLKNNTAFDPEIDKKNQLKSNKKESNVPRDKSRRYQGFDSKAPVSRFQRKRRKEQKASQIATSDDQCGINAAAPMLTV

SEQ ID NO: 374747 - protein, 309 aa, unidentified
MKKEKVYVGIDVAKAHLDLAFEEVCCRLSNDARGHRALVERLAQLSASPQVICEASGGYERGLVLALAQAQIDCTVVQASRVRQYARACGLLAKTDAIDAQLLARFGHAIAPRPTKALPPAQEQLRELEGQRRHLVRLLVAEQNRRAQLSDKTLLRLSTSLIAQLKKQIAQIEALLGRLIEQSQELSAKARKLTQVVGVGSRTATLLLAQMPELGQLNRREAAALAGLAPFNRDSGSAHGKRTIFGGRRAVRCGLYMAALVAAHRNPILAPFYQRLRRAGKPPKLALTATMRKLLIVLNSVLKTDPIPA

SEQ ID NO: 374748 - protein, 326 aa, unidentified
MASIIYVGMDVHTTNLTFCCYNADSDRGFAVAQTEPDYRQVIKYMERVQKQRGEECKFVCGYEAGCLGYSLYHQLTRCGVDCVILAPSTMHQEKGKRIKTDRRNAENIARCLAFSLYSPVYVPTTEDDAVKEYIRMRDDIKVDLKRVKQQIIAFTTRHGFAFDGKSYWTQKHLKWLETLVFEHPFYKEALQEYLILYYMLDEKVAVYDTRIEEMSHLEHYEENVQKLCCFRGVAAHTALSLLVEVGDFQRFRSAKHFAAYLGLVPGEHSISDKTDTHQYYKSRKHPFTATVGRGRSILQSRSHWEKERSAQGQTGRQSCRDHRLRG

SEQ ID NO: 374749 - protein, 328 aa, unidentified
MTGWMAFDVGARRHAYAARINGKEEAGELDNTAEAIGRLLARQQARCGQFCVVMEATGIYYLDLAVQLAQAGVEVMVVNPKAAHHVAKAMSQRSKTDALDARMLLTYLQRMDFVPWQPPPREVLELRRLGRHLSRLTGQKVRLKNQLHALHGTDTTPRVVIQDMQDALAMLERRIERLSADATARVRADAALAERFDALDSIIGVGPVSALALLAELRVLPGEMNSRACICHADLDVRIHRSGSSVELAPRLSKHGNKYLRHARYMPAMTAIVHDPHAKAFRDRLLARGKQKMQALAAVMRKLLAAAWALLRNPQSYDGAKLFASLNP

SEQ ID NO: 374750 - protein, 429 aa, unidentified
MKIIYPRVCGIDVHKKFIVAVICISESIKPVYLKKRFSTFHNDLIRFRDWLIQNDCQNVCMESTGKYYIPVYNILESHISNIVVANPKWVRAVKGEKDDDKDAKWIADLFKLGIVKSSFIPQKDFRILRELTRYKYKLVNMRSSEKNRYQNALTSGNCKLDMVFTDVFGKSASNIIDLILSDNPYTDEDILSKVHKNCKASPDMILNSINGTDLTSVQKSRIELVNNHIKQLSSNIQRLDKLIDLMIEPYEDYISFLCQIHGVSRNSAITILSEIGVDMNQFTSTRRLTSWAGLTPSSNQSAGKKKSVRISRAGVYLKPCLVEVAHAAVKDTNHPYYANKFNKISKRRGKKRAYIAIARKILVAAYHMLLTGEIWNPADLAEVETPVEQRIKYVKNNLKSDIKQLLDIGLTVEELTLMIQQNANNIATQ

SEQ ID NO: 374751 - protein, 352 aa, unidentified
MSKVFGCDAHKRYSVFDSMDERGQAGLPVRVENERGLLRRYLNGLPAGSRIAIESVGNWYWMIEEMERAGHVPQLAHAAKAKLMMGQINKTDKLDARGLALLLHNGTLPSVWIPPGELRDQRELPRMRMGLVRVRTMLKNRIHATLAKYALDIPEVSDIFGVTGRMLMKKRLEELPPFTRQSVETQLELLDQVEDHIRGCEKQIQEVVQASPEMKLLMTLPGVGQILAVVMALEIGQVSRFPGPDHLASYAGTVPRVKSSGGKTFLGKVRPDVNRYLKWALIEAANVVVLNQGRWPNRHVVQLYGRIRQRRGHAKAIVAVGRHLAEAAYWILKRKEPYKEPHGQKPISSSQE

SEQ ID NO: 374752 - protein, 424 aa, unidentified
MKVTFQTCCGVDVHKSFLVATIIKTSSGIEPSYQKRRFSTFNNSILEFKKWLLENECLYVCMESTGKYWIPVFNLLEDEINVTIANPKWVKAVKGNKDDTKDSKWIGDLFRLGLVRGSYIPCKKIRILREFTRYRYKLVSCRSSEKNRYQNALTVCNVALDSVVSDIFGKSSTSIIDYLLEQSGTSIDHEVIASKLLKRLKAKEDAVIESIEGYQMTDSQKYRMHLVRAHMDYITAVINDVDSAIESLIASDPDYENAVELLCTIPGVKYDSAITIISEIGIDMSQFCSSKRLCCWAGLTPGSNESAGKKKSVRITRAGVYLKPALVQCAHAAVKSEKSPYYKKKYESLVKRRGKKRAIIAIARMILTAIFQMLTTGETWNPCDLYKIDMPEALLEKQKQKAIKQAQKLLIREGLLPPTEPIAS

SEQ ID NO: 374753 - protein, 431 aa, unidentified
MNYNQNHKIAQITPKTLIIGIDIAKHHHVARAQDYRGIELGSTCFFDNTQEGIRTFINWINQIKDSYQMESVITGMEPTGHYWLNLAHILKDEQIKFVTVNPLHVKHSKELDDNSPTKNDVKDAKVIAQLVKDGRYSEPTIPQGVFAELRVAKKLRDLLNVDLQIVQGQIHNWIDRYFPEFFTVFKSWEGKAALHLLKLEALPEELVRYTEEELLEYLRQAVKRSIGIKKIRALKEAANRSIGIRQGAMMAKMELRTLIQKYELIQNKFEELDQTLDTLLQDIPGVDQMLEITGIGRDTVAGFFAEVGDLSEYNHPRQITKLAGLSLKENTSGKHKGRTRITKRGRKKLRALLFRSSMILVAKNKAFKALHHYYTTRPDNPLKKMQSLIALCNKLIRILFSIGKKEFVFQEEKMLKDIPHMHAFIQEPIAA

SEQ ID NO: 374754 - protein, 338 aa, unidentified
MFIIGIDPHKGSHTAAVIDSDEQVVGEFSLRADCRQRDRLLRFARSFTPRVWAVEGATGTGHLLAQQLVGAGETVVDVSPALSARVRLLDAGRKDKNDAHDARSTAIVALRHRDLAAVTVEDHRQVLRLLARRHHQLNAGRTRAVCRLHALLAEMLEGGLPRNLSVNRAVSALQRFQATDLVGAERERLVLELLDEVRRHDRSLVEIRDRIVRAVQLADTTITDIVGVGPIVACYLLGYSGDMRRFPTAGHYARYNATAPIEASSGPRVRHRLNPNGNRQLNHAIHVAALGQISHDTPGRAYYLHKQAQGKSSKEALRCLKRRISDAIYRQLRADTNR

SEQ ID NO: 374755 - protein, 323 aa, unidentified
MTRVICGVDVSSCRLDARVGQNGAEGSFANTTAGIAALGDFCRGHQVELVAMEATGGYEQQAFAGLSQQGLPVAILNPRAVRRFAEAMGLLEKTDRIDAGVIAWFAQTKRSRPAMLPSARQQQRRALVTRLRQLTQIRTAQRNQARLLTDPTVLAMIEELQQVVARQICELEAAIAEHIAEDPLWRQLDPVLRSIKGVAGRTVSRLMAEMPELGTLSNKAISKLAGVAPLARDSGKQQGKRITRGGRAPVREILFIVASVAGRYEPDFVAFHKRLTAAGKPPKVVRIALAHKLLVRLNAKARQVRQCMAQPALTQPSAPMTTT

SEQ ID NO: 374756 - protein, 398 aa, unidentified
MTESSDYESVQVFIGVDVGKDTHHAVAINRSGKRLFDKALPNDENKLRSLISDLKQHGQILLVVDQPATIGALPVAVARSEGVLVGYLPGLAMRRIADLHAGEAKTDARDAAIIAEAARTLPHALRTLKLADEQIAELSMLCGFDDDLAAQTTQASNRIRGLLTQIHPALERVLGPRLDHPAVLDLLQRYPSPEKLASLGEKKLAAQLCKLAPRLGKRLAADIAQALAEQSVVVPGTNAAAVVLPRLALQLITLRKQRDEVALEVEQRVLAHPLYPVLTSMPGVGVRTAARLLTEVACRAFASAAHLAAYAGLAPVTRRSGSSIRGEHPSRRGNKALKRALFLSAFAALRDPLSRAYYTRKMSQGKRHNQALIALARRRCDVLFAMMRDGTFYTPQAS

SEQ ID NO: 374757 - protein, 412 aa, unidentified
MTVFVGDDWAEAHHDIHLMSETGDKIVARQLPEGLSGISVLHAMIAEHVDDPAEVIVGIETDRGLWVQALIAAGYQVYAINPLSVSRYRDRHNVAGAKSDTGDAKVLADLVRTDRHNHYPVAGDSPDVDGVKVLARAHQSLIWDRTRHTNRLRNDLREFFPAALVAFDDLAHPDALAVLAKAPNPTTATRLTIPQIRAVLKRGGRQRNLDTRASEIQTVLRTPQLAAPPAVTAAFAATTRALVAVIAGLNTQIAALETELADHFERHPDADIYLSLPGLGRILGARVLGEFGDDPERYDSAKSRRNYAGTSPITRASGTKKAVHARNVRNRRLYDALDQWAFCSLQTSPGCRTFYDQRRAAGDLHHQALRTLANRLVGYLHGCLRTRTHYNEHTAWKHRPENTPTNQIGKAA

SEQ ID NO: 374758 - protein, 388 aa, unidentified
MFQPFDASKSLTAFEQDGTVIAVIEMSQSKWLVAAVVPGIERQPLKRIEANEEALLKLLHRWRAEAGQAGRMIKRVAVAYEAGRDGFWLARWLRARDIEAYVIHPASIAVSREHRRAKTDRLDTELLMRAFLGWLRGEKRHCSVVAIPTVAEEDARRPNRERENLVTERTRIVNRMKATLTRFGIRNFKPTLRKAAEKLDSLRTAEAMPLPENTRAELRRHLARLRVVRDQIREIEHERLRMLKAAPLTEKGPHAMVRLLARVLSVGIETADMLVNEVLSRHLRDHRAVARYAGLTGSPDESGRRRREKGLARAGNARVRCGMIQLAWRFLRFQKDSALAKWFDARTADGRAGTRKTMIVALARKLLIALWRLVTTGEVPQGVVLRPA

SEQ ID NO: 374759 - protein, 485 aa, unidentified
MCGIVEQESAQSKQKVIPVRKKRTYRAKEINAVRVSEIVAGHEGCGATVGIDVGKDDLFLMLRWGAEMFSGPWHAENRTGIRGVVEFLVMVSRGRKLTVALEPTGTYGDALRYALTQAGLNVHRVEGKASHAYAEIFDGVPSQHDRKDAAVVAELAAVGKSKPWPYDAGSVENQERTYWVQRLEAAQGTMQIGTGRLEGLLARHWPEVTQVLQLNSVSLLKTLAHYGGPEELAMDAEAAVRLAGWGRSLLTAEKVQALVKSAAETVGVPQGRYDREWVQECAQEILDARRKKQRGQRELKRLGAGNEVLSRQGAAVGYATASLLWAYLGNPQDYHCGAAYRKAMGLNLKERSSGKWIGQLRITKRGPGAVRRWLYLASMRLLKKKRVRAWFEAKKKRDGDRGGKALIGVMRKLSMALYRVAVDKVGFNAGKLFPGKPLKQKGTSARARQKGPPHRAFAVTSTSEGRRPRRRRRRKGLETKPIQGE

SEQ ID NO: 374760 - protein, 408 aa, unidentified
MEVVYRCCCGIDVHKKVIVACLNNGGEQDLREFGTTTSEIKSLAKWLTESGCEMIAMESTGVFWKPLYNLFELMDLDAIVVNAAHMKALPGRKTDVKDAEWIADLLRHGLLKASYIPSREQRELREITRYRKSLTEERCRETNRLQKILEGANIKLDSVVKDINGKSARKLLERIIEDDVPTSEAEISRIVHGSMRSKLGQLVTAIEGITTPLQRKLLAQVIDHIDDLNRRIANLDELVQDYMDEYVAAIAALCEIPGIARRSAEVILAEIGLDMSRFPSAAHLCSWAGVCPGNYQSAGHRKHGKTTKGNKALKTILTQCAKSARSVKKSYFSAQYQRISARRGKNRATLAVAHSMLIAIYHMLKNNVPFRDLGADYYDSFNRDKKIHGYLKRLKALGWEPDTLPDSA

SEQ ID NO: 374761 - protein, 314 aa, unidentified
MVAAWAGVDVAKAHLDAAVAGSDMVRRFANDGAGVTGLVTWLGEQGVTALVVEATGGYERAVSASARAAGIVVSRMNPRQVRDFARATGQLAKTDTIDARVLASYGARLTPAATWHAEEDGAERAALVGRRRQLQGMLTAERNRLPLARRAVQAHIAGHIAWLEQELRAVEGELEELASADGVYAAQAELLRTVPSVGRVVAHTLLSELPELGRLPGRQLAALVGVAPLNRDSGLLRGRRSVWGGRAPVRATLYMAALVGSRHNPVLRDYYRRLLDAGKPKKVALVACMRKLLVILNAIVRTGRPWDPSYALAI

SEQ ID NO: 374762 - protein, 313 aa, unidentified
MFSEKPDYFIGVDVSKLTLSICVLHKNTINHFEISNNKSDIIAFFAMYANMRSYATFENTNTYNYDLMRAFDELGLAYARLDAFKFSHFLKHNSKNKTDKSDAYAIALYGSKFYDELGKNEFSEEFALIKSYQSGLTQLNKISVQIQNFNEALANIDNQTLKEAMFEVLETLKEQKKKVEDEVFELICSIVPQTKQIIAENKGFGKTFAVYVLPLIYLNKTRSSNELVSYIGLAPMSYESGTSVKRGTHISGGAKLARNCLFMCSLTASKYNEHFSAIYKRHIKNGKAKKVALCAVARKMLVFVKNIYFKDEI

SEQ ID NO: 374763 - protein, 340 aa, unidentified
MQKASYFIGLDISSEYFTATIIKDPQDQILTGVDFSNELSGFENFADLLSENAIPKDEVAICMETTGVYSEKICYYLHNNDYIVYSEQPNKVKKAFNVNRHKTDSVDSEQIAEYIYRFEDRAQQWQPREDILEKIKTLLNSRELLVKYKTGISNHLHAIKRKEVKTETAIDSLEEERQNIQEKIDRMEDEMDDLVKQKEDIKRIFYILRSAPGYKTFLPLRLIVKTNGFKMNVGYKNLASNIGISPLKNQSGKSRHKKDKSRGNGNAALRKLLRLAARSVVTHKERFRKYYLRKLNEGKPETLVLNNVANKLLKMTFAMVRDGKEYIPNHQSVNPVLKKC

SEQ ID NO: 374764 - protein, 377 aa, unidentified
MKRIKFVGLDVHAETIAVAVAEQDGEMRSLGVIPNREESIRKLVKKLGPVEQLRFCYEAGPTGYVVYWQLTALGAKCEVVAPTLVPVKSGERVKTDRRDALKLARNYRAGELTAVWVPDTAHEALRDLVRAREAAKKDQLRAKHRLGKFLLRHGRRPPTGVKPWTLNYLAWVKKEVHFEQPAQEATLLDYLHEVEHAESRIDRLDLAIEEAVKSTPPKMRAVIEALQALRGIAQVAAVTIVAELGEISRFPGARQLMGYGGIVASEHSSGESTRRGGITKTGNAHLRRVVVEAAWASRHRPNVGGALRKRQELVSEEVREIAWKAQHRLYTRYRKLMARGKDKGKVITAIGRELLGFIWAIGVKVEAAQKVTERRAA

SEQ ID NO: 374765 - protein, 390 aa, unidentified
MRFAGIDIASETHVVAAVDDEGKTVLKPTAFDEDAAGYQKLLELLGDASDCKVAMEATGHYWQNLFAALAAAGFEIALLNPIRTNRFAQEELARTKTDAIDALGIARFAQQKRPAPTRLPDSATVELRELVRLRDRVVQDMGDATRRLHRLVDLGFPEFTRYVKTLDSELATALLHEYPTAAAFPAGPKPLAKLVYDGRHKVGTELARQLVDAAAASVGRHHGDAYRVQVRYACEDVDVARRRLRELERRIETTLRDHEVGSLLTSITGIGPQTAARVIAEVGDFERFSGPEKLAAYVGAIPGLKHSGKSKPKGAMTTIGNARLRCALWMPLLTAVVRNPWLRAYYRRLVAAGKLKKVALVAAMRKLIHAIYSVAINRRPFVPRLQEARS

SEQ ID NO: 374766 - protein, 317 aa, unidentified
MAEVTFPQLIQRACGIDVHLKVVVATIDGAGIQRETRSFKTFTSSLNELKEWLLSNGVTHVGMESTGVYWKPVYKVLEDSIPNVWIVNARHIKNVPGHKTDKMDSEWICKLLLAGLLKPSYIPPKEQRQLRDLTRYRNKLIQQIASEKNRMMRILEDCNIKLSSVVSNTSGTTATSLIDMLCEGKVLTLDDIKSVYHGKLSASPEELLEACTGFVEEHHIYLLQMIRKDIDQTQTLVDDLSERIKRLLSKYENVLELLREIPGFSTKVVEDLVSEIGLDMSHFPSEKHLSSWAGLSPGNNESAGKKKAHESLTETNR

SEQ ID NO: 374767 - protein, 364 aa, unidentified
MDPPLKDGVIMRQHRISIFKKRRRSMKDIKILGVDIAKDVFQLCGIDEWGKVIYTRRVKRAQYVSTVASLKVGCVVMEACGGANHWYRTFMGMGIPTQLISPQHVKPYVKSNKNDRNDAQAIAEAASRASMRFVRGKTVEQQDVQALLKIRDRLVKSRTALINEIRGLLQEYGLTMARGAKRFYEELPLILASEAVGLTPRMKRVLNCLYTELLNRDEAICDYEEELKAVAKANEDCQRVQSIPGVGYLTALSVYASMGDIHQFHPSRQLSAFIGLVPRQHSSGNKEVLLGISKRGNVMLRTLLIHGARALLRHVKNKTDKKSLWLKALIERRGMNRACVALANKNAPIIWALLTRQETYRCGA

SEQ ID NO: 374768 - protein, 345 aa, unidentified
MKKNPKTFVGADLHKDFTQFSVQNNQGKEIASQRLANDGELFRAFLAGFPQPVSVVVETTSNWSWFSRQIKQAGHRVVVAHAGETSAKSATRQKDDKRDACLLASLLRGNLIEKQCWQAPEEIISGRERMRYRQIIVRHVVAHKNRIHSVLIRNNLTCPRKDPFCKSGRLWLRSLNPGEGFAFAIETSLSLIECLEKRLAVIDAWCEQLAREDELVWLLTTIPGIKSTLAAMIRFETGDIDRFERVEQYVSYTGLVPGKRQSSDKQASIGITKEGSFWLRWAFVQAAQTADRTRGRLSRYYWHQFRAHHNSNRAKVATGREIARIAFHIMKRKQGYYEPLFYGNK

SEQ ID NO: 374769 - protein, 416 aa, unidentified
MSDRDRVASIDIHSKVLMVVVGSREGEAISPQCKLEHQRFGTMASDRRRLLAWLQAQGVKEVVMESTGQYWKPIWWELEPYMRLHLAQAFSNRAPRGRKGDFRDAERLLRRLVAGELILSFVPDPEQRAWRTMTRTKVQLARERVRLYSQVDGLLQEMRIKLANVLSDLFGASGLRILHALAAGETDPKKLAALGDDRLKCTEGQLIDALTGNVQAMQQKLLELYLQRLQLIDEQIAKLDGMIAQALKAHQEVVARLAEVPGFGPDSAQQVVAEVGVQASAFPSAANLASWVGACPGKEETAEKNHSSRSAKGNKYMRRLLTEAAQAAVKAKGSHFQALFRRLLPRLGYKQALWAVAHRLCRLVWKILHDGVRYIEQGEYRDPKAKKQRAQALARALRKLGYDVQLTPAQPATANA

SEQ ID NO: 374770 - protein, 452 aa, unidentified
MSTSKTSKSKKMKIPKHLQHINPYAAGIDIGSRSHFVAVPEGLSEQPVQEFSTFTDDLHRMVDWITACGVTTVAMESTGIYWIPVFEILESRGLEVKLVNARHVKNVPGRKSDVLDCQWLQQLHTYGLLEGAFRPTEQVCSLRAYVRQRMNLVRYGASHIQHMQKALLQMNLQLSNVVTDITGVTGMRIIKAILGGERDPQVLAGMRDRRCKNSENTIARSLCGNYRPEHLFSLKQAVDLFAFYQGQIAECDKEILSQLTTFDAISGTKDDQETKPTKTVDDALRRMSGVDLTRIDGIDTNSALKIIAEIGIDMNRWKSAKHFASWLGLCPGTKVSGGKVLSGKSKQVANRAAATLRLAAFTLFNSKSALGAYLRRQRSRLGAPKAITAAAHKLARLVYAMLKHGTAYIDAGQEYYEERYRTRVVQNLKRKAQELGFALVEVASPQLKTATA

SEQ ID NO: 374771 - protein, 379 aa, unidentified
MLPITRTHDNTMKTTYHIGIDLHAKTAAIAWASSCGKLEYHGSCSATIKTTERTLRRLAKGLGVALKDLRICYEAGPTGFVLARRLSGLGVQVTVVAPSLIPRRPGERIKTDKRDALQLARLHRAGELKPIHIPDAQDEMVRDLCRARTDAVEDMRRIKQQLSAFLLRNGHRYTGRSNWTSAHLRYLRHLELPADQRFVLEEYLLALDTAHQRIARIEEHMQQRLETWQRKQAVEWLMGFKGFQLVAAMTLTAELGDLRRFEHPRQLMAFLGLVPGEHSSGSKRRLGAITKCGNSHARWMLVESAKAYRTTPNVSAQLTTRQDGLPREVKVISWKAQNRLCVRYRRLKARGLHENKAAIAVARELSGFLWELHHLQHDA

SEQ ID NO: 374772 - protein, 340 aa, unidentified
MYPFYLGIDLHLKRTYVVLMDTEGEVIDERRLLNAEMAGYLEQHVPQETYAVLEATRNWPFMYDMLSEHVERVELAHPKEVKAIANAAVKTDQIDAGVLAHLARLNYLPTAYAAPKEVRDLRLYTRHRSWLIRHRTQAKNRLQAVLASYNLASPVSDLFGVKGREFLEEVLEELRPAARRVITDNLTLIDRLDEQIKELEQEIPLTKEQAHTIQILMSMPGVGKVTAMTILAEIGHISRFNSSKALCNWAGLTPRVRKSDAIVRHGKISKQGSAHLRSAMGQAAMVASRFSSRWYQVYERLAKRCGKRGARVAVARRLLTVMYYMLKRDRPYEKDYHRGA

SEQ ID NO: 374773 - protein, 374 aa, unidentified
MADYNEVFVGIDTSKLRNAVAIAEGGRNGEVRYHGEIENTEAATSKLVKKLAAQHRRLTFCYEAGPTGYGLHRLIKTLGHECVVVAPSLIPKKPGDRVKTNRRDALNLAKLLRAGELTAVWVPDARHEAMRDLVRAREAAVDDLKSKRQQVLSLLLRLGRHFTGKRTWTRAHMNWLVSQKLAHREQRIAFEEMLLAVRQANERVIRLEKAIAAAVPDWSLAKVVTALMAVRGLDLISATVFLAEIGDLSRFASPRQLMAYLGLVPGEESTGDRVWRGGITKAGNHRARRILVECSWSYRHPPRVGKKKLAKVEAAPPAVQEIAWKAQARLTARYRALARRGKRPTLVVTAIARELSGFIWAVSRAVGASATPAT

SEQ ID NO: 374774 - protein, 344 aa, unidentified
MDHFGGLDVSVKETSICMVDDTGRIVKEVKVASEPAALLKVLGNPTYRFKRIGLEAGPLSQWLFSALAEAALPVICAETRHMQAVLKAQINKTDRNDARGIAQMIRVGLYRPVHVKTLRSQKLRMLLTHRKLLQSKAIAIENDLRGTLRNFGLKVGMVGKVRFEARIQELVENFPDLAELVEPLLIVRRALREQIVILHRRLLAIVRDDEVCRRLMTTPGVGPVVALTYRATVDVPARFRKSKSVGAVFGLTCSRYQSGEIDWSGKISRCGDEMMRTMLYEAAQSMMHSKKWSWLKAWAMQIARRRGMKKAVVALARRLAVIMHRIWVDGTEFRWTRQQAAAAA

SEQ ID NO: 374775 - protein, 355 aa, unidentified
MKRYIGMDVHAASCTLAVISEKGRKLKDFPVETNGQALVEAVRMIPGHKHLVMEEGLQSAWLYETLSPHVDELVVAGITTSRGPKSDKRDAYGLAEKLRVGNLDKHVFKAPRQFTRLREFSRTHMTLVGDVVRAQARIKSVYRSRGVLVTGIDVYSPRRREEWLKQLPSNTQPRASRLYAHLDFLLAQKKQAEADLLREGKKHPIVKILETAPGFGRIRAVRLVPIVITPHRFRTKRQFWSYCGLGIVTRSSSDWVQTADGAWIKARTPQTRGLSRQHNHFLKSIFKGAATTVVTQRNKDPIHARYERLLDGGTKPTLAKLSLARMIAATVLRMWKNEEEYDPGRAGLPTQTRKG

SEQ ID NO: 374776 - protein, 365 aa, unidentified
MMNHIFVGIDLGDKNSVARIAVNQGKTERWGFVNDRRGRQRLLDEVRRRSEKVENGQVVMAYEASSCGFILYDEAEARGIRCEVLAPTKMEKSVEQRQHKNDDRDAEDVVEKLRGHVLAGNRLPTVWVPDRQMRDDREVVRTRVELVEKQTRVKTQIQMLVKRHGLEKPTGIGGPWTVRHRQWLEALTESDAWGYGARTALMSLLRHLSFLEAEIERIEKPIHELAEQPRHKPILDELTREHGVGLMTAMVYRTEIGYAGRFRRGRHVGKFVGLTPTSHESGQQQDRKGHISRQGPPRLRRMLCQASWVHVGHDPQAKRFYQQLVARNPKKKKIAIVAVMRRLAVRLWHRMRQAEIRMTDLVPVN

SEQ ID NO: 374777 - protein, 465 aa, unidentified
MAHRTQKPDQAAQLPPPLKHVHLNAAGIDVGGESHYVAVPADRDGQPVREFGCFTPNLYQLADWLKACGVDTVAMESTGVYWIPVFEVLEERGFEVKLVSPQQLKRAPRRKTDVLDCQWLQELHTFGLLSGAFRPEDQVCVLRSYVRQRGMLVRYAGQHIQHMQKALTQMNVQLQHAVSDITGVTGMGIVRAILAGERNPRKLATLREPGCKRDQATIAKALKGNWRREHLFALQQAVELYDSYQQKIADCDQQILAQLRSFEDRSESGSGTPPPPLPEGRKPRKNEPTFDAAGEVYRITGVDLTKINAIQGNTALKVISEIGTDMSPWPNEKHFTSWLGLCPDNRISGGKKLRQRKVPPNANRAAEALRIAARSLHRSSSALGAFLRRMKARIGMPKAIEATARKLAVQIYYMLKHGTDYVDRGQDYYERAYQDRVLRNLSSNARKLGYRLVKEEPASTQPLPA

SEQ ID NO: 374778 - protein, 345 aa, unidentified
MNNSNVFGVDLAKDVIQACKINSNGGELFFNRAVSPKKLKEMLVKSPPSIVAMEGCGSCHYWGRVAKKYGHEVRIISPKKVKGFLQGQKTDANDALAIAIAAMQIGMVFSPAKEVEQQSLQTLETSRKFLDKGLLSLSNHIRAFLYEYGITIRLGYKPLSTAINMVLDDTDSRLPQCLKPMLRLLWEQYQSTKARLKEAEKTKAALVKQLEPCSRLMDLEGVGDVGASMLYTSIGDGSEFKNGRQASVYVGVTPKQHSSGGKVIMTGIDKNGGNKELRAVLFMGALSFISKLPAEPRTVKEAWLIDLVKRAGVKRACIALANKTVRTAWALLATGKSYEPVLLCK

SEQ ID NO: 374779 - protein, 456 aa, unidentified
MLYSHVAGIDVHKKQVTVTVRTPDPRGVGQREKTRTFRTFYADLLAMGAWLVECGVRRVAMESTGPYWWPVYAALREAGGPELAIDVVNAAHVKAVPGRKTDVKDSQWLARLLEVGLLRGSFLPPDDIREVRDLTRYQTKLTEERSREKQRLLKVLEAAGIKLDVVASDTFGVSGRSMLDALVAGERDPQVLAGLARGVLRNKTDDLRLALAGRFTAHHGQMIGFHLTRLDHLDQVIDQVKEKIGHPGIAGSGRRAASGPSGLVAPFAEQIRLLTSIPGIGERVATVIISEIGVDMTRFPSAKHLAAWSGLAPGNNESGGRRRRARHRKGNTHVQSILIEAALSASRTRTRLGARFHRLHRRFGGKANTTAAKKAGFAVAHTLIRVIWTVLSTGQPYTDLGHDYYTRRVNPESHARRLIAQLEALSGKKIILVDHDDDPPSPNGSHGSYHDGEAAA

SEQ ID NO: 374780 - protein, 377 aa, unidentified
MKKHTTAKKNQRALTNTKKQIEKMAANQRLTIGLDLGDRTSRYCILDAGGEVLSEGELPTTKTGLNSLFGKMPCSRVALEVGTHSPWVSRQIAGLGHEAIVANPHKVKLITQSGRKNDRIDAQKLARLARVDPKLLSPVRHRGAEAQADLAVIRARAELVEARTALVNCARGLVKPMGDRLRKCDAGQVGAGLAAGLSAEVRKIVEPLLKSVEAISQQIEVYDEKIAEIAQRYQEVELLTQVYGVGTLIGLTYILTIEDAERFQHSRDVGAFLGIQPKQRESGDSQPELGISKTGDRLLRSYLVQAAHCMLRQGAPDSDLRAWGLGKMGAGGKRAKRRALVGMARKLAVLLHRLWVMGEVYDPLYNRKAVQAAKAAA

SEQ ID NO: 374781 - protein, 347 aa, unidentified
MKFYTQTHKHYCGIDLHARCLYVCILNQQGNILVHKNISANPQALMKLVTPYLDDLVIGVECMFSWYWVADLCRERQISFILGHALYMKAIHGGKAKNDKIDSHKIAVLMRGGMFPQAYVYPREMRGTRDLMRRRLRLMRQRAELFAHIHNTNSQYNLPPINKDLHHVCNRDGIAERFSDPSVQKSIELDLKLMGFYDHQLSKVEWTIQRHARNCDQHSLILLRTVPGIGKILSLVMLYEIHTIERFATVQDFASYCRLIKCKKESAGKSYGTSGKKIGNAYLKWAFSEAAVLFLRANPEAQAWLEKMANKHNKARALTILAHKLGRAVYFMLQRKTVFDQERFLNS

SEQ ID NO: 374782 - protein, 309 aa, unidentified
MEHYAGIDVSLECSSVCVVDGSGKIVRETKVESEPAALIGWLGSLGFRLGRIGLEAGPLSQWLYMAMKQAGLAVELLETRHVRDAFKAMPVKSDRNDARGIAQLMRLGWFRPVHCKSMAAQEVRAILTARKLVQSKLLDVENSLRGILRGFGLKVGKTTRKNFAERIKELVKGHPNLKTIGEALLSVRAVLLGEFHTFEKRVRAMSCLNANARLLMSTPGVGQIVALTYASAIDDPARFRSSKRAGPLFGLTPKKYQSGETDRSGRISKIGDASVRAALYEAAHIMLTKPIKGCSRLKSWAMRIAGAPA

SEQ ID NO: 374783 - protein, 306 aa, unidentified
MSIGVGIDVSKATLDVAVHGQSRGRTVPNTPAGFARLCRWLVELAPSQIVLEATGGYEQAVLDALHAAGLPVARINPRQGRDFARAIGQLAKTDRLDAAVLAQLAATLPLPAYQPLTAEQRRLAQYQLRRQQLLQQLVAEKQRLRLFDEPALCEQLQGSIQALQVALRQLDKAIARQLDALAQWAPLQRIAGVGPVLLANLACHLPELGRLSGKAVAKLVGVAPLARDSGQWRGRRSTWGGRSGIRTALYMATLSAVRYQPVLRDFYQSLRQRGKPAKVALVAAMRKFLVILNARMRDALAASAAA

SEQ ID NO: 374784 - protein, 326 aa, unidentified
MLYAGMDVHKRFCQIIVCTKEGEVVKKGRIKTDEKEIREFFYGLKNVKVAIEASANYSYIVDALAKEGYEVLVAHPLKTRAIAEAKIKSDKIDAKILADLARGNLIPTSWIPPKEIRELRDLVRQRIFLVKQRTKIKNKIHAELIKRGIECRGNIFTKAGKEWLHSLKIPAIETYLSIMEKLEEEIKKMDKRLKEEEKKFEEVKLLKSIPGVSTFSALVILAEIGDVNRFPDEKKIFSYAGLVPSVHKSGDRVYYGHITKQGSKYLRWILVECARIHVRKCDSKITEFYRKLRRKGKHENVAIIGAARKLLQTIYYMLKKGESFHS

SEQ ID NO: 374785 - protein, 408 aa, unidentified
MTVFVGDDWAEAHHDVHLMNEAGDKLAARRLPEGLEGIAALHAMIAGHASDPTEVVIGIETERGLWVQALIAAGYQVYAINPLSVSRYRDRHNIGGAKSDPGDAKVLADLVRTDRHNHRPVAGDSDDADGIKVLARAHQNLIWDRTRHTNRLRNDLREFFPSAVVAFDELDHHDAVAVLAKAPNPTDAARLSVAQIRAALRRGDRRRNLDTRAAEIQQTLRSPQLSASPAVTAAFAATTKALVDVIAGLNNAIAELEGELTNHFEQHPDADIYLSLPGLGVILGARVLGEFGDDPERYDTAKSRRNYAGTSPLTIASGKKPAVLARHVRNRRLYDAIDQWAFCSITSSPGCRAFYDQRRTAGDLHHQALRALGNRLVGYLHGSLRTRTHYNEHTAWAHRQQQHDPIAA

SEQ ID NO: 374786 - protein, 315 aa, unidentified
MEKYIGIDISKATLDLYDGEKSHKVSNNLEGFTFIRQLAKHPKDLVLIFEPTGVYAHALIAYCQKQNIRAVIVGSKEARDYARSIKQRSKTDKIDAKVLYRYHTQISPEMIAVPSLDTRVIRITQRRNVYDKYRHAITQLNNLIEATRKEDKVLIRSIQKQIASLEKAADRLLEEIEVLLIEQEENKAALENLQTIPGIGKKSALALLLEFMRYPRAKSNEIVALMGLDPVLKDSGVFKGKSRISKQGGKHLREKLYMATIVAIKYNDRLKHFYERLISHGKPKMVALLAAMRKLLRIAFAVVKNHEPYRALEVV

SEQ ID NO: 374787 - protein, 417 aa, unidentified
MEHFAALVGIDWSDKKHDVCLVDLTTGKREQLIINHTPEALDEWVTKLRTRFAGQQIAVGLEQSRGPLIYALLKYDLLVLYPINPTTLAKYREAFSPSRAKDDPQDAEYLVELLIHHRERLKPWLPDDEKTRTLQLLVEHRRRLVNDRTRISNRVTALLKSYFPQVLGWFDDIRTTLVCDFLLLWPTLELVKKVKRATLEKFFRAHNSVRQETNENRIAAIKEAVPLITDCAVINSSVLMIKALCAQMKTTIESIREFDQQISALCQSHQDYYLFASLPGAGEVYASRLTAAMGTDRERWTTADELLRFSGIAPVIERSGKSARIRWRYFCPKFFRQSFVEYAGESIKHSFWARAYYSAQRTKGKSHQAAVRALAFKWIRIIYRCWQTRTPYNEVTYLESLRKKGSPLLSFAANNPA

SEQ ID NO: 374788 - protein, 368 aa, unidentified
MCAYGWRLISTSSRSLLRCCRPRGGEPGLERIETTDKAIRRFIDRLGGPEGLAVCYEAGAGGFDLYRLLCSVGVACDVVAPSLIPVRAGDRVKTDRRDAKKLVRLYRAGALSFVHPPTPETEGLRDLLRCREDLRRARIAARNRVLKQLLRHGRIFREGKHAWTQKHREWVNRQRLDDPLAQAALEQMLIHVDGLDRQLALLDVRLEEIARSARWGDQVRVLVRFRGIATLTALGLIAEVGDFARFSSARELMAWLGMTPSEYSSGQQRHRGHITRAGNTHARRLLVEAAWHYRHPPRRSTRRPAPDERAWQAQVRLFARWRHLTAHGKTSTVANMAIARELSGFIWAAMTQPSRVSLPTAEPEEVVA

SEQ ID NO: 374789 - protein, 412 aa, unidentified
MEVLYACCCGIDVHAKMLVACLLKAGRKEVRTFSTMTEDLLHLLDWLIQAGCTHVAIESTGVYWRPVFNILEGSLDVILTNARDAKGYKARKTDVIDAEWLADLLRHGLLKPSFIPPLPIRELRDLTRYRESLVREQTALANRIQKLIESANIKLGQVASDALGASGKRMLRALAAGETDAEEMSHLAQGILKRKQPQLQQALEGRFTQAQRWILVELLDQYDQVEAALQRVAERIRQEVDTSTDPFVPEAVKLLDTIPGIGETVAQIIVAEVGVDMEQFPTANHLASWAGMCPGNNESAGKRKSGKTTKGSRYLRAALVQAAWAASHQKETYLAAQYKRLVKRMGKKKALVAVGHSILVIAYHVVQTRTPHQDLGGDYFGRRNVDKQRKRLVRQLESLGVKVTIEEVKEAA

SEQ ID NO: 374790 - protein, 320 aa, unidentified
MMAQNDRVVVGIDVAKDKVDACIRTLSQRRTFESTAEGRRQLIAWLRKHQVTKAVMEASGGYERDWAKALREAGLEVRIVDPKRVRSFARSAGRLAKNDAIDAEMIAWFAETFGEAPVQAYDADREKLVQIVNARQALLDVQTELQNRNEHSVPDVVQKMQARLLKKIALEVAKLEAAIAAMIKATAHFTELAEIIESVPGLGEGTSAGLIAAMPELGQVSNKAAAALLGVAPYDDDSGKRRGERQIKGGRRKVRNLFYMACLGAATQHNPVLKAFYRRLIAKGKEKKVALVACMRKLIVILNIMIARGEKWDASRYAVG

SEQ ID NO: 374791 - protein, 352 aa, unidentified
MIFVGVDAHKKVHVAMALDEAGQEIGEWSGPNSAAGWQSLSLWAAALSTSRIWGIEGAWSYGRGLAQQLVAEGETVYEINARWTALGRRRARRPGKTDRLDARAVALFVRQEAPGLPKVAAEDATAVLDLLTTEREAALAEATRLRNQIHALLLQLDPEYKARFPNLRSRTTLTRLEKYTPVGKGPLPAQRAAAVRRLAKRLRLALSQADELAREIEANVADFAPLTRLCGVNLLTAGSLAGILGPGRRFSSDAQLAAYAGVAPLEASSAGLVRHRLNRGGNRRLNTVLYRIALTQAHHLPAARDYLERRVTEGKTRREARRALTRYIVRAVWRLWQECTPVAAGLRLDEAA

SEQ ID NO: 374792 - protein, 346 aa, unidentified
MLYAGLDLSRKRLDVHLLDEAGGTVEVSAAPPDADGLHRLAAHVERFGEPVQAAIESMNGARFVHDRLEQAGWRVEIADAVRVKGLAPLACKTDRIDAWVLAELARRELVPAIWLPDPAVRAERERARFRLHLVRHRSSLKQRVHALLLAHGKPCPVSDLFGVSGRALLERLALPEPWADTLAASLRLIDELDEEIGACEAELRRLGAGHRYVPLLMSVPGIGFVLGYTIAAEIGAIERFASPGKLAGYSGLCPRVYQSGASDRRGALAKNGPRYLRWALVEAATVACRHPVYRERYQRTKHRLGRQRGAKVAQVELARRLAEAIWHMLTRNQPFAPAGATGPLTA

SEQ ID NO: 374793 - protein, 421 aa, unidentified
MQVVYPRCAAIDVAKKEIAVCVRTPGEAPGGRRTQVRKYKTFYGVLKEMCAWLRECGVTHVAMESTGIYSNPVFHALVEFGDFEVIKCNAAHVKNVPGRKTDAADCVWLAELLECGLLRGSYIPVQKIAELRDLTRYRAKLVGSRTSEIQRLQKTLEDAGIKIDSVASDIMGVSSRDMIEALIDGERRGAVLAGLARGVLRSKIPDLSMALTGRFNDHHALMCRLHLRHVDELTELIDTVEKQIGVMLVPFRAERDLLMTIPGIGPAAAAVIISEIGADMSFFPDADHLASWAGLAPANNESGGRRRPAGTRHGNQHLATVLIESAWACSRTKTRPGAQYHRLVRRFGGHRNPRAKKKAAVAVAHTLILIIHCVLDRKVPYQELGDDFYTRRQDPERYKDKLIARLAKLGYTVTVEPAQAA

SEQ ID NO: 374794 - protein, 376 aa, unidentified
MKKNGEAFVGIDTAKARNAVAIAEGGRKGEIRYLGEIDATPDAVAKLVRKLAGRYETLQFCYEAGPTGYGLYRQILSLGHSCVVAAPSLIPRRPGDRVKTNRRDAQSLARLLRAGELSAVWVPDNTHEAVRDLVRTRAMAVEDYRRKRQHVTSFLLRHGRAYTGNATWRGRHLRWLDTQNFAHAAQRFAFQEMLNAVRSTAERINRLDAALAEIVPAWTMAPVVAAFQALRGVGFLTATALVAEAGDIRRFDHPRQLMAFLGLVPSERSTGETRRQGGITRAGNVRARKALVEAAWTYRHPAGVGDKHQRRQTLLPQQIRDIAWKAQARLCARYRRLVAKGKRSTVATVAIAREIAAFLWDIARHVEPSPINAALL

SEQ ID NO: 374795 - protein, 348 aa, unidentified
MSYFAGLDVSLEETAICIVDDAGCIVREARAASEPEALVAFFNACGMKLERVGLEACSLTAWLHAGLTEAGFPAICIEARQAKAAMGAMPNKTDRNDARGIAQIMRTGWYRAVHVKSPSCRSWRALLTARRMVLNKRRDVENGVRALLREVGLKVGTPSRKDFPARVRELAADEPMLMSLAESLLSVIEVMTRAVETLTKRVLDEVRIEPTCRRLMTVPGVGPLTALAFRATIDQPDRFRKSRDVGAHLGLTPRRYQSGETDVQGRISRCGDELARTALYEAAHSLLIRTTKWSALRAWGMNIAKRRGMARARVAVARKLAVILHRMWADGSEFRWGKQAAAPVMAAA

SEQ ID NO: 374796 - protein, 372 aa, unidentified
MRHHTEAFIGIDTSKSRNAVAIAEGGRGGEVRYLGEFPATEAAMRKLVAKLAARYDKLTFCYEAGPTGYGLYRLIKRLGYECIVAAPSLIPKKPGDRVKTNRRDAISLARLSRAGELTAVWVPDERHEAMRDLSRARQAANKDLQGKRQQISSLMLRLGRVYPGKTTWGPAHMKWLMAQKLDHREQRMALEELLQGVRQESERVERLERAIREAVPEWSLAEVVTALQAMRGIDLIAAVGVLAEIGDLSRFQNPRELMGYLGLVPSESSTGDKINRGGITKSGNGRARRILVEAAWAYRYPARVGREKQPKVAAAPRRVREIAWKAQTRLCGRFRSLERKGKRRTVIVTAIARELAAFVWAINREVRPPRTA

SEQ ID NO: 374797 - protein, 440 aa, unidentified
MQVVYARCAGLDVHKKTVVVCVRLVGADGTMTTHTRSFGTTTAELLNLVAWLLTLEITHVAMESTGEFWKPVDNLLEGSLTVLVVNAAHIKYVPGRKTDVKDAAWIAELLAHGLLRPSFVPPAPQRALRDLTRQRTHLIQERASVVNRMQKVLEWANIKLASVVTDITGVSARAMLQGLVDGQSDVTALAQLAKGRLRSKLAELEQALRGTLEPHHAFMIGQHLALLDVFDEQIAAFDTRIQTAIDGTQPDPPPPTDAIGADRPPADAPSAPDRAWTAQAILDAIPGIGLRVAETILAELGTDMSRFPDAAHASSWAGLAPSQHESAGKRKATRIRDGNKYLRSALIQAAWAAIKQPDTFLAAFYRRLAARRGKKKAIVALAHKILVLIYTLLRTGQVYQERGAAALDARQKDRIVHRLEHRIAQLGYKVHLEPITAAAT

SEQ ID NO: 374798 - protein, 342 aa, unidentified
MDHFAGLDVSVKETSVCIVDDTGEIVREVKVASEPEALLAVLRNPAYHFKRIGLEAGPLSQWLCSALAEAELPVVCVETRHMQAVLKAQINKTDRNDARGIAQMMRVGLYHPVHVKTLRSQKLRMLLTHRKLLQSKAIAIENDLRGTLRNFGLKVGMVGKAKFEARIKELVENLPDLAVLVEPLLVVRRALREQTVILHRRLLAIVRDDEVCRRLMTTPGVGPVVALTYRATVDVPARFRKSKSVGAVFGLTCAKYQSGEIDRSGRISRCGDEMMRVMLYEAAQSMLRSKKWSWLKAWAMQIARRRGMKKAIVALARRLAVILHRIWVDGTEFRWTREAAAA

SEQ ID NO: 374799 - protein, 483 aa, unidentified
MKPKSEEKNKRATNHPTQHHWHEMNRKQRREMMRKIQSNDLSLEVIHPDAAGIDIGNESHYVSVPPNRDGQPVREFGCTTAELKAMAAWLKQCRIRTVAMQSTGVYWVAVYDILEQAGLEVYLVNARDTKNLPGRKSDVQESQWLMKLHTYGLLRNSFRPAQEIRVMRTYWRQRNDLIQSAGRHIQRMQKALTQMNIQLANVLSDISGVTGQAIIKAILAGERDPHKLAVLRNPRVKASHEDIALSLEGNWQPDLLFVLKQEQDGYEFCQHQMAACDRQLEQYLQQREDRSHGAPLPEEKRKGRLKKKRGNKPQFDLRQGLFRMTGTDLTRIDAIDVMTATAIISEAGWDMSKWKTEDHFVSWLRLCPDNRISGNKVIGKGRLPTNNPISIALKMAASTLRESKTYLGAQFRRLRTRLGAPIAIKAMAAKLARLVYRMLRYGMKYVDQGAAFYELRHRELQIKRLKAKAEKLGYRVAPIPAAA

SEQ ID NO: 374800 - protein, 329 aa, unidentified
MQSEVHVGIDVSKFTLDVFILEVRSHRRFKNNSNDFPAILQWIEKCTKQQSAFICFEHTGVYSMALAAFLESQHIVFAMVSPLEIKRSMGIVRRKNDVVDSKRIAEYASRFRDKIVVTKLPAKDITRLHFLLTLRDKTARTLSGYIMAVNEVQRGIGHEELPELFASYDAIITALKSEIKKIEATIKHIINNNPDIKTSFKLVTSLKGVSLIVGTYMIVYTCNFTKFANWRKFACYCGIAPFSNQSGISVKGPAQVSPIANKQLKRLLHLAAVSAASHDPELREYYIRRQSEGKSKMSTLNIIRNKVVARAFAIVKRGTPYVNIRQYAT

SEQ ID NO: 374801 - protein, 354 aa, unidentified
MEKYCIGIDIDKKTFKVCLLFRSSDLTKRVQGSKTFSNGKEGFKEFITWISKKIKVKGVPQSYVMEATGVYHEQLAYFLEGQGKNVHIALPLKSKRYLQSLGIRSKTDKIDAKGLGMMGCEQSLGSWHPSSPALLKLRSLTRQIESLQTHRTSFLNQLESANHAAIIDRMVIKSLKTMIKQVENQITKLEKQVKENIRMDEVLRRKYKLISTIKGVGIMSFAVVVSESNGFSLFKNQRQLVCYSGYDVVENQSGQRRGKTRISKKGNSHIRRILHMASLSSVNSDEIIFRNLYQRVVDRTGIKMKGYVAVQRKLLVLIYTLWKNDMEFDPNYEISGIQESEPLFSVAPLGASGV

SEQ ID NO: 374802 - protein, 389 aa, unidentified
MFYLGIDIGKNTHVASLIDDKKKVIFKAFSFSNSIDGADSLVSKLNPFKNELEIGMEATGHYWLSLYSYLDQKNFTVRVINPIQTDGWRQDIEIRKRKTDIIDSLLIADLLRYGDFVETSLSNEDYLSLRNLSRFRSYLISSIGDLKRKTIALLDQVFPEYASSFSNIFGKTSKQILENFSSPSDFEDISSEDLQSFLDNVTMKKFATRKLEELSKKTSTSFGVNFCMDSFSFQIKMLIGQISFIQNQVSDVENEIEILLEKLNSPITTIPGIGSVNAATILGEIGDIKRFSNPSKLVAYAGLDAGISQSGEFESTSNHMTKRGSPYLRRALFQSALRAEFCDPVFSNYYQKKIAEGKHHLVATNAVARKLCHTIFAVLTKNEPYQEQS

SEQ ID NO: 374803 - protein, 369 aa, unidentified
MLYLAIDQHAKQITVCVRNEDGDTVLRRQVSTRPEKIEAFFQQLTEMDPQFMAILEVCGFNDWLIDVLHEWNCRDIVLIHPEKPSKKKTDRRDAHKLADLLWVNRERLAAGQTVHGLRRVYMVTQKEREDRQLTSLRRNLGQRRTRTLNKIHRIINKHNLIWNYPTKSFQTQAGRKWLDALQLPEIDRVEMDMLLAEWKTWDEQIAKVDEEIVGRASQVEPGKTHSPTQVLMTAPGVSHYSGLTLASRIGPIERFPRPRSLANYFGLTPGCRNSGNTQDRLGSITKEGSKIARFVLGQLVLHFLKHDPKMKAWYRRIKLRRGSKIARVAVMRRITTIFWHMLTHDEAYSIGGPPPRLRSNSETTGSEAV

SEQ ID NO: 374804 - protein, 421 aa, unidentified
MRDRWLKAGPISYETRELWVQTSSIDVFIGIDVGKSDHWATALDRDGERLFDKALPNDETRLRDLYERLSHHGRVLVVVDQPATIGALAVAVAQDMGITVGYLPGLSMRRIADLTPGNAKTDARDAAVIAQAARTMPHTLRAINGSDEDAAALSMLTGFDLDLARQVNQTSNRIRGMYTQIHPALEKVLGPRLEHDAVLEVIASWPTPAALRKAGRARINAKLKAHGARHHEAWADEIISALKAQSVVVAGTDAAGIVLPHLARQLIALHAQRSDVAAKVEALVEAHPLYQVLTSMPGIGVRTAAVLIAETLGRDFATGAHLASYAGLTPVTRRSGSSIRGEYTSHAGNKRLKRAMFLSAFASLRSDPASRAYYDRKIAQGKRHNQAVIALAHRRILTLHAMIRNGTLYDPQPTHQLPAAA

SEQ ID NO: 374805 - protein, 317 aa, unidentified
MVTIAVLGIDLGKNVCSLVGLDEAGKAILRRRMKREGLSTFAERLSPCVVAMEACCGAHWLGRIFAARGHEVRLMSPEYVRPYVKAQKNDDRDAEAIAEAATRPTMRFVELKCQEQLDLQTLHRARDRLVAERTALINQLRAILLERGIIVAQGRRKLEQELVALFDEGEGVGLSARLIKLVEDMRAQWTELDRRIGEFEAEFATFAKTNQDASLLLSIPGVGVLIASALIAAIGRGETFDHARDLAAWLGLVPRQSTTGGKPKLFGISKRGNKYLRKMLIHGARAALPHLAQKDTPLGRCAKVLLARRTRTWSRLL

SEQ ID NO: 374806 - protein, 340 aa, unidentified
MQVYAGIDLHANNNYLGVVDVDGKRLFRKKLRNDPAMILNAFDSFRKDVVGVVVESTFNWYWLVDLLMDEGYEVHLANPAAIQRYSGLKHSDDAHDAYWLAELLRLGILPTGYIYPKEQRAVRDLLRKRGHLVRLRTSLILSLQSIVARNCGRKIKAGDIRILSEDRVVPLLSGNEDLALAGQVSKESIDYLTGKILVVERFIEGKMELRKDYRYLHTMPGVGRVLGLTIALETGEIGRFAKVGNYSSYCRKVSSRWTSNDKYKGKGNTKNGNKYLSWAFSEAAELARRFYPEVQAYYSRKLQKTNRMVAHTALAHKLARAAYYIMKDEVPFEMDRLFGS

SEQ ID NO: 374807 - protein, 413 aa, unidentified
MQIIYERCCGLDIHKKLIVACLLTPGRGGGRHKEVRRFGTMTADLVLLAEWLRAAGCTHVAMESTGIYWRPIFNVLEDVCEVLIVNAQHIKGLPGRKTDVADAEWIADLLQHGALRASYIPGRAQRELRDLTRHRSTLVEERARVVNRLQKVLEDANIKLAGVATDIMGASARDMLAAIIGGETDAARLADLARGCLRAKHDQLEQALAGRVRPHHRFLLAEHMGHIAYLEEAIARLNQEIALRLRALQEDMDLLIELLDTIPGVSRRVAEVLLAEIGADLTRFPSAPHLASWAGLCPGNHESAGKRQTGRTRKGSRWLRHTLIEAAHAASRSKNTYLGAQYRRLAARRGTKKAEVALAHSILVIAYHVLTRKEPYRDLGPNYFDEHDRQAVERRLVRRLEKLGLKVTIQPAA

SEQ ID NO: 374808 - protein, 428 aa, unidentified
MAKTKSSHTVDIVYPICCGMDIHKSFIVACIAITDERSHTKHHLKRFSTFQKGLRELVAWLKSYNCLDICMESAGKYWVPIFNTLEAAGLNVCLTHPKYVKGKKTDKKDAKWIVELFKCDLVRSSFIPPLIIRQLRELCRYYVKLTYALSSEKNREQNCLTICNFKLDDVFTDLSGMSASRVIAKLLEHGNSDFDVAPLLDHRCKVTVQDVIDALDGELSPAETEKLKLVRLHKEYLYYLRDTLESLILELAQPLARQIELLLTVPGIKEPLTAVRILAEIGADMSVFETSKQLCSWAGLTPQNQESAGKKKTTRIGRAGQYLKPLLVQIALAVSKSAKHPEIKNKFDSLKKRRGGKKATIAIARRLLTAIYHMLSKNEAYNAELYHKADKPPKERILSPEQALDFARRHGFLIEGIDPPPDPAIPAA

SEQ ID NO: 374809 - protein, 415 aa, unidentified
MSPTYTVAVDLSKYKHTATILDTSTGDVCKTVTVPVNLAGFQQFESTLEAFSSKPTDFIIGCEATGHYGETLLRRLQDHGYPIVRMNPAQVVQFRRGLGRHAKTDALDADAMAKQLAVTEWIPEQSVHETARRLQSLTRLRLNFVEEQSRWINRVRGLVNQIYPELEPLLKKVASPTSLAVLTHFPSRLLLAHSSLDDITAVVKKASRGGKGEIFALRLQQIAQTSVGLDDCWLETELRLVTSQLVALSANIKQIERDIQALTRRILAEYSLALDLEKPLTLKAFPCGSYLTIGTLLSEIGDIGRFKSLKHLLSYFGWCPNTQESGMSTVAHPRMSRRGNRFVRRILWMMSISAVRWVPEYRTYFNMRVDMGKSKMKTLVAVGRKLLSVVYAVLRTGRPYDENRYLRQPIVALAA

SEQ ID NO: 374810 - protein, 342 aa, unidentified
MSIIGGLDIHRKQLTFDYLDQATGEVKSGRIAPADRRHLAGWLRRFEGVEQVTFAAEACTGWRYVVECLQAAGVRAQLAEPADTAAARGRKRRAKTDRADSRLLRELVEGDRVPQCWIPPRQVLEHRALLELYHDLRREHTAWIQRIHAVCFHQGTEALSLSTEADRAHLRQVAAAQLSPAGQLQVDTYLQLLQTLEVHLAGVRRRLLAAAGHLRGAKVLTERLYGVGPVTALALTCWLGGAGRFGSSRKAVRFAGLDVTVYSSDGKRSPGRLSRQGPPVLRWCLYEAGKTHARATAPDHAYYAAVKDRVDGKRAAISEARKIARQACHILTELGDDAFAPV

SEQ ID NO: 374811 - protein, 373 aa, unidentified
MPRYSTAFGMDVHLRSTTVCALDAETGEAVTRRFRGNPWGEVAEWMSGFPGPSLAAYESGYPGFAPQRELAGLGVECVVAAVSKIPRSAADSASKNDRNDAARMAKAILAHDISPVWVPSPEVEGIRDLAGAYDGATARLATAKQRLLAFLAKRGFAYGGTTPAGNPRKYWTYDFLRWLDKVRPEDDGGVRTLAALRSEVEAAAEARADLLSEYRAAVDASPIAAEAAALQSIKGCAFALAAAFSAEVGDFTRFRSGRQVTAYFGLAPSQRSSGDSVRLGGISGAGNALVRKLAVEGSWCYAAARHQPKLMPRDTGVPLEIRMHGRKGSERLLRRREEMLARGMPQAKANAATAAELVRWLWALGTMCREGAE

SEQ ID NO: 374812 - protein, 345 aa, unidentified
MGVIIGVDTHKASCTAAVLDERGELVDQQRFASTRTGSRALGRWAKRWPERRWAVEGASGLGRRLTQQLVGDGEPVVDVPAKLAARVRLLSAGHGRKSDAHDAVSVAMAALGTTRLGQVRLEDHTAVLRLLSDRRDDLVRQRTRTLNRLHVLLCDLLPGGAKRSLDADTAAALLRRLRPATAPARTRRQLAVDLVADLRALDRRITAVEERLRHAVTQSATTLIELFGVGPILAAKLLGEVGDVRRFATKHRFAAHNGTAPIEASSGEVVRHRLSRAGNRKLNHALHLIAIVQIRHPTAGQAYYRRKLAEGKSRKEALRCLKRRLSDAVYRQHLADQHQPVQAQA

SEQ ID NO: 374813 - protein, 370 aa, unidentified
MERVCYVGMDVHKETIDAVVMDLGGRGPRFEKRISAHMSAVRRFFDPLLREGAVVAGYEAGCLGFKLYRELRGMGVRCVVIAPSSIARAPGERVKTDRRDALMLAKLLRNGEGQAVHVPEPCDEAVRDYLRARADLKVELKRYRQRLQHLLIRHGLVFVDGKNWTLRYRRWLGQQQFAHEALKETVDLYYGRILELEGRLVEMDQRIQEMAEGQRYGQAVGRLRCLRGIDYLTALALVAEIGDFRRFGSAEQFMAFLGLVPSEHSSGATRRQGGITKTGNRHIRRLLVEASWHYRYSRPPSAGLRRRREGQSEQVVVYADRAMRRLAKKFHRLVGRGKSSQVAVTAAARELAGFVWGLMVGKIELHEQAA

SEQ ID NO: 374814 - protein, 350 aa, unidentified
MDQRTILTLGLDIGDRHTHFCLLASSEEEVSEEGRVRTTPTAIEAFLRSRERCRVVLEVGTHSPWLSRLAETAGHEVLVANPRALRFIYGNTRKSDRRDAELLARVGRMDPKLLSPIRHRREETQRALLVLRVRDTLVSSRTKMVTAARGMAKALGARITKCSTPSFVKTARKELPEDLRAALDPLLDSIEKLTLEIRESDKRVEQLGAESYPETKLIRQVHGVGPVTALAFVLIIEDPAHFAKSRDVGPFLGMVPRRDQSGNADPQLRITKAGDSFLRRLLVQSAHYILGPFGEDSDLRRRGLALVERGGKAAKKRAVIATARKLAVMLHALWKTGEVYDPLHNAKQAA

SEQ ID NO: 374815 - protein, 436 aa, unidentified
MTSHCQSYNYKFQEVILLSFKILKFNCCGLDVHKTWIYACIGITDSNNRTEYKQARFSSFTKGLNELCNWLAKYNCTDVCMESTGKYWIPVFNILEQHNLWVTLSHPKYTKPMKGNKTDRKDAKWICDLYMCGMVKPSFIPPADIRELRDLVRYRFKLTCMITGEKNRAQNCLTVSNLKLDDVFSDVFGKSSRSITEQILQHPGEIFDVAPFIHGRCKTPIEEIQAAVDGAISKEQAVKLRQCLDHIDELNKHISEVEQEILCLSDKYEAALNLIRTVPGFNKNPMTAIQVLSEIGCDMSVFPTDKHLVSWAGCCPRNDKSDRKIKSTRISRAGSYFKPVLVQVANALIKSKKYPEFITRYKRIKARRGHKKAIIAICRMILTAIWHILSDLKPYTPEGFLESRPVKEEKILTTSQALNLLKLRGYVIKDDPLPTS

SEQ ID NO: 374816 - protein, 412 aa, unidentified
MDVFCGIDWAEDHHDIALVDRDGQLLARRRISDDAAGFASLLALLAEHGDTAEDPVPAAIETPRGLLTACLRATGRKVYPINPMAVARYRDRHSIAGRKSDHGDSVVLANVLRTDMHAHRPLPDDSELAQAIAVLARAQQDAVWARTQAHNKLRSHLREYFPGFLAAFTAARGGITRPEARTILAAVPTPAAAAQLTLAQLRSLLKKAGRVRGINTEATRLRDAFQARQMRQLPLVEDAMGQQALALLGQLNAACTAADDLEQAVTRSFNQHPDAGIITSFPGLGPVTGARVLAEIGDDRSRFQDAKGLKAYAGAAPITRASGKSKSVTCRRVKNNRLSAVGYVWAFSALSASPGARGHYDRRRDAGDGHAAAERNLFSRMLGCLHHCLVTGHTYDENTAFPNTPKKLPQAA

SEQ ID NO: 374817 - protein, 345 aa, unidentified
MEIHTIGIDLAKTIFHLVGVNARGEVVVRKKCSRNQLLRFTANLRVCLVGMEACGGSHFLGRALREQGHDVRLMPAQYVKPYVKTNKNDYIDAEAIAEAVTRPSMRFVPIKTDDQLDLQSLHRVRERWVGRRTAVINQIRGMLLERGITVTKGRRHIEESLPGILEDSDNKLSGALRVLLTELRLEMQYLSRQIEESDKLILRIASELEPCRRLVAIPGIGPVIATATIAAIGNGAAFKKGRGFAAWLGVVPGEHSTGGKQTLTETSRRGNRYLRKLFVQGAHAVLQKRRTQSTGLSTWLAQLTTRKRIQVAAVALANKLARMVWAVLAKGEAYRPPVAALSACV

SEQ ID NO: 374818 - protein, 334 aa, unidentified
MKFIGIDIGKSNFVAAVPLPAAPAGAAGSDGYRVATYPNTAAGAKKFIDTLSLSDHHCVMEATGNYGFLLLYMLHQSSIAVSLVNPKQIKHFARMMMSVTKTDRKDACMISLYGEKMTPSVYKMPSETIILLKQKRTVIRQLKKQLSAMKNLHGSLAVLPLPDHSSMLSINKTITFLTLQIKTLESELYNIAAEQFDRQIKALTSIKGIGVTLASALIVATGGFSHFDNAKQLSRFIGICPTCYQSGSSINIKGGINRNGDASLRSLLYIASWSAIRYNAACRECYLRLKTNGKPSKIALIAVANKLIRQAFAIVTTDAMYIDGYGSNLKTQPN

SEQ ID NO: 374819 - protein, 338 aa, unidentified
MNIVFLGIDLAKNVFQLCGLNQAGKPVYTKRTGRKELLQTLANIPACLIGIEASTGAFYWQREFEKPGHKVKVISPQYVKPFVRGQKNDGNDAQAIAVALMQPTMQFVPPKSPEQQDIQALHRARQRIVNHRTATVCQIRGLLLDRGIPIGSTVSRARRAIPLIPEDAENGLSSRMRRTIAELYDLFNDLERRIHFFDKEIETVFRQSEACQRIAKVKGIGPKTATAVVAAIGKGTEFKNGRHFAAWPGLVPRQHSSGNRQVLMNMTKKGDRHLRTLFIHGARAVVRVATNNNDGHMNQWVNQLKERRGFNKTTVAVANKNARIIWSMLRNETGYQVV

SEQ ID NO: 374820 - protein, 341 aa, unidentified
MKLNVVGVDVAKRVLQLHWVEADSGEIVSVKVRREKFLEHFANRAPCLVGMEACGGAQHWARKLRQLGHEVRLLSGRMVKPFVSGNKNDAADARAIWTAVQQPGTKTVAVKSEAQQAVLALHRMRQQLVKFRTAQINGARGLLTEYGEVMPQGRVGVIRQLPAALGRLAQHLPAILIDTLREQFARIHELDAQILQIEQRLRHWHREDTASQRIAAIPGVGLLTATAAVATMGDAKAFKSGREFAAWLGLVPRHSGTGGRVRLLGISKRGDTYLRTLLIHGARAVVTHSKAPPEWVTNLAQRRPKNVTVVALANKMARTIWALSAYERAYQPRYVSQSTPS

SEQ ID NO: 374821 - protein, 343 aa, unidentified
MDHFAGLDVSVKETSVCIVDDTGRIVREVKVASEPEALLAVLMNPGYLLKRIGMEAGPLSQWLYSALAEAGLPVICVETRHMRAVLKAQINKTDRNDARGIAQMMRVGLYRPVHVKTLRSQKLRMLLTHRKLLQSKAIAIDNDLRGTLRNFGLKVGVVGTVKFENRIKELVENLPDLAILVEPLLIVRRVLREQIDVLHRRLLAVVRDDDVCRRLMTVPGVGPVVALTYRATVDVPARFKNSKAVGAVFGLTPSRHQSGESDRSGGISRCGDEMMRMMLYEAAQILLVRSTKWSWLKAWAMQIARRRGMKKAIVALARRLAVIMHRIWVDGTEFRWTRDVATA

SEQ ID NO: 374822 - protein, 309 aa, unidentified
MDTTIVGIDVAKDRLDVAVRPSGELFVVERNAGGLELLVERLKPLAPTLVVLEATVGFETVAAAALAAAGLPVVVVNPAQVRAFAKAIGQRAKTDPIDAAVIAHFAEATKPEPRPLPDEATRLLADLVARRRQIVEMIGSERQREKRATARIKKSIARLIKALEKELASVNGDIDDAVHGSPAWRDKEDLLASVPGIGPIIARTLIADLPELRRLDRKKIAALAGLAPFTRQSGQWRGRSFIGGGRSKVRTALFMGAMTARRHNPILKAFFARLVAAGKPRMVALIAVARKLLTILNAVLREQKPWQTA

SEQ ID NO: 374823 - protein, 408 aa, unidentified
MEQLYVGIDVSSTKHAAYLMKPDGDKFSSFPMQNDRSGAKMISEKIVSALTKLGLKDVVIGMEATSIYGDNLVYALREDGNLGRFHRKIHVLNPKQVKNFKKSYPELPKNDPVDAFVIADQLRFGRIGKEVYMDDYRYKALQTLTRARFYAVQNLTREKERFANYLFLKCSGIAQSKDIPNTSATTLALMEHFETVDELANADLNELTAFVNRAGHGRFADPEATAKLVQAAARGSYRLPKTVNDSINQVMSASIAAMRALESQIRTLEKAIEKQFEIIPNTLISIPGIGKVYSAGIIAEIGDIRRFDGQASVAKYAGLVWTQHKSNEFEAEDTRLIKSGNRYLRYYLLEAANSVRRCDSEFRRYYDLKFKEVNKHQHKRALALTARKLVRLVFRLLKDNRLYKLPEG

SEQ ID NO: 374824 - protein, 341 aa, unidentified
MKNKSFIGIDISKNVIDASIFCEGTPIKDFPHAVFNNSHKGFGEMCTWLKKNHVVLSNSLFGMEFTGSYSMELEKFLNARKYQFCMLSTHVVKHYPMGPKDKSDKIDSAKIADFLYRYDGTECVKPYKMPDKTMQRLKALTKERKFLVEQRTCFMNRRQLCTTKEAAQLYDGYIKEFSHDIENIELKMQNLLETDDSLSTTYKNLLTIPGIGFVNAMNVIVITRNFTAFETARQYASYIGVAPHFHTSGTSVKWRPRPSARCDGQAKAVLSMAASVAVQCDAELQSFYNRKLGGKQDSDTKRKALNAIKFKLVLRMFAIGKQNREWEPLDSKSSNEKLAIS

SEQ ID NO: 374825 - protein, 345 aa, unidentified
MKKIIIGIDFSKETFDATLLDCRNSELSEALQSAVHEKFTNKKEGFQAFLTWIKSFVKKINSAELLLCGEKTGKYSLALSNFLYAKGYSIWLDSGLRIKRSLGISRGKSDKADSLKIALYAYRYQDMAVCYVPLSKNVSRLKELFLYRQHLVSQIKAMAVRKNVTDDFKKELGDVRFIVDSATEIIQQIKATIKKCEEKMQELIEEDEELKTTHDSITSVKGISLINATAFIAYTNNFKDFGGNAKKIATYWGVAAFAQESGTSVHKGARVSKIASKMLKSLLTQAARIAVRWEPKFRQYFEHLISRGKHQGVALNNVKNKLIHVITALAVSKEKYNQEYKCINR

SEQ ID NO: 374826 - protein, 397 aa, unidentified
MYIVGIDIAKRKHEAAVIDGEGTVIIKPFSFTNNCSGYNRLLAMLTKAKLPLDEVSFAMEATGHYWLALFTRLQKEGFRVQVINPVQTNSIRSFYIRQAKTDPRDALLIAEVIRFGHFSESTLHPENIYELRELCRGRHAIVSMQADVKRKVVALLDQVFPEYETAFTNLFGDTSMAILQTCPTPKELSEMPLEELCHLIEVSSHKRFRMAKAQELQELARNSFGFAMAGDVFSTMIRLYAKHLDFLKQQVREMDRKIAEIMDTLDTPITTITGIGPTLGAYILSEIGDISRFSSAAKLAAYAGIDPTMRQSGEYNGVRNRMSKRGSPYLRHAIWLAASSAVLHDPALKLYFQKKRDEGKPYMASVGHACRKMVSIIYAVMRDNKAYTPYIPNEISA

SEQ ID NO: 374827 - protein, 423 aa, unidentified
MLEETPERAEIIERIAALDIGKAELVCCVRVPGGPGKSRRMQEVKTYKTMTRSLLVMIERLRELEVSRVIMEATSDYWKPPFYLLEAAGFETWLVNAKDVKHLPGRPKTDKLDSVWLAKVGERQMIRPSFVPPPEIRVLRDLTRYRFDLIAVRTAEKQRVEKLLEDAQIKLSVVASDIFGVSGRDMLAALIHGQRDPKVLAQFARGRMRAKLTVLEEAFTGRFNDHHAFLLSKMLARIDQISADIAELEVAIESQIAPFSQQADHLDEIPGVGLTTANMIIAEVGLDMSRFPTPAHLCSWARFAPSVKESAGRKKGNGATGHGNRYLAAALGEAAVGAGKTDTFLGERYRRIARRRGKKKAIVAVGRSILVIVWHLLSDPQARFEDLGSDFYDTHLNTSAKKRNHIRQLEALGYKVTLEPAAA

SEQ ID NO: 374828 - protein, 347 aa, unidentified
MIIIGCDYHPSWQQICWIDTLTGETGERKLEHAQGEAEKYYRSLPSAALIGMESTGNCQWFTELMASLGHQLWIGDAARIRAAEVRQQKTDRRDAALLLKLLLEGRFPRIWTPTVEEQDQRQLLLHRHKLVEMRVRVKNELQHLAMNRGITKGRRLWSKAGERVLCELPLAPWASRRREDLFRLRKMLDEQITALDEAVKKVAERNDRARLLMTHPGVGPITSLAFVLTMGDVNRFPRGKQVGSYLGLIPREHSSGGKQRTRSISKQGNRFMRTLLVEAAQSVVRYEPEFRKEYLHRCHRSEKGVAKVAAARKLAIRLYWMLRSNTAYPEIVRVESSSRVPLDSSPA

SEQ ID NO: 374829 - protein, 407 aa, unidentified
MEVIYPRCAGLDVHKQTVVACVRIAGDGPPLQEVRTFATTTSGLLALADWLDSFEVEVVAMEATGVYWKPVWHVLESHFELVLANAAHVKNVPGRKTDVNDATWLADLLAHGLIRASFVPPAAVQELRTLTRTRKQFVRERSAHAQRIEKVLEDANLKLSVVLADILGKSGRAVLQALIDGHTDPERLASCISTRVKASRTELLEALRGHVSAHHRFMLKLHLGHIDALDQAIAAIETEVGLGLEPFRQAAKLLSTMPGLSAVSAHVVVAEIGIDMSRFPTPGHLLSWACLCPRNDESAGKRRSTRLRRGGKWLKTTLVQAAWSAVKVKGSYLQAQFHRLRARRGAKKAIIGVAASMLTAAWHMLRDGTVWHDLGAAHFDRADAHKTANRLIRRLQQIGYTVQATPA

SEQ ID NO: 374830 - protein, 381 aa, unidentified
MTTKATRNTQAKTSEGPLFMAFELSEKTWKLGFTTGPGQKPRERNVTARDQERVLDEIAQAKRRLGLPETALVVSCYEAGREGFWLHRFLEAHGITNHVVDSSAIEVSRRQRRAKSDGLDVRKLLSMLIRYHEGERQVWQVVHVPSVEAEDQRHLHRDLETLKQERGDTTRRIKGLLSSQGLRVENLTRLPEQLDALRLWDGSPIPPGLRQRVLRVYAHHQFLSEQIAAEEAERGTQLQDSNDASIEKVRQLMLLKGIGINGAWLLVMEFFAWRGFKNRREVGGLAGLTPTPYQSGESAREQGITKAGNPHVRWMITELAWGWLRFQPQSALSVWFRERYGSGGKRLRRIGIVAVARKVLIALWRFLETGELPEGAALKTR

SEQ ID NO: 374831 - protein, 314 aa, unidentified
MPEQMFVGIDVSKARLDVAVLPSGEIFAVENTAAGLTELLIRLSEVQPHLVVLEATGGLEQAAMLALHDAGLAVTVLNPRQVRHFCRALGKHAKTDRMDAVLLAKFAQTLQPQAQVPGDAPQRALEALLARRRQMVDLLTMERNRLHSSRDSYVQRDVQEVIQYLEGRREQLDQALQEAILNSPKFQGTYALLTSTPGVGPVVALTLLAQLPELGSLSRQKVANLVGVAPLNWDSGKSRGHRCIWGGRAEVRQVLYMAAVTAVRWNPTLKTVFNHLIQKGKPKKVALVACMRKLLVYLNAMVRDQTPWHAPSAA

SEQ ID NO: 374832 - protein, 356 aa, unidentified
MNKRTKLNFSGQAIYLGLDVHKKSWSVSIFTQYGEYKTFSQPPEAEVLIQYLERHFPGARYHSVYEAGYCGFWIHDQLREKGIDNIVANPADIPTRDKERRSKRDRIDCRKLARGLRGGEIEGIYTPPRWKLEDRSLIRTRLSMGRKQARCKNQIKSMLLFYGVAIPEQREMGHWSRRFIQWIEGIRMERSSGDMALQLHLEELCHLRQILAKLNRSIVALARTEEYRGWISLLKTIPGISTLTAMIVLTELYEITRFRSIDQLCRYVGLIPDTQSSGEKEHVGGMTRRHHSSLRWLLIEASWIAVRKDPAMMEAFNEYCKRMGKSKAIIKIARKLLNRIRYVLKNQAEYVTGVIE

SEQ ID NO: 374833 - protein, 340 aa, unidentified
MNRIGLDAHSASFMMAVVSEAGKVTRCLSRPTSAENLIELVSAVPGPKELVVEESGVAQWVKDTLEPYVDRLVVCDPRHNRWIAKEDFNDDRTSAIKLAQLLRGGYIKEVRHLDGCGAQLRGAFGHYGDLNEQVCRFKNKLKATYRQVGIAVSGDGIYEATRHGEWLERLKDTPALRRQAQQLFVLVDTLGEMKQECLKAMVKSARKDKGYELLLAMPGVGPVVACGYIALIGTPHRFSRKNKLWRYGCLGNTLHVSDDRVYQDRPSKSGNRLLKWVVVQHFMGAVERTRKENVFQRRYQRLRREGHSEKVARRQVCRSLLSVVRAVWMKGEPYREAPLS

SEQ ID NO: 374834 - protein, 487 aa, unidentified
MITERRLVGVDLGIASDHTVRVLTGEGSEVCRRRARPTVESLAAVEAAALAGAPADIRLEVVMEPTGPAWLPVAVFFCNRGHQVFRVASAKAADLRRFLSRHAKSNGVDADTLARLPLIAPESLHPLELPGPAAAALDRRVRACDRLTQQGALHQRRIKDLARQLLPDSPLTGDLCQTDLAVLARWADPRALLGARRTRLLAVISKTSHGQQGAARADAWRTAATAALELYADHPAIAFTDLAAEVATEVRLLQAVRAELAGHAAARAEAYRFTDPGALAASLPGLAEVGAPTVTAIIGRPGRFRTGKQFRSFTGLTPKASETGDTDRKGQAMSKAGNRLLRTTLIRAADNARRQDPQLARIYYVQMVERGAEHLKACCVVAAHLAERLHTVLVRGMPYVVCDTDGTPVDPARAKQIIAEHWTVPSEVRARRRSHKASTRRGAKAGKAPQQVRAGHDRSDTRRVDKRGDLPRNSSVLAPRTPVKQGT

SEQ ID NO: 374835 - protein, 350 aa, unidentified
MAKDSIETIGCDLGDKQSELCILLPDGKLERPDPIKTTRRAFTKFFTRARAHVVIEVGTHSRWVSELLKNLGHKVTVANPRRVKLISQSTLKRDKKDAEWLARLGKADEELLAPVHHRGSEAQADLAVTKARDALVRTRTKLVNHARGLVKSFGERLPTCTAESFHRKAKFAVPARLRPALEPVFRVLEQLEEQIDAYDEQIKQLAKKYPDVEVIGQPKGVGTLTALVFLLTLEDKTRFSKSRAVGAFIGFNPKRDQSGDCDKQLGIAKTGDAFMRRLAVGSANYILGPFGEDSELRRWGLELARRGGRNAKKRATVAVARKLVVLMHRLWVTGDVYEPLGYKARRTTAA

SEQ ID NO: 374836 - protein, 424 aa, unidentified
MQNTAARKRKQVPEGYLVVGVDPLKKRHAAVAITQDFTTQAKFKFDNTREGLEAMLDRAKVEMVKSGCRGVMFAIETGGHYWRNVAYFLDEHGIPFRFINQFTLKRRREGKDLNRRKNDYRDSEVAAQLLCTGEFTESKLPQGVYAELRTAHNAYRRLVKERTRITNLVKGLLDALFPEFTQVFKDPCALTALSVLSICPIPRVIAGMTEDEFEATIEAQHKGRRLMRKKLRALHYSARTSIGIDAGACSLSSEIAFLVEKLELIRGHICSIERTLVRLVDETEEGKYLLSIRGLNYIAVAGLLAELGCFKAYQSARQMIKMAGTNPTESESAGKKRARTPMSKQGRPVLRYCAWTSVIPMLRFNSDFRAWAKQRRERPVHANPLGGREVVGAALNRLLRLAFAMVKNKTYYQVSKAELTLVAV

SEQ ID NO: 374837 - protein, 359 aa, unidentified
MEAQRKALSFKGQNIYIGIDVHLKSWSVTLMSEATQLKRFSQSPDPDALYAHLVRNYPEAEYHSVYEAGFCGFWIHYRLVGLGIHNIVVNPADVPTTTSEKLRKTDAVDSAKLARSLRAGELKGIYVPGSESLETRSLIRLRDSITKDQTRLKNRIKSHLRYLGIEIPEEFSGPGRCWNRRFVVWLKGAETGTAYGRQTLDFLVRQYESLRGQRLEMLRAVMALSRTERFEKPLENLMTVPGIGQLTGMSLLSEIDDIRRFKSADQLAAFIGMIPMCHSSGEREGVGDITVRRSARLRSVLVEASWVAVRQDPALSMAYGNYCKRMAPGKAIIKIARKLVNRIYFVMKRNQPYVKCVVA

SEQ ID NO: 374838 - protein, 341 aa, unidentified
MDKELYFGVDVSKKTLDLAYYDGETIDWKNAHIQVSNDDAGFKKIGSWVAKVGKDFDTFLFCMEYTGLYNQNFRLWLESKEYIYGMVEPRKMHHFEPDLDDDQRSLDRIKTDELDAFRIAIYCEQNHKKILRNPSKLPSPVYFKLKRLLAERKQNTKQSTLYKQQLHDICAYDTDLSVERKKLLLKSMTENQKAIDREIDSYMNEDASISKNYDLLTSIPGIGRIIALETIVLTENFTAISNPRKYACYIGIAPFKKESGTSVRKRTTVSKKGFSEAKADLSIAVLSAIRNNPSIRDYWIRKRKEKCGGIVLNAIKFKLVLRMFAVIKRGTPYVETDAYKN

SEQ ID NO: 374839 - protein, 341 aa, unidentified
MFYVGLDIHSKVIAVCVLDKDAKVVRQARLRQVDQVVRLLEEIPGRFQLCFEASCGYGGWFELFTKYATRVVVAHPGHLRLIFRSQRKNDRVDAHKLAKLLVLDLLPAVHVPSADVRAWRELINYRTKLIGKRTRAKNEIRALLRSLRMAAPKRPGLWTQRGMAWLKELELEHRLHRVRLKQLVLEIEYLTEHLREVEAELKTFSQDNPAVPLLRTIPGVGLRTAEALVAFIDDPHRFPNAKAVGAYFGLVPCQDQSAHTNRLGHITREGAAVVRRLVTEAAWQAIRRSPSVAAYFERIGRGDPDRKKIALIATAHYLTRVMWGMLKHGTLWKETVSASAT

SEQ ID NO: 374840 - protein, 425 aa, unidentified
MGSSKQSREKMNTHLLSSEHAEASIKYVCGIDIGSQSCSSCVTRPDKSVVVKPITFVNTQQGWKVLEEKLAQLDAAPDQIVIGMEATSRSHENLYHELEQRGYQMRLLHPGQTHHFHQQRGLRAKTDRLDAMTIARVLLSGEARMGYIPGEQVATYRELVRLHTQLSEEAARYQNQIQVLVVVLFPEFNQVFADPCGQGALAVLKAYPHAQAVAEAGVEAVYQALRAIPATHFGRPTAQKLVAAAQTSSSSGRALSGRASSLRILCDQLEHTQANLTRLEEELEQLITTDPGTKGLQQMPELGPKTIAVLRAELGEVDRFACTDQAVAYAGMDIRIKESGKFKGKAKLSKRGSGLLRQILYLAALRSIRLEGSAFGAYYRHLVGRGLKKMSALMAVMRKMVAVTTHLMQTGEDYDPSKVWVGGTS

SEQ ID NO: 374841 - protein, 320 aa, unidentified
MTYIGIDISKDSFVAAYPSKCGYTTKTFPNTTSGVRKFIDSLPADCHCVMEATGNYSMLLLYLLQQANITVSMENPQKIKHFSRAMMSVTKTDEVDAKLIAMYGEKMNPAPYKIPSESIILLKQKRTVLRQLKKQLTAMLNLQHSLSVLPKQDPTAKVATEQTIKFLRKQISKMEEEITNISNKEFKRQMDLLTSIKGIGENIASALIMATGGFTYFSSAKQISRFLGLCPTYQQSGTSVNVKGHINRNGDTHLRSQLYVVAFSSIRFNSACKETYERLRANGKSGKVAVVAVANKLIRQMFAVVTNNRPYIDGYVSSFA

SEQ ID NO: 374842 - protein, 422 aa, unidentified
MDENSRLTEFRQMKNEIRGSAKYLVAGIDIAKERHHAFFGRSDGRTLLRNIVFDNTEEGFEKLLFHAEIIKKRHMLETIVFGMEPTADYHKPLAGYLIEKGYLTVLVAGTAVKKNRELLDGRWDKHDTKDAANIADLIAQGKCLFYEFPSYQIQQIRALLSLQQRLKKNERGCMVRIRNHLIAQYFPELDRYWGYAEGRAVIGNCFDPRHITRLPLEEFIPLVASRRGSTAQRVRIREIWHAARRSIGSPAHQAAVFEAALLTRQLQTIQAMIRETGARLHEICSPLPEYPCLVSIPGFGPEISAMIIGAIGNPHRFENARQVLKTAGLDLSSSRSGKRSETPYSISKGGKAHLRYALYQAARIASTRNRCFMQYLANTLTGRQRERGIVTKMRVKLAAKMLVIAWTLMKKREVFDPGYITI

SEQ ID NO: 374843 - protein, 408 aa, unidentified
MEVIRERCAGLDVHKDTVVACMRVQTEGQVRREVRSFGTMTQDLLTLSDWLEAQNCTHAAMEATGVYWKPVWHMLEGHVELVLANAAHIRNVSGRKSDVNDATWIADLLAHGLIRSSFVPPKPIAELRDLTRTRKQLTREIVQHTQRIQRVLQEANVKLDSVISSVLGVSGRRILRAIIDGEQDPEVLASLGSPRLACSPKALVEALRGRVTAHHRFLLSQHLGLIESLERTIQQFDEEIERAIHPFRELVQLLTAIPGISNISSRAMVAEIGIQMEQFSTVGHLISWASLCPRLDESAGRTRSSRVRVGAAWLKPMLVQCAWAAVRSKDTYLQAQYLRLKGRRGPKKAIVAVAASILTAAYHMLKYGVEYRDLGGAYFRKRDSEKVAQRLAKRIRELGYDVNISKVA

SEQ ID NO: 374844 - protein, 347 aa, unidentified
MRFYTQSHRYYCGIDLHARWMYLCILDPEGEVLLHRNLRAGPEAFLKAVEPYRQDLVVAVECIFSWYWLADLCAQHGIEFVLGHALYMKAIHGGKAKNDRIDSQKIAVLLRGGMIPVAYVYPPEMRSTRDLLRRRTYLMRKRAELLVHVQNTNSQYNLPEIGKKIAYRANRSGVAQRFSDPAVQTSIAADLSLIDFYDTLLNRLELFITSQAKQQNHHSFYLLRSVPGIGKILALTLLYEIHDISRFERVQEFVSYCRLVKCSRQSAGKNYGFSGKKIGNVHLKWAFSEAAVLFLRHNPEGQKLLARLERKDGKAKALTILAHKLARAVYFILRREKAFDLTQFLAA

SEQ ID NO: 374845 - protein, 346 aa, unidentified
MQITTIGLDLAKKVFQVHGISSGSEVIVKKTLRRSQVRRFFEQIDPCLVGIEACGTSHYWAREITKLGHEVRLMPPAYVKPYVKRGKTDAGDAEAICEAVTRPTMRFVAIKAPDQQAALALHRTRDLFVKQRTQLVNMIRGLLAEFGIEIRRGIEQALTLAKLIAAHEVPDIPPLATKVIAGLAGQVLDLQARLGGIERELLAWHRSNDIAKRLATIPGIGTVCATALAASVTDPHQFRSGRQFAAWLGLTPLQHSSGGKERLGRISKMDDKYLRRLLVVGMTSLIRRAKYKPEAVDPWLADLLSRKPVRLVTVALANKAARVVWAIMVRGGVYHRSASASVMTTA

SEQ ID NO: 374846 - protein, 354 aa, unidentified
MKRTTKYVAFDVHQATTVASVREESGRVIARSVLPTDSGALTEFVRGMRGARHVTFEEGTQAQWLYELLTPLVDRVIVCDRRGAPRQGNKGDQVDADHLSELLRRGALRAVYHGSADRATLKELTRTYRNLVEDATRVMLRLKALFRARGIATAGTAVYHPRSRARWLAQLLEGGARFRAEALYAELDVLRQLRPQAKAGMVTEARRDPAWRVLRTIPFLGPVRVALLLATMQTPWRFRTKRHLWAYAGLAVVTRSSADYTLRAGAPVRRRRAPMTRGLNRNHNRVLKDVFKGAATAATARPGPLQDFYHRVLAGGTREELARLTLTRKLAALTLRLWKTGERYDPTKLTMPAR

SEQ ID NO: 374847 - protein, 338 aa, unidentified
MKTHVGVDLHQRFCYLTAVDASGKTCKQGQVVNEGAALRAWLRQVPGPRQVVVEASGFWPAFARAVAPEQERLVMVHPQRVKAIASAKLKNDRVDSETLAHLSRCDLLPEAWMADEATQQLRLRVRLRITLGRQRARAKNQLQAVLHQEGFKKPVTDVFGKRGRAWLAGLELSAAGRLVVDTWLREVDHLDVELAEQTRELERMAKADARALCLQTMPGIGAYAAMVILAELGDVERFGNKRALASYAGLTPVVRESAGKRKRGGITHQGSNTLRWIMLQVAQVAARYSPGARSYYARLRQRKPAQVAKIALARKLLTVVWALLHHGECFDEELFSRG

SEQ ID NO: 374848 - protein, 414 aa, unidentified
MDVLYPRCAGLDVHKDTVVAAVRSAANGPANTEVRTFDTTTPGLLGLSGWLAECGCTHVAMEATGVYWKPVWHILSDGDVTLILANAAHVKNVPGRKTDVADAAWLADLLAHGLVRASFVPEAPTQAMRALLRTRKQLVREQASHAQRIQKTLEDANLKLASVLTQVMGKSGRAIIGALIAGERDPDALLRLVQRGVKAPPERLRAALTGRVTERHRFLLRLHLRQIDALEAAIAEIDQEVDRDLDPFRQAVRLLRTIPGLSDLTAQVIVSEIGLDMSRFPTAGHLISWAGLCPRNDESAGKRRSTRLRKGAPWLKTTLVQCAWAGTRKKGSYLQAQFQRLRHRRGPKKAVCAVAASILTAAYHMLRDGTFYQDLGPDHLRRATPEAQACRLARQITKLGFTCVIAPADTRVSV

SEQ ID NO: 374849 - protein, 325 aa, unidentified
MGKNQLHAAITVDGVNFHDQRVENTPTSIKEYFRQLKSKFNFNASQLIVCMEHTGIYCYPILDYLTHQGIAVCVEPAVRIKQSQGMQRGKNDKMDAVRIAKYLFKNHTELKLWKPKREVVQQLRALLVVRERLVRGQKQFEVPVKESSEFISKSIRQLAVANCKATITAIKKDIKRVNLEISRLIKKDAQLHAQIRLATSVIGIGTIIATNMIIDTNEFQDIDNYKKYACYSGIAPFPNQSGKSLRGKDKVSHLANKRIKTLLHMGAWSAVQYAPDMKAYYNRKLAEGKSPYSVLNAVCNKLISRVFVCIKNQRMYQKDYRPALA

SEQ ID NO: 374850 - protein, 420 aa, unidentified
MTRREPTPPEAALVAIDVAKRRNEVLIEAVRGGYRRRMTILNTRADHDELIASLQAMRKPVVVGLEPTGNYHRVLAHRLIAAGFSVRLISSMALARTREALHNGWDKNDPKDAQVILHMLGIGATMVYQDPLVAGINDLQELSKTHEVVSKAKTEIWHRLLTHYLPLYFPEIERFVGNSRSDWFLSFLERFPTPASITAMTKENFVRAAWDVVGRKVSKARLLGDIYETACTSAALPVSLDSPAIAMFRLVLAEARSLIQQRNIIEAHAHELLREWPDYLRLRQVPGIGPIHALTILAEAGDLRRFRHHRQFLKFCGLDLATHQSGQFRGQTRLSKFGNARLRRTFWLAAQVAIRQRDNSLRDCFGRHVAKDRESRDLRRKATVAVATKMARVVHALIKTGTDYRPFPEGPVPSGRTLSL

SEQ ID NO: 374851 - protein, 348 aa, unidentified
MAIVEAARTTAVTGGVDTHLDLNVAAALDSIGGLLGVEEFPTTAAGHEKLLCWLAGFGQVARVGVEGTGSYGAGLARYLRAEGTEVVEVDRPNRQARRRTGKTGTVDAIEAARAAQGGRALGAPKTRDGNVEAIKASVVARRSARDTRIKTMDQIRHLGFTAPDQLRQRLAGVPRSLLAKRAASLRPRADQGTVIFATTTALRALGRRVLALDEEAKQIDKILDDLVRATAPELLAVYGVGTDTAAALLVAAGDNPDRLRSEPAWAHMCGVAPIEASSGKTKRYRLNRGGNRHANAALWRIVITRMSSDPRTQAYVARRTEEGLTKGEIIRVLKRYVAREVYRYLRPA

SEQ ID NO: 374852 - protein, 447 aa, unidentified
MMAKKKKTVEMTMLNPNAAGIDIGSTEHWVAVPQDRDAERVRHFSAFTCDLHEIARWLKKCGITSIAMESTGIYWLNLFLLLEDYGFEVFLVNARNVKNVSGRKTDLNDAEWIQKLHSCGLLSNSFQPDSYTRELRTYTRHRQNLIRQTSRYMQHMQKSMEQMNLKLHKVIRDLAGKTGMAIVGAILNGERDTEILAGLRDRCIRASKETIMKSLEGTWRDEYLFTLRQAYDAYHFVQEQIRQCDEKIEMALKERESSKARDTDIDPPKKRRKSKNKNTPRFDVDVHLKMQLGVDITQIDGIDSLSGLNILGEMGSDFSKWPTRKQYLSWLNLVPNNKQSGGKLISSHLMNKKNTAGHIFRKCGSCLWKSKGPLGDYYRIQRAKNGGKAAAIATGNKLASIVYTMVTKQVEYDESILVRMKRNSQQRRLINLQRKVVRIQNELEGVA

SEQ ID NO: 374853 - protein, 338 aa, unidentified
MGTYAGIDLHSSNNYIGIMDQDYKRLFGRRQPNDLNNVLKVLEPFKSDLEGVIVESTYNWYWLVDGLQEHGYTVHLANPSAIKQYEGIKHTDDRWDSFWLAHMKHLNILPEGYIYPKEQRSVRDLLRRRLFFVKQRTANILSLQSTITRNLGIKISGNNIKKLNMDDANELFDSSNLVFMAQNNISAIKHLGKIIKGIEKEIKPQVQLRKEFVMLLTIPGIEIILGLTIMLEVGDIIRFSKVGNYSSYCRCVSSKRLSNGKKKGENNKKNGNKYLAWAYVEAAHFATRYIPKAQKFYQQKMAKANGAVATKALANKLARASYFIMRDQVPFDEDMLFK

SEQ ID NO: 374854 - protein, 400 aa, unidentified
METLLVGIDVGCRRHRVAVGMADGTLVDQFDVDHRPTAFDAFFTRVEKQAAKHGLAVSVGMEGYGGWARPLDEMVLAKGWTLLNVNNLKLARYKEIFPSPAKTDAIDARKILELMRLRPLLPQAKAILNEVIAAPRVNHDMKLLTRRRRQLVNERIMVVNRMHSDLQAIAPGLLEITGRVDNQWFLHFLSARDTFEQLTRMHQSGILKIKNIGQKYAGLIRTWQKTAQLSSDVLMVGDMVMEDARRVLALADQIARIEAQLRGLIPESPLAITIKSITGFGLVCASELAGEIGTIERFSSESALARYIGMAPLDNSSGVYTGAKGGKQVNRRAKAAMMVAVARHYAHTPQSQVYYEKKRAEGKRHNQAVRSLGRHITRVIWALVKNNKQYECRESISENA

SEQ ID NO: 374855 - protein, 320 aa, unidentified
MTDGSVFIGIDVAKAHLDVAVRPDGDTWQAANDASGIAALVAHLDQLRPTLVVLEATGGYERPVTASLVAAGVPVAVVNPRHAAQGAPGDFAKATGKLAKTDTLDAHVLAHFADAVRPTPRPLPDADTQMLAAILGRRRQVVAMLTAEQNRLHTAPTTIRERIGAHIVWLEEDLKEIDTALAQAIADDPTWRERDALLRSVPGVGPVLAVTLLAELPQLGALTRHQVAALAGVAPLNRDSGTRRGIRTVWGGRARVRGALYMAALVATRYNPVIRAFYARLCAAGKPKKVALTACMRKLLTILNALLAHHTPWQSSPSTP

SEQ ID NO: 374856 - protein, 340 aa, unidentified
MSRIKDIRKSVDIKHMYVGLDLHKATINATVMDENGTVLHEVKIKSEPDSLRNFSDSIPFGSDIVIESSSTWYWAYRILSERHNVTLSNPLKTKAIAESKVKTDKVDSFTLANLLRGGYIAESYIPPMELMQLREMVRYRASLVRVRSIIKNRIHAHLLMYNIKINASPFTKEFIKTLRELNDYKINGYLNVLEVLNKEIDDISNRIKEIANDNEDAKLLMSIPGISFYSALFIISEIGDINRFPDSGHLVSYAGLAPSTRSSGNKVYHGPITKQGSSYLRWILTQVTWANIRKEPNGTVGNFYSKLKKKKGSSKAIVAASAKMLRIIYWVLKEHRPYQS

SEQ ID NO: 374857 - protein, 360 aa, unidentified
MPDRIEGLLSLNLQGRHQPLDPPSLPKVEEETMTPTTWIGIDIAKADFVAAQRTQKGFDTQTFPMTSQGFEAWRNWLPEAPDLGIVFEATGPYWLRLACWLDELEVSLPYACINPRQLRDFAKASPERNKTDPIDAALLVHFAETFPPSLERPKSLSSQRLRALWRHHLELQNLFDRTRDRQEKASADPRLPAEVAEGLETLLTCLRNELDNVLRQASALVREDTTLRQAHRLLLSIPGIGPKTALTLLAEYGPQLHQATPRQLTCYVGLDPILFESGSSVRKRPHISKQGNWRLRRALYMAALVGVRFNPVLKTFYERKLQQGLAKKSALVAAMRKLLHLVYGVLKHQQPFNPDYGPQT

SEQ ID NO: 374858 - protein, 455 aa, unidentified
MPKKSTGDRPELKPVNVNAAAIDVGSKMHMAAVNPTCTDTPVRTFGTFTQELHDLADWFKACGVTSVAMESTGVYWIPVYEILEQRGFEVMLVNARFAKNVPGRKTDVSDAAWLRQLHSYGLLRGSFRPDAEVVTLRAYLRQRERLVEYAAAHIQHMQKALMEMNLQLHHVVSDITGATGMRIIRAIVAGERNPDVLATYRDVRCHSSIETIRAALVGNDRDEHVFALTQSLELYDIYQAKMLDCDRKLEVLIAALSNKGAKPVGKLSKPRVKTKQVNAPTFDVRTALYGVLGVDLTDIHGLGPSLALKLIGECGTDLKAWPSAKHFTSWLCLAPGNKISGGKVLSSRTRRSSSRAAALLRLAATTVGRSDTALGAFYRRLSSRAGKSKAVTATARKIAVLFYNTLRHGMLYRDPGADQYERQYRSRVLANLQRRAKSLGFMLQAIPGDADPAVS

SEQ ID NO: 374859 - protein, 394 aa, unidentified
MWINEKAHREPCLLAIRCSRLILIKASLRIPQSGMINNPKNLTKEASMNFYTKQHQYYCGIDLHAKSMYLCIINKEGEIVLQRNIRTHPELFLKTIERYREDIVVAVECIFTWYWIADLCAQENIPFVLGHALYMKAIHGGKAKNDKIDAHKIAVLLRGGMIPMAYVYPQEMRSTRDLLRRRMHLTQKRAELLRHIQNTNYQYNLPDIEKKIAYKANREGVAEHFPDESVSKSIELDLNLLDYYDQLLPRLEHQISLIAKAHDADSYFRLRSIPGIGRILGLVILYEIHDIRRFPTVQDFVSYCRLVKSAKESAGKRLGSSGKKIGNVHLKWAFSEAAVLFLRRNPEARKYREKLQKKHGKAKSLTILAHKLARAVYYILKRKEVFHMNTFFER

SEQ ID NO: 374860 - protein, 339 aa, unidentified
MEPTIIGVDIAKQVFQLHWIDRETGEVVDRQLKRGVFLEHFANREPCLIGMEACGSSQHWARRLSELGHQVKLMPGKLVKAFVTGNKNDVADACAIWAATSQPGIKTVAIKTEAQQAVLALHRMRQQLVIFRRSQSNCLRGLLSEYGEVMALGRAAMSRAMPDVLARLESRLPAVLIDSLREQWQRLSNMDEEIARIERRLRAWLQESDACKAIADIPGVGFLTATAAVAAMGNAKAFKSGREFAAWLGLVPAQIGTGGKVRLLGISKRGDRYLRTLLIHGARSVMKHVKDAESWAAKLRQRRPLNIVIVALANKMARTIWALLAHRCSYRADYTAAIA

SEQ ID NO: 374861 - protein, 335 aa, unidentified
MKHYAGLDLSMESTQVCIVDETGRKLVSEKVESTPEAIATLLKRYGPIERAVIETGRMSPAICLGLRDLAIPVMCIDARQAHQSLKAMKANKTDPHDAAGLAQLARTGFYKEVHVKSPAAHGVRSVITARGHLVEARVRLDNMIRGLCATFGYCPGAGQGKAFLERIMQAAHIPGLGEAITSLLSVRAELMEQIKEMDRRLRIIASQSQACEILMTIPGVGVQTSAAFAVAADEAGRFRQSRNAGAYFGLVPRRHQSGELDWTGRITKQGDGTVRKLLYEAANSILTRSRETFALKTWAMKIAKRRGLKKARVALARRLAVIMHAMLRDGTLFQA

SEQ ID NO: 374862 - protein, 374 aa, unidentified
MWIAEDLGAAPQADGEYEVRGHGLKHQKEKRSMDHFAGLDVSVKETSVCIVDDTGKIVREVKIASEPEALLAVLSNPDYHFKRIGLEAGPLSQWLYSALTEADLPVICVETRHMQAVLKAQINKTDRNDARGIAQMMRVGLYRPVHVKTLRSQKLRMLLTHRKLLQSKAIAIENDLRGTLRNFGLKVGIAGKVKFEARIKELVERFPDLAVLVEPLLVVRRVLREQLGILHRRLLVIVRDDDVCRRLMTVPGVGPVVALTYRATVDVPVRFRKSKAVGAVFGLTPSKYQSGEIDRTGAISRCGDDMMRMMLYEAAQSMFHSTKWSWLKAWAMKVARHRGMKKAIVALARRLAVIMHRIWVDGTEFRWTREVAAT

SEQ ID NO: 374863 - protein, 370 aa, unidentified
MENRSMFVGLDVHKETIDVSIAEGHRNGEVRHYGVIASDLEPLDKVVRALRAPHRRLHFVYEAGPCGFGIYRHLTKRGETCVVVSPSMVPKRSGDRVKTDRRDSVTLARLHRAGELRAIYVPDDADEAMRDLVRAREDAVAGGTQAKYRLKAFLLRQGRRYPGREGWTVPYRRWLTDLSFPTAPQHITLQEYRDTIDETERRITRLTEQLRQLARTWRWAPVVAALQALRGVSFITAMALVAELGDLTRFGHPRELMAYLGLVPSEYSSGPSVRRGAITKAGNPHVRRLLAEAAWAYQGIPRIGRQHAYRQEALPKVVCDIAWKAQLRLTTRFRRLIARGKAKPKVATAIARELAGFIWAIAQEVSPASQ

SEQ ID NO: 374864 - protein, 389 aa, unidentified
MRKRYASVACGGMDVHYKSSHVTFRDADGRVVAREQLDHTNRAGLREQLARWPKGIPIVLEASFGWGWLSDLMEEVGLDPQLSNCYKVDGMRKARGWVKTNKKDADLLSLLPKETASEAEPWWQVWRAPADVRDRREWMRYRADMVGLTSGTKNRIHSVFHRHGIFFEERTDLFGGLGRRFLDQLSQDGRHAGGVLPDGARQALRGLVNLHTYLRGQLLEVARTLRGQLERDELARRLDGIPGIGLILSHTLRSEIGDIGRFKNDRKLAAYACLAPRSDDTGEAHPERAPLGRHLGGRGNRTLKWTFIEAAHGAVKRGGKWRAMFDRATDGGKKNRGRGHIKVARELVKVVYIVWSRNVAYREAPPRQPGSGRQTRRPRKNSRPGTGQP

SEQ ID NO: 374865 - protein, 369 aa, unidentified
MTAKDQFAAHVGLDWADKKHDVCVQFKNGDRIFHVIEHTPEALDIWLNELHQRVKGRIAIAIELKKGPVVYALQKYPFVTVFPIHALSLARYRQAFWPSGAKDDPQDAELALDLMLRYPHKIKAIEADNPDIRLLQQLVEQRRLLVEDKRRFVNRLINTLKQYYPQPLEWFSHRDSSLFCELIIRWPSLQQLKRARSDTIRHFMNAKGGPAVAYTEARVASIASAIPLTTDKTVIEANALMATALASQIKLAGDLIRTYDERIESLFDTLPDAELFKSLPGMGPCMGPRMLAALGDNRDRFNSAEEIQNYAGIAPVTERSGQKSWVHWRWQCAKFVRQTFVEWTAKTVNSSYWARLYYQGQREKGKSHQ

SEQ ID NO: 374866 - protein, 370 aa, unidentified
MNKITYVGLDTHKNSIQVCMLLPQSQDRVEWNLPNTPEDIRKMARTLKRRSEGSLQVCYEAGPLGFSLQRQLLALDIPCEVIAPTTIPHRSGDKVKTDRLDAFRLARWHSHQEMSIVHPPTLEQEAVRDLCRCRISAKKDQTRARHRVAKFLTRHGHRYDDGKRAWTQQYYGWLQRQHFDQSATQTAFDSYLLSVVGLDERVKSLELAMGNIAEQPFYQTMVGYLRCFRGINTVTALSLAAELYSIERFPKARNLMDFVGLVPGESSTGEDERRLPITKRGNSVVRHLLVEAAWHYRHPPQASVTLRERRQGQPGWAVAISERASNRLHRRYRALVARHKHPNKVVAALARELAGFIWEMMIQAHLETRS

SEQ ID NO: 374867 - protein, 344 aa, unidentified
MDHFAGLDVSVKETSICIVDDAGKIVREVKVASEPEALLAVLKNLAYHFKRIGLEAGPLSQWLFSALAEAGLPVICVETRHMQAVLKAQINKTDRNDARGIAQMMRAGLYRPVHVKTIRSQKLRMLLTHRKLLQSKAIAIENDLRGTLRNFGLKVGMVGKVKFEARISELVDNLPDLAVLVEPMLIVRRTLREQIVILHRRLLAIVRDDEVCRRLMTTPGVGPVVALTYRATVDVPARFRKSKAVGAVFGLTCAKYQSGEVDRNGRISRCGDEMMRVMLYEAAQSMLRSKKWSWLKAWAMQIARRRGMKKAIVALARRLAVIMHRIWVDGTEFRWTREQATAAA

SEQ ID NO: 374868 - protein, 369 aa, unidentified
MARNGTLAKSQELQPSFHATTEQITIGIDLGDRFSHCCVLGPDGKILTEGRLRSTPETMARHFQDLPPARIAIEVGTHSRWVSQLLGQWGHEVIVANPRNLRMIADSIRKSDQVDAHMLARLARVDPKLLSPIVHRKQEIYPDLIQLKARDLLVKNRTRLMNAVRGVLKSAGLRVPPSGTSCFPSKAATCIPDELKPSLTPLLETISHLNKQIYSLDKAIESTAQNRYPETNRLRQISGVGSITALQYVLTIGDPGRFAHSRDVPAYLGLTPRRHQSGSVEQQLRISKAGNKQLRSLLVQCAQYLLGRFGPDSDLKRWGTRMFERGGKNSKKRAIVAVARKLAVLLHRLWVTGDTYHPLYNASISSVTR

SEQ ID NO: 374869 - protein, 344 aa, unidentified
MQHYIGLDVSVKETSVCIVDKAGQVIREVKAATEPVAILAVLAEKPLAIERIGLEAGPLSQWLYSALAEAGLPVICVETRHMKAALSAQINKSDRNDARGIAQMMRVGLYRPVHVKTLASQKRRMLLTSRQLLQAKALDIENDLRGTLRNFGLKVGMVGTVKFEARIRELVADHPDLAAIVEPLLIARRVLREQLDVLHRQLLEIVRHDEVCRRLMTTPGVGAVVALTFRATVDVPSRFTSSKAVGAAFGLTPRRQQSGEIDRMGGISKCGDAMMREMLFEAALVVMTHSRKWSWLKAWGMKIARHRGMKRAIVAVARRLAVIMHRMWVDGTEFRWTREEAAAA

SEQ ID NO: 374870 - protein, 419 aa, unidentified
MRIVYPRCCGLDVHKRSISACLLTPHEDGGTQQQVRRFGTVTRDLLELCDWLTSNQVTHVAMESTGVYWKPVWNILEASFTILLVNAQHAKAVPGRKTDTKDCQWIADLLQHGLLSGSFVPPSPIRQLRDLTRTRASLRQDHTAVANRMQKILEDANIKLASVATDWLGVSGRVILSRMLDGEQDAGKLAGLCRGRLRDKIPEMQLALEGRMTEHHRWMLRLQREQLEFLEAQIVKLETKIQEEMQSYQEAVDLCITVPGIEAIAAANLVAEMGVNMDQFPSAAHLASWAGLCPGNNESAGKRLSGKARNGSVWLRRSLCQAAWAASHSKNTYLSAQFRRLAARKGKKRAIVAVGHTILVILFHMLKNHQPYRDLGADYFDRRNAEQLKRVLIRRLERLGLQVTVVQSPACSSSAVQTA

SEQ ID NO: 374871 - protein, 341 aa, unidentified
MTRISTIGLDLAKNVFQLHGVDASGAVVLRRQLRRGAVEKFFAQLPPCLVGMEACGSAHHWARVIGRYGHEVKLMPPAYVKPYVKRNKNDGRDAEGICEAVTRPTMRFVPVKSVEQQAALAVHGTRALLVRQRTMAANALRAALSELGIVAAQGYEGLRELMTRLEAPSEEIPEMMRSALLVLARHWQALDTDERVLEQQIAKAARCDQEARRLMAVPGVGPITATMVLAKVPDAKVFRSGRDFAAWIGLTGKDHGTGGKHRPGRISKQGDRALRALLISGASSHLRQQKRRGISDPWLRELLARRPYKVAMVAFAAKTARILWAMLVKGEPYRASAPAAA

SEQ ID NO: 374872 - protein, 339 aa, unidentified
MKNSEKTTYKHYLAIDWSIEEVYTARMLAQGEKIETKKFDSDIRQIKKYLMSIKGSKILTIEETTSSHWLYVELLDCVDKILICDPYRNKLLSEGAKNDKIDARKLCLLLRSGLLKEVYHSLNEDYKIRKLVSAYEDLVKAGVRVKNQKSALYRAEGLRYKKDKINKKDKLILFIEEQQNASIKLYIEEKKKYESKFEEIKKGNEIIKLLCGVPGIGTILSMRIYSKVIDASRFENKYKFWGMCGLVNHQRESGGKNYGKKKPRYSRTLKSVFKTAAIAAIGGNNDVREYYDHLLKVGYTISEARNQIARYIAKVCYAVMKNKIAYKAYQWRELKKTAA

SEQ ID NO: 374873 - protein, 378 aa, unidentified
MGSALEVQRRLALKQDSNKPRQSPKRRTFRADMVLTIGLDLGDKSSRYCVLNERAEIVGEGSVGTTRKAIVEKFQGLPSCRVALEVGTHSPWVSRLLAELGHEVLVANARQVKLISESSRKTDRIDAELLARMARADPSLLRPIRHRSAETQAVLTKVRVRATLVETRTSLINTVRSLAKVAGERVPACAADSLGMADLKDLPAEMQQTLEPLVRHIESLTEAILKSEKELAQIARRDYPETEQLQQIKGVGTLIALTYVLTVEDAGRFKRSRDVGCYVGLRPKRSQSGERSPELPISKEGDIYLRRLLVQGAHYILSRLGPDTDLKRWGVKLAARGGKNAHKRAVVAVARKLSILLHRLWVSGEVYEPLRNHRAQAA

SEQ ID NO: 374874 - protein, 345 aa, unidentified
MDQISRIGMDTSKHVFQLHGVNVAEEVVLRRKLRRKEMVTFFEKLAPTVIAIEACGASHHWARLLHSFGHTVKMIPPQLVKPYVKRGKNDAADAEALCEAMSRPTMRFVPVKSAEQQAALMLTSVRDRLIRNRTQLANAIRGYAAEFGLTAAKGMAHLVPLLERIQADESLPALARELFAAQAKEYEQLQSQIDEVDAQLMARHRADECSRRLAKIPGVGPIGAMLLTMKTPAPELFRSGRQFAAWIGLTPRDHSTAGKVRLGVITRAGDEGLRSVLVVGATAVIQHTRRSGKASPWLGALLKRKSPKLAAVALANKMARIAWKLMLTGEAYTATPAPAALAGAA

SEQ ID NO: 374875 - protein, 404 aa, unidentified
MHNDLGFDIWCGLDVGKQAHHACALDAAGKKVFDKPLPQDQSKLEDLFTRLSEHGRVLVIVDQPNTIGALPIAVARSMGIQVAYLPGLAMRRAADLYPGNAKTDARDAFVIADAARTMPHTLRRVDLGEETLAELKVLVGFDEDLAAEATRLSNRIRGLLTQIHPALERVVGPRLATRQGLAVIEQLGGPQGMTAASKSKLLRVITKANPRHAQNFADAITQTLSEQTVVVAGTAAAEQVLPKLAASLRQTLDQRSELAAQVEKVVDAHPLAEVLTSMPGVGVRTAARILLDVGDASLFPTAGHLAAYAGLAPVTHRSGTSIRGEFPARSGNKHLKRALFLSSFAALRSDPVSRAYYDRKRAQGKKHNAALICLSRRRVDVLFAMLRNREPYRAPNPTPQPLAA

SEQ ID NO: 374876 - protein, 423 aa, unidentified
MKPLATGGFTAYVGIDWADTKHDVCLQVPGNESREFDCIAHRVVAIDQWAQSLRQRFGSPIAVALELAKGPIVYALQKYEFLVLFPINPSTLAKYREAFKPSRAKDDPTDAELALDLLMRHPERFAPLQAQSEGMRALLSLTEQRRELVADKTRFTNRLTNTLKQYYPQALDWFDQRDTVLFCDFLARWPTLTQVKRARPSALKAFFYAHNGRRAHLISARLNAIKAAIPLTQDLGVIAPCRLQVLVLVEQLRTTLQAIERFDREIAELAPRLPDYCLFRHLPGAGPHLAPLLLAAFGEDRRRFQHADELRKYAGIAPVTERSGKKSWVHWRWQCPTFVRQTFVEWAGQTINKSFWAGAYYRQQRDKGSSYQAAVRSLAFKWIRILYRCWQTNTPYNESRYLSALRKRRSPLLKNLDLDTQNA

SEQ ID NO: 374877 - protein, 343 aa, unidentified
MQAITTIGLDIAKSVFQVHGVDAEGNVILRRQLKRRYVLAFFQKLPPCLVGIEACASSHHWSRELQTLGHTVRLMPPAYVKPYVKRHKNDAIDAEAICEAVTRPNMRFVATKTREQQSCLTLHRTRHLCIRQQTSVINAIRAHMAEFGIVAPVGRNGVEELLTVAADASDKRLPDVARACIVALGAQLRTLKAQILQFDRLIMAWHRSNQASRRLDDIPGVGPVLATALVATVADPIAFRSGRNFSAWIGIVPRQHSSGGKDRLGSISKRGDRYLRGLFVAGALAVIRYAKIHGTKHRPWLTALLARRPTKVAAIALANKVARMVWAMMARGERYKEPVALAR

SEQ ID NO: 374878 - protein, 311 aa, unidentified
MTKPVVGIDVGKAKLDVGLADEKRVRVWANDKAGRAELSDWVVVQKAALVVVEASGGYEAALVSELVSRGVAVALVNPTRVRAFARAEGILAKTDKIDAQVLARFGVTMKPQARVRREEAQVGLNELVTRRRQLVEMLGGEKNRLQTASLAMQAHLARHLDWLQAEIQDLEQQISQTIEANPAWAETAKRVDSAPGVGPITAATLVADLPELGHLNRQKIAALVGVAPFNHDSGKHRGKRRIFGGRTSVRSVLYMATLSAIRHNPVIKAFYQRLLDKGKLKKVALTACMRKLLVILNTMIKSAQDWNPAVS

SEQ ID NO: 374879 - protein, 403 aa, unidentified
MIFVGVDWAEAHNDVLVMDEGGAVLGRGRFGVGVEGLAQLHGLVADHAAEPAEVVVGIEIDRGLLVDALAGAGYQVYAVNPLAASRYRDRHTTSGAKSDASDAKLLADLVRTDAHNHRPLAGDSDEASAIRVLARAHQGLVWMRARQANGLRSALRDYFPGALSAFGTDLASSDALAVLAIAPTPERARALSRAKIAGALRRAGRERNLERRAAEIQEALRAEQPQAADVVADAFGAAAAARVAVLVSLNQQIAALEVALAERFDRHPDAEILRSLPGLGLVLGARVLGEFGDDPNRYGDARGRKAYAGTAPITKASGRSLVVLARIARNRRLADACERWAFCSLTSSTGARRYYDLLRARGKTHSQATRQLANRWVGILHACLERRQAYREEVAWPALRLVA

SEQ ID NO: 374880 - protein, 272 aa, unidentified
MSEYIGIDLHKAKSFVTRVDQRGRVLEQVELRHATGEMQRYLEKVPGDTRIVVEATGNWMWLYELIEARHPDLILAHPLKTKAIASARIKTDKIDATTLAHLLRADLVPAAYIPPRAVRDTREILRFRASLVRLRTQVKNKIAAILSKTGIVTPTKTAFGVKSRQFLATVAVRPCYRLALDGYLRQLAHLTDEITQAAQTIEAQAQADPQAQLLCTMPGIGAYSALLILSEIGDVHRCPDSRHLCSYAGLVPSVHASGGKTRLGRLTKQGST

SEQ ID NO: 374881 - protein, 347 aa, unidentified
MTLYIGVDFHPHQQTVSYCNNEEGEVHQTSLIHNVEQVRRFYSQLPKAVVGIEASCTAAWFEQMLFDLGHELRVGNPTAIRARARSRHKSDKRDADLILDLLLKDEFPTLWRRSVQGQSVLEQLRFRHQLVKHRTQICNRLQALAHAAGLPKKGMQTKRARVALMEARLSETQSFQRDQLFELLDDLTERIKQVEQWLEEKAAGDTKVQLLLTHKGIGLLSALATVHTLGDVSRFPSSKEAVAYTGLDPLEQSSAGKVRYGSISKAGSPVLRHLLGQAMHVASRYDGELRSFYKRLASRRSKSIAKVAATRKLLVRLFIMLRDGIDYAEFKRRGATVGMPVLSHGLQ

SEQ ID NO: 374882 - protein, 387 aa, unidentified
MIYYVGIDISKYKHDFCIISNAGELIVENLSFQNNKIGFQSLLDQLKPYNKSDIHIAFEATGHYSLNLELFLINNGFSFMKVNPLIIHQFLKAQSLRRTKTDKADSLAIARYLMSVPYKPNSDLLYTIFTLKSLCRAREKLIKERSKFAVLLTNELDKSFPEIKSFFNDSISATLLYILEKYTNIKHIAAMKDYESIRKLSRGKFTYARFAQLKELAKNSVGFHDENTDLLISTYVSIYNNFNNKIDPIEKQISTIIKELNPRMLTIPGIGEISAAMILSEYGDIKNFSNPNKMLAFAGLDPSINQSGTLETNGKMVKHGSGHLRYAIMNSALSILRFSPEFYDYYLKKCSEGKCHRVALSHVCKKLIRIIYSLEKNNIDFDPSLLK

SEQ ID NO: 374883 - protein, 348 aa, unidentified
MTLVGCDLHSRKQQVAVLDTTTGEVLEQELAHDGDTVERFYRALRPPVTIGIETTGYTQWFHTLMHRLGHTVVVGEAAKIRAMVVRKTKTDRRDARHLLDLLRHDRFPSVWIPDGDTRDRRTLVAHRVRLVRMRTMVKNGLQAIALSQRLALRSKLWTRHGLAQLQALRLPAHTARRRDDGLELLAWLTARIDQLDEQIATIANNDPRAQLLLTHPGIGPLTALTTVLVLGPIARFPNSQHVVSYVGLAPAVDASADKQRLGKITKQGNALLRWVLGQAAPLAARADDDLRRRYFSVLHRRGRPKARVALARKLLVRLYVMLRDQIDYAEFRRRGRSPRPLQTAAAAM

SEQ ID NO: 374884 - protein, 362 aa, unidentified
MDHIGIDVHKRESQICILAEGGELIEQRIRTEPERFAAVLGPRPRARILIEASTDSAWVARCLERLGHEVIVANPSFAPMYATRTRRIKTDRRDARALADANLLGAYRPAHRLSDAQRHVRGRLGVREALVRTRTRYISLIRALLRQHGYRVPSGGAETFIDRVAAMPLPGRLRSLIAPLLAVMLPLNRQLAYSDKVIEQLAAHDPRVKRLRTVPTIGPVTAAAFIASLDDAQRFRHAHQVEAYLGLVPREFSSGDTRRRGPITKAGPGRTRWLLIQAAVSIFRRRPAEAEALHTWALHIAARRGKHVAVVALARRLAGILYALLRDGSVFQPRPTRGGGDAPAAPAVTRHAASARGAGTAA

SEQ ID NO: 374885 - protein, 428 aa, unidentified
MNYNQNKRILQINDETLIVGVDIAKEKHVARAQDFRGIEYGKTLNFSNDNRGFNELYDWFSKLCAEHAKTNIIVGMEPTGHYWFCLAKFLRQKGIKIAVVNPMHVKKSKELDDNSPTKNDPKDARVIAQLVKDGRFAEPNMPQGIYADLRTAMNLRDMLIKEITSVKARVSRWLDIYFPEFEDVFSSWEGKAALLTLKRLSTPSKISQINAEDILILWKTEVQRAVGIKRARLLVDKANISIGLTEGIEMAEYELKYLLDKYDALKLKLEDLMVKVEAILSEIPEANEMMLIPGLGLVTVAGFLSEVCELAQYAHPRQIQKLAGLTLKEHSSGKHKGQTTITKRGRRKLRALLFKAIMPMVAKNAEFKALHQYYTTRTNNPLKKKQSLIALCCKLIRVLYAIGTKGVAYNPQKLMNDIKHPEVTGKAA

SEQ ID NO: 374886 - protein, 348 aa, unidentified
MDTIGVDLHKRETQLCIGQADGTMTEQRIVTSRERFTAVLGHRPPARILVEASTESEWVACHLESLGHEVIVADPNYAPMYATRSRRVKTDKRDARTLMEACRAGTYRPAHRLSAARRHVRAQLAVRDAVVRTRTRYVALAKALVRRDGLRVPSSAAERVGAHLEALAVSPPLAAELAPLLTLLPPLTATIAAADQRLAELEHTDPSVALLMTAPGIGAVTASALVATIDDVQRFASAHQFEAYLGLVPGERSSGELRRIGPITKAGNRRARWLLVEAAWRILRSKDAAGAPLRGWARPIAARRGARIAVVAVARRLAGILYAMWRDGASYEAGKIRRPRSARQSPAA

SEQ ID NO: 374887 - protein, 376 aa, unidentified
MTKILFVGMDVHAETIAVAVAEQDGEVRSHGVIANRVESIRKLAGKLGRAQRLRVCYEAGPTGYALYWQLAALGVACEVIAPSLIPRKPGERVKTDRRDAEKLARCYRAGELTAVWVPDADHEALRDLVRAREAAKKDQLRARHRLSKFLLRHAQRPPAGVKAWTKKYLAWVHAKVRFEQPALEATLADYLHEVEHAAERIVRLDKAIDEAVQHAPAQMRAVIEALQALRGVAQTTAATIVSELGSLSRFPSPKQLMSYSGLTPSEHSSGNRIQRGPITKSGNAHLRRVLVEAAWAYQHRPDVSGFLLRRQKKLALSEEVKRIAWKAQLRLSGRYKKLTARGKNKNETVTAVGRELLGFIWAIAVETEGQTKAIAA

SEQ ID NO: 374888 - protein, 328 aa, unidentified
MSKERFEVGVDVGQSEVWASLGSGKPRKFSHDQAGVKQLYRWAKEKSGELLLHFCMEATGVYSQSLAVRLLGCSRCEVSIINPAQIAAYAKAQMRRSKTDQIDAQVIWAYAESQQPRCWQPERQAIQELAALVAQADALKKTQRSWKNRQHAHQYRPALPRIVQQTSAKVERMLEQELEKVQKEIYRLCETDAELERDVDLLCTIPGIAKLTATRLLAYGKSALTERSPKELTAHAGLAPRHRQSGTSLKGRSRLCKQGDARIRFMLYMPTIAALSCNPIIRHHYQRHLANHKPKMVALMACMKKLLLMAQAILISRQPFNPNLIPLT

SEQ ID NO: 374889 - protein, 347 aa, unidentified
MAAVMIGVDPHKGSHTAVVIGRAEVALGQVRVRACAVQAERLLAWAAAWPERTWAIEGAGGLGHLLAQQLVAAGERVLDVQPKLAARVRLLAAGDVNKNDPNDARSVAVAALRSAACPPVRAEDHATVLKVWAKRHRDLSRSRNQVVCRLHAVLCELVPGGVSKQIYAAAAARILDQIEPAGAVQAARRELAGEFLADLRRIDAQRRDIRKKLTAAVRASGTTVTEVFGVGPAVAAAVIGDVRDISRFPGRDRFAAYNGTAPAEVSSGNRKVYRLSLRGNRRLNHAIHMAAVTQIRYGHTKGRLPAPEGRRAPRRCGPGRAPGERLCRQRGRLTPRTPALRTSHSRT

SEQ ID NO: 374890 - protein, 348 aa, unidentified
MENPTTIAIDLSKNVFEIAVERQGRICQRKRLNRRQMVEFFSQCPSATVLMEACGSSHYWGRVLQRLGHDVRLLPPQHVKPYVLGNKTDRRDAEAILSARHRESIVPVPVKSIEQQSVVFLHRLRATWMKTRTSRLNVLRGILRELGVTIPEGASRVLPAVSAALSDPSAPVPEVLHSVLMSAMAEVRELDERIEGVKRQLEAVAGTVPMVERLETIPGVGLLNATALAAMVGEFSRFPSGRRFASSLGLTPKEHSSGARRQLGAISKRGDTYLRTLLIGGARSVLLSAHRTKKPHRLQEWALNVERRRGRNRAAIAVANKLARIVWAVSTRGVPFHPIPLAPQNVPA

SEQ ID NO: 374891 - protein, 465 aa, unidentified
MAKFGKSKSQRGRKQQNRAKLKPQDWTLGLSVVHPKAAGIDIGNEEHYVAVPPSFDPEPVRRFGCFTADLNALADWLQQCGIETVAMQSTGVYWMALYDILSERGLRVFLVNARDTKNMPGRKSDVQECQWLLKLHVYGLLKNSFRPEEEILVVRTIWRQRQQHIADAARCIQHMQKAMSQMNLQLANVLGDICGVTGQAIVGAILKGERDPWQLAQFRDPRVKASKETIAKSLQGNWREELLFVLKQEFEGYQEFQRKIGECDDKLYEKMQRMEEKADPKQLPPCPRNKRARGNVPESFDLREELYRVIGVDLTTIDGVNSLTVQTVTAETGFDMSRWASEANFVSWLNLAPNNKISGGKVIGRDKRKVVNRAGQALRQAASSLLQSQSYLGAQYRRLRTKLGNPKAVKAMAAKLARIIYRTLKYGQAYVDKGSEYYEQRYRQQQIQFLAKRASALGLQLVDAA

SEQ ID NO: 374892 - protein, 348 aa, unidentified
MTGRDSSMDIAVLGIDLGKNSCSLVGLDGSGKVILRRRMQRKTILTLAAKLSPCIVAMEACCGAHHLGRLLAAQGHTIRLMSPEYVRPYVKAQKNDDRDAEAIAEAATRPTMRFVVLKSEEQLDMQTLHRVRDRTVCERTSLMNQLRAMLLERGVIVRQGRAKLRLRVTELLQQGAGELSSRIQLLIEDMLTRWMALDERIAAFDAEFAAEVKRDEAARRLTSIPGIGALNATALVAAVGNAETFARGRNLAAWLGLVPRQATTGGKPRLLGITKRGSKYLRKMLIQGARSALPTLSRSNTRLGRWLRSLLARTHSNTVVVALAAKMARIVWALLRYGTTFEPRAIAI

SEQ ID NO: 374893 - protein, 359 aa, unidentified
MTILPQTVAKTYSYIIGVDTHARKHVYSIITYTGEHVETRDFPATSSSIKRAIAWVGRRTGADASTLWIIEGTASYGAVVAGAVTDAGYTVAEAPSGYQKAGRGVGKTDPLDAQRMAAAALPIEVQKLRVPRLNDGARAALRVLVTARDMLAVERTKYVNALTALLRVTSLGIDARKPLSSTQILEVAGWRSREETIELQVARAEAVRLARRVGELDTHIKENTTQMTELVKLSEGKELLELTGIGPVVAAVCVAAWSHQGRLRSEAAFASLAGVNPIPASSGNTVRHRLNRRGDRKLNKALHTAAMVRMTHDEETRAYVAKRTAEGKTLKEIRRCIKRFLARRIYKILESAEVLPLKA

SEQ ID NO: 374894 - protein, 351 aa, unidentified
MLWVGLDLHKHYVTACAMDEQGGIVAEHRRLPADATTLVGWLGALPGPATVAMEATLYWAWLHDRLTAAGYAAVAAHPYQVKLIWQARCKTDPIDARKLAELGRAQLLPTIWVPDAETRARRKLLRGRAYLVRLRTRIKNRIHGYLTAENCRCLVTDLYGKAGRAWLQAVQLPEISRLQVDLLLEVLDTLDVRIRKLDQRVRRTVTQDAAAERLQTVPGIGPFGALLLLAEIGRIDRFASSHQLAAYAGLVPSTRSSGDKTTHGAVGSEGSPWLKWILIEIVQTLKLAPGPIGMQYQKLLRSKGKAKATVAAARKLCCYLYWMLKESWSYDEWLRQHELGVRPEQALVSVA

SEQ ID NO: 374895 - protein, 357 aa, unidentified
MQLQDTLSIPKVFIGLDIHKKSWTVSIQTDLFFHKTYSMPSIAEDLYQYVERTFPNHDVALVYEAGCCGFSAARYFLNLGWNVLVVNPADVKTGDKERYQKTDALDSKNLSNQLKSGVLKGIYIPTEEHEQFMTLARHRTQVTKKLRQTKSHIKSMLLFHGIKVPEEFDNPNWSKAFIEWLEELKFSTSCGDLALQGKIRMFKFIKLEYLEIANQMRAYCRKTNKKDYNLLRSIPGIGGYLASVILAECGDLRRFNNEGQFSSYIGLVPGIYNSGGSEKCLGITPRSRSQLRSYLVEAAWIAIRKDTEMQNYYRTHQGKNVKSVIIKVAHKMARRILSVIKTETAYQINRNLVPIEQ

SEQ ID NO: 374896 - protein, 389 aa, unidentified
MFYAGIDIGKFIHEITLIDDKSSKPKSLRFQNTRQGFEKLKQFLPDAQEVKISIEATGHYWLTVYYFLIQQNYSVLVVNPLQTDAYRKTKLRKTKTDRQDSFILAELMRLNLIQETPVAPPWTHQLKSLSRFHFGLVDQIADLKRQLFSLLDKVFPEFESLFSHPLISSARTLLKNYPLPEEIAKLDLSELKNLLEKSSRNKFSQEKAIKIKELATSSIGLPYLADAARVQILCLINHLEFIERQLEIIDSHISNLVKTYAPYLSSLPGFSDILAGVCLGEIGDISRFANKNKLAAFAGIDPTIYSSGEYTAPEHHMSKRGSPYLRRALWIAATIARKYDKELKQLYERKINQGKHYGTAIGSVARRLVNRLFVVLKEQRPYKLSSVNS

SEQ ID NO: 374897 - protein, 315 aa, unidentified
MAMPSSEHSTIIGVDVAKAELVIYEDSSGQLSTIANNKTAIKQWIKALHGKVSIAIEATNVYHLLFTDMVHEAGHTLYLMDGYALSHYRKGIGSRAKTDPIDARVLARYLKNEGANLTPWIPPSTLYRDLVSLFRRRAMLVQTRTALRLSWEGEPLLKNLLKSQLTSMKRLEDLIENMIKKLLDQAGLMLLVKQCMKVEGIGFLTAARLVATYQRGEFKSADAFIAFLGMDLRVAQSGKKKERSTLTKRGDPEVRRLLHNAAMSAGRTAAWKTFYEDKQSRGFKKTQVLVMLARKLARVVFALIRSGEEYRPKAA

SEQ ID NO: 374898 - protein, 418 aa, unidentified
MTKKLDTTFIQVVHPVCCGLDVHKKKISACLITIDTHGQEQYEIEEFGTFTNDLLEMKKWLTNNNCPIIAMESPGVYWRPVHNVLEGFMEVILVNARHIKNVPGRKTDISDSKWLAGLLRHGLLRGSFIPPKEIRQWRELTRLRRTYTESLADYKRRIHKLFETANIKIDSVVSDLFGVTGRNLIFLLCDKSELSLANIRENAKGGLKAKSEELYRSIQGFFEDHHRFQLIGMMEIIASFEKKVVEITERLENLTAEHQDLLDRLDELPGIDKKSAQSIVSEIGVTLDEFICMAALASWAGLCPGNNESAGKRKSGRTSVRNHPFKTILIEVAWAAVKKKGSYYRAKYFKLKARRGPKKAIVAIAHRISKAIFNIIKNGDTFKDLGEDYLTSQTRQRTINNIKQRAKQLGYELVPCMN

SEQ ID NO: 374899 - protein, 409 aa, unidentified
MQYFVGLDWAAREHAVCVVDERGAMTSRFEVAHTDAGLAELVTKLARFGAPAQLRVAIERPSGLVVDTLVDRGFAVVPIHPNAVKAARPRYSAAQGKTDLGDAYLLADLLRTDGHRFRTLSPLSDATRALRGLVRTRDDLVERRVAFANQLRALLGEFWAGAAEIFADVDSPIALEFLDRYPTPHFAAGLGEKRLAAFLARHAYCGRRSAAELLERLRSAPRSVAGELEADAKGDCVRALVAVLRPLVAQIAALTAAIEHAVEAHPDGKIVTSLFRAGRVCAAQLLAELGDDRARFVSDEHLAAEGGVAPVTRESGKHRAVTFRWACNMRLRSALTTLADTTRHTMPWARALYQRARERGKEHAHAIRIVARAWCRVLWQCWQQRVAYDPTKHRAARQFTLRTVDQEAA

SEQ ID NO: 374900 - protein, 417 aa, unidentified
MAEEVEWFVGIDWASQSHQVCLVDAHGECLGERAFAHGGPGIEELCDWLIARTGATPEVIGVAIEMTQGPVVEALLERGFCVYGINPKQLDRFRDRFTVAGAKDDRRDAHVLGDSLRTDRHAFRRLSNDEPVIVKLREWSRMADDLQQERARLASRMREQLWRYYPQMLELADDLAADWFLDLWNQAPTPAKAARLRQTTIERFVKAHRLRRWQAPEVLSILKQKPLSVAPGVVEAASDHIRTLTVRIRLVNQQLKAAHRKLDELCAQLIPSEENEPGQQCEQRDVVILQSMPGLGRIILAVLLAEVWQPLRRRDYHALRSLSGVAPVTRRSGKTSVVVRRYACNKRLANALYHWARLATQHDALSRRRYAALRQRGHSHGRALRTVADRLLSVACTLLEQQTVFDPTYKVHEAAGA

SEQ ID NO: 374901 - protein, 338 aa, unidentified
MPLYGGIDLHANNSVVVLLNEQDQVIYQRRLSNHLPTILEQLAPYHSDIKGMVVESTYNWYWLVDGLMEADYRVHLANPVAMQQYSGLKYTDDHSDARWLAQVLRLGVLPEGYIYPKAARAVRDVLRKRAHLVRQHTANVLSVQNILARNTGSRFSAKRIHEFTKADLEGLLPEANQVLAVTSSLALLDCLSQQIKTLEKAVTKSLQHTPAYEQLLTVDGIGTILAQTIGLETGDIGRFPTVGNYASYCRCVKSTKISNGKRKGQGNVKNGNPYLEWAYIEAAQFAIRFNPTVQRFYQRKHAKSHLRVARKAVAHKLSRACYYIMRDLVPFDVHKAFG

SEQ ID NO: 374902 - protein, 408 aa, unidentified
MNPLFVGIDVSSKNNVAYLMKPDGSKHSSFSVQNNLGGAKLLSERIVSALSSMRLSDVVIGLEATSIYGDNLVYALREDGGLGRFRRKIHVLNPKQVKKFKEAYPDLPKNDWVDAFVIADHLRFGRIAKEVYMDDYRYQALRTLTRARFDVIQNLTREKQRFANYLFLKCSGMAQDKGIQNTSATTIALMERFETVDNLANADLDDLTAFVAETGRGRFADPESTAKAVQAAARGSYRLPKTVNDTVNQAMAVSIASMRALKEQVKVLDKAIEQQFEIIPNTLTSIPGVGKVYSAGIIAEIGDIHRFASQASVAKFAGLVWTQHQSGEFEAEHSRMIKSGNRYLRYYLLEAANSVRRCDSEFRRYYDLKYHEVNKYQHKRALALTARKLVRLVFRLLKDNRLYIPPEG

SEQ ID NO: 374903 - protein, 339 aa, unidentified
MLYAGVDTHKKYSRVVVTDYHGNRVAQASLSNDQASFSDFFLKLGEPTKAVVEAGRNWGIIYDMLDNLGVEPTLANPLKARAIAEAKIKTDTIDARTLADLLRADLIPKVYVPSRRVRAQKDLLRQRLWLVNIRTMVKNRIHHILDRNHVATSFHSDMFGKAGREELGRVSIPAPDNLLLKAHLEILDHIQAQVDNSEKWIQEAMVENPIVAILRTIPGLGKILASLVAMEIDDIHRFSCPGKLCAYAGLVPSTYASGGKVRHGRLLPNCNRWLRWAFVEASWIAQRTSPYCQVYFERMKKRKGANSAATALARRLCEITWHCLTENRNYEERSVPAAF

SEQ ID NO: 374904 - protein, 420 aa, unidentified
MKEESIEFAAYIGLDWADRTHVIRLRCAGSQAVEQREVTHTPEALAAWVSELQQRFGGRPVAVALEQSRGALVHALMSYDFVVLYPVNPKSLAKYREAFRVGGAKDDPDDAQLLLELLTLHRDKLRAWVPDDELTRTLVLLVQYRRQLIDERTSLTNRLTSLLKLYYPQALRWAGGLATQQAGEFLRHWPTLADIQRAPATTLRKFYLAHGCRKAELIEQRLQEIKLAQPLTRDLAVITASVSMVQAIVNQLRALITAVAQMEKQITELFGQHPDHDLFESFPGAGPVLAPRLLTAMGADRQRFSVAREVQQFSGIAPVTERSGQSCWVHWRRACPKFVRQSFHEYAARSIRWSPWAKAFYEQQRQKGNGHHAAVRSLAYRWIRIIYRCWQQRGPYSEATYQQALIKRHSPLAKLLPAPH

SEQ ID NO: 374905 - protein, 480 aa, unidentified
MVLPTTPSPHPVPAHRRRRAQAQAHTEARQQAEARRLEGLPVLQPHAAGIDIGSRSHWVCVGPDLVQEFPAHTDGLHALLAWLRTHQVSTVAMESTGVYWIPLYELLEAEGLEALLVDPSFTRRVKGRPKTDRLDCQWIYRLHSVGLLAPAFRPDEKTCQLRSYLRQRANPVRDAGQHIQRLQKALEQMNLKLTEILSDVTGLTGQQIIKAILRGVRDPQKLARLRNGRCHATAAEIAQALTGTYRAEHLFALRQAYQAWQFYQKQIDQVDGQIQLQLGQMKQERALPPLPPRKPQNGRKPNQLRFDVRTALYYVVGLDLTEIEGLGEHTALTIISEIGVEVSKFPTVKHFCSWLGLCPQFKKTGGQVRSSRTRPGANRVATALRMAASSLYAQRGPLGSFLRRKKAQLGAPKAVTATAHKLARLVYQALKHGLAYVRQSQAEYEEQVRQQQLRALRKKARQLGVEIVENAAAAGETAAR

SEQ ID NO: 374906 - protein, 424 aa, unidentified
MKVTYQTCCGVDVHKSFLVATIVKTTGGIEPSYQKERFSTFNNSILEFKQWLLDNDCHDVCMESTGKYWVPVFNLLEDDINVVIANPKWVKAVKGNKDDTKDSKWIGDLFRLGLVKGSYIPCKKVRILREYTRYRYKLVSCRSSEKNRYQNALTVCNVALDSVVSDIFGKSSTSIIDYLLEQSGSSINHEEIASKLLRSLKSKEDAVIESVEGYQMTDAQKYRMRLVRAHMDYITAEINDVDKMIENMISSNTDFENAVQFLCTIPGVKRDSAITIISEIGTDMSQFSSSKRLCCWAGLTPGSNESAGKKKSVRITRAGVYLKPALVQCAHAAVKSDKSPYYKKKYESLVKRRGKKRAIIAIARMILTAIYQMLSTGEQWNPSDLYKIDMPVALVEKQKAKAIKQAKKLLQREGLLPPDEPLAS

SEQ ID NO: 374907 - protein, 402 aa, unidentified
MTDGSTRFFGLDIHKEYFVAVAVNRERETVFGPQRVSNYQLDDWAGRVLTPQDAIVLEMTTNTYLFHDTLLPLVHSVIAVHPPNVPLVTNVHVKTDKKAAETLAQLLAAGMLTGVWIPPHEVRDLRSLISRREKMVHLSTMAKNRLHALEHRKHLVLPDNPFSPDQRTWWENLELSITEKLLVRSDLDTLQFAQKQVERIEECLKQKSIQDERIPLLIQLPGVAMLTATTILAAIGDITRFPTAKKLVGYAGLGTRVHDSGMTHSSGRITKAGRKDLRRAMVNAANHAVLDNPHWKAEMERLEPHLGRSKAIVAIARKLLVAVWHVLSRQLADRFADPQNVARSFLSHAYQVRVRNLPKGQSAPAFTRQQLDRLGLGKDLQKISFGSKLIKLPPSKLLIEKK

SEQ ID NO: 374908 - protein, 388 aa, unidentified
MYMIYVGIDISKYKHDCFICKDTAEVIVENLSFDNNKKGFQQFLDLLKPYDNSNVRIGLEATGHYGLNLKLFLEKNNYSFMEFNPLLVKEFYKSLSLRKTKTDKVDAIVICQKLMSVPYKPNSQLFYHKYSIKSLTRLRETLVKQRSKYKVQLTNILDIIFPEFKPFFNNSFGSTSIYILNKYKIPERIAKMRDFETLNKLSRGNFTYAKFVKLKDLAKNTIGESNDIFEIELSSILNLYKNIDDHIIELDKQISTIIKDLNPPTLSIPGIGVISCASIISEFGDISRFSNAAKMLSFAGLEPGIIESGTMSSKGKMVKRGSGYLRYSLMNVALTVIRYNNTFYDYYYKKISEGKCHRVALSHVCKKLIRVIYILETKNIQFDPSLLK

SEQ ID NO: 374909 - protein, 321 aa, unidentified
MKTSDLNPCFIGIDVSKNRLDAHILPTNVFKSVSNDDKGCKKLVSMMLSLNPVCIVLEGTGGYETTIAMQMAIAKLPVAIVNPRQVRDFAKALGILAKTDKIDARVLAQFAETIKPEPRFIPDQQALELKEIVTRRRQLIAMMEAEKNRLTHARSKAARTSIEGIICAIKAQIKDFEDQIGHLIQASPLWCMQDNLLREVKGIGPITSATLIATLPELGKLNRREIASLVGVAPYNHDSGKLRGRRSIKGGRSEARKALYMATLVACRWNSVIKEFSDRLEARGKRKKVVIVACMRKLLTILNAKMRVFYNKEQIIMAEAA

SEQ ID NO: 374910 - protein, 392 aa, unidentified
MRISVGIDVAKETHWVVALTETGDTVLDHAVTNDPAAIEALLAELGALPGECTIGLDVLGGIATLLSAMLVAAGQRVVHVPGLAVNRARQGTTGGEAKSDPRDARVIADQVRSRRDLRPLAIEDETLAELQLLVGRRRDLVTEQTRRLSRLHDLLTRVHPGLERALDLTSKGGLWFLTRYVTPAEIRAAGRARLLRHLRRGSARHLEALATAALEAAQRQQIALPGERVAAGLCQELAREALAVRERLAAIEAALAKVLAAHPDHTLIRSLPGMGVILTAEFLAEVGSRDRFADADALAAAAGLAPVLRQSGKVRFLRRPLGGDKRLKRVFYQAAFCSLCCPASRAFYARKRREGKRHHQALLALARRRVNVLWAMLRDRRPYELKEPRCAA

SEQ ID NO: 374911 - protein, 335 aa, unidentified
MGNGLRVLGIDISKQKFDVCLTTTSGGKERYRTFRNNEAGFDELAGFLKLHGAERVHACMEPTGRFCEKLALWLRERQHEVSIVNAYRIKGFAISELKRSKTDRIDAGIIARFCLMHNPEIWTPREEDVQQITDIGRYVDELTADLVREKNRLKSGIENAVVVKEIENHIRYLEKTIEKLDKRMRTLVKNNDRLETAFKCATSIIGVGERLAFTFLGEIGYGDKFISTRQVEAFCGLNPRLRTSGTTLNSRPKMSKMGSSRMRHALYMPALSSMQHNPILREFADRLRAAGKNPRAIVGAIMRKLLRLLFAVVKTGKPYDLEYHVRPRLLEGNEA

SEQ ID NO: 374912 - protein, 405 aa, unidentified
MLYLGIDLHRAQMTVSLRNENGDVILRRQVSTRWAKLEEFRGQLQQAGAAREKFIAIVEVCGFHDWLVKWLQQDDGCHKVLVVQPLGRSATKTDRRDANTLSELLWVNRERLLRGDRVQGIRTVLVPGAEEQAERHLTQLRERLVWKRTQTLNQIHKILRRHNLEWEQPTKSFQTRRVAEWLQTLQLGPMDRLALNQLLVQWKLWEEQLAVTDTQIAERFQANQAAQLLATIPGVSMYIALAITCRILPIERFPRGRSLANFLGLTPGCRNSDKMERLGSITKEGSRLVRCLLAQVILHLLRRDQTVRAWYQRIKRRRGANIARVAVMRRMATILWRMLSKGERWRPGAASSETPPAASDSRPARLWRPRRTMLLALAARVAEAAGSSIGFSSLLAGGEVTRCPA

SEQ ID NO: 374913 - protein, 387 aa, unidentified
MTVRTVNDLPAATHGETVRCLFAIELSKQSWVIGFNTPLSEKISRRTLSGCDWKGLLELIEDVRARVSREMGRAVAVMSCYEAGYDGFWLHRQLEAHGVRNYVIDPASLQVDRRARRVKTDRIDAERLLRSLMAYLRGEPKVWSVVRVPSVAEEDARRLHRERDRLVLERVQHVNRIKGLCALHGIYDYHPLRPQATARLEQLRTAQGGELPPRLKSEIKRELHRLELVVEMIATLEAERDAIVEDEASTHLNAEKIQNLHKLKAIGPEFAAVLVGEIFHRSFDNRRQLASYVGVTPSPFQSGSMAHEGGISKAGNRKGRTTGIELAWLWLRYQPDSDLSIWFRARVGIMKGRIRRIAIVALARKLLVALWRYLETGLVPRGAVLKG

SEQ ID NO: 374914 - protein, 352 aa, unidentified
MKLIKKQLTGKSYSVVNKYAGYDNYLAVDWSQSTMAIAMIRAPYQNRIRVTEHPSSLKQLQQLLKSLSGKTIIALEESSPAHWLFVNLYDYAAKVVICDPYQNRLLTQGPKTDPIDAQKLSTLLYNGMLKETYHAKKEEFELRKYISAYSDLIKRGVRLQNQKTAFLGQDGLSRKTRNLSKAEKESTKFILNQLEEDIQQYEKQKKDFEVLFTGLCKKNKTLKNLMSIPGIGIIGAVTILGTVIDVKRFDSVGKFLAYSGLVTHVKQSGGKTYGHRKGRYSRILKQAFKVAASTCINGENELSALYKDLLKRGVSQHNARNAVARYVARVTFGILKTEKPFISKKTKVKSKK

SEQ ID NO: 374915 - protein, 467 aa, unidentified
MAKNTKKFPKTQSASNFKLTPMNPCVAGIDIGASSVFICIGFFDGHQEIREYLTFTEDLKNMRTWIQQNGIQSVAMESTGVYWIPVYDILAQAGIDVILVNAYYLKTVPGRKTDVKDCQWIQQLHAHGLLSGSFRPNDEGVELRGYVRQRSRLFELASQQVQLMHKALVQMNIQLNHVVSDITGATGMNIIRSIVSGERAPAVLAKYRDPRCKKDEKEIAKALDGNYRQEHLLALKHALAAYDFFHQQVLECEEAVEKMLGQWEKQAKQSASSQNSSPAECASKTKSKDRQKKTKYNLSPYHFEAEDSLETILQVNLTEIPGLDVNGIIKILAEIGMDMSRWPSAKHFASWLGLCPGNKISGGKILSSKTKPTANRAAQAFRLAANSLYRSKSALGAYFRRMRARLGAPKAVTAAAHKLAKILYTMLKERKSFMEVGQAAYEQEYKERQLHSLKKRAQDLGYNLVAV

SEQ ID NO: 374916 - protein, 321 aa, unidentified
MTLNAALFVGIDVAKADFVVACRPDAGSWTAMNNGRGIATTTARLQTLGPALVVLESTGGYEAALAEALTAAQLPVVVVNPRQVRDFGKAIGQLAKTDRLDARLLALFAERVQPSPRPRPSPLCQRIAALVARRRQLQVMRTAEMNRLPRTAPTIRVEIRAHLRWLTRRIVAIDRQLHDAVHSDDGFRHNEQLLRSVPGIGPVVSSTLLADLPELGLLNRRQVAALAGVAPLASDSGQVRGKRLVWGGRASVRATLYMAALVGTRYNQTIQIFYRRLLAAGKPKKLALVACMRKLLTMLNAMLRTHTAWQSVTPVINEQHP

SEQ ID NO: 374917 - protein, 387 aa, unidentified
METQIRLTQIGWDSHRMFSLATLRDCGGRVTARWRLKHRDRVGMRESLARWPRGSPVVLEATFGWGWISDELKAAGLEPHLASSRKVGAWRKARGLAKSDRIDADLLSELWFQEPRWWEVWLAPPEVRDQREWMRYRMALVTMQSGIKNRIHAVLHRHGIVWEQTDLFGTKGRQFLSLLVAADDITLPESGRATLKGHLQLLDQVRRQIAQVTRELRKQLVKTRAGRRLVSLPGIAWILGYTILAEIGRIERFRSARHLASYSLMVPRADDSGEEDPDSPKGRHIGHAGRRTLKWAWIEAAHGAVRSGGRFREIYDRVTNGGKKDRNRGYITVGHELCRLAYVLLKKDVDYREDRPERPGRRSKRSKKQGSRPGMGQPEDPMVAAVA

SEQ ID NO: 374918 - protein, 343 aa, unidentified
MKLMRVGVDLAKAVFQVHGVDRNEKVTLRRKLTRANWLEVLLEAVEPGCVIGMEACGGAHHWARAFQAHGIAVKLIAPQFVKPYVKSNKNDANDAEAICEAMSRPNMRFVAVKTIEQQDIQAVHRVRFELSNQRKAKGNQIRGLVAEYGLVAPKELWHLRAAIPVWLEDAENGLSARFRHLLNGLWQDLLALDQRMTELDREIALIANADPVAKRLQQLRGVGPMIATALVATVGDAKQFANGRQMAASIGLTPRQNSSGGKQRLLGISKRGDTYLRTLLIHGARSIVRTAKGKDDRLSQWVTRIAETRHYNVAAVALANKTTRIAWAMMKHGTEYQADQTAA

SEQ ID NO: 374919 - protein, 350 aa, unidentified
MTYIEYIGFDVHKKQISYCVKRADGEIVEEGTIIARAEALRSWAEQRRQPWRGAMEATLFSGWIYDVLKPYSDQLQMGHPAMMKAIGASKQKTDRLDARKTSDMVRCNLLPACYVAPKEIRDLRRMLRYRNLVVSQAVRMKNKIAGLLMEVGASYNKQRLHGECYFAELMENLAEVPDSVKEMLRLTRSSLEMFQAVQKKLLKTLQRQPSLRERVQRLRTIRGVGEVTALTWALEVGEPQRFPSIAQALSYCGLTAALKESAGKKQRLPLSKQCNHHLRTVLVEAAKLAPHWNPLLAQVHARELARGHRNRATIMVARKLVAYLLAVDRSGQPFQVPSSEVVPATEVRPD

SEQ ID NO: 374920 - protein, 427 aa, unidentified
MSGIETGGQAPQFAAFVGIDWADQKHVWCLQSRDSTKREIGELKHTPEAVEAWVAQLCQRFGNRPIAVALEQSRGSLVFMLAKYEPLHLFPVPSTMSASMRKALYPSGSKDDPRDADVLLDLLLQHRNKLRRLSPDTEATRRIQNLVEERRKLVDEKTEHTNRLTSHLKIYFPQMLNWFEHLDTGLVCALLEGWPTLEELQKVPPAKLRRFFSKHHCRDQELIEWRILAIRQSIPAIQDRAVIEAKSAAVKVMVQLIRILLEGITDLDDRIEEAAATHPDFFIFKSLPGAGPALAPRLLAAFGSQRERYRNAGEVQTYSGVAPVIEKSGKKQWIHFRWACPKFLRQSFHEWAGHSIGYSVWARAYYRQQRGKGVDHHGAVRALAFKWIRIVFRCWKERVAYDESKYLAALARRGSTLVALVATAKAL

SEQ ID NO: 374921 - protein, 341 aa, unidentified
MHISVLGIDLGKNSCSIVGLDDVGKVVVRRRMRRETVIVFAAKLPGCVVAMEACCGAHHMGRTLAAQGHEVRLMSPEYARPYVKAQKNDDRDAEAIAEAATRPTMRFVELKSEEQLDMQTLHRVRDRLVRERTSLMNQIRSLLLERGHIVPQGRARLAVRLAELLDTEEPILRPRIHMLIADMRERWQALDERIASLDAEFTEQARSDDRTRRLLTIPGIGALNATALVAAVGDASTFGRGRDLAAWLGLVPRQATTGGKPRLLGITKRGSRYLRKMLIQGARAAMPTLSKGDTRLGAWLRALLSRSHANVVVVALAAKMARIVWALLRHERTYQPVALAA

SEQ ID NO: 374922 - protein, 400 aa, unidentified
MKTVLSVDVAKNKSMIMLMNNDGEILIDTKEIKHNLGEFEKVKEEIEEINPENLTVFMESTGTYHLPVERYFKENGFNTLVINSLTTKNNFDTIRKTKTDKKDCYRLAKLFFVNEVEYHEISKKDLYANLKAMTRQYFYLTQVNIRCKNRYKRLINICFPEFEGFFARNRIYEDTALNFIKAFPHAYIVREKRIDALYNNLRKVDARHDYYYKILARQLKDTAMDSFPGVDKDHADVKNLSDMASILQENNRLIDEIRKNMIELAKQSPYFEIVNSFYGIGEVLAAELLGELGDITRFDNHKQLIAFCGLDPAIVKSGKSINVHGAISKRGDKYARWILFNISQMVVKLGHQYPSHPVYNYYLIKKAEGKHYYESLTACSTKILRMLYSMCKNNKRFLEE

SEQ ID NO: 374923 - protein, 323 aa, unidentified
MKKHITKCAGIDTGKRKLDIALDGGARQLQVANSQEGHSKLMEWLRRHEVGRIGIEASGGYEQAVVGQLRRDGFQVVVFQPAQVRSYAKFHLQRAKNDKLDAALIAACAAAAKKIHAPPDPRLVAMAEQQTLIDQITDQIARFKNYRESSRQPQTRQFWEAEIKRFRGLFRQQLKQLLAAIRQHRDLSERLNLIASVDGIALRTAAAILVRLPEIGRLSREQVAAIAGLAPYDDDSSDHVGIRHIEGGRERLRHSLYAAAFAASFRWNSELVALYARLRASGKLHKVAMVACARKLLIFANAVVARGTPWQSRAQHSSNLQPV

SEQ ID NO: 374924 - protein, 345 aa, unidentified
MKLSRVGVDLAKNVYQLHGVDRHGKTVWKRRLRRGQWLQVLTDTVEPGCEIGMEACTGAHHWARELESRGYTVKLVAPQFVKPFVKSNKNDANDAEAICEAMSRPHMRFVSVKTVEQQDIQATHRVREELKAHRNAKANQIRGLVAEYGLVAPKTLLALRRAIPEWLEDAENGLTDNFRSLLHGLWNDLLTLDDRLKELDKEIEKLARSFEVTKRLQQLRGVGPLVATALVATVGDGSQYSKGRQMASALGLTPRQNSSGDKYRLFGISKRGDVYLRTQMIHGARAVVSQAKHRDDPLSRWVTDIAKRRHPNVAAVALANKTARMAWAMLQNETNYDASLAVGQA

SEQ ID NO: 374925 - protein, 336 aa, unidentified
MDNIEACGVEESARELVVARRGKSGVQLKCFANTAAGHRQLLRALTRGGQRVRVVLEATGLYALDLALLLSAHPQVQLMVANPRAVRHFAQAMMQRSKNDRLDAVVLLHFAERMPFTLWVRPQENTLALWAIARRLQALTKLCTAEKNRAHAMSLSEAIPATVRRDIARSLQFHQRAMKKLRQQALQCIAADATLQQRYQLLRSVPGMGEISAVQTLAELLLVPADRDVRQWVAYAGLDPREYSSGTSVRKYTRISKVGNAHLRRALYMPALVASRVEPHLRGFYEHLLARGKRKRQALLAVARKLLHAIYGMFRSLRPYDGTRVYLPPCFAEKSS

SEQ ID NO: 374926 - protein, 404 aa, unidentified
MLYFGIDWGEDHHHLCIRNEAGAHVSEIEFAHSLAGFQRIEAERGKLAVPAPHCLVAIETSHNLLVDFLLDHAYPVYIIAPSATNGFRNRQRSSGARDDHSDAALLAGALRTDRDSFRLWRPNEVLTQQLLAQVRLIETLRRSIVRQESQLRALLLRVYPTALDLFGELTAQITLQFLSAYPGAAQAQALTLSAFQAFCREQRYTRSDLIAQRYAHLIEPLPLAAPAVVQAHQEQIRVLAQVLLPQVRCRHQALAQLKLLFRQHPDAAIFSSLPGAGDLLAPALLAKFGDQRDRFPTPASVQALAGTCPVTDSSGKKRIIKFRLGCDREFRHIAQQFARASLPQSGWAAAYWREIQRQGRSYSHAYRVLANRWLAIIWKLWQTRQPYDEAYHLQQRALRRKPKA

SEQ ID NO: 374927 - protein, 343 aa, unidentified
MTISTIGLDLAKHWFQVHGVDAGGTVRVRRKLRRSEVLAFFQSLPPCLVGMEACATAHHWARELTALGHTVKLMPPAYVKAYVKRNKNDAADAEAICEAVARPSMRFVPMKDAGQQSVLMLHRTRNLLVRQRTMLVNALRAHMAEFGIIAPQGLRNVELLTKEVAREQERLPELARSTLQLIVDQLTDTMVRVRAIEVRLTRWHRQSRVSQSLATVPGVGIMGASAIAATVADPSLFRSGREFAAWLGMTPRQNSSGGKERMGRTSKRGDKYIRSLLIAGAVAVLRHARNRPTRDGAWVRALMERKPTKVAAVALANKTARIVWAVMTRGDGYRAKQVLGQSA

SEQ ID NO: 374928 - protein, 356 aa, unidentified
MAVYVGIDVHKHYCQAALMDDNGHVVKELRFDNTSEGTSSLVTLARSIDPQVQAVLEPSANFWIRTYDKLEQEGVEVKLSNPLRTKAIAEARIKTDRIDAKTLAYLLRGDLVAESYVPTRKTRERRALIRHRASLIQMRVDIKNRIHALLDKHELTHTYTDLFGKGGLEWLRGLQLPTPDHEILQSSLEVVETLNEQIRTIDIQIAKDATSEEKAKLLMTMPGVDYYAAMILLSEIGDVHRFNSDEKLVSWVGLAPQVHQSGETQWTGHISRKGSKRARWILGQCAQSARQHDPRMREFYERIERKHGSQKAVVAVARKMLAIMYVMLIRNEPYRGENPELTEQKHKRLDTLANSA

SEQ ID NO: 374929 - protein, 377 aa, unidentified
MSDVTSIAPADVRLWVSLDVHKFSIVAATLPPTGGKLEVSRIETTEKAIRRFIDRLGGRRGLAVCYEAGPGGFALWRLLARIGVACDVVAPSLVPVRAGDRVKTDRRDAKKLVSLYRAGLLRFVHAPTPELEGLRDLLRCRDDLRCARTAARNRVLKQLLRQGRIFRDGKTAFSQKHRRWINAQRLDDPLAQLALEQLLSHLDGIERQLDTLDARLQQIAGCERWGEQVVILTHFRGISTLTALGLIAEIGDFARFSHPRELASWLGITPSEYSSGDQQHRGHITKAGNRHARRLLIEAAWHYRHAPRRPAGGPQPDERAWQAQVRLHHRHHHLSQHGKRSTVVNVAIARELVGFLWAAMTDQPLTTRNQQLQEVAA

SEQ ID NO: 374930 - protein, 448 aa, unidentified
MSKSKTKKEDVKRISQLTVINPTAAGIDVSDKEMMVAYPINSEQLEIRVFECYTRDLHSIAKILGANGITTIAMESTGVYWVSLFLLLQEYGFEVYLVNAKHVKNVTGRKDDESDAEWIQKLHSCGLLNASFQPDNMTRTLRSLARHRKNLVRTSSTYLNRMQKAMELMNIKLHTVISDIDGKTGTLIVESILDGERDPGVLADMRDKRIKASREVIIKSLEGYWTTEHLFELEQCYKLFCTHREMINECDQKIEEQLIGQIASKNDGVIPDIPKMKRKPSGKNKISFNLTSYLKEILGVNITTIMGINELSALTIMSEVGTDMSKWKTEHHFTSWLGLAPNTKISGGKIISSRIKKKKHHAGQAFRIAANSLHSSKSPLGDHFRRLKARSGAGKAVVATARKLAIIYYKMISKKEEFNPNALIEYQKKYKEQKINQLMKKIEKLKAA

SEQ ID NO: 374931 - protein, 403 aa, unidentified
MEEGCTRFFGLDIHKEYFVAVGVNPQREGVFGPQRVSNYQLDDWVSRVLTPQDSVVVEMTTNTYLFYDTLLPHVHSVIAVHSPSVSLVTRVAVKTDKKAALALAQLLAAGMLTGVWIPPHEVRDLRALIARREKMVHLSSLAKNRLHSLLHRNHLVLPEKNPFSPEQSTWWESLPLSATEQFLMRSDLDTLAFAQKQVAQAEEQIKQESVRDERVPLLIQLPGVAMLTAITILAAIGDITRFPTAEKLVGYAGLGTRVHDSGMTHNSGRITKAGRTDLRRGMVNAANHAIEHHPHWKKEFERLESHLGRSKAVVAIARKLLVAVWHVLTEQVADRFADPQNVASSFLHHAYQVGTRNLPNGQSALAFTREQLDRLEIGKDLQQINWGSKPLHLPPSTLLIDKE

SEQ ID NO: 374932 - protein, 482 aa, unidentified
MAKRKLSTFERLQPGRLNRQQRRELGQRIAATDPGLDVVHPDAAGIDIGNASHFVAIPPDRDPVPIREFGAWTAALQEMARWLTGHGIRTVALQATGVYWIAVQDVLEQAGLEVYLVNARGTKNLPGRKSDVQECEWLRKLHTYGLLRNSFRPPEAIRAVRTIWRQRDRWVAEAGRAVQHMQKALTTMNVQLANAISDLSGVTGQAILRAIVAGTRDPWALAKLRDPRIAASEEEIAHSLQGTWREDVLFALRQALEAYDFYQQQLAACDRELAKYTAAVPSRERPAPPEGPDGAAPLPPAKPPRRAKSRRKDQPGFDLAGELHRTMGVDLTRIDGIDVLTAQVVFSEIGPDFSAFPDENHFASWLTLAPQRDISGGKVIRHVPAAGRNRVANALRMAAQSLCRSDSYLGARYRRLRARLDGPVAVKAMARYLACLVYRLVTKGRAYVDRGAAHYERKRQERERFALERRASHLGLKLVPAT

SEQ ID NO: 374933 - protein, 397 aa, unidentified
MIAIGIDVSKSKSTIAILNGDGTIRAKPFVVHHVADELQALVDYIKRTPEPPTILMEPTSHYHYPLLKAFQEADLPVCLINPYQMKKYGDTALRKAKTDKRDALRIAQYALEKSYSLVPYTPADQKYEDLRFLSRQYGQRISTLTVAKVQLLSLLDETMPGITTILPFKSRDPDNCVLLRFIKRFKSFDVIRKMGKTRFLDSYQVLVKKTNDRFAGAKGLKIYELAFNSITTRGENPLSAMTQDQCVDLVSTSQKAADEINLQMRLIAETIPEYKVLRSMAGVGDRLGPIILGEIGDIRRFHSGKALNAYAGNDAPPYQSGQFESRNRHISKRGNPALRKACFEVMQALKLTKPQDDPVYLFMLKKEQEGKPYNVAKMAAVNKFLRIYYARAMELYK

SEQ ID NO: 374934 - protein, 411 aa, unidentified
MSLPESSFYVGVDWAAETHAVCVLDAAGKIQTEFTIAHTADGFADLLRRLGRLTDDPMDVPVAIERPDGRLVDALLEAGYPVVPVSPNAIKTWRDGEVLSGAKSDAGDAAVIAEYLRLRAHRLRPATPFTVETKALRTVVRTRDDIVEMRVAATNQLAALLDAHWPGARAIFADIESPIALEFLTRYPTAAHAQRLGEKRLTAFCVKHGYSGRRPAAELLHRLRQAPAGTTDDTLVEAVRDAVLALVTVLKALGAARKDLDRSVAAHLGEHPDGPIFTSLPRSGQVNAAQMLAEWGDSRVAYDGPDAVAALAGLTPVTNQSGKHKAVHFRWACNKRFRKAMTTFADNSRHASPWADQVYRQAIARGHDHPHAIRVLARAWTRVIYRCWLDGTPYNPVKHGNANEINQPTAA

SEQ ID NO: 374935 - protein, 375 aa, unidentified
MYYVGLDIHQRSTSVEILDCNGKLVKRAEWKLPWPQLAQQLRQQAPAPFAVCFEASCGYGYLYEQFSSVAQQVKAAHPGSLRLIYKSKRKNNRVDAGKLARLLYLDAVPSVYVPGKETRLWRQTIEFRQSLLIRLVALKNQIRASLRERGIAAPSGLWTVKGMSWFKTQGENDDAWALRRDLLIEELAELKKKIKRVELQLRKMSDPRPGTALLKTIPGIGPRTAEALVAYIDNANRFSSVRKAGSYFGWDPCQDASADKNRLGQLTRNGPPTVRKLLCEAAWQSVRRSPTVKAFYDRVTRNDPDRKKIAIVATAHYLTRVAVSMLKSGEVWREDPRLANSPEPDVAHQTLGGSAPKPPPRKPLPPVDGSREQQH

SEQ ID NO: 374936 - protein, 384 aa, unidentified
MKTIYYIGLDVHKDTVAIAHIKSTSRSEAIYYGTSGGSNAAVERALRKLAKQLGVKLQDLKVCYEAGPTGFVLGRRLIQLGVECVLCSPSKTERKPGEKVKTDKRDAQKLAKLFKNGDITPVRIPPALDEAVRDVCRARTDAVDDLVRSKQRLSAFLLRHGFRYSGKTLWTPAHMRYLRELTMPTDAQKIVLEDYIQAIDLNETRAKQLKEKLIDLLEDWEWKPVVKALMGCKGFQEVAAITTISELGDLRRFDNPRKLMAFLGLVPSEHSSGGKRRQGAITKCGNSHARWMLIECAQHFRRSPKVSAALTTRQIGLTTEVKELSWRMQNRLHKRYVKLKMRGKNENKSIVAVARELVAFIWELQNKCNLEMPAESEVKNMIEN

SEQ ID NO: 374937 - protein, 364 aa, unidentified
MSEYDGHQYVGIDLHRRRSVIVRQTDQGEQLSVVRIVNDPVALGLQIEQAGTRPDVVLEATYGWYWAADVLQAAGAHVHLAHPLGVKGFAYRRVKNDVRDAADLVDLLRMGRLPESWIAPAETRELRELVRYRAKLVALRSGLKAQVHAVLAKAGVLLAVSDLFGVDGRAQLEQTALSGAYAQRVASLLKLIDILDAEEDLFNRRIAERLRGHAGCGAIQWLPGIGPVLAAVLVAEIGDVHRFPSADRLCSWSGLTPRHYESDTVARHGHVTKQGSKLVRWAVVEAIQRKTPQDQGGSGPDRGPPRQEHREDRRGPQTAHAGLLRAARRAHPRPGPPGRVSSSVAAGARSGNCLTPTRRGRGFD

SEQ ID NO: 374938 - protein, 354 aa, unidentified
MKRTVKNVGFDVHQATIVASVRNDTGRVIAHSVIPTEAAAVLEFVQGMRGSIHVALEEGTQAQWLYELLRPVVDEVVVCDRRGQSQQGNKGDQPDADELSDLLWRGRLRAVYHDRGERAALRELTRTYDNLVKDSTRVMARLKALFRARGIRTPGTRVYGKAERTKWLAQLPTAGVSFRAMMLYAELDTLRELRPRAKAAMITEARRDPAWKVLRRIPSLGEVRAAQLLATLQTPWRFRTKRHLWAYAGLAVVTRTSAEYELEGLRPVRRRRAPQTRGLNRNHNHVVKNVLKAAAASAIARRGPLQEFYQQLLNRGMREELARVTLARKLAAIILRLWKTGEHYDPAQLSVQAR

SEQ ID NO: 374939 - protein, 350 aa, unidentified
MDVHQASISIAVRDANGKLVMESVIETKAATILECIRGIRGNLWVAFEEGTSAAWLYDLLKPHVAQVIVCDPRKNALLKTGNKNDRVDARKLSDLLRAGLLTAVYHGESGVRTLRELSRSYLTVTKDLTRVMNRLKALYRSWAIPCAGEKVYSPRHRSAWLEQLSEAGVRRRAEQLYQQLDILLQIRRDARRELLRESRKHPAHELLRQIPQLGPIRVALLIALVQTPHRFRTKRQLWAYCGLALQTRSSGEYRFTAGQLQHAHRLPALRGLNTNHNHDLKNVFKSAAMHVSTSPDAWGRFLSELAGQRNETSHGAPDVGAQDGGDCFNRLEERSPLRSRRIETTSRLSV

SEQ ID NO: 374940 - protein, 355 aa, unidentified
MNDAKYIGMDVHQATISVAVRDSRGNLVMEAILETKADTILQFMHGLRGSLSVTFEEGTWAAWLYDLLQPHVARVVACDPRKNALLKVGNHNDRMDARKLSELLYLNKLSPVYHGEHGIRTLKELARSYITITRDLTRVMSRLKAIYRGWGIPCAGQQVYAPHYRPEWLAKISEAGVRRRAELHYQQFDVLAALRQQARRELLAEARKHPAMRLLQQIPSIGPIRAALLIALIQTPNRFRTKRQLWAYCGLALRTYTSGEYRFVAGQLKRSKKVLAVRGLNINHNHDLKNIFKGAATRAAATSGPFQDFYQACVASGVKPHLARLTLARKIAAITLLVWKKGVRFDAEHLKQQAA

SEQ ID NO: 374941 - protein, 368 aa, unidentified
MGWTPPTASMRQSGGVKHHLREASVSEVIIIGLDIAKYVFHVHGADERGRAIFSKRISRGKLLDFFAAHPRCTVALEACGGAHHWARQLAQLGHEVRLIPPAYVKPFVKRQKNDAIDAEAICEAAQRPSMRFVAVKSEQQQAAGLVFRTRDLLVRQRTQIINAIRGHLTEYGWIAPKGPSHVTMLADLLEEEKMANSLPEAARAMFRLMLDLLAGLNGKIAALDKEIARRAREDEVSRRLMTVPGIGPISATAIAALAPPAETFAKGRDFAAWLGLTPLQRSTGGKQRLGATSKMGERTLRRLLIIGSSTVVLQASKRGAPKGSWLEQMLARKPRMLVIVALANKMARIIWALLVKQENYRAPVAAEA

SEQ ID NO: 374942 - protein, 343 aa, unidentified
MDHFAGLDVSVKETSVCIVDETGRIVGEVKVASEPEALLQVLMNPAYHFKRIGLEAGPLSQWLFSALGEAGLPVICVETRHMQAVLKAQINKTDRNDARGIAQMMRVGLYRPVHVKTLRSQKLRMLLTHRKLLQSKAIAIDNDLRGTLRNFGLKVGMVGKVKFEARIKELVENFPDLAVLVEPLLVVRRVLREQLGILHRRLLAIVRDDDVCRRLMTTPGVGPVVALTYRATVDVPARFRNSKAVGAVFGLTPSKYQSGEINRTGAISRCGDEMMRMMLYEAAQTMLMCSAKWSWLKAWAMKIARHRGMKKAIVALARRLAVIMHRIWVDGTEFRWTREVAAA

SEQ ID NO: 374943 - protein, 347 aa, unidentified
MDTIGVDLHKRESQLCSLAPDGKATEQRIVTSRERFTAVLGNRPTARILLEASTESEWVARHLEGLGHEVIVADPNYAPMYATRARRVKTDKRDARTLAEACRLGAYRIAHRVSPARRHVRAELAVREALVRTRTRYVSLAKALVRREGLRVPSSESHLVMQRIATLELSGTLEAELAPLVHVLDPINAEIAAADRRIAALLEDDPIVRLLATAPSIGPITASAVVATVDDIQRFETAHRFEAFLGLVPGERSSGEKRRIGRITKAGNARVRCLLVEAGWRILRSRGEETAALRAWALGIARRRGQRIAVVALARRLAGILYAMWRDGRAYEPGKIRAPRPRLSATG

SEQ ID NO: 374944 - protein, 353 aa, unidentified
MTKIVYCGVDFHARMQTIAYSDSADGEIKLAQLDHRKDDVRGFYSQFTSQVIVGLESGGYSSWFEAMLEELGHTVWTGHAAEIRRRANWRQKNDRRDAELILELMLKGDFPRVHRHRRESVEVLRMLRYRARLVKMRTMISNSLQAIVMSCGLSERTRVLSRAGQQRLKSASMTPVIKQQSDDLISLLVPINERISKADQWLKEQAATDDRVRLLMTHPGVGVLTALGVVHTLEPFNRFSKQRSVVAYVGLEPMERSSAERKRYIGISKAGSRLLRFLLGEAAHIAVRFDPELKQFYERVGKRRGKSKATVAVARKLLIRCWIMLRNNIDYAEFRSRGVEARLARIIHGPSCA

SEQ ID NO: 374945 - protein, 344 aa, unidentified
MVEYVGFDVSKEETAFCVKDEDGRVLARGKVATDADALFEALKEHCLCPERMVMETGTLCHWLARELRARGMPVDLIDARQAHAVMRLQHNKTDANDADLLAEIGRTGFYRLVAVKSEDAQGDRVLLKARQHLVRQRRDTENAIRGILASLGHRFPKGVGKFARRVLAIVEERPELAPVIKPLLSVRAAVEISLARLDKEVGRRTRESPACRLLMTVPGVGPVTALAFASTIDDPGRFAESRAVGAYVGLTARRYQSGGMDCSGRISKHGDGMLRSLLYEAANSMLTVVRKAHPLKDWARRIKRRTSHKKACVALARKLAVILHRMLITGEVFRWPEKEEKQAA

SEQ ID NO: 374946 - protein, 401 aa, unidentified
MGTVRDNATRVKRFRELKASLRTDRSRLLVGSDIAQAEHVVHLRHAHTRVVVPTLTIPNTTRGFTQLWARIQQAQRTTGCREVVCGLEPTGTYHQAVATFLETQGADVLLLSSSVAYWNRRTQDGTWDKHDRKDAANCADLLEQGKVLFYSQPTGPLAELRYLVKLLRRARGELAACKARWRTTLRPALAPMGEALPQRLWAELPAVLQAWERAAPGRPALAKGRLPLGLASAWADLGAQVTGVQARIAAIEQALTPVAERLPAYPLLRTIPGIGATVGAILLAEIGDIAWYTQFSQLRKLAGLDIVRVQSGQFAGQARISKSGRGLLRWALYHAAIGLARTGAGRTRLAALKAKRRGDRFAGFKAIVELAAKQLRVIWGVWRSGLPYDPRRGGGLSRQAC

SEQ ID NO: 374947 - protein, 459 aa, unidentified
MLVTTTTSEHIGHWVKMRRSLAPFSGLESSVHTRYSADFIITTSAFRSYGEVDSDRRSGRVRLQTLTLETTMQVIADRPEAPSAIRTNLGAIFVSLELSLSTWLITSLSPGSGEKMSKHMVQGGDIAGLLRRFAQLQEKAQARTGRNFPIIVIQEAGLDGFWIDRVLKNEGIESHVVDPASVATSRRRRRAKTDKIDGEALVRTLLAYKRGEPRVCAMVKAPTPEEEDRRRLCRERKVLITERVKHVNRLKGLLFSQGVCGYEPLRRNRRLRLDELRTGDGRPLPKHLKAQISRELDRLELLLEQIKAVETERDALLAAQQIAAPSSAAMLLAIKGIGPDFAAVLWSEGLFRHFDNRRQIASYAGLAPTPWKSGSIDREQGVSKAGNPRLRTTLIQLAWLWLRHQPQSALTLWFKERVVRNGGRLKKATIVALARKLLVALWKYVTAGVVIEGAIMKAV

SEQ ID NO: 374948 - protein, 318 aa, unidentified
MTEAQSYVGIDVSKGQVDVAARPTGQQWRVSNTEEGLSQLVERLQGLSPALVVLEATGGYEVPLAAVLGTAGIPVAVVNPRQVRDFARATGKLAKTDRLDAQVLALFAERVRPAPHPLPDPQTQELNALLARRRQLVAMLVTEQNRLGMALPNVRPGIQEHIAWLEKRLEGLNDGMAKLLQQSPLWREREELLRGVPGIGPTVAATLLAELPELGTLDRRQAAALVGVAPLNRNSGALRGRRTIWGGRATVRAALSMATLVATRFNSVIRPFYQRLLAAGKPKKVALTACMRKLLTILNAMLKHRAPWQPLAFQAVRP

SEQ ID NO: 374949 - protein, 343 aa, unidentified
MTQCNTIGIDLAKQVFQVHVNNPSGRTISSRKLKRTQVMDFLRQQPASLVAMEACAGSHYWARVASSMGHQVKVIHPAYVKPFVQLHKNDQRDAQAIAEAAVRPNIPSVSVKAEEQLDIQMIHRVRERLVREKVSIGNEIRSILLEYGIAIGKGQSILKKQMASLLENAENGLSIRCRHILSDLMEQWYEREKRILQYDKELQTVARNNEPCQRLQSIPGIGPVNATLLLSLAGDAKHFRSARCFAAYLGLVPRQHASGGREQLLGITKHGNKHARKQLVHGARSAYLALIKNPDKSALGRWVQRLEGKHVNKIVVALANKLARIAWAILSKGVVYQAEIRPA

SEQ ID NO: 374950 - protein, 415 aa, unidentified
MLKIVYPVCCGLDVHRDFIYACIASTNDHGVTSYKSHRFSSFTKGLRELLSWLLQNSCRDVCMESTGKYWIPIFNILESDCKIVLAHPKYVKAIKGKKTDKKDAKWIADIFKHDLVSGSFIPPADIRQLRDLVRYHVKLTNFTTGEKNRAQNCLTVSNLKLDSVFSDVFGKASSNIIGCILQNPSEKITDVSAFRTKGMKATDDEVLEAVDGEMCPEQAEKLRIIREHMSGLDLCKANLQSLILNTAEKYLDEINLVSTVPGLTAFSAISVIGEIGVDMSVFPTSKNLCSWAGLAPQNDQSAGKKKTTRISRAGVYIKPLLVQCALAAIKSKRNPEIVNRYNALKKRRGHKKAVIAIARMLLTAICNILKKHEPYNPDLYRKSDFPPEHRNVSVEEAVFILQRQGYLVSPPTSVD

SEQ ID NO: 374951 - protein, 275 aa, unidentified
MAEVTRGAAARVGVDLSKRVLQVHAVDRSGHKLVGKAMSPERFFAWCTELPSGCLVAMEACGGAHHVARRLRLLGLDARLIAGHFVTPYRMAGKSGKNDANDAAAICEAAGRPHMRFVPVKTAEQQGQLSVHRLREGYKAERTALINRIRGVLAEFGLVFPQSPEALRRVLAEVLEDASNELTGIARLVLQRAQLHWIDLDLQMKWCDERIEAHARSDERASKAAALQGIGPIGVSALVASVGDFKQFDTARQFGAWLGLVPSQNSTGGARRQLS

SEQ ID NO: 374952 - protein, 410 aa, unidentified
MRLFVGDDWAEDHHDVEVMSEAGKVLARRRLPEGVAGIAQLHALIGGFLGEEADAEVVVGIETDRGPWVTALIAAGYLVYPVNPLQASRYRERHGVSRAKSDSGDAHMLADMVRTDSHQLRPAAGDSPEAEAVKVLARTHKTLIWERTRAVQRLRHQLREYFPAALEAFEDLDAPDTLELLGKAPEPARAARLTRAQVSAALKRARRRNIPDKATAILAGLRGEHLGQPEVVTAAYAATARSLIAVITTLNEQVKILQGQVGEHFGRHPDAEIILSQPGMGAILGARVLAEFGDDPHRYRDGKARRNYAATSPVTRASGKKKVVAARFIHNDRLVDALRAQAFTALSASPGARAFYDELRARGIEHNDALRRLANRLVGILHGCLKTRTLYDEATAWGHRENLPQSSVAA

SEQ ID NO: 374953 - protein, 357 aa, unidentified
MKITKKKVIGKAYVGIDVHKTSWKVCVLSSGGFKKEFSCNPQVEALVASLENMLPDFEFQCAYEAGFSGFWLADGLNETEGFNCIVVNPADIPTSDKERAQKEDKRDARKIASQLKAESLEGIYIPSAEDIAFRELQRLRSTITKDLVRAKARIKSFLFRSGINITSQEFPDSKQHWSARFIKRLNELPIENSALRFTLTQLVQTLINLREQQKTVLLELRTQIRNSKKEKMHEALCKITGIGEITSATIISEVIDINRFSSYEKYHSFIGLVPSTNSSADIEVVRGITNRANKRLRKVFVESAWIAIRKDAELHHLYHSLKMRMKPNKAIIRVAKKLANRVRFTLLELENEMLITT

SEQ ID NO: 374954 - protein, 338 aa, unidentified
MLHSGIDLHKRDLVIATVDSSGTVVKSGRVPAARAPVAAYFRGLGAEQRAVVESTATWYWLADLLRAEGVSLTLGHSKYIKAISYAKVKTDAVDAATLAQLLRSDLVPEAHMISPELREPRDLLRQRLVLVAKRTRCQNAVSGLLAQYNVPSVAELPALMRFQAALHSEQRALLTRQIKPLEQLLQPTLVPNDQVQRLLWIPGVGKIAAFTLYLEIDGIQRFGAVRPFFSYCRLVPGAKNSGGKTRHKRTKDGNRYLKLASSHAAVRAIQYYPEIQRWYLAKRRTKGPMIARALVAKELARIVYYVLRHEEPFNGTFKGQPLSRTKQSQWPRRASPSV

SEQ ID NO: 374955 - protein, 349 aa, unidentified
MLIIGCDFHTRYQQIAMAKEETGELLLERRLDHQSGEAHAFYRSLQAPVRVGIEATGPIHWFERLLAELGHELWIGDSARIRASDVRKQKTDQRDAALILDLLLAKRFPKIWVPTPTERDFRQLLVHRHKLVCLRTTLGNQLHALAMSQGLCRKKKLFTRKGRVELAGLTLGLWASRRRAELLKLLDQLESQIAELDHAVLEEAERREDAVLLMTHPGVGSVTSLAFVLTIGSVTRFCCSRKLVSYLGLNPSEESSGGRRRTGAISKQGNTMLRWLLVEAAQKAAQCDPALRQDYQRLKFRRGHAVAKVAIARKLAVRMYWILRSGAGYAPLVRMQGSPRGTLVHASTP

SEQ ID NO: 374956 - protein, 374 aa, unidentified
MSKLRFLGLDVHADSIAVAVAEPDGEVRALGIISNRLESLRKLVKKLQPASSLRACYEAGPTGYVLYWQLAALGVKCEVIAPSLVPTKAGDRVKTDRRDAAKLARSYRSGDLTAVWVPDAAHEVLRDLVRTREDAKQDQTRARHRLSKFLLRHGRRPETTMKSWTVKYMQWLERQVHFDEPALEATFLDYVHEVSHQAERIADLEKAIDTAIAAAPAPIRAVVEALQALRGVAKITAVSIVAEVGSFSRFANPRPLMGYSGMVACEFSSGNRIQRGGITKTGNAHLRRVIGEAAWAYQRRPWVGGFLHKRQQGLEPEVKEIAWKAQQRLHSRYTKLSARGKNKNQVVTAVGRELLGFIWAIATRTEMKYQRKAA

SEQ ID NO: 374957 - protein, 318 aa, unidentified
MNTNTLQNINVGVDTGKSQLDIYIRPLDIYFTAPNTEKGISHAIKTIKKHKPQRVVIEATGRLEMPFILACDKAKLPYVIANPLRIKRFAGAIGQRAKNDRLDAALIAHYAERVQPELTKIKSENIRLMSDLVTRRNQLLTMQTMEKNRLQILPKNISSTITPILTALKNQIEKVEAKIAKLIDSCPEYQAKNTLLQSMPGVGKVLAASLISNVPELGYITNKQASSLIGVAPITRESGCFKGKRMIQGGRAQVRTVMYMAMMSAIQCNPVFKAAYERLLAAGKPKKVAIVACMRKMVVILNSMLRDGVMWDKDSVKN

SEQ ID NO: 374958 - protein, 308 aa, unidentified
MEHYAGLDVSLKEISICVVDGDGKTVARGACPADPEGMAGWFRNRSLNPLRIVHESGMLSIWLQRGLARLGLPATCIDARKAHKALSARLNKSDAADAEGLAQLARTGWFTPVHIRMTGISQGRQRQAFRDQLAAAGEANPVLRVIADGFIVAHDTLCQAADDLDKAVKRKAKEHPVARRLMSIPGVGPVNALSFIALVDNPNRFSRTSDVGAFLGLTPRRHQSGEVDWSGRVSKCGDGAMRGLLFEAASCVIRQVKRFSPLKSWAVRLAGRRGIRKAAVATARKIAVLMLTLWKSKISYQWTKEATA

SEQ ID NO: 374959 - protein, 387 aa, unidentified
MDSPVFFGINVPAGFHVVWETALNPKESEMNATARIQKIQSCTGVVVGVDIAESVFQLCEADTNWRRQGSHRLSRTQFERWFDNRDVALVIMEACGMAHHWARWLQSRGIDVELLPPHYVRAYVKRNKTDAADAAALLEAARCADIQPVRVKTVEQQALQALHRTRSMWMGWRTATINAMRGACREAGLQVSKGAKVGLSQMGKMIADDQSAIPALLRNTMKSMLEEVRQLEERIDGIEKELTAVVCHSEACKLLQSVPGVGLLTTTAMAAATGGDVTHFKGSRGFACWFGITPKEHSSGHNRKLGRISKQGDTYLRMLLVHGARSVLRAAAAAQAQGKPLDALKRWALQVQARTCHNKAACALANKLARICYACLRDRVPYQAKMA

SEQ ID NO: 374960 - protein, 340 aa, unidentified
MDMTTLGIDIAKSVFQLHGIDADGVVVVQKKLRRGAVLNFLGNVGPCLIGMEACATSHYWAREIAALGHEVRLIPPAYVKPYVKRQKNDAADAEAICEAVTRPNMRFVPIKTEEQQSVLVLHRARDLLMRQRTMILNAIRGHLAEFGIIAAQGPRQVMGMIARLRDDGDASLPEIARSALLALGAHLEALAGEIRALERQLMVWHRADPTSQRLETIPGVGLITATALAASVSDPSVFKSGREFAAFLGLVPRQNSSGGKDRLGRISKMGDRYLRKLLVVGATSVIRRAGSNSTKTGAWVRSLMERKPARVVTVAMANKTARIAWAVMTRGEAYRASPIA

SEQ ID NO: 374961 - protein, 418 aa, unidentified
MEVLHERCAGLDVHKNTVVGCVRLAQGGRVEKEVRTFKTTTGELLALAEWLDGHGVNHVVMEATGVYWKPVWHVLDDGERQLVLANAAHVKNVPGRKSDVSDCDWLSDLEAHGLIRPSFVPDNQTQELRSLLRTRKQLVRERTSHTLRIQKTLEDANIKLDSVIINIVGVSGRRMIEALVAGESDPAALACLADRRIKAPPEVLCEALRGRVTKHHRFLLGLHLGHIDAIDEAIDKIDQEVAASLQPFCAAVGLLTTIPGVSDLAAQGIIAEIGLDMSRFETCGHLISWAGLCPRSDESAGKRRSTRIRKGAPWLKTLLVQSAWAASKTKATYLHAQFLRIRSRRGARKAIVAVAASILTAAYHMLKTATPYRDNGPQHFDSRHNQAQITKLLTRLRNLGVVADFDTLKRPDQAAVSC

SEQ ID NO: 374962 - protein, 431 aa, unidentified
MPYIATRMGLRRFNASAIAPGKESAMITVGIDIGKEKHAVAAIAATGEILMPPRFFAQTAEGFAGLLAQLERLGKPADIRIGMEATGRYWLPLRHTLARQGYRVESVNPLITSAEISKDVRGRKTDKADALAIAHALLRNRHNPAPAEDAATDALKSLTRHRTFLVRQKSSVKLCLRAALDVTFPEAGATVTSLFSPTSLAILEAFPSARLLSGANLKTLTAIVSKASRGLLSADYARSVRDAARNSVSAGIVNEGEEAALESLIRQIRFIEGQIEKAEERIKAMPAPEMASSLASVKGVGPLLSRVITSEIGDMERFRNPPSGKPPRDMDKRILAFAGCEPRLRESGKWKGRTKISKRGSPALRTALWQAASTCRLHTPLFAEVYDRQTKRGKPHSVAIFYVARKLIEVLCGMYKTGMPFSPQTVGGETC

SEQ ID NO: 374963 - protein, 352 aa, unidentified
MTRRKSTDGKSYAGLDVSLRETAVCVLNEQGSIIFEGMIATDPDLIADCLAKRAPGLVRVGLEAGATSAWLWRGLQQRDVPAVCLDSRHAHRVLSMRTHKTDRNDARGLAELVRMGWFREARVRSRDAQFVRSILLAREHLIRTRRQLENLIRGSLKALGVMTGPTGGKTFMARVAELRNDNDWLHPILAPLMAAHSVVRDQLKVLDRTVIATARQDPDVRRMMTVPGVGVISALAFKSAIDDPRRFRSSAQVGAYLSLTPKQYESGESAWVGGIGPANDPMLRSCLYEAAGSLMMRCKRWSPLKAWGVRLAKRIGWKRASIALARKLAVTMHAIWRDGTEFVWTPAEAARA

SEQ ID NO: 374964 - protein, 339 aa, unidentified
MNSIAVGVDIAKQVFQVHYVDRETGEIVNKSIKRAKFVEHFANRAPCLIGMEACGGAHHWARELSRLGHEVRLMPAEFVKAFNIRNKNDAADARAIWLAVQQPSKPVAVKTEMQQAMLALHRMREQLVKFRTMQSNGLRGLLTEYGEVMSKGRAKLDKEIPAALGRIAERLPAALIDTLREQWNGLARLDEQIVEIERRMREWKKADRAVKAISEIPGVGLLTATAAVAMIGDPKAFSSGREFAAWAGLVPKQTGSGGKVNLHGISKRGDTYLRTLLIHGARSVLTHAKEPGPWVEQMKKRRPMNVVIVALANKMARMIWAVLAHDRPYRKDYVSVKPA

SEQ ID NO: 374965 - protein, 347 aa, unidentified
MKFYNQQHQYYCGIDLHARKMYVCILDQKGKTMVHENIKTDPELFFQLISPYLEDIVVGVECVFCWYWVSDLCAKHKIPFVLGHALYMKAIHGGKTKNDKIDSYKIALLLKGGNFPTAYPYPAQWRATRDLLRRRMYLVRRCGELVSPIQNTNTQYNLPAFNKKLSRKYNHAGVAEQFENPEVRKSVEVDLAAIASLNQILNQLEWHIEKTAEQHDYHTLYLLRSIPGVGLILALVMLYEIQDIKRFPSVQDFSSYARLIKPVKESDGKWAGKSNGKIGNHHLKWACNEAAILMLRESEKAKQYVAKLERKYNKGKALGIFTHKIGRAVYFILKNKEAFNMEKFFSQ

SEQ ID NO: 374966 - protein, 308 aa, unidentified
MKKISTAAAQKIEKVEGQKLTIGLDVGDRSSWYCVLDEAGDVLLEQKVATTPKAMKEVFGGMPHSRIALETGMHSPWVSRLLSEVGHEVIVAHARTVRLIGESRRKDDRFDARTLARLARIDPDLLGPVQHRSRKAQVDLMVIRARAGLVRARTALINTARGLTKSYGERLRGCSPRKMNRELAEGLSPELQSALQPLLDEIESLSERIREYNERVQQIAEESYPEVARLEQVKGVGTLIALTYVLTLEDPRRFRKSRDVGCYLGLRPGRRNSGQSEPQLHISKEGDPYLRTMMGQSAARSGAFWSRQ

SEQ ID NO: 374967 - protein, 392 aa, unidentified
MDNKVWVGIDAGKELHWAHVLDASGQQILSRRVENDEVDLLKLIDEVLALSEEPVWAVDQPGGSAALLLALLWERDQQVLYFPGLAVDRARDAYPGESKTDARDAYIIAEQARMRSNLAQIVPGEGDLAEVQLLLARRRDLVADRTRSINRLRDVLLSLFPALERALDLNAKGALILVRHYQSPSAIRRVGHRRLATFLKNRSVKGAEDIAHKAITAAKAQSVSLPAENVAATICSELAEETLALKESIDNLDRELRRRFFARPEARILASLPGIGPVLGAEFLVSVGDLSAFESADRLAAYAGLVPAALDSGKRVGNHRRMRGGNKVLKRVFYQSAFASLRSSPHSRAFYDRKRAEGKKHTQALIALARRRVNVLWAMLRDGTTFEARPAA

SEQ ID NO: 374968 - protein, 346 aa, unidentified
MMIIGCDFHPSWQQVSWLDTETGETGERKLVQASGDAERFYRQVAAPALIGMEATGNCHWLADLLSELGHELWVGDGAQIRASYVRQQKTDKRDAAHILKLLVEGRFLRIWMPSSEVRDLRQLLLHRYKLVIMRARVKNELQHLCLNKGVQRKHKLWSAAGQQILRELPLKPWAGRRRDDLLKLMAMLDQQIEPLDQAVKAEAQRDKMALLLQTQPGVGAITALAYVLTMGDVGRFPRGKQVASYLGLIPREHSSGGRQKLGAITKQGNRMLRMLLVEAAQIAVRYDPQFRREYLHRCYQKPKAVAKVAAARKLAVRLYWMLRTQQPYPAVVRIESSPRVALVGTS

SEQ ID NO: 374969 - protein, 343 aa, unidentified
MNLSRVGVDLAKNVYQLHGVDRHGKAVWKRRLRRGQWLQALLDKAEPGCEIGMEACTGAHHWARELQSRGYTVRLIAPQFVKPYVKSNKNDANDAEAICEAMSRPHMRFVTVKSVDQQDIQATHRVRTELKDHRNAKANQIRGLVAEYGLVAPQTLLALRRAIPEWLEDAENGLTDYFRSLLHGLWDDLLTLEDRLKELDKAIDKLARNNEVTKRLQQLRGVGPIVATALVATVGNGEQFSNGRQMAASLGLTPRQNSSGDKRRLLGISKRGDVYMRTQLIHGARAVVSQAKHRDDPLSRWATDIAKRRHPNVAAVALANKTARMAWAMLRNETDYDPNLAIG

SEQ ID NO: 374970 - protein, 426 aa, unidentified
MKEHIDYLSTLFVGIDIASRIHVISALDFNQDFFIKMKPFENTKEGAGIVEKMIADVLADNHQFKYVVIGMESTGFYGVHLANYLSTSELLAPFSVRVYCLNPKEVKNYKKSFNDIGKNDGIDSFVIADFARVGRIAIKPWRGSQYLALQRLTRHRMHITECITREKTYMLNNIYLKFSEYALLRNGEHPFSNKYGATAEAILTEFTTNEDIVNSSIEELVEFINSKSKGRIADPEETAKIVQAAARNSYILDKCLYEPLTISIASSFNCISSFEKELKAIDKAILQTVQGLNPEEYTVLNSIPGIGKVYSAGILAEIGSIKAFQNANQLAKYCGIVWNDNDSGDFESEDSRMSKAGNRYLRYYIIEATGSVISHCPEYKAFYQKKYAETRNHQHKRALALTSRKFIRLLFGLLDKGQLYSPEKGR

SEQ ID NO: 374971 - protein, 355 aa, unidentified
MTIVAHAHPFVIGVDTHARNHVLAVLAATGEVLDTGQFPATATGMSRAIAWVARRTEGDLAALWVIEGVASYGAGLAAAVAQAGYEVVEAARMNARSNRGLGKSDPLDAHRIAAAVLPLDSGQLRRPRLAEGVRAGLRVLVAARDHMSAERTATVNALIALLRVVDLGLDARKPVTRTQIATVARWRTRDEDLGTTTARVEAIRLAKRVVELDEQITANSTRMTELVQASQAAPLLEKTGIGPVTAAICLTAWSHHGRVRSEAAFAALAGVNPIPASSGNTVRHRLNRGGDRRLNRALHIAVLTRMTHDPQTRAYVERRQVQGRTTKEIRRCLKRYLARQIYRILNTTNAVTRPA

SEQ ID NO: 374972 - protein, 340 aa, unidentified
MNSFALLGLDIGKSTFHLIGHDVRGHEVLRKQFNRNRLLQFLAKLEPCTIVMESCGGSHWLARKLISFGHQVKLIAPQHVKPYVTGNKNDYIDAEAICEAASRPKARYVAIKTVEQQVLSTQHRLREALVCQRTQTVNRIHGFLLEFGIALPATKAAMNQIHQILDDPSAELPQQLKQFIEHLLEEINRITLEIKSIDHCIKGQVAADDAGTRLMSIPGIGPIIASALLADVGNASNFRSARDFAASLGLVPRQYSTGGQIVLLNISKRGDKYLRKLLVQGSRAVMVRIDKRTDALGTWVRDLLTRKHPNKVACALANKLARIVWAVLARGASYNAQLTA

SEQ ID NO: 374973 - protein, 408 aa, unidentified
MLLVGIDWADKAHVYCLMDDAGTTLSTGTMEHTAEGLEQFMNIVRARVQTPHDVLVALETSHGPLIGALLDQGFTVYAINPKAVERHRDRFRVAGAKSDLRDAWVLATLLRTDRAQYRPLVPDSEVAQELRALTRDRADLVRTRTMLSNQLTACLKAYFPEFLTLFADPDRPVALALLQTFPTRDHLQAVSRADLEAFLRRHHCPHSRKRATAIHERMQAPGFHIAPPIVRAKARLAGTLASQLLALLEHIDAYEREIERILKLHPDGELYRSLPGAADVLAARMVGELGDNRDRYRDPNVAQCEAGTAPVTRKSGSTRTVHIRRACIHPLRETLWTFAFSSLRHCAWAQAYYNQARKRGKKHAEAIRMLGNVWLRIIIAIRRDRRPYDEAVFQKARARHASPGLCFA

SEQ ID NO: 374974 - protein, 346 aa, unidentified
MTMLEARRVTGGVDTHLDVHVAAALDALGGLLGTESFEVNPAGYQSLLSWLESFGAVGKVGVEGTGSYGAGLARFLRQHGVSLIEVDRPNRALRRRSGKSDSLDAVEAARAALSGRAKSVPKSKDGAVEAIRVLLVAKRSARQARVKAVTQVRHLVITAPDELHRRMKGLSVSALVEEGAKLRPSRSTDPVVAATKAAISSLVHRIQALESELDELAEMINALLVATAPDLLALFGVGPDTAAALLVCAGDNPERLRSEASFAHLCGAAPIPASSGKSIGRYRLDSGGDRQANSALWRIVMVRIAHDPETTAYFERRVKEGRTKREVIRILKRYVAREVYHHLPRG

SEQ ID NO: 374975 - protein, 445 aa, unidentified
MTFRTIGIDLAIRGDHLAQIYDDGRPNGRAIRFRHDQPSLAAFVQTAVMGLRADDHIQAIMEPTGMSWFPVAHHLADAGVTVARVKGKRVKALRRYLSEHAKTDMADAQILAAIPSFGGPRLDPVHIPDPRSHALQRLTKQRSRFQNEVADARRRLLDLIRWASPRLEAVLPDLGTRLSLALLQKWFHPSDVLKARRTTLAKYVAAHAGGNHPRSGPFVETLITGLREAAQYAQNLHGAHIDFSELQFEIATEIENVLKKIQIVGDLEQHIADLYKHLDPQALLLSIPGVGRHLAPTLIGILQNIERFHSEKHLRGFCGLFPRRADSGGVERAGQTLTQGGNNRIKHALYLAADTARKTDPELAELYWRLMTAKGHHHKQALCAVANRIVNRIFSVLKRGKPYEVRDREGNSITLCEAKAIILERYTVGENIRAGRRSNRIEKNS

SEQ ID NO: 374976 - protein, 325 aa, unidentified
MIDASLSAGVDVGSTWLDLGFHPFAKPIRARNSEAGIETIIAALRERGVAKVALEAIGGYGRKLVAALIEADLNVFVVNPRRIKAFRDAEGLIAKTDKLDAGLIARFAHAMAHELRPLPDAEQAVLKALSTRRRQLTESIAIEKTRLKQAFDPLIVESCREMIAILEDKRRLIEADLDRRIDAQDRMARRRAILSSIPGVGAHISALVVVEMPELGAIDRKAAASLAGLAPIPRNPGFPAGATPSPGVDPACGRPSPWPRSWQRAAIRNSSKPISTCAPPENRPRSPSSPSRAASSPSPTPSSATTFPSTTHASLDELNTVACMS

SEQ ID NO: 374977 - protein, 344 aa, unidentified
MGEVSTIGLDIAKSVFQVHGVDADGAVVIRKRISRAKVLEFFAAVSPCLVGIEACPSAHHWSRKLQALGHTVRLMPPSYVKAYLKRSKNDANDAAAICEAVTRPSMRFVPTKSEQQQSGLMLHRGRQLLVRQRTMLSNAIRGHMAELGIISAKGRNGTVELLEIITNADDDRVPTVARLSLGALARQYANTTAEIRAFEKHIHAWHRSCEESRRLEEIPGVGPIVATALVAEVGDWKAFSSGRNLAAWIGLVPKQHSTGGKERLGGISKQGNRYLRWLLIAGAMAVIRYARQHGTKRLWLARIMERRPIKVAAVALANKIARMAWAMMVHGERFKEPRLLSQAA

SEQ ID NO: 374978 - protein, 355 aa, unidentified
MTSTKYIGMDVHKESISMAVRNAVGKIVMECVIETKATMILQFFDGLRGDLHVTFEEGTWAAWLYDLLKPHVTKLVVCDPRRNALLQDGNQNDRVDARKLADLLYLNKLNAVYHGDHGLRTLKELGRSYLTITRDQSRVMTRVKAIYRSWAIPCSGKQVYGSRHRAEWLGKIHEPGVRRRAELYYQQLDALRTLRQEVRRDLLAESKKHKVWKRLCEIPAIGPIRAAELLGILQTPHRFRTKRQLWTYCGLGVVSSSSADHEMSKGQLRRKKKHVQIRGLNENYNHDLKDLFKGAAVVASIKPGPLAEFYEALVSKGMRPEMARLTLARKIATIVLIVWKRGVCFDAQYLKPQTV

SEQ ID NO: 374979 - protein, 447 aa, unidentified
MLLVMKPLPVLDPQAAAIDVGSESLHVSVAGDSPKVFGTFTVELEALREWFKGQGVRTVAMEATGVYWLYLYEVLEAAGLEVVVVNGRHVQNVPGRKTDMSDCQWLATLHAHGLLRGGFVPPAEIRRLQDYQRLRADHIIGAAGQVQKMQQALERMNVKFHDVISDLTGVSGLKVVRAILRGEREPVRLLALCDGQIQRKKSAAVKESLRGCWKDEQLFALRQALELWETFQQKIADCDRQLERLLHQLAGPPPAEGGAGGGELRLAPAKDAGKNAPAIERCQQLLARICGGRDATQIPGLSVYLVLQLISEVGTDMTRWPTEKHFTSWLGLAGGRKQSGKRKGSIKAHRNRAGRMFCAAARALARSVDKALGGFYRRLRGRIGGLAANVALARKLAQLFYRLLRYGMEYVEKGLKAYEVKVCETEARLLRKLAKNQGFILMPAPQK

SEQ ID NO: 374980 - protein, 403 aa, unidentified
MVRYHVGVDVGKYRHYVSIRDLSHEKYCGSFSLANDHDGFMELVDILDKLSLEKGDFLIGVEACPYALNLSYFLMATGFDLVEVNSFRAGQFRKAQGKKAKTDKIDARTIAAILALDDHKPLSIPDPVLDNLKELTRFRVDLVNEKATALIHLQETLSVLFPEYGKVFRQLDSAASLALLTAYPGPGHMIAAGEEVIGKTLSIASPRRMSRGMAKRIIEAAKRTIGVAQKRPSLGTKISVIAKRIAELQSIIGDLDRQITALFRNLPCKPFGFPVGRTPSLAAIISEIGDIRRYPTLKKFLSHLGWCPQSFQTGNYRLEHPKMSHAGNKYIRRLIWMLSIVAIRRVPSYREYFQRRVLEGKNKMHILVAVGRKLLSTLYAMLKTGTTYDPNWEENRRLAPARL

SEQ ID NO: 374981 - protein, 350 aa, unidentified
MPTVTIAVDLAKNVFELAITTRPGAIPKRRRLSRPQFETFWVTQQPCRVVMEACSSAHYWARHLTTRGFDVILLPPQYVAPYRRRNKTDRADCEALLEADRCAGIHPVAVKSEDQQALLSLHRVRAQWLATRTARINTMRGLLHEFGIIAPRGAKRFMNELHQKLAATDRTLPPYVQRMVDALWTEVRDLEQHIADVENELTLIARENPTVQSLVRIPGLGLLTATALFATVGDIHAFKSGRQLACWLGLTPRESSSGARRRLGRISKQGDAYLRMLFIHGARAALNGARRLEARDQPLSQLQQWALRRARTAHPNQAAVALANKLVRIAWAVWYHQRVFNGDHVIRAAA

SEQ ID NO: 374982 - protein, 331 aa, unidentified
MSVCVGLDIGSRTSIAGVRKDGHPAGQWDIAQTAAGRKAAVKKLLALKPKAIVMEATGIYYLDLALELHAADLPVSVINPKSFHNFAKLMLVNSKTDAIDAQLLSEYGERMTPRLWTPPSPVQLELRALGRHINRLVGHRTRAKNELHALQATATTPSMLIEDQEEAVASLDNRIERFRKAGRELIAQCPRLTRQYEQLLAGPGIGEVSALAALAELTTLPETLKSSQVARHAGLDVRQTQSGTSIDKPGRLGKSGNAYLRAAMYMPALTAVRCDPYAKAFYETLVSRGKKKMQAIAAVMRKYLTGIWACMRGDEPFDTAKLFSSEQLRKA

SEQ ID NO: 374983 - protein, 324 aa, unidentified
MGFTTEAAMQTPSVVVGIDVAKAHLDIAVRPSGEPLRVPYDTSGITAVITRLSQLRPTRIVLEATGGIERSLVRALVEAALPVIVVNPRQVRDFAKATGRLAKTDALDAQVLAHFAEVIQPAERALPDPQTEELAALLARRRQVLVMQHAEQMRLERTAPSVQKRIRVHLRWLTAELGRLDQDLDERIEQSPVWRAREDLLRSVPGIGPVMSRTVLAELPELGTLNRKQIAALVGVAPFNRDSGRWRGKRTIWGGRATVRRALYMAALVATRWNPSIRAFYQRLRAAGKLPKVALVAAMRKLLTILNAMVHHGTRWQSTAEVAA

SEQ ID NO: 374984 - protein, 379 aa, unidentified
MRRVCGLDVHKDSIYMCILYENGSKIESVFGVLTPELDKLRDLLVSHHVCEVALESTSIYWIPIWNILSVDFSLKLVNPYFIKQLPGRKSDVKDAEWIATVLQKGLIRGSYVPDRMIQCLRQYERRNHELSKNIVHAEQRMDMILQRCNIRISNYVSCISCKGYQKVVNAIISGESNPKVLVTLIHKRTLNKHGRQVVEDSLNGFVSDTDRDILRQYRDERMQMEQHKSENKAKMQAICEAHYCEELELLQTLPGIKEESAANIIAEIGVDMKMFLTASAIVGWAGLKPRNDQSAGKIKSRKITHGNKYLRKILVEAAWSAARTQDSRFMKMYQRLLARGKSKQKALIAVARKLLVLIWNMLSKKEAFNPEYKRRIQAA

SEQ ID NO: 374985 - protein, 318 aa, unidentified
MKKRIEGVAVYGIDIGKNSFHVVGLDSTGKPVLHTKFRPDRRLDHFANTPTALVGMESCPGSQWLARKLQASGHTVRIIPAQFVKPYVKSNKNDIVDAAAIVEAVTRPTMRFVQVRQPEQSARQALHRVRDRYMSQRTGLINQVRGFLLEFGIAVRQGTGVFRMDVPRVLGDEKNELPPSMRSLLTGLWNDFKLLEIRIEELSKQIQRSVQYSDAARRLMTVPGIGPLAASALEASAGNGHQFTNGRFFAAWLGLVPRHYPTGGKTTLLSISKRGNAYLRRLLIHGARPVCRPAIGKDIPWEDGSPSLSSACIEIKSS

SEQ ID NO: 374986 - protein, 374 aa, unidentified
MLQQQLLGHWSPSRDVRACPSTKKGVAVTIVDSARHVVGGVDTRRDVNVAAVVDMNGGVLGVESFPTSAAGHRCLSSWMSRFGTIERVGIEGTGAYGAGVARHFLAAGVVVIEVDRPDRQKRRKHGKSDRLDAVEAARGALSGRCEGRAKSGDAHAEALRALLVAKRSARSTRIATIVQLRHLMFTAPDELRAKFGALSATQLVNQAAKLRPRPGADVALHGVKTTAVILARRVQSLDDELAVLDEQIGLLVKAAAPELLNIFGVGADTAAVLLVTAGDNPERITSEAKWAMLCGIAPIPATTGLIKNQFRLNNAGNRHANNAIWRIVITRLGQHEPRTVAYMNRRLAEGKSKRYIIRCLKRYVARETFRALPR

SEQ ID NO: 374987 - protein, 356 aa, unidentified
MAKVKTNFVFHRVDVGLDVHKRSWNAALFLDGLYVRNIHQPPSPKALHHYLTTHYPGATYRCAYECGKFGFWINRQFADLNIDCLVINPADIPSTHKDEVYKNDPRDARGIGHALTTGQLRPIYVPSPEQEADRHLVRMRKKIWRDLVRCKNRVKGFLDYIGIAIPPPYDNANWSGNFIKWLQQLPLQHATTRLTLDYQIREVQLLRKELLSICNDVRKLMRSKKYKQLYYRLRTVTGIGPLTAAALITEIGDMNRFSSFYHLNSFIGLMPMEHTSGEKIMKGRITVRKHRQLRSDLVECAWAAKRNDPALALYYQQQLSKGKNGKAAIVKVARKLLSRIRYVWLSGQPYQTAIVQ

SEQ ID NO: 374988 - protein, 379 aa, unidentified
MTCKECGQVVKLARTMNKCHSNTESSSHEETRCQFNGGTGAIKLGIDVHQDFYVVVEQVGGSNPKPPQRFRKQAFLHWAAKLKSQATEVYAVYEACGFGFALQRQLSALSIQCYVVCPQKLDEQNRRVKTDGLDAKALCLKLDRFVQGNRDALAIVRVPSEEEEQARAIHRQREQLVKARKQLEAQGRSLMVNHGLEPVQNWWKPRTFTALDAPQWMKELLANSQPILVALQQKIAALTVQLQSAASPEQPRGLGKMTSVIIDREIGDWHRFSNRRQIASYTGLCPGEYSSGNTRLQSCVTKHGNPRLRAALVELAWRLVRFQPNYHPVRKWRQILAKGALATGAARKKAIVAVARQLAVDLWRIKTGRLRAEELGLIN

SEQ ID NO: 374989 - protein, 318 aa, unidentified
MPNPIHVGIDVAKDSFEAALGVGGEGGSFANDDSGFDTLLSQLKAYEVRLVVMEATGGYEAQLACVLQSAGYAVAVVNPRQARDFAKSMGYLAKTDRIDARALAEFARVIDSHPQRERFVELLPDPERQHLAALVTRRRQLVDMRTAERNRLSLGQRAARKSIETVIRTLQREIDDIEGQMLRHVNEHHANLAALLSSAKGIGEGTVASLIGELPELGRLSNRQIGKLVGVAPINRDSGNYRGKRTTFGGRASLRSALYMPTWAAIRHNCVIRAFYQRLVAAGKPKKVALVACMRKLLVILNAMVRTGKHWDDSLHHA

SEQ ID NO: 374990 - protein, 404 aa, unidentified
MIFVGDDWAEDHHDVYLMDADGARLASRRLPEGLTGIGALHELIADHVGEPSQVVIGIETDRGLWVQALGVSGYQVFAVNPLAVARYRERHQVSGAKSDAGDAKVLADLVRTDRHNHRSMAGDSPEAEAIKVLARAHQNLIWARTRHTNMLRSALREYYPAALNAFDDLHDRDALAVLSRAPTPAEGTRLSLSKIRSALKHAGRQRNIDARAHEIAVALRTEQLAAPATVTAAFAATTRATVGIIGELNRQITDLETQLATHFETHPDADIYLSLPGLGVILGARVLGEFGDDPNRYTTAKSRKNYAGTSPLTVASGKKCAVLARRVRNRRLYDAIDHWALGAINHSTGARAFYDQHRAAGDLHHQALRALGNRLVGILHGCLRHHTTYNEHTAWAHRQTAQAA

SEQ ID NO: 374991 - protein, 433 aa, unidentified
MVHPKAAGIDVGNEEHYVAIPPSLDAEPVRRFDCFTEDLESLADWLVERGITTAVMQSTGVYWMALYDILERRKMKVFLVNARDTKNLPGRKTDVLECQWLLKLHVYGLLKNSFLPEDRILAMRTYWRQRQQHIADAARCTPHMQKALTQMNVQLANVLSDVCGLTGKLIIRAILRGERDPKELAKLRDPRVKVSPEVIAKSLHGNWREDLLFILKQEFESHEGFEERIKECDARLYEHLQLMEEKADPESLPACKYNKRPRGNVPDFDLRDQLYRIVGTDLTAIDGVNVLTAQTIIAEVGYDMSRFAAEGNFVSWLNLAPNNRISGGKVIGRDRRKVVNRAGQALRQAASTLLRSQSYLGAQYRRLRAKLGSPKAVKAMAAKLARIIYRTLKFGQTYVDKGSEAYEQNHRQQQIKFLTKKAAELGLEIVPAG

SEQ ID NO: 374992 - protein, 344 aa, unidentified
MKSRTIAVDLAKNVFEVGISDRPGHVKKMVRLSRAKFLKFFVDQEPSRVVMEACGSSHYWGREISKHGHEVKLISPQYVRPYVPRNKTDRADVKGLFEADRNNDIRPVPVKTVAQQQLTALHRIRSRWMATRTARINTLRGLLREFGFIIPVGAQHAVPGAQGLIEDGDVNMPDVLRGVFHEMCTEIRELEGRIRSVEKQLEALASQTPAVARLRSIPGIGLLTATAMVGFVGDVERFRSSRHFASYLGLTPREHSSGNIRRLGRISKRGDCYLRMLLIHGARSVLWSAHRKSITPSPLQQWGLRIHEQRGYNKATVALANKLARRIWAVWKRDSDYLADYRAA

SEQ ID NO: 374993 - protein, 438 aa, unidentified
MAVVMIGIDPHKASHTAVAINAAEQSLGQLRVRASAVQAERLLGWAQAWPERAWAVEGAGGVGHLLAQQLLSAGERVLDVPPKLAARVRLLATGDINKNDPNDARSVAVAALRSAGVRQARRDDHAAVLKVWSKRHQDLAQARTQVACRLHQVLCELIPGGVPGEITAGQAGQILAAITPAGAVEAARRELAAELTEDLRGAGTRIRETRKKTAAAVRAAGTSLTGLFGVGPVIAAAVIGDVRHVSRFPNRDHFAAYNGTAPIEVSSGGRKIYRLSRRGNRRLNHAIHMAAVTQIRYRHSPGRAYYDKKLAEGKTGKEALRCLKRQISDAIFACLQADARRAAAAPEKSPGGQPGNHSASRAAGSNPEHRRFGQATPGPATHPTTPTAAFPAPLPTRASGRPGQEPGAARPRSGAPQGVLEATAREPIIPAAGKRPLR

SEQ ID NO: 374994 - protein, 414 aa, unidentified
MLKIVHPICCGMDVHKSFVVACIATTNERGVTTYKSKRFSTFTGDLRRCAAWLAENNCKDVCMESTGKYWIPLYNILERTCNIVLAHPKYVKAIRGKKTDKRDAKWIADIFKHDLVTGSFIPPADIRQLRDLVRYRWKLTSFTTGEKNRAQNCLTVSNFKLDDVFSDVFGKAAFAITTRILNNPAEKITDVSNFRTKGMKATDEQVLAAVDGAMCEEQAEKLRIIRSHMDSLHLCNLNLESLILATAEKYLPQLNLVMTAPGIQSFAAIGIISEIGVDMSVFPTSKHLCSWAGLTPQNNESAGKKKTTRISRAGAYIKPLLVQCALCAIRAKQFPEVRNRYLALKKRRGHKKAIIAIARILLTAIYNMLKKNEPYNPELYRKGDRPPTHREVSVGEAIFILQRQGYLVTAPPTP

SEQ ID NO: 374995 - protein, 313 aa, unidentified
MPVSLSKPIVGVDVAKNELVIYQSDGDLLEEIANTKTSIKQWLKALSGTVAIAIEATNIYHLDFADLAYEAGCTIYMVGGYELKHYREGVKIRAKTDALDAKLLARYLKNEAEELRPWTPPSPLYRQLLSLFRRRAALVQARVGLVQSWSNEPLLKAAFAEQVKSMQQLETLIEKTINDQLKEAGLLGQLKRRLKVEGIGFLTGARLITAFQRGDFRNADAFIAFLGMDLRVAKSGQKDARRSLTKRGDPEARRLLHNAAMSASRTKAWKGYYEEQRTRGFSTTQALVMLARKLARVVFALLKGQSEYQPKAS

SEQ ID NO: 374996 - protein, 397 aa, unidentified
MYIVGIDIAKRKHEAAVIDGEGAVIIKPFSFTNNCSGYNRLLAMLTKAKLPLDEVSFAMEATGHYWLALFTRLQKEGFRVQVINPVQTNSIRSFYIRQAKTDPRDALLIAEVIRFGHFSESTLHPENIYELRELCRGRHAIVSMQADVKRKVVALLDQVFPEYETAFTNMFSDTSMAILQTCPTPKELSEMPLEELCHLIEVSSHKRFRMAKAQELQELARNSFGFAMAGDVFSTMIRLYAKHLDFLKQQVREMDRKIAEIMETLDTPITTITGIGPTLGAYILSEIGDINRFSSAAKLAAYAGIDPTMRQSGEYNGVRNRMSKRGSPYLRHAIWLAASSAVLHDPALKLYFQKKRDEGKPYMASVGHACRKMVSIIYAVMRDNKAYTPCIPNEISA

SEQ ID NO: 374997 - protein, 341 aa, unidentified
MMIIGCDFHPRFQQIAFLDQETGEYGERRLSHPEEAQRFYRSLVGRRVRLGAEATGNFRWFRLLMQELGHEFLLGDATTIRAACPRKQKTDKRDARHILKLLVEDRFPDVWQPPEENENLRQLLMHRCRMVRMRTRIKNQLDSMAKNEGLLSKRVWCPMRRNQIEALPLAGWNVERRRDLIALLEEMNRRIEPLDEAVIKAAEQNPEACLLMTHPGVGPVVSLAYVLTIGNWERFPRGKQVGSYLGLIPVEESSSDKRRLGHISKQGNTTLRWLLVEAAATAQRYDPSWHRQYVRLSMTKHHGVAKVAIAHKLAVRLYWMLRSGEDYDKVMERGSHVGQSE

SEQ ID NO: 374998 - protein, 344 aa, unidentified
MSEIITVGLDIAKHVFHAHGADERGRAVFSKRISRGKLLDFFAAQPSCTVALEACGGAHHWARQLTQLGHEVRLIPPAYVKPFVKRQKNDAIDAEAICEAAQRPSMRFVAVKSEQQQAAGLVFRTRDLLVRQRTQLINAIRGHLTEYGWIAPKGPSHVAMLADLIEEDEMASSLPKAARAMFRLMLDLLAGLEGKIADLDKEIARRAREDEVSRRLMTVPGVGPISATAIAALAPSAEIFAKGRDFAAWLGLTPLQKSTGGKQKLGVTSKMGERTLRRLLIIGSSAVVRQASKRGAPKGSRLEQMLARKPRMLVTVALANKMARIIWALLVKQENYKAPVAAKA

SEQ ID NO: 374999 - protein, 407 aa, unidentified
MEVLHRRCAGLDVHKDTVVGCVRIAEGAKVKREVREFATTTRSLNELAEWLTRCGCSHAAMESTGVYWKPVWHVLEGHVELVLANATEVRNVPGRKSDTNDATWLADLVAHGLIRSSFVPPEPIAELRDATRTRKQLVRERARHTQRIQKILEDANLKLSSVVTDILGQSGRAVLEAVIGGETDAVALTDLTSSRLKASQEQITDALYGRVTDHHRFMLRLHLTQIDGLDRAIEALDIRVQELLEPFRPKVEHLMTMPGIGPTVAAVLVAEIGVDMSRFKTPGHLVSWAGLCPRLDESAGKPRSTRTRRGRWLKTTLVQAAWAAVRNKDNYLHAQYLRIKRRRGAKKAIVAVAASMLTAAWHMIRDDADYLDLGADYFQRYDRDKVARRLVRRLLQLGLHVDIRNAA

SEQ ID NO: 375000 - protein, 338 aa, unidentified
MNYVGIDHHRQYSHLTVMDQEGQVLRSGRVPNVQVEIKKFLEGLEQVEAVIETGRSSYTMVDVLEEMGVGVKIARPNEVKAIARAKIKTDKRDSEVLAHLLRMKMIPEVYRKSVENRQAQRVLRQRAFYVSAMTALKNRVHALLAQQREEVREEVARETNIFSEKGRKMLLGLDLARGEKRLLEALLKTYRHLETRIGESTSFVEKLYEESREAQFIRTIPGFGKYLAVLVAVEIADVNRFADAAHLHAYAGVIPSTHSSGDRTHHGKSLRAGNRWLRWAAVEAVWPGVRADFDLRCLFERLARNKGANKAKVATARRLLTIIYNVLKEGRNYVAYRR

SEQ ID NO: 375001 - protein, 343 aa, unidentified
MEHYAGIDVSLERSSVCVVDVAGRIVREAKVASEPETLVGFFAGLGVAVTRIGLEAGPLSQWLHAGLTGAGFEAVLLETRHVKAALSAMVVKTDRKDARGIAQLLRMGWYRPVHCKSPAAQEVRALLVGRKLLQGKLLDVELSIRGILRGFGLKLGEVSKGRFAARIRELVAGQPMLERVIEPMLRAREALRAEYQALHRAVLAIVREDTTCRRLMGVPGVGALVAITFTSAVDDPARFRRSRAVGAHFGLTPKKYQSGETDVTGGISKVGDAMVRAALYEAANVMLTRAGKFSTLKRWALGVAQRRGMRRAKVALARKLAVVLHRLWVDGSEFRFGKQAASA

SEQ ID NO: 375002 - protein, 459 aa, unidentified
MQRFYLGIDASKGYADFVILDANKMIVQRNFQLDDTFRGHCYLTERLRLFFKNHPEAAMFAAIESTGGYEKNWLNTLTKCRSVWKIKTARVHPLSVSHNIRAELKRNITDKISAQSVAEFLIVHPEKVTYNADDPLSSLRRQWHFINTLTKQKTQLLNQLQTLIYTANTELCSYCKDGMPQWLLKLLERYPSARKLARARIVTVARIPYVSKEKAKTLITMAKKSIAADSDPITENTITMMVKQINTLAKAIDAQTAMIKKHSTMPEVNLLKTFKGIGDFTAMGLMLEIRSVNLYSSSKKLAAFFGLHPIYKISGDGQGSFRMSKRGRKEPRRLLFLVAMSATESNPLIRKLYLQKLGEGMSRMAAIGMCMHKILRILYGMLKHNQPFDPQVDIQNTKVTRKRWDKRSVIKSRRYQDYDPNAPISRRQQAKRMERKRSQSVENTKRGIQTPVPMDTLTN

SEQ ID NO: 375003 - protein, 349 aa, unidentified
MKNFSIGIDVSKEKFDLTVKKVHFGAEQSEFLHYDVYENNPSGFRKMLKAVDKATGRADKSEWLFCLETTGAYELHLCNYLYAKGYDVWRESALQIKMSNGVTRSKNDRVDSDRIADYAIRHMDKMVIYVPVEEKLGTLKSLFLYRDRLVKEKQSKHTSSQEIKCTHVMNDEMRWMHTRSQQDIARLNKEIKECEDHIQELIASSAEIEKNYKHIMSIKGMGIITTTALIICTHNFATITSARKASSYCGVAPFFAQSGTSISHKKNVSHYSNAQLKAILTQAAFIATRYNEDIAIYYNRLKEKGKPLGVCVNNVRNKLLRIAFSLVQNDCDYEENHEWRRSQLYKDAA

SEQ ID NO: 375004 - protein, 359 aa, unidentified
MSQQPSDRSVIIGGVDTHKELHMAAVVDAHDRVLGTASFPTTRHGYKTMLTWMRSFGELSRVGIECTGTYGAGLLRYLQHAGITILEVTTPDKTVRRKRGKDDAIDAENAAHAAYAGIRTVTPKTRDGMIESLRVLKVCRKTAVAARRVALQMIQTQVVSAPEELRDLLRNMTRMQLLRTLAAWRPDLNGYRDVTMAYRIALKSLARRYLELHDEIADLDVMIKAIVDELAPKLVSRTAVGYETAAQLLITAGDNPDRLGSEASFAALCGVSPIPASSGKTHRHRLNRGGDRAANSALHIIAIGRLRLDADTQAYIARRVGEGHSKLEAIRCLKRYIARELYYVLRSRHREINQTQIAT

SEQ ID NO: 375005 - protein, 343 aa, unidentified
MLGEVFVGLDVHKSSIVATVLDGEGNRVDQTKLTSADSELIEYLNGFPGPKHVVLEACGVWPHVYDAAQSAGADVTLAHPLKVRVISEASLKSDKVDSDSLARLRLLRSVPMAYAPETPVRDLRQLVRDRVFYLHKEQDVKNHLYAVLLRRGISYEDGILSLKRKRETLRELHLPEIDRGLNVLVDLEEGCKELDKAVHEAFLASKEAQLLFTIPGIGKITAVALVAELCPISRFPNIEKLCSYAGLVPTNHQSGESSYQGHLKKDSNQLVKWMLVEASWSHRYQEKRSAVTNVAKRVSRRRGKQKGNVAGAHKLLKIVYAVLKRGTPYTPEPPRSERTFAKL

SEQ ID NO: 375006 - protein, 369 aa, unidentified
MEWPAPPSGVVGSPEFQKEEKGMALTAISVLGVDLGKNVCSVVGLNESGAVVMRRKMRRETLIGLAEKLPACVVGMEACCGAHHLGRIFVAHGHDVRLMSPEYVRPYVKAQKNDDRDAEGIAEAATRPTMRFVDLKSVDQLDMQTLHRARDRLVGERTALINQLRAILLERGVVAPQGKRKLETFLTLLMDEQGGAGLSPRMILLVADARTQWAEIDRRIAAFDTELVRWAKENDEARRLITIPGFGAIVASALVAAVGHAESFDSGRDLAAWLGLVPRQFTTGGKPKLLGISKRGNKYLRKQLIHGARAALPHVAERNTPLGRWAKELMMRVHHNVAVVALANKLARIAWAVLRRGERFAAARVSAAA

SEQ ID NO: 375007 - protein, 537 aa, unidentified
MVLLLAGNKTKPNTELFGELNMSDDQITTFRKKKSPRDTVFPEKTQNTSPAAAVVRYGVGFDVHKETIVVCVKAQLFDATIIEIQTHTFKAHPAGIDEICHYLLKYQPVSFFLMECTGVYHLPLYYALKAAFPKYQNQVIAMNPLMINHRLAEFGNKHDKADAQGIATLAFYDGLIKPSYIGERSFMELRDLTRAYAGNRQHTSRIKNQLTRILHANNLKFPFDYSATWVQQFLAFYVNNSLPLLEALDYFILDLKAHQESTGVIEKKRDDLIPFGEIKLDENARYHLSLLLERLQYDEILGASLLVQVETKILENPDFASAYRQLLAVPGFGSISALTILTELGDYHRFTNWEQMAKFAGVVPQIGKSADVVHKGHINRYSNGILRQSLCQVATVLINRADKSFDLGAFAFQQYHIKQKPFKLALIKVSQKLIRVIYAILVLGIEYSAVHEKEAKRNQIINRRYQQKKSYLEPIRVRALRSDINRFLVTHYDALNSKGRYHLVHGFHSLLKKASNNSDEVKKSVVKKRNVISKGDC

SEQ ID NO: 375008 - protein, 450 aa, unidentified
MSKGSGVSRGDRRRNARLAELRLLVCRENAIVGIDLAEDNQAVVVTDHDSKVLARRSPRCKAWQLGEVLDWAVGKAKARGFESVTVACEPTGSRWMHVQQACAERGLNFVCVQTLVTHNARVAEDYTRDKSDQKDAVLIARLTAELRCYRPEVIEEEWAVLRYLGQRRDALVTEALRCRQQITDRLALAWPAALGAAAAPLDSVTFLACLQVTADRCDGDPGKLRRYGLAEFTQLVRGVLPRWGGQRICHRIVACFHAALGDSRGAVPARRRGALKLAGHALADLRRARELQLRAEAEMIAQLDVLGITDVLASIEGLSLPVAACILAEIGDPARFGSSRALVKHAGVAPCENSSGNSAGQARISRRGRPVLRKTAWRGTWAMIHGANPVLAAKYDHLTSRDTGKLAKGQAHIACVATLLRWIYSVITTRTAWDRRVAGGTISHTATLAA

SEQ ID NO: 375009 - protein, 482 aa, unidentified
MKKKNIYVNQSQELLTLFEEAGNGAKVMCVPIDYAKKDHVVMFCNGHGHIFRKPFSIKNSPEGIEYLTEQVIRSCSHRRIDPKHVFFGGEDVGSYAENFVNTLRSGGWIVAGVNAHDAKEQRANLQASTDRLDLMGIASMLLNRRGNCSPAQSGIYRNLRTLVRHRRKLVVMSTEVKNRIHTVVDRLLPGFLNEKNSGILPFSKSSLFLMQDRFSPSQIRRRKRHKLIEILHRYGTATPESTAAKLQEYAARVLNTPDEYITTLQVSLAQHVKHFRCLQDSINHLKNEIAVWLAQTQGAFLTTLRGIGIVLAAGVSAETGNPHEQKPLNNLVSYSGIIPRVKQTGGPEGKTYTGKVAKRCNRILKDYVVQSANHLGLHGPEDLMADYKRREAAEQHADFGIGRRYLRMGMCLMRTSQIYMPQRLRNTEVKPEERAGYYLMIWPSLREKWNKADALEAAFEKDRPLGRWRSMVQELYEIKLKL

SEQ ID NO: 375010 - protein, 473 aa, unidentified
MTIGIAQTLLLIIDWRITMPKKTTSDRPELKTVNVSAAAIDIGSKMHMAAVNPACTEVPVRSFSTFTQDLHELADWFTACGVTSVAMESTGVYWIPVYEILEQRGFEVILVNARYAKNVPGRKTDVSDAAWLRQLHSYGLLRGSFRPDAEIATLRAYLRQRERLVEYAAAHIQHMQKALMEMNLQLHHVVTDITGATGMRIIRAIVAGERNPDVLATYRDVRCHSSTETIHAALVGNDRHEHVFALTQSLELYDVYQAKMLDCDRKLEVLIAALNNKGEKPVGKLSKPRIKTKQVNAPTFDVRTALYGVLGVDLTEIHGLGPSLALKLVGECGTDLRAWPSAKHFTSWLCLAPGNKVTGGKVLSSRTRRSSSRAAALLRLAATTVGRSDTALGAFYRRLSSRAGKSKAVTATARKIAVLFYNTLRHGMSYRDPGAEHYEQQYRSRVLANLQRRAKSLGFVLQAIPGNANPAVS

SEQ ID NO: 375011 - protein, 356 aa, unidentified
MNKISKLDFKGQQVYIGMDIHKKSWSISILTDNFEHKTFTQPPNVEVLVNYLKRNFPGGSYKSVYEAGYCGFWIHDRLQEHGVQCFVVNPADVPTKDKERRSKTDRVDCRKLARNLRNGEIKGIYVPCRPKVEDRSLIRTRQSMVKKQTRCKNQIKSILQFYGIQIPEELAESHWSKRFITWVETIRMERASGNFTLKVHLEELNNMRKIIADLTRGIRSLANCEEYRQNVRILKSVPGISTLTAMMLLTELYEINRFKNLDKLCSYVGLIPDTDSSGETERNTGITKRRNAQLRGILIESSWVAVRKDPSLLMTFNTLCKKMRKANAIVRIAKKLLNRIRYVLKTQQEYVPAVVQ

SEQ ID NO: 375012 - protein, 352 aa, unidentified
MKRQVKGLDSSEALFVGIDLHKANWHVTIRTADVELFSGSIPGRWDVLRVLLQRYRGSTIQVVYEAGCFGFWLHDRLIEHGVDCMITPPSLIPQESGNRVKTDRRDSRKLAHLLAKGLLKRVFVPGKKECYHRQVVRRRRQLIGDRTRVQNRIKAELRFYGINISEPIGKWTKGFMENLNKIRFEDKFMQESFNRLLEQYRFLTEQIEKQNSLIHELSEKELYRDRAEILKSVPGIGTIAAMELLLELQDVSRFRQADQLAAYVGLTPSQYSSADKIRMGRITKVGKHSVRAILVQVAWQLIRKDQAMREKYERIKIRSGAKRAIVAIARTLFLRVRRIWLDAVPYRLALSA

SEQ ID NO: 375013 - protein, 348 aa, unidentified
MKFSVNLDSSDIGLDIHKRTIAYCIKAIDGHLIDQGKIGADRQSLGAWVEGLPGPWIGAMEATMFTGWVYDFLKPHAVTLKVAHPAMFKAITAAKKKNDRADAEKIADLLRVNLLPECHMLSEEIRELRRILRYRNHIVRTAVKMQVKMSGLLMEVGVSYSKKRLHGKKYFRELLERVDEIPPSVKELLQLSRSSYEMFRSFQKRLVETLRTNQLIRDRVQRLMTIPGVGEITALTWTLEIGDPGRFSSTRKAVSYCGLCSAQKESAGKEQRGPISKKRNKHLQTMLIEAAKLAPHWNEQLAIVHEQELKKGNRNRATLAVARKLVAYMLAVDRKQADFKLSSEIRAA

SEQ ID NO: 375014 - protein, 441 aa, unidentified
MKKKSGFPVLHPNAAGIDIASKEHYVAVNPFTDDHPIRSFGCFTEDLHAIALWLSKCKVDTIAMEATGIYWVSLYLILEEAGFNVVLVNAKHVKNVSGKKSDVKDAEWLRQLHSCGLLKASFQPDPYIRKLRCYMRHRKNLTDMAATHIRMMQKAMEQMNIKLQHVIADITGKTGQAIIRSILQGQHDPQALLHLVDGRIRASRQDIAKSLDGIWKEEHLFELQQSFEFYHFYRQKISECDQQVKMHLDKCPKQESLQIPLKPKSKSNKNNLNFDATQVLHEMTGVDLTRVFGLTDTNAIELISEVGMNMNKWPSVYHFTAWLNLAPNNKRSGGKLLSTNTPKKKNKAAQIFKMAAFAVQRSKNHLATFYHRIKSRRGAGKATIATARKIAVIFYLMIKNKTAFNPISIEHYSATFREHQLIKIAKNAKRMGFKLVPELVT

SEQ ID NO: 375015 - protein, 452 aa, unidentified
MATKRKKRVQDLPVLHPDGAGIDVGASEVYVAVPADRDTEPVRSFATFTRDLHTLADWLQRCGIKSIAMESTSVYWIPLHQILEERGFEVCLVNAQHVKNVPGRKTDVSDCQWLQYLHSVGLLRSSFRPSAEICAIRSLWRHRASLIQMAAEHVMHIQKALDQMNLQVHRVLSDITGLSGLRILDAILAGERDPFTLARLCHSRVKTSHDTVAKSLEGDYRSEHVFALRQSLAGYRYYQGLIADVDKEIQRHLADLKTVADTDAEPPQRTKKAAYQRRHYEPKTFDLRGELYKIFGVDLTDIPGISAVTAHTILCEIGTDVSQFRNASAFASWMGLCPDRQISGGRVLYTKSRRVRNRIALALRMGANSLHHAHNYLGEFFRRISRRLGKPQAITATAHKLARIVFHLLSVREPYNESVFHQCDQDAQRRAEIRLRKHAAQLGFQVVAATNT

SEQ ID NO: 375016 - protein, 344 aa, unidentified
MPAAEVTTFAGIDVSGRELSVALRRGQGGDKPAMAKFPNHPSGHKALVAYLLRGDGRVRVCLEASGNYSLDLALTLQAHQMEISVINPRRARRFAESLGERSKTDPVDARVLCEFAARMPWVRWQPPSPVALHLRALTRALADLGAIHTQQNNRAHAAAASQALPALVVKEMQRHQKYLEQRMTRLRREALRLIADDPELDRRFRLMLTTTGIAETSALQILGELAVLPDMLDARQWVAFSGLDPRLFKSGKSVEKRPRISRGGSRHLRRALYMPALVALRRDPYLRGFYQNLLARGKARLQAVVAVMRKLLHALFAMFRTNQPYDGSRLCALHLVVDGVAACA

SEQ ID NO: 375017 - protein, 354 aa, unidentified
MLIIGCDYHPGFQQIAFVDSETGELQKRRLEHPEAAEKFYRELAAQGKKVRVGMEASGHAGWFERLLAELNFELWIDDAAEIHRKRERKQKTDRQDAQHILRLLLKDDFPRIWVPSWENRDLRQLLWHRHRMVQARTRMMNQLQAVALNEGLRCKKKLWREAGRKQLEAFRLARWASRRRHDLLELLDRLNPTIAALSQAIEQKVQNCPEAQRLMTHPGVGPLTALAFVLIIERADRFQCGKQIASYLGLVPLEDSSGNRRRLGHITKQGNSLLRFLLVEAAQVTVRSLPEWRSKYVHLTMRRGRKIAKVAMARKLAVRLYWMMRKGWDYEQVKKFGSHPGQPGHRDGVKSNIE

SEQ ID NO: 375018 - protein, 334 aa, unidentified
MQNITLIGIDLGKHSFHIHCQDKSGKVLLRKKFTRTKLIEFLAGCASSTVVMEACAGAHFMARRIADLGHEAKLISPQFVRPFVKSNKNDFVDAEAICEAASRPSMRFVQPRTEAQQAMRALHRVRESLVSDKVKTTNQMHAFLLEFGISMPTGVAVVKRLSTVLAENELPPYLAQLLMRLHAHYIYLVGQITELEIALEQELSRDEVGQRLQTIPGIGPITASVLSSQLGDGKQYSCSRDFAASTGLVPRQYSTGGKNTLLGISKRGDKNLRRLLVQCARSFIQRIENQSGRLADWVRALLARKHSSIVCCALANKLARIAWVITTQQTVFER

SEQ ID NO: 375019 - protein, 312 aa, unidentified
MTPSIIGIDISKDRLDVHRLPDGAAKRFTNDMAGHTALLDWLAQTRVARIVYEPTGAYHRALEQALAAKGLPLAKVNPRQARRFAEATGKLAKTDRADAAMLARMGLALAPDTRPLPSQILRDLKELHLARQALMKDWTAAKNREKSLRLPLLKRQNQKRQRQIETQIAAVEAEIASRIAANAELAERLAILESIPGIAKITACALLIEMPELGTLDGKQAASLAGLAPLARQSGRWTGRAFIRGGRASLRQALYMPALVATRFNPQLKAKYHQLITAGKPTKVALTAIMRKLIVLANALLRQRRNWAENPA

SEQ ID NO: 375020 - protein, 348 aa, unidentified
MIIGIDPHKASHTATAVDPATNTPVASLRIDASIAGYRQLLRWADQFAERRWAVENAKGLGCHLTQWLIARDEHVVDVATTATSRVRELSRGGRRKNDVIDASAAASVAALQGDAVVATADDETTVFALLEERRANLAAQRVRSVNQLHALMRDLVAGGARTALTAKAASTALRSVRPTTPTGHARKALAWDLIRDVRSLDAQLVKIAEQMTDALETYGSSLLDIDGIGPVLAVRLLGRTGRPSRFRSADAFASYTGSAPIEASSGERVVHRLSRSGDRKLNSALHLVAVTQVRMRNSAGRAYFDRKIEQGKTRNEAMRCLKRKLASHIWRRMLADERARTEVTKIAA

SEQ ID NO: 375021 - protein, 438 aa, unidentified
MSNKVIFNLDDLFISVGIDVGADFSWMSIALPNQQFVGKPYKILHNSIDSLTTAVSKIKEAEELYSLESRIFLESTGIYHYPLFCYLRDKGFNCSVINPIITKNSTNINIRKVHNDRFDSKKAALVGLKPDLKVSLMPSDLALNCRNLCREYYDLMDNRSAYVNKLQGELRMAFPQYLGIFSKVTINTSLTLLETYTSPSAFLEADKQEIIDIIKSTARFGLTYAQNKYNAIIQAATDANQFGYIIDSNIKRIRLYISFIRKYDEEINSILESLHELVDANEDADFVKQIHLIETFKGAGFLSAVSIMGEIGDFSAFSKPKQLFAYFGLDPAVKQSGKFEGTKVQMSKRGSAIARRVIHTLTLQSISISRNGEAKNPVLREYYLKKCDSKPKLVAMGAVSHKVCNMIFAILRDNKPFEIITPQEHIKQYNASKCDMAA

SEQ ID NO: 375022 - protein, 406 aa, unidentified
MILIFVGDDWAEEHHDVYVMDEAGKRLAAKRFPEGLAGIRGLHALIATHAEESDQVVVGIETDRGLWVDALTAAGYQVFAINPLAAARYRDRHHLSGAKSDPADAKLLADLVRTDRHNHRPVAGDSGGAAAVKVLARAHQSLIWARTRHTNMLRSALREYYPGALETFDDLDDRDALAVLGRAPTPAEGARLSLAKIRSALKAAGRQRNIDARALEIQAGLRTEQLTASDAVTAAFAASTRAAVGIIAELNHQISDLETELATHFETHPDADIYLSLPGLGVILGARVLGEFGDDPNRYTTAKCRKNYAGTSPLTIASGRKRAVLARHVRNRRLYDAIDQWAFCALTTSPGARAFYDQRRDADDLHHQALRALGNRLVGILHGCLRHHTLYDEHKAWAHRQPTAAA

SEQ ID NO: 375023 - protein, 412 aa, unidentified
MNQDKLYVGIDVSSKNNVCYLMYSDGSKHSSFSVPNNRNGAKIIVDRVTSVLLLQDIPQVVIGMEATSVYGDNLMRFLRESGSLGRFERSLHMLNPKQVKKFRDAYSDLPKNDYVDSYVIADHLRFGRINKEVYMDDYKYQALKMYTRARHQLVQELTREKQRFLNTVFISFSGLTQEKIFSNKFGATSMALIEEFSSLDELAYMSTDELVDYIRKKGKNHFDDLEEIAEAVQRAAKNSYRPPQVIADAAKQMLAISMNTIRLLQKQIKEYDKAIEKMLEAFPQTLTSVKGIGNIYAAGIIAEIGDINRFPSQASLAKYVGLVWTQHQSSDFEAEDKRMIQGGNHHLKYYLCEAANALRRCDPEFKRFYALKYKEANKHNHKRALALTARKLVMLVYTLLKTNRLYIPPEEY

SEQ ID NO: 375024 - protein, 477 aa, unidentified
MVINRVEEILDEPYEQVVQRVCAIDVAKDLGKVCVRTPAESGSGRRVSRVWDVQARTNAIIELGDHLACQSIEKVTLESTSDYWRIWFYLLEARGLDVQLVNARDVKNVPGRPKTDKLDSVWLAKLTEKGLLRPSFVPPRQIRVLRDYTRLRVDLTAERVRHWQRLEKLLEDALIKITSVASRIDTLSVRDMIEALIAGQRNPKVLAGMARGRMRLKHADLVEALTGQFDDHHAELARMLLDQIDALTAQIDTLTDRIDTVLADVPVSPPPDGPEPDPDDHQPGRRNRVEQAPQVRGNGSGTAPAPGAAPRPVTALSLVDILDEIPGIGRHNAQEIIAEVGLDMSRFPTPEHLVSWAKLCPRTIQSGSRSSAGKTGKGNRYLRAVVGDAAAGAAKTQTFLGDRYRRLIKRRGKIKTLVAVARSILVIIWHLLANPGMRYQDLGVDFHTKRIDIARRTRNYVRQLEAMGYTVTITAAA

SEQ ID NO: 375025 - protein, 402 aa, unidentified
MKVCGLDVHKDSIFCSIYDGKTSSEVKVFDSTTRFIYEMGEYLMTEGVNQVAMESTSIYWVPVWNILSEMGFELTLVNPFLIKQMPGRKSDVKDAQWIATLLHKNLIRGSVIPNSTIQELRFYTRKYMKLQQDKCKLLTKMDRIMVMANIRISSCVSKLTNKSVIIVIEALIKGETNPDNLVKLVYGNTKNKQSGKLREALTGYIMDHHRKALKWEKEIYDILERQTLECIKEMERICNKHYKDEMLLLQTLPGVSKISAICLIAETGADMSVFDNSGKLTGWAGLRPRNDESAGKFKSKAITKGNKYLRVVLIQVAWAASRTKGSYFMEKYHRLSMRKSNKKAVVAIGRKILVIIWNMLKEKKPYNPNLVCIYDPIKIERTLAYHRKEMEKAAKLLHKEII

SEQ ID NO: 375026 - protein, 360 aa, unidentified
MNKNKYVGLDVDQATTVVAIEDARGDFLMESFLPTRAVELREFFKGLNGRIHVAFEEGTQATWLYDLIEPLVKEVVVCDPRRNKLIQSGNKGDRVDARKLARLLRLGELHAVYHGERGTRGLKELVHAYEQLVGDTARTKNRLKGAFRSRAIGCRGDKVYGASERKDWLAKVDTPAVRARISSLYEQLDCLKKLRDQAHKEMIKEARKHPAYKLIINVSGLGSVRTSQIIATVGSPHRFRTKRQFWPYCGLAVVTHMSSEYEVVDGKRRRKSKPLQTRGLNKNFNRTMKVVFKGASETAIKKAPFKQYYQRMIDNKMRPEMARLTVARKISAITLAVWKKGEEFDPEKVNQAARDSDDQR

SEQ ID NO: 375027 - protein, 344 aa, unidentified
MQVARIGLDLAKYVFEIYCVDAHGRTVIRKTLRRHAVLPFFANLPTCLVGMEASNGAHFWAKAISELGHDVRLISPQFVTPYVKSNKNDRNDAEAICEAVGRPNMRFVPVKSAEQLAVQAVHRIRSRLVADRVRLVNQVRGLLGEQGIVVAKDIGNLRRALARIVGDDECRALNPLVRALMAELRDELTELDARIAGYDRKIRELYRNSEICQRLGKVEGIGPVTATALVAAVGDRSSFKNGRQFAAWLGLVPKQRSSGGRARLFGISKRGDRYLRTLLIHGARSALGRVRDKQDPRSLWLGRMRQRRHPNIVAVALANKNARIAWSLLTSDSAYDAKLSVRAA

SEQ ID NO: 375028 - protein, 387 aa, unidentified
MIYVGIDIAKLNHFASAISSDGEIMLQPFKFTNDYDGFHLLLHKLDSLDPDSLIIGLESTAHYGNNLLEFLVKHNYKVCVINPIQTSAMRKNNIRKTKTDKVDTYIIAKTLMMDPHRFFSQHDLSIMHLKELGRFRMKLIKKRTQGKIQLMSYVDQAFPELQYFFKSGIHQKSVYAVLKEAPTTKDIASMHLTHLSHLLEVSSHGHFKKDTATALRILAQKSVGCNDSSISTQITQTIELIELLDSQVHDVESEMELIVNSLDSVIMTIPGIGFINGGMILGEIGDITRFSSPSKVLAFAGLDPTVYQSGNFNASHTKMSKRGSRPLRYALINAAHNVVKNNKTFKDYYDQKISEGKSHYNALGHCAGKLVRIIYKMLTDNVSFNLD

SEQ ID NO: 375029 - protein, 346 aa, unidentified
MIVLGADMHKSSHPIAAVSAMSGELLGDKTIQLGDRGFAAALDWARGLGAERVWALEDCRHVSGSFERFLVVSGERVVRFATRLMAGERRGGREPGKSDQIDALAVARAALRDGVERLPVAELAGVELDIRLLVDHRERLVRMRVALYNDLLWHLHDLWPEQTFPGCALLSKKWTTRIARRLGRAEQTARVRIARDEIGHLRELTHTINGLEAEIAELVAQVAPQLLAEPGFGPLTAGKLIGEIAGVTRFSSDAKLARAGGIAPIPVSSGKTNRHRLDRGGNRQINTAIHRVAVTRARCHPETKAYIQRKRAEGKTSTEALRCLKRHLARRIWHLLQPDATAAVLT

SEQ ID NO: 375030 - protein, 349 aa, unidentified
MKPNSQMTLGESFRQCVGIDISKDKFTACLYMYDRASDVGCCTKSIDFANTKSGFNQMVKWSRKEAVKEYPLVYLMEPTGIYYERLAYHLHKIGQTLYIVLPNKARTFCEAEGIKTKTDAVDARCLALMGCTSRKLRPWSPPKAIYSELRQLTRFHADLCKVRTSVTNRQEALLHMEDAAKGVLKGCEKLIAEIDKLLEKNEKDINDKLAQDKELKAKIERITTVKCIRIATVTCVVAETQGFHLINNRKQLTSFAGLDVVAKQSGKEDPKHVISKKGNAHIRAALYMPALSATFHNRQMKAVYGRICQKHPNEKKIAVIAVMRRMLLLIYTLWKNGEVYDEERDTTHS

SEQ ID NO: 375031 - protein, 396 aa, unidentified
MRWIGIDVHVEFCEVAVHEDGVSRRAPRVQTSEAALRRVGEKLEPDDTVVLEATGGAWSIAHLLSGYAQVVVADARPLRALSQAKAKTDRADARSLAELGAAGLLRPVWLADNATRSLRRLLSRRDQLVRQRCRAKNEIHAALHRNLLRSPVSDLFGVRGRRWLGGLQLPGHEQHTVESCLRQVDLLDEELSAIDRALAERALADARIRRLMTIPGVDAVVAAALVAAIGEVERFDNPRKLTSYLGLDPTVRQSGSEPAKHGKISKQGNSLARRLLVEAAWTASHTPGPLHAFHARVRARRGPQIAVVATARKLATLAWPMLKSEQDYAYARPFLTRIKLRRLELHSGAEPLTGRRPPVRIYPTGPQRAAERKMLEQAEAAYVRLMTDWKAGGPRT

SEQ ID NO: 375032 - protein, 376 aa, unidentified
MEHSTFIGLDVHKAAISVAVAWGTRGGEVRHWGSVPNRPDQIRKLVEKLAAGGARLHFCYEAGPCDYGLHRQLVEMGHDCIVVAPSLIPVKAGDRVKTDRRDAVMLAKLHRAGELTAVWVPDTAHEAMRDLVRARATAMRVAGKARQHLQGFLLRHSRIYPGKKGWSGAYRRWLALVRFTHPAQQIVLQDYIDAVADAEARVERLTGQIADLLPHWSLAPVVAAVQAMRGVGFIVAVTVVAEVGDFQRFDSPRQLMAYLGLTPSEHSSGASVRRGGITKAGSGLARRALIEGAWSYRMQARISVKLLARLEALPKLVRDIAWKGQLRMCQRYRHLVAAGKAKVVVVTAIAREMLGFVWAIARAVTTPPAAPSATAA

SEQ ID NO: 375033 - protein, 338 aa, unidentified
MKLYGAIDLHSNNNVTVLIDEQDQVVYQKRLPNDLPLITQQLSGYRDRLQGIVVESTYNWYWLVDGLMDQGHRIHLANTAAIQQYEGLKYTDDHSDARWLAHILRLGVLPQGYIYPKEERAVRDLLRKRGQMVRQRTANLLSIQNLITRNTGSSIRSNRIKTLDAEQVDDLLPNSDLALAVKANLAMIQCADGQIDILERTVTDRVKLRAAFSFLKTVPGIGQILALTIMLETGEIKRFPTVGDYASYCRCVGSQKLSNGKKKGSGNTKNGNKYLAWAFVEAANFAIRYNARIKSFYQRKKAKSHGVVAIKAVAHKLCRACYYIVKDQVPFDIAKAFA

SEQ ID NO: 375034 - protein, 359 aa, unidentified
MLGVLTSNATKEAPVSGQYAGKQIVGMDLHRRRSVLVRMTETGEHLETVRISNDPEYLRQVMERAGEAPEVVLEATYGWYWAADTLAELGAHVHLAHPLGVKMFAYRRVKNDQRDAADLADLLRMGRLPEAWIAPPACRELRGWVRHRAKLVGLRSSLKCQIHAVLAAAGVQVPMSDLFGAGGRQLLTNARLAPESRARVDSLLRLIEALDFEIELFATLVARRLREHPGYRALLQIPGVGPVLAAIFVAEIGDIGRFARPQQLASWAGLTPKHHESDTTVHRGRITKMGSRLVRWAAVEAVQRMPAHTRLGQIRDQVGERRGRNIGVVAAARELTELVFFGLRDGDIRRLSTPPQPAA

SEQ ID NO: 375035 - protein, 427 aa, unidentified
MSVTQNDKIRQVTDTTMVIGVDIASELHWARAFDWRGLELGKTVKFENSAEGFNFFLRWVSELTVEQKKDSVMVGLEPTGHYWFTLAAHLQGGDFKLVLVNPYHVKRSKELDDGHPSKSDKKDPKTIAKLVLEGRYVYPYIPQGLYAELRVTMNCRWRIRKELASLQNQIQRWLKIYFPEHSKVFGRFTGAGSMALLHSAPFPSDLISLGVEGISGIWKQMKLRGIGRKRAQRIYEAAQTSVGCTTGMEAARMELQILLEDYDAKLQQYERVMQVVENLCSQIPAVAELLKIQGLGLVTVAGLFAEIGDIRRFESPRQIQKLAGLAITENSSGKHKGPTEISRRGRSRLRAILFRAAIPLLAKNREFQLLHRYYTTRQNNPLQKIQSVIAICCKLLRVFYALATKDCAYSPEKVLADIQRNQPLKAA

SEQ ID NO: 375036 - protein, 347 aa, unidentified
MRHFVGLDVSLEETAACVVDEAGRIVKEARIASEPEALVAFFRGLGLAVERIGLEACSLAAWLHDGLAAAGLPALCIETRQAKAAMSAMPNKTDRNDARAIAQIVRTGWYRAVHVKSPACRSWRALLTARRMVLNKLRDVENGVRALLREAGLKLGTPGRKHFPDRVRELAAPDPVLAKLTEPLLAIIATMTRELARLTRQVLAVVRDEPVCRRLMGVPGVGPLTALAFRATIDRPDRFRRSRDVGAHLGLTPKRYQSGETDVQGGISRCGDELARTALYEAAHSLLARGRKWSALRAWGMRVAKRRGMARARVAVARKLSTILHRMWADGAEFRWGEEEVAPAASA

SEQ ID NO: 375037 - protein, 375 aa, unidentified
MQNKLRFLGMDVHAETISVAVAEADGEVRSLGVIANRAESVRKLIRKLGPVDQLRACYEAGPTGYVLYWQLSELGVECAVIAPTLAPVKAGDRVKTDRRDAERLARSHRADDLTRVWVPDAASEALRDLVRAREAAKQDQLRARHRLSKFLLRQGQRPIAGVKAWTIAYMTWVRQLRFTQPAQDAARLDYLHEVEHMSERITRLEDSIREAVQQASPQLKAVVEGLQAMRGIALISAVTIASEIGAVSRFQNARQLMSYSGTVPSENSSGKRTQRGGITKSGNAHLRRILGEAAWSYRRKPAVGPALRKRQEGVPEQIRQIAWKAQVRLCKRYARLQAANKEPGKIVTAVSREMLGFIWAIGLRAELSIPQADAA

SEQ ID NO: 375038 - protein, 372 aa, unidentified
MSDRTATSSAPAKESSTTTTSHVILALDLGKFKSVACRYDPATGAHAFETIATTPPAVHDLLIEASPAVLVIEACSASGWISDLAESLGIAVRVANTLGEAWKWKRVKRKTDRDDALKLAKLAASGHLPLVHIPKLSVRQHRSLIKYRHALIDRRTGIKNTIRSLLDAQGLSMPMRSRGWTIESINELKQLSRPLSECDARTLWRGQLDLELRLLEAVSTLIKEADKKLDAIASQDDRVKRLKTIPQVGSRLAELVVSTLDDAKRFKTARQVSAYAGLVPKQYQSGQMNRLGRITGQGPGLLRRVLVQVAWGLQRREETRGHAVFERLCHGQRTRRKQAAVALARKILIWCWAILRDGSVWDDTRDRRLTVT

SEQ ID NO: 375039 - protein, 355 aa, unidentified
MNATTVAVDLAKNVFQVAVADRQWKIIERARLTRSQFERWFDNRECGTVVMEACGSAHHFARWLTGRGFDVKLLPAQYVRAYVKRNKTDAADAAALLEAARAADIKPVAVKSIEQQALQALHRTREAWKSTRTRRINTLRGFCREFGLVVPEGAATGLAQMARYLADEQSGLPAMLRSSMRLMLDEIRLMEARMAQLETQLAEVAKHSPACQVLLTVPGIGLITSTAMVAAVGNPGSFDSGRRYASFLGLTPREYSSGNSRYMGRISKRGDRYIRTLLTHGARSVLRSATVAHRAGREIDRLKSWALEVQGRTNHNKAACALANKLARIAWAVWVKHEAYRGQALPASQSPLCST

SEQ ID NO: 375040 - protein, 374 aa, unidentified
MKNNITYVAMDTHKRQHKIAYQQPDQMEIIECTVLNTAREIKKMVKKILRQAPGPVVFCYEAGVCGFVLKRQIEALGCRCYVIAPSLIPRKPGERVKTDRRDAKKLLSLFQAGLLTEVQAPDEAQEAARELTRLRETAQENLKRIRHQILKFLTRHGYVYTEGRHWTQKHLTWLHALEFAEPRLTQVFENYFAELVYCQSRLQNLDQEVTQLAQSPAYREVVRLLCCFHGIDTLTAITLLTEIFAFGRFASPRQLMSYLGLTPGEDSSGDRQRKGAITKTGNARVRRLLNEAAWHYRHRYLPSRALQKRREGQPLWAIAIAEAAGRRLSQRFRYLVNKGKLPTKANIAVARELIGFIWSLVRQYEARNPTVQTA

SEQ ID NO: 375041 - protein, 367 aa, unidentified
MSRMKRLTVQQLDVSKDYLIIGLDLAKTDTAVIAITTDGELYAIDRLKYLDLLNQAKQLGPTVFAMEPCNGMTYLVHELEELGHECRVINGEAVKDYVKSHFAGQKNDLNDAQAIAFLAQDEMLKFIRTKAKSEMTMQTLQVIRQQLIKQRTCSVVCIKGICQNYGLVISKSIMSEAKIRPIIEESQKLPEEIKEPLKALLRNTARFTIDIKQIDKAIEQGLKGNDTAERLLEVPGLGPQCVSRLLTTIGDINRFEGPKNLAAYYGLVPRSHTTGHNEQMGKITKHGDRLMRSFLVQGAHAVLILHARGRLPKSALKKWIDKKLSGGMPRSKLSIALAAKLLRIAFAVLKYKKKFDIKKAGVARCSL

SEQ ID NO: 375042 - protein, 330 aa, unidentified
MAQEYIGIDVHKTFFQACAVTPAGDRLWEGRFARSADGFAQFLPRLGPQSQLAVEACGPTWAFVDRVAPTGAAVCVVDTRKTKLKAGCAAKTDRLDARRLADAVRRGSVVSVYVPPPAIRALREVCRSRQQLVRVRTRLVQMLRALLLRSGAADAPQRQLYSARGLAWLGQVALPPEAATSCQRLTRLLQLVHAEVTTADGQVRAQAAADPIAGVLDGLVGIGPVLALTLRAELGDITRFPRGPQLASYAGIVPRVSRSAGRGYSGRITRDGAPWVRWALVEAARHAVKRQDAVGRWARQLARRIGWQKARVALARRLCDEIVRVWPRGR

SEQ ID NO: 375043 - protein, 409 aa, unidentified
MIRVIGLDIHRVFAEAVMLDEGRLIRLGRIGMTREHLEAFARKLTHDDHVVVEATGNATAVSEALMPHVGRLVIANPRQVRLIAEARIKTDVIDAAVLARLYAAHFLPEAWVPDQQTLALRRQVTRRRQLVRQRARLKTMIQSILHAHLVPPCPHADLVGPKGRAWLLAQRLPPDEQEAVARHLREHDRLSEDLRVVERGLARDALGNPELQRLMTIPGIDMVVSIGVLAAIGRISRFAAPDKLVAYLGLNPTVHQSGEDRPRHGRISKQGPTHARSMLVEAAWQAVRSPGPLRAFYERVARRRGTPIAAVAVARKLAVIIWHLLRRGEDYAWVRPALHARKLRDLQLRSGQPACRGQRGAAYAYNLARTRREEKRRAEQAEVAYRRLTDGWTRRCRKAPSGAAKEERH

SEQ ID NO: 375044 - protein, 387 aa, unidentified
MYYIGIDISKFKHDCAVIDDSGEIVTPSWSFTNDAEGFSQLKLLLNSLDTETRIGLESTGHYGMNLKLFLESNNFSFMEFNPLLINRFVKSKSLRKTKSDSIDCMMIAHYLMTVEYKPYPSSFYHTEKLKSLTRFRDSLIRLRSRQLVELTNILDKVFPEFKPFFGGKFSVTALYILSNYSSPEKIANMNSKSYEALRKLSRGRFSTVDFAKLRQLAKNTVGNTEDYLLQEMQIVLELYSQLDSKVDETEVSIKECVSDMNPPMLSVPGIGIESAAVILAEFGDFSKFKNASQMLSFAGLESGYFQSGTSETTGKMVKHGSSYLRYALMNCAQTVVNYEPTFAMFYAKKRAEGKPHRVALSHVVKKLLRVIYTLQTKNIAYDTDFVR

SEQ ID NO: 375045 - protein, 342 aa, unidentified
MVYVGLDVSGKSLVGYAVNERKRCVYEGEQPASRVGLRALVRQIGVGPKLVAFEAGNQMKWIADTLKTLDGVQVHVVHPNEVKWITESRGKTDRVDAKKLAELARADLLPRAVHIVEGPVRELRELVSARQQLQRKRVALINTIRGYVYQEGHRLPEKFFAGVAWREKLARVSVSAPLRLIVQTFMTSIEALVVAEQQLTQRLRAIADPRCDLVETVPALGPLASRVVLSAVDEAQRFDDQKAVANYGALAPTIYQSGAVRHLGRINRDGRQEVRRVLLQCAHTVVRMKSAGAKPLQQFYARIATRRGKKIAVVALARKLLTTAYGVLKSGTPYDPRKLQPA

SEQ ID NO: 375046 - protein, 401 aa, unidentified
MPAIWAGIDSGKRAHHCVVIDQSGTVLLSKRVENDEAVLLELITTVTEIAAGDDLCWATDLNAGGAALLIALLANHGQQMLYIPGRIVHHAAATYCGDGKTDAKDARIIADQARMRTDLQPVRGADQISVDLRLLTSRRSDVIYERVRAINRLRATLLEYFPALERAFDYSKSKAALTLLSGYATPDSLRRMGVARLTAWLKARGCRNSSAVAHTAVDAAHTQHTMLATQRVGSALVARLAAEITRIDAELAEIDTELTQRFSQHHDAAILVSMPGFGPVLAATFLAQIGGTLDGFDTVDRLACVAGLAPVPRDSGRISGNLHRPRRFNRRLLRTCYLAALSSLKNSPASRAFYDRKRAAGKSHKQALIALARRRINVIWAMLRDHTLYQEPALANTPLAA

SEQ ID NO: 375047 - protein, 442 aa, unidentified
MARFVGGDLQARFMARVRDVDPRRCLVVPVDVGKWSAMALVADHHGEVLRAPWEFRLDEPGVRGLLSVVAGAVRDVDAVVCRVGVESTGHYHRTLVARLRSSGVEVVELNPAAVKEARSQQLLRRLKSDERDLGAMAELMIRGAGRVPQVGDEAMAAQSAWVAHRRRKVVAHVALSNQVQGHLDLVFPGLGACFDGILRTKAGWVIVRDLADPDRMRRLGPEGLRRFVARRGVVLRRAKAAQLIDAANVALRLPAGERAPIAALLRADVALLEAIGDEIRRSEHELARVLDATPAGVLVSLPGVGVVRASAYGAAIGDPGRFPNAAAAYRASGLVPTEYSSAGRRRGGQHISREGSVELRSAIIELGRGLAGHDDDFGAYRRRLRSSGKRPAVAAVAVGHRAHRLAFAMLRSQEPYDPNRWAAAVADGPVMAKTGGRPTTAT

SEQ ID NO: 375048 - protein, 352 aa, unidentified
MRYYIGCDAHKKYSVFAGISEAGEVIPAQRVDHDRESFRRFLTTSLPRSEIAIESVGNWYWLVDEIEKAGHTPILTHPAKAKLMMGQINKTDKLDARGLAILARNGTVPAVWIPPGELRDQRELPRMRMAMSQVRTKFKNRIHSTFAKYAITFDEVTDIFGGKGRKLMEDALDELPPETRRSVREQLLLLDQVEDSIKKAEKRIRQVIKVDDTMQLLQTMPGVGPVLAIVIALEVGCADRFPTAENLASYAGKVPRVSSSGGKTRYGKVRPDVNRYLKWAFTEAANAIVLQQNRCPDRHVVRLYQRVRKHKGHAKAVTAVGRHLAEATYWMLKKNEPYREPGGKHPVSSTQR

SEQ ID NO: 375049 - protein, 333 aa, unidentified
MVDGTKGSHRKEGTTKMSENNINAAGIDTGKAKLDVALAGGKARLQIDNAPSGWRKLATWLKWHNVDRVGIEASGGYERGVVAYLREKGFTVILFQPLQIRAYAGFRLQRAKNDRIDADLIADCTAATTTVREAPDPRFQAFCEHLTLIEQIEEDIARAKTRLEGFRDSRHREILASEIKRLKAWRTAELKRLIAALCRHDDLTNRLTLIESVPGIGSRTALALLIRMPELGSLSREEAAALAGLAPYDDDSGKHQGLRHIAGGRERLRRSLFAAALPAAFQWNPSLVALYARLTAAGKSHKVALIACARKLLIFANTVVARGTPWTEHHATV

SEQ ID NO: 375050 - protein, 424 aa, unidentified
MKRTQNEKILQIKNETLVVGIDIGKETHYARAFDYRGIELAKLLQFANTARGYAAFDEWIENTMRQKGKTEVMVGFEPTGHYWFTLGDHLQRKGHKIGIVNPFHVKRVRELDDNSPTKNDRKDPKTIAMLVKDGRFREVYIPKDLFQELRESVYERERIQEQLIALSNQIIRWLDIRFPEFSEVIKDWRGKTAWATLRAFPTPAKIVEAGINGIMAKWQGQLKKPSRKKAEKLLKAASESVGRTAGAEAAEVALQNMLSQYEMILRQRCELEILMQELLLRVPNAAKILRIKGIGMLTAAIIVSEIGDISRFKDPRQILKMAGLNLRENSSGKHKGKTTIAKRGRKRLREGLFNGMIPMLANNEEFRQLHHRNLTREKNPLNKMQSIIALCGKLIRVLYAILTKGCEYDATKMINDINRMAMAA

SEQ ID NO: 375051 - protein, 475 aa, unidentified
MTSKRRTSKAKQTRLKRRRPKHTHQRGAPQQSIPVQEANAAGIDVGAREMYVAIPADRDAEPVRVFPTYTCDLEALADWLVERGITTAAMESTGVYWIPLYQILEDRGIRVCLVNARHMKNVPGRRTDWHECQWLQYLHAVGLLRAAFRPEPEVVAIRTVVRHRSRLVEAAGVHIRHVHKALTQMNLQIHHVISDITGVTGTAIIESILAGQRDAGELAKLRQPEIRADAETIRKSLEGDWRREHLFALRQSWELYGTYVRSIAACDQEICEMLGEHEPKVDPAKKPLPSDTKRRTKRKHQRTGDFRFDVRTEAYKQFGVDVTGIPGLEGIALMLYSEMGNDMNRWSSASQFASWTALCPDNDKSGGRILWTGVRQVKNRVGQLFRQAANSLHHSQTPMGGYLRRMKAKLGAEAGITAAAHKIARIFYAVVKNQVEYDQTTWHRQDLERQRRLEAKIRRQARGLGFQLVPIQPVA

SEQ ID NO: 375052 - protein, 377 aa, unidentified
MKRIKFVGLDVHAETIAVAVAEQDGEVRTLGVIPNREESIRKLVKKLGPVEQLCFCYEAGPTGYVVYWQLTALGGKCEVVAPTLVPVKSGERVKTDRRDALKLARNYRAGELTAVWVPDAAHEALRDLVRAREAAKKDQLRAKHRLSKFLLRHGRRPASGVKAWTLNYLAWVKQEVHFEQPAQEATLLDYLHEVEHAEARIARLDLAIEEAVKSTPPKMKAVIEGLQALRGIAQVAAVTIVAELGEISRFPRARQLMGYGGIVASEHSTGESTWRGGITKTGNAHLRRVVVEAAWAYRHRPNVGGTLRKRQELVSEEIREIAWKAQHRLHTRYRKLTARGKEKGKVVTAIGRELLGFIWAIGVKVEAAQKETERRAA

SEQ ID NO: 375053 - protein, 367 aa, unidentified
MKNTIVHYEGTASLEAVATKVKLRGAEIKIGLDVHARLYVAVAQYDHLLPKAARRLRPEQFVPWVETLLRQGHTVHVVYEACGFGFSLYRRLIAAGAHCYVIAPRKLDEECSRVKTDPRDATTLCQRLSRYLEGNTRELAVIRVPSQEEEQARHVSRQRTQLVCHRQKLEAQGRSLLISHALPAPAHWWKEQTFSRLGRHLPAWVTTRLQMARPALLSLQQQIDALTNELETSAPSTLPRGVGRLTSVVLTREICDWGRFNNRRAISSYTGLCPGERTSGSKRVPGSVTKRGNPRVRAALVECAWRLVRFQPQYPPVQKRLAVLAKGSRAIGAVRKKAIVAVARRLAVDLWRLHTGRCTAEQLGLEL

SEQ ID NO: 375054 - protein, 408 aa, unidentified
MQALIERCCGLDVHQETVVACLMVGAPGVRPSKEVRTFRTVTRDLEALRDWLAAEGVTHVGMESTGVYWRPVYAVLEGHFDLIVGNARHIRNVPGRKTDVKDAEWIADLVRHGLIAKSFVPPRPLRELRDLRKLVESQTAERNRLLKLLETANIKLASVMSDVFGVSGRAMLKALIEGQASAEAMADLAKGQLRRKRADLVLALEGRMEEHHQFLLATQLRRLEAIEHDVAALDVRIVERLELYRAPHALLMQIPGVDWLVAAVIIAEIGVDMSVFLSVYHLSAWAGVCPGNHESAGRQRSGRARKGNVHLRTILVGAAVSAGRTKGSYLRDKFHRLKARRGPLRAALAIAHKILVAAYHMLAKGVGYRELGEAYLDQIGQTRTVANLKRRIERLGYHVTLQPIAERL

SEQ ID NO: 375055 - protein, 356 aa, unidentified
MLYAGIDAHSKTSWITVMDEKGKILKREQINTCREDVQRSLGRYRQPVKAVVEASRSWGPLYDWLDEIADDVILAHPAKVRAIADARIKTDKIDSETLAHLLRADLIPQAYAPSKDIRAIKRVLRQRMFFVRIRTMLKNRIKALLAQHSVDIPEVSDLYGKKGLQWLKGLKLPEPDGKLLHEDLNLLLVLNERIAATESLISELSSGDDAVDWLLSLPGIGKFLSVLIRYEVDNIDRFRSAKKFTGYTGLVPSTYASGERTVHGRLTKRGNKWLRWAFIEAVTPAIRKSAMLRRYYEKIRSRRGCKDARAATARKLAELSWTVWTERRMFTESGRKKLRRTKGSSGTPAALTYFWA

SEQ ID NO: 375056 - protein, 329 aa, unidentified
MQNFIFIGTDVSKLTLDHGVHTSMVHQKLPNNSEGFKSWLKWALQFGSKEQLWVVMEHTGYYSYQFEVFLQGHQIRYTKVAAIEIKRSVGLVRGKSDKIDALLISRYGWMNQDRLKPQQLSAAVITELKDLVSLRDKLVRDRSGYKARMKEQAATRKYAKSHIQTKIQTQMIKELTANIKEVEAAIKKLIKEDEALLSNCNLLVSIKAVGFVTAIYMLAYTENFRKFLNSRKFSCYAGLAPFEHTSGTSLRGKKRVSHYANKKAKCLLNLAASVAIQHNPEMKAYYIKRVNEGKSKMGTLNIIRHKLIDRMFAVVKRGTPYTEIISIAA

SEQ ID NO: 375057 - protein, 355 aa, unidentified
MMNDKQVKVYGGIDTHADTHHLAVIDQAGRRLADAQIPTTATGYQAALRFLGSWPGLVSVGIECTGSYGAAVTRAVREAGITVFEVNRPNRFDRRLHGKSDPFDAYSAAEAVLGGRASAAPKGGDGLVESLRVLRTSRSSALQARTATINQIKGMLITAPEDLRTRYKGLSTPKLIAALAASRPTATPVTAAEATAYSLRLLARRWQALTGQIEDLAGHLQRLLDDHAPDLMRVFGCGQDTVAQLLITAGDNPDRLRSEAAFAALAGVCPIPASSGKTKRHRLNRAGDRQANSALYHIVMVRLRYNQETRDYVARRTAEGKTKMEIIRCLKRYLVRQLYPLIVETLHPRKEVAVA

SEQ ID NO: 375058 - protein, 406 aa, unidentified
MQVYTGIDWSENKHDVVFMNQAGAVFAQLTIAHTVEGFLQLDAARQQLQVTPAECPVCLETAHNLLIDFLWSRGYVHVYVIPPSVVKANRGRQGQSEARTDPSDAELIADILRTDRGRLQPWHPDSTLTQQIRAQVSLVRHLTRDVVRTSNRLRAALVRYYPAALHVFSSVRTQVALAFIRAYPTPQAAAALSFAEFEAFARAHRYPRPSQLRHNYARLQEPYPEPMPGTVAVFQTEAVQLAGLLLEELQANKEAKRRLKTLFDQHPDAPIFASLPGAGDLLAPALLAKFGDDRQRFPTAASVQALAGTCPVTVSSGKRRSVRFRFSCDRTFRDIAQKWAMCSLSQSLWAAAYWQQTRPRCHSNSHAYRCLANRWLSIAWAIWQKRECYDESYHLQQRALRSKKRP

SEQ ID NO: 375059 - protein, 364 aa, unidentified
MNKCHLNTELSSHEGTRCQFNGGRCAIKLGIDVHQDFYVVVEQVGGSNPKPPQRFGKQAFLSWAAKLKQSGAEVQAVYEACGFGFALQRQLSALSIVCHVVCPQKLDERNKRVKTDGLDAKALCLKLDRFIQGNRDAMALVRVPTEQEEQLRAIHRQREQLVGARKRLEPQGRSLMVNHGFEPVKSWWKRGNFGALQVPEWMKELLLNSQPILLGLQQKIAALTLQLQVAAASKQPRGLGAMTSVIIDREIGDWNRFNNRRQVGSYTGLCPGEYSSGNTRVQSCVTKHGNPRLRAALVELAWRLVRFQPSYKPVLKWRAILAKGALATGAARKKAIVAVARQLAVDLWRVRTGRCKPEALGLEI

SEQ ID NO: 375060 - protein, 338 aa, unidentified
MTMKISMLAIDLAKGSFQVCAVGADGAVLYNRVLSRTRLATLLGEQPACVVAMEACATSHHWGRVAQQHGHEVRLVPAAYVKPFVKRQKNDRADAEAIAEAASRPTMRFVAVKSVETQGRAVAFRTHQCLVRQRTQLINALRGHLAEFGLVAPKGPASLKVLENALADDTSELPGPVREMGSIYLEQIARLTEVIERLADELEAASRTDAALRRLRTIPGVGPVTAGAVAAFAPDLDTFDSGRNFAAWLGLVPRQRSTGGKVKLGSVSKMGQTDIRRLLIVGAMSVIRWVVRKGGSPNRWLTALVARKPKMVAAVALANKMARMIWAVTTKQEDYRMA

SEQ ID NO: 375061 - protein, 417 aa, unidentified
MNAVGIDVSKGKSMVAILQPLGVVVAKPFEVRHTANELANLANYLKSLDGETKVVMEHTGRYYEPVAQIIHEQGLHVTAVNPLLIREYGNNSLRRVKTDMADAKKIARYALDYWTELREYTPMDTIRYHLKTMNRQFHLASKNRTAFSNNLISLLDQSFPGVRGWFDTPVRKDGSQKWVDFAMTFWYADCVRAVGLDAFTESYREWCSDHRYNFSAAKAEQIHSDSKEVITLVPKSATTQLLIQTAATQLLSISRTVEILRAEMNRLAASLPEYPVVMGMYGVGESLGPQLMAEIGDIRRFARKQSLVSFAGVDPLPNQSGMKNTKSNRSSKRGSPYLRKTLFNVISMLLRLSPQDVPVYQFLDRKRSEGKPYYVYMTAGANKFLRIYFAKVRDHFAALEKAGQEVIVNHLDEAHPQ

SEQ ID NO: 375062 - protein, 421 aa, unidentified
MAQLAQEEFAAFIGLDWADAKHDVCLQATGTARREFLSFEHRPEAIDAWVQTLRTRFHGHPVAVCLELNKGPIVSALRKYDFLVLFPVNPLTVARYREAFTPSRAKDDPTDAELQVELLLKHRDKLKPLQPQSPAMRVLAPLVEHRRRLVGDKVRCTNRLTSTLKNYFPQVLQWFPEKDTAIFCDFLSRWPTLKAAQLARRSTLEGFFRVHHVRSVDVIDTRVQALKSAMALTTDDGVITPNVLLVHALVAQLRVTLQAIADFDNAIAQRAQAHPDFPLFDALPGAGAVFAPRLLVAFGEQRERFTSADELQKYAGIAPVTERSGKKSWVHWRLQCPTFLRQTFVEWAAESTRHAFWAQVYSQQQRDKGKAHQAAVRALAFKWIRILFRCWQDHTPYDESVYLQALKRRSAPLLHNLAKGA

SEQ ID NO: 375063 - protein, 316 aa, unidentified
MKTYAGIDLHSSNNYIGVIDAKDKRLYSKRHDNRIEDILKVLGKFKATLQGIVVESTYNWYWLVDGLMDQGYTVHLANPNAIKTYDGLKHTDDKWDSFWLAHMLRLGILAEGYIYPKHLRSVRDLLRRRLMFVRQRTSQILSLQSMITRNRGLNFSGAQIKRFRDEFIEKLFSDRHLVFTAKRNIETIRFLDRIVSEIEIEVKSQIKLKKQFLKLLTTPGIGNILGLTIMLEVGDIHRFAKVGNYSSYCRCVESKRISNGKKKAKTIRKTETDILPGHMLKRQIMPCETALRHKNFFSAKWPKASGYLLQKPWPTN

SEQ ID NO: 375064 - protein, 391 aa, unidentified
MVCVGIDIAKDKHDCCILDSDGTVRADCFTIPNNMDGFKQLLQTIRNCTKKSDKIKVGLEATGHYSYNILGFLLDNGLPTYVINPLHTNLYRKSLSLRKTKTDRVDARTIATMLLSDVDLKSYTDTAYHNEELKSLTRYRFEKVQERAKLKQSVSRLVTILFPELEKLVPTLHIASIYSLLSEYPGAKQVSEVHLTKLTNLLTTTSKGRYGKEKAIQIRDAARVSIGSVMPAKSLELKHTIKLIQELTSEINEIEDSIHKIIEELNPPILSIPGMGVNSAAVILAEIGDFSNFSSPDKILAYAGCSPSTYQSGKLTNCYAHMEKRGSRYLRYALYNATKYVCHWNPVFAEYLAKKCAEGKHYNVALSHAMKKLVRLIYALQKSGKTYLAAA

SEQ ID NO: 375065 - protein, 412 aa, unidentified
MSLDPHEEPAAIQTHIGAIFISLELSRSKWLITSLVPGGGQRMSKHWVEAGDLAGLLARFWAIRDKVLARTGKSYPFVVIQEAGLDGFWIHRSLVKEGIESHVVDAASIAVSRRRRRAKTDKIDGEALLRALLAFKRGEPRVCSMVRAPTPRDEDRRRICRERETLIAERIRHVNRIKGLLFSQGIGDYEPLRRDRRRALEAARTGDGRALGANMKAQIGRELDRLELLLDQIATIETERDAMLARQAEAETAPGAETVPEAEAAAGVQSVQSAPARVQKLMELNGLGAQTVAMLETEAFYRSFDNRRQLAAFGGLAGTPWKSGLIDHEQGVSMGNHRLRQTMIQLAWLWPIHQPNSALTRWYRERTKGATKLQKKKMVVALARKLLVALWRYVDAGVVIEGAVLKRAARAR

SEQ ID NO: 375066 - protein, 329 aa, unidentified
MEQYIGVDLHKQFFQACSITSTGARAWEMRFPRTDGGLALFCARCGPQTAVAVEACGPTWAFVDAIVPTGTAVCVVDPRKTRLKAGFAAKTDRLDARRLADALRRDSVVSVYVPPPAIRELREVCRGRHQVIRLRTRLAQMIRALLLRSGGPDVPVRRVFSPRGLAWLEEVQLPPDAAASLARLRHVLTVIQAEAVAAEAVVAARAAADPLARALDTMVGIGPVLALTLRAEIGDGLRFPRGAALASYAGLVPRVDASADRYWSGRITREGSPWLRWALVEVAMHAIRRQDAVGRWARQLAIRKGAYKARVALARRLCDDVVQVWRQAV

SEQ ID NO: 375067 - protein, 321 aa, unidentified
MGEELKFADVYVGVDVSKARLDVAVWPSQQVFSDTNDAEGIGRLATRISGLNPKIVVLESTGRLEVPMALELGERGVPYRIVNPRQIREFARSMGKLAKTDRIDALILARWAESAQPEAKPLPDPDRRELRALVTRRAQLIENLTREKNRLQGETVPHVRRSIKDSIAWHERQIARLDKELNQFMKNSANFSGQSDRLQSVPGVGPVLTRMIIACLPELGTLNRYQIAALVGVAPLNRDSGKSSGKRFCWGGRIEVRCALYMAALVGTRYNPIIQALYERLRAKGKPAKVALVACMRKLLTILNAMMRDQTCWRQTSPAAA

SEQ ID NO: 375068 - protein, 350 aa, unidentified
MSKKQIGVAGKNVYTGIDVHKRTYSICAIVEGTIVKKATVPASPEGLVAFLKKCFEGARIFSVYEAGFSGFGLHRALVESGVINIVVNAASIEVAANDKKKTDSRDSQKMAEQLSAGRLKAIYIPSEEEELRRQVTRTREQITNERTRTANQIKSKMFYFGLIKNDEDTVVSEKYLKAVEARELPAELRFCLGLLIKTWRHLSVQLEEIKTEMMGQSFEDAANEEVYRSVPGVGPVGARVLSNELGNLATRFSNQKALFQFTGLTPAEYSSGDHVRKGNIDRQGSPRVRKILVEASWFAIAQDGALKECFDRIAHTRGKKRAIVAIARKLIGRIRACFVQGGPYCVGICE

SEQ ID NO: 375069 - protein, 301 aa, unidentified
MEHYVGLDVSLKRTSICVVNHTGSVVREGVVDSDPEAIALFVRSNAPGAVRIGLETGPTTTWLWTELKRLGLPVICIDARHAKAVLKMQINKSDRNDAAGIARIMQTGWFKEVRVKDLDSHAVRALLASRALLVKIKRDLENQVRGLLKNLGLVISRATFNVFSARAGELIEDRPDLVAAIGPLLEERKAIEQQVRDLDRKVLKLARHDVQVRRFMTATGVGPITALCFKATIDDPTRFRRSRSVGAYVGLTTRRHASGEVDWSGRISKCGDAMLRTYLFEAANVLLTRVPKWSALKAWGA

SEQ ID NO: 375070 - protein, 421 aa, unidentified
MEETNEPAELVERVAALDIGKAALTACIRVPHEDKPGRRCQEVREYATTTRALLGLADYLRCQGVTLVVMEATSDYWKPPFYLLEAEGFECWLLNARHVKNVPGRPKTDKLDAVWLAKVAERGMCMPSLVHPQPIRQLRALTRYRRTLIRERAREKQRLEKILEDAQIKLSAVVSDLFGVSGRAMIEALIAGQRNPWALARLARGTLRNKTRILEDALTGHFGDHHGFLCQMMLARIDGLTAQIGQLDARVEQAIAPFARQVTQLDEIAGVGTTSAQELIAEIGVDMSRFPTAGHLVSWAKFAPIDNSSAGKKKGSSTGKGNPWIGGTLGEIVLGASRTHTFLAESYQRLARRRGKRRAIVATGNTVLTIAYHLLSDPTARYTDLGPGFYDSKAGRERHARNLIRQLEHLTGKKVALNEAA

SEQ ID NO: 375071 - protein, 464 aa, unidentified
MRRVAGALPPHPQDFSLGCLSRCWTCCERMDEKGDAEASPYRSVEATESALRLLPSIALSSAQSGLILLGRDIQRRIFAMGSEGMTLKPWGKMVQAKNQFPPKEVLSMLSSNVKYIGLDVHKEAVAIAVLNGAGKLVMESIVETKASTLLDFLQGLRGELHVTLEEGTWAAWLYDLLKPHVAEILVCNPRRNALLKEGSKSDKVDARKLAELLRSGMLRAVYHGEHGLGTLRELARSYLTISKDQRRVMSRLKALYRSWGIPCSGKQVYTPRNREQWLSKITQPGVRRRAELLYQQMDGLSVVRHTVRGELLTDSRRHPAVKILRQIPLIGPLRATLLLALMQTPHRFRSKRQLWTYSGLAVETHDSAQHRYVDGQLQRSKKPQQIRGLNQNYNHEMKEIFKSTALSASRCAGPLQDFYEGLLAKGMKPDMARLTLARKIAAITLTLWKKGECFDAEHLKLQAA

SEQ ID NO: 375072 - protein, 430 aa, unidentified
MSTNFYLSVGIDVGADFSFMSIALPNQTYVGNPFKITHANPASLEKAVLTIKEAEESNSLKARIFLESTGIYHYPLYCYLRDKGFNVSIINPIITKSSTNINIRKVHNDKFDSKKLALIALKPDLKVSVIPSDLVLDLRKLTREYYNLMDCRSAYVNKLQGELRVAFPQYLGIFSKLTVDTSLALLEKYAVPAAFLAAKKKTVIKIISSTARFGAAYAEKKYQAIVAAAQAASRFGHTLPSNAKLIKLFVSFIKKYDEEVDLILDAMHELVDTQPDEPFVKQIHLIETFKGAGFLSAVTVMCEIGDFSVFKSPKQLFAYFGLDPAVKQSGKFIGTNVKMSKRGSPLARRVIHTMALVSIGLTRNGVANNSVLREYYLSKCQTKPKMVALGAVMHKVCNIIFAILRDDKPFSVITPAQHKLNYSHRRCLVA

SEQ ID NO: 375073 - protein, 425 aa, unidentified
MNLNANTSEIPFAALIGLDWGDREHALALYDCASGQTQTSTLEHSPETVQAWLQSLEKRFGSRPVALALETSKGPLIHMFLEVPWLTVFPVHPATSTRIRKAFAPSGAKDDIPDAQVLLQLLLAHRDKLRPLPTDDAQTRRLAGLCELRRKSVDQRTQISNQLCSVLKGYFPQALELLGGKLYSPMALEFLSRWPDLLSLKSARAATLQSFYHRHNVRRPERVKQRLERIVQAKALTTDEVMVGLGQQQVGRLIQLLKVLQKHITQDEQLIQQAFREHPEAPLFRDLPGAGSVLAPRLLVAFGTDRTRYSRAADLQKYSGLAPVKEKSGGRTWIHWRWNAPWFLRQTFIEWAGQTVVYCPWAKTYYDRQKAKGKNHWSILRSLAFIWIRILWKCWQTRTPYNETLYLEALRKRQSPLLKFNAQPA

SEQ ID NO: 375074 - protein, 374 aa, unidentified
MNKHTTFIGLDVHKDSIDIAIADPGRSGDVRFYGTVGGDLDALHKAIRKLQSVAGGSNLSFVYEAGPCGYEMYRSLTNKGFDCAVVAPSMIPRKSGDRIKNDRRDALNLARLHRAGELTSVYVPSVEDEAMRDLTRSREDAVKSLRVSRQLLLSFLLRHGLVYCGKTKWSIAHLNWLSGLKMPHRAQQIVLHEYLHAVEENRERVERITQQIKELLPEWELGAVVKVFQALRGVSDIVGATVVAELGDLTRFKTAKELMAYIGLVPKEHSSGNTIRRSGITKTGNGHVRRALVEAAHAYLHPARESRVIKNRLEGLSQDIRDLSWKAQVRLCGRFRKLLARGKNKNTVVTAIARELSAFMWSIAQQVGSGSPAR

SEQ ID NO: 375075 - protein, 392 aa, unidentified
MYYVGIDIAKRAHEVCFLSGDGEILDGNSFKIPNTISGVDKLQKMLDKYGLTPQNSLVAMEATGHYWLVLYSWLFERGFEIKVINPIVTDAYRNMRIRKAKNDRIDAEIVAKVLMFGEYQETSVSSDETLSLRQLCRYRLWQVQTVSDLKRKIIALLDQVFPEYENLFTDIFGMSSKELLKHYTTPEEIASINTLKLTNLLVSHSKGRFGKDKALEIKAIAKGSLGIRIATDAFAFQIRQMLEQLEFVDKQIEGIDVEIKAYMDKLNSPVTTIPGVGPAYGAVILSELGDIHRFPSAKQIVSYSGLDASVSESGDFAGDQCHISKRGSSYLRRAIWGAAFVASWSDPELTAYYHRLRNRGKPHQVAVGAVARKLCHIIFAVLSENRPYEARA

SEQ ID NO: 375076 - protein, 309 aa, unidentified
MEQAIVYIGIDVAKAHLDVSWAATLRRFRNEPTGHATLVRWLKTSATPVQLICEASGGYEQALLESLASNQLAVTLVQAVRVRQYARAAGILAKTDQIDARVLAAFGTALRPKPTPPRSAEQKRLRELESQRRHLSRILSAEENRLAQLSCKQLRALERNLINKIKKQIDAIEKRIASLITQDQTLCTKAQKLTAISGVGVRTAALLLAQMPELGQLNRRQAAALAGLAPFNHDSGSLRGKRAIFGGRPALRSGLYMAALSAAHHNPILSRFYQRLRAKGKPHNLALTAVMRKLLLALNHTLKPLPCTT

SEQ ID NO: 375077 - protein, 364 aa, unidentified
MKRKVYVGMDVHKETIQIAILPSNTKALVKEQQIKHEEGQIKKFIQKLKSEGTEIHCCYEAGVTGYPLYRYLKTLGVNCIIAAPGKIPRQSSDKIKTDKRDAIKLARLLRSGELESIHVPSEEDEAVRDYLRSRDSLRLDLGRNRQRLMKFLLRKGIKYSTTKYWTVSHYKWLNNLHFENEILQATFNDYYSRVRVQEENLKAMDQKIREIAESEPYREKVGILRCFRGVDYLTAMFLLSEVNDFKRFKTAGSFMSFLGLVPGEYSSGSKRKQTSITKTGSPRLRRILVEAAWQHRFPGTGSKVVAARRVGQSALVVSLAEKASLRLHKKFKSMQLRGKTPQVMITAVSRELSGFLWAAMNLVA

SEQ ID NO: 375078 - protein, 338 aa, unidentified
MNHVAIDLGGRESQICVRAPDGTILEEKRYATRLLGKLMRGWTTSRVIVETSAEAFRVADAAKEAGHDVRVVPATLVKTLGVGARGIKTDQRDARTLSEVSCRIDLPSVHVPSEESRELKAMCGNRENLVECRTKLVNNVRGWLRTQLWRTRSGSTSTMPTRIRESAKTNSRELPIHIEETLELIAETTTRIRAADKRLREFAKKHSVCVRLMTVPGVGPVTAVRFLAALDDATRFRNAHAVRSYLGLTPGEHSSSDSQHRTSITKAGPAPLRRVLVQAAWTVLRTHPSDPMVLWAKKIESRKHKFIAVVAPARKIAGILFALWRDGTSYEPRRGAAM

SEQ ID NO: 375079 - protein, 342 aa, unidentified
MAIVAVGVDLAKNVFAVHGIDETGKVALLKPKVKRADLMALLKSLPPCLIGMEACSGGHHWARELIKAGHDARLMAAKLVAPYRDGGKLKKNDAADAAAICEAVQRKTMRFVPIKSEDQQGRLSVHRARQGFVEHRTATINRIRGLLSEFGIVMPLKAETVRQMAREHLEDLPGYLNQVINDQLDELSHLDNRVAAYDVMIKEMARNNDRCKRLMQIGGIAEVTSSAIEATVGNAHDFKCGRQFSAWLGLVPRQRGSGGKVHLGRITKAGDPYLRTLLILGARAVLNAAQGKTDRLSKWALEVKARRGYGKALVAIAAKNARMAWAMLSKGLDYRQAEQLEA

SEQ ID NO: 375080 - protein, 329 aa, unidentified
MVGVGIDVSKGSLSVAIHGAGNPWEGTFENTTAGRKALVKVVKKRTKREKQVRAVVEPTATYHVAVAKQLVSAGLRVMVANPRRTKHFFKSRNQRAKTDRADSHALAAYALAMPFEEWQPPAASVEALRSVVRRRKQLVEMCTAEKARLKELRATGGEDAVIASVLAHIKWLNAQIKALAAQAVAIVKADASLWDWKQLLESIPGVGEITSLTVISELAYLNDDLDNKQLTAFVGLDPRPFQSGMMDAKRRISKAGNRHLRTALFLAAWTATKNSPHVRAWKEGYLARGKAKKLVNVACARRLLLTMNAMRRTNASWDGERFHALQESA

SEQ ID NO: 375081 - protein, 377 aa, unidentified
MSKSLIFVGMDVHQDSVTLAVFEGASKEPEIVQRLPNDLRTLRRFFDRWAKRGLIRTCYEASGAGYVLQREITEWGYACEIIAPSLTPIRPGEQRKHDRRDAIMLARLYRAGELVPIRIPSPTDERVRDLVRCRQTFQRELLRSRHYIMKFLSRRGFVFRHGGRWGPKHRAWLERLLHQERLAPEDRAVYSEYLALMDYKLGRRDELDRQIEEVAFSDAYRTQVQRLSCFRGISTLSAMTLVTEIGDWRRFERPGQLMAYLGLVPREHSSGERTRRGSITKAGNSRCRHILVQAAWHYRLRPAVGKELKKRHVGQPPGVIAHAWKSQHRLHKLYHRIGNRKSSQVAVVAVARELVGFMWAVMRELEIEQGAAIEAAA

SEQ ID NO: 375082 - protein, 400 aa, unidentified
MSTRQAQVWAGVDAGKGHHWAAVVDETGATVWSKKIDNDETAILTALGEILDLADEVHWAVDISGTSSALLLALLAAHGQQAAYVPGRTVNRMSGAYRGEAKTDARDAYVIAETARHRRDLAAIDVPAQLAADLALLTAHRADLVADRVRMINRLRDVLTGVFPALERAFDYSSHKGALVLLTGYQTPAVIRRRGRARLTAWLANRSVRGADIVAATALEAAQAQHTALPGEDVAAQIVADLAAQILALDDRLKRIDKQIRETFRDHPQAEIIEPLPGMGPILGAEFVVAAGDFAAYDDAGHLASAAGLVPVPRDSGRRTGNLHRPKRYSRRLRRVFYLSAQTSIIREGPNRDFYLKKRGEGCKHVQAVIALARRRASVLWALLRDNRVFTSAPPVAQAA

SEQ ID NO: 375083 - protein, 391 aa, unidentified
MPMYFVGIDISKYKHDCCIISAADQQIVSKFTVKNDKDGFEHLLTTLNSLSNPEDIKIGFESTAHYALNLELFLENAHHSFMEVNPVLIKEYKKSTTLRRTKTDSVDCESIARWLITVEYKPHSKGFYHAYSLKSLTRLRDRLIRQRSFYLVKITNVLDHTFPEFKPFFNERLSKTALYLLENYGSAEKMARMNSASYDKLRCISRGKFSIQQFLRLKELAANTVGVNNSIFDLELNTLLTLYKSLSDEINTLETEIIKLIEEVHPHYMSIPGIGPISSAVIYAEYGDISNFSNPGQMLAFAGIEPGINDSGTESHGGRMVKHGSSQLRYVLLNACLPLIRFDLTFATYYEKKRAEGKKHRVAITHVAKKLIRVIYALERQDVDFNVQKLR

SEQ ID NO: 375084 - protein, 385 aa, unidentified
MAPTRMPEAVIGLDVGKSSHWACVATRDGEVLLSAPVANREGDLDSLFVRFPDALVVVDQSRNIGALALARARAAGMSAAYLPGLAAHGAARLFAGDAKTDERDAMVIAKTALGIPDALLPVGDPGPTIAAARALAAQRNFLTCENTRNKNRLRSILLESCPDFEALVDLSDGPQLRLMASLGGAWSVADAGPRRAAALTRGAARGKIEALVRSTASSTRPDAAAVAAEDRAVKLLARRISENSAEIEAITAEISALLEGDDTYRCLLTVPGIGPKTASELAISIDIEDFPSHDRLASYCGLAPRNRQSGTSISSVTASRQGNKRLKNLLIFSCNCLTRTEGRWGDYYTRCRERGMSHGKALKALARKRLKVIYAVMRDRVPYAA

SEQ ID NO: 375085 - protein, 343 aa, unidentified
MQRVTTIGFDIAKSVFQVHGVDAAGQVVVRRQLKRRQVMAFFEKLPPCLVGIEACASSHYWSRQLQALGHGVRLMPPAYVRPYVKRQKNDRADAEAICEAVTRANMRFVPTKTPEQQSGLMLHRARHLFIRQQTSVINAIRAHLAEFGITAPVGRRGVEDLLRVVADPSDKRVPEVVRACLGALGNQLLNLKKQILNFDRMIMAWHRSNQTSKRLNCIPGVGPLLATALVASVADPKTFRSGRNFSAWIGLVPKQHSSGGREKLSSISKQGDRYLRSLFVAGAFAVIRYAKIHGTKHRPWLTALLTRRPTKVAAIALANKLARMAWAMMATGARYNYPASLKV

SEQ ID NO: 375086 - protein, 354 aa, unidentified
MSKERTDAALVFLKPERLRAPQSSAHAQAGDVKTMSEISVVVGIDVAKAHVDCAVLGAEFATRQFTNDVDGHSALATALQPLGLSLAVMEATGGYETALACALQAAGFALVVVNPKQARDFAKSMGRLAKTDRIDAEVLAELAATLVRRRDLARFIRPLPDAQQRELAALVTRRRQLLTMLGAERLRLQLATPKVRPSIDALIAAIRAQLEDMDAQMQAHVHEHFAPLDALLRSARGIGPIASATLIAELPELGRLSRREISALVGVAPMANDSGTSHGRRRVTGGRFQVRRVLYMATMTAATRNPTIRAHYRRLIAAGKLPKVALVACMRKLLTILNAMVRTQTRWRDALHHP

SEQ ID NO: 375087 - protein, 356 aa, unidentified
MSEITRVGVDLAKSVIQVHAVDVAGKLVTNRQLSRDKFLPWCAQLPPGSLVAMEACGGSHHWARKLIALGLNVKVIAAHLVAPYRLQGKGGKNDANDAAAVCEAASRPNMRFVPVKTTVQQGILCVHRLREGLKEERIAGINRIRGMLTEFGLVVSKSPEKLREKLTDMLEDASNDLCGLARLVIQEAYDHWKDIEKRIQWCDERINAHVKDDAQAKAAKELMGVGPVTASAVVATVGDFHQFKNGAQFGAWLGVTPRQNSSGGKNSLGGITKRGDMYLRMLLIQGAKSAVMTAHKRDDPISKWLFQLREKSGWQKAAVAMANKNARVLWAMMTKGSRFDTRHVSVKPTASTTAMA

SEQ ID NO: 375088 - protein, 390 aa, unidentified
MPKYDDLSRSLVAFDQNSTLVAAIEMGSKGWLVGALVPGLERDPRKKLPPDKQALLKLLDRWCAEAARKGHPIKRICVAYEAGRDGVWLARWLREQGIEAYVIHPTSIPVSREHRRAKSDRLDLMLLLRALLGWLRGEPGHCSMVAIPTVEEEDGKRPLRERETLTADVTRLINRMTSLLVRHGIANFNVKLKKAGEKLAEVKTAWGEPLPPEAVAELQRSFERLRLAKQQIAEIDKARRQRLEKAPEAGMHPMILILARVFGVGLMTAESLVREVLYRNLRDRRAVARYAGLTGSPDESGKKRREQGLAKAGNGRIRRALIQLAWRLLRHQPESALVKWYQARTADGRRDTRKVMIVALARKLLVAFWELVTNGTVPEGMRLHPAKVTG

SEQ ID NO: 375089 - protein, 376 aa, unidentified
MGDYSEAFVGLDTSKLRNAVAIADGGRGGEVRFFGEIENTPAATAKLVRKLAGKYKRLTFCYEAGPTGYGLHRQIKDLGFECVVVAPSLIPKRPGDKVKTNRRDALSLAKLLRADELTAVWVPDGHHEAMRDLTRARETAMLDLRTKRQHVSAFLLRLGRPYPESKKTWTKAHVSWIASQKLEHAQQRLVLEEMMLAIRQAQERLARLEQAVAAAVPEWSLAPVVTALMAMRGIDMVSATTLLAEIGDLSRFRTPTELMAYLGLVPSENSTGDTVKRGPITKAGNRRARRMLVECSWSYQHPPRVGQAKQPKVDAAPPAVREIAWKAQCRLYRRYRALIRNGKLKTVAIVAIARELAGFIWAVARAVTTAGVAATA

SEQ ID NO: 375090 - protein, 317 aa, unidentified
MDKEFIGIDVSKDTLDIATYASGKKWQFSNDEAGISRFMETIGEITPALVVMESTGGYEAPVAYALYHSGIPVAVINPREVRDFAKATKKLAKTDRIDAQVLAHFAAVIQPEPRPLSDEQAQELEAVIARRRQVIEMLTAERNRLHTARKPVRAAIKAHIEYLEKELGQIDTELKEKIEESPIQREKYNMLQSVPGVGPNLSATLLIELPELGMLNRRQIAALVGVAPLNHDSGSKRGKRSPWGGRSQVRAALYMAALVAARFNPIISQFYNRLCAEGKAKKVALVACMRKLIIILNTMLKNHTTWLENQPVLAPVL

SEQ ID NO: 375091 - protein, 309 aa, unidentified
MDVIVGIDVSKDRLDVHVLPVEECFFVGNDHAGVDALIARLREAKADIVALEATGGYEMLAVAGLSSAGLAVVVVNPAQVRSYANALGKRAKTDPIDAAVIAAFVAATRPQIRPLRDEESETFSAIVSRRRQIVQMITAEENRSRMAQAKETQKSIKRLLAALRRELESLDGDLDGRIRKSPVWRVREVLLTSVPGVGPTTARTLIAEMPELGTLDRRQIASLAGIAPFTRQSGKWRGRSFIGGGRGKVRAVLFMAALVAARHNPTLKTFRDRLVAAGKPKIVAIVATMRKLLTILNAIIRDEKPWQGA

SEQ ID NO: 375092 - protein, 443 aa, unidentified
MAELVNGKAPEPDFAAFVGIDWADQKHYWKLVVAGTQASETGELKQTPEELSIWAAALQHRFSGQPVAVALEQSSGALVYQLSQYPHLWLYPVHPATAAHYRQAFYPSGSKSDPADAGLLLELVVHHRDRLRRLAPDTPETRLLRMLVEQRRQVVDEKTRWNNRLKAALKMYFPQVLDWVDVDTIMGCDLLERWPTLQQLQRAHPGTLRKFFREHNCRSESLITERIAAIYQATPAVKDAALLEGESAMAATCVAQIRTLLASIAKLDHQIEPLASQHPEASLFAELPGAGAALQPRLIVAFGTQRDRYANAAELQAYSAIAPITESSGHSRWVHVRWACPTFLRQTFHEFAACSISRSEWARVFYDTKIAAGKSHHAAVRALAYKWIRVLFRCWKDGRPYDERTYLQTLADRNSPLNWGAGASTKPVWKTVGGFKKLSTENS

SEQ ID NO: 375093 - protein, 363 aa, unidentified
MLKYSVGLDIAAKTINACISSIDAGQKVTVRSSCKIDNTKTGFKQLDEWINRHHKEKGIPLVILMEATGVYYENCALYLFSNGYSVSVMLPNKAKKWMQSEGIKSKNDKIDAAGLSKMGAEKAIDLWEPAAEYYYQLRALTRQHQSLQEHKTAISNQLHAEEHGMYQNKQVLKQLNQLIALINKQIADLAIIIEQHLASDEMVMKKAGNISKIKGIGVLTIAVILAETNGFTLFRNASQVVSYAGYDVVENESGTHKGKTRISKKGNSRIRRALHMPALCAVTHKQKPFVDLFERTFEKHRIKMKSYVAVQKKLLVLIYGLWKNNEAFDVNYKNKLTKEQEQVLPLGSAVAVTDYEDKKNSPA

SEQ ID NO: 375094 - protein, 399 aa, unidentified
MNPVVGIDVSKGESEGFIFLERNKSLGKSFRFLHTFDGIQSLISRLQEVESLTERRPAIVLESTGHYHLGLVAALQKQAYKIIILNPLIPQRARKSKLRKVKTDAEDAKHLAELYYKEELKPTPLKQNEQAELRFLSRQHEMITHAYVQAQLNFQSILDQLFPLYSNLFGQLFSKTALQVLRKYSTPEQVLLSDLEEITRTISSSCNRSSSWATKKAEDIVTAAKNSLMTNSSNHSQIISLRLMIDLLMEYQTHLSHLEREIQVIATTMEDYHLLCSIPGIGHKLAATIIAEIGDVTTFEHAKKLVAFAGIDPSVFSSGKFTATRNRITKRGSTRLRRALYLAVLCGIRGAARNTRIRAFYDKKRLEGKPHRVALIACTNKLLHIIFAMLTRSVPYCSA

SEQ ID NO: 375095 - protein, 312 aa, unidentified
MAPTIFVGIDVSKDTLDIAVRPSALRWQLANDDAGIRDLVSRLAELSATLVVLEATGGYEHPAAAALAGAGAGVVIANPRQIRDFARATGQLAKTDAIDAGILALFAERVRPEPRALPDEARQMLEALVTRRRQVTEMLVAEKNRLGHARRPVRRGITAHIRWLERQLSDVDRDLDEAIRQSPLWRSQDDLLQSVPGVGPITSRTLLAQLPELGLLDRKEIAALVGVAPLARDSGTLRGRRTIWGGRATVRAVLYMATVAAARCNPLIRIFYQRLRAAGKPAKVALIACTRKLLTILNAMARTHTPWRPAHA

SEQ ID NO: 375096 - protein, 343 aa, unidentified
MTHHVGLDVSVRETSICIVDEAGTIVKEARVPTEPSIIIEMLTAPGIACRRIGLEAGPLSQWLFNELAKAGLPAICVETRHMKEALAAQVNKTDRNDARGIAQMMRVGLYRPVHVKTRISQEKRMLLTSRKLLQGQIRALENDLRGSLRTFGLKVGATSAGAFDERVRELVVEHPALAAIVGPLLAARGTLRTQFVVLHHMLLKLVRSDPICARFMTVPGVGPIVALTFQATVDQPQRFAKSKTVGAHFGLAPRQHSSGETDYSGRVSKCGDAIMRSVLYEAAHTLLTHTRRWSSLKAWGVRIAMRRGLRKATVAVARKIAVILHRMWIDSTEFRWGTQPVSA

SEQ ID NO: 375097 - protein, 281 aa, unidentified
MVYIGIDISKLTFDAAYILNSRYVYKQFSNNLKGFGEFSLWMNKSKKEVYTCLEATGIYSFDLAHYLSQQKINVMVVNPIITHAFFKMELNRNKTDKADAQLIARYCEHAVLTGDYKKKSYQPKGADYEAIQRLVTRCDQLEKSKTQENNRLEASTNKQASRSIKRLQKTIDNEIVRVKKTIADIVKNNQTLSQQVDLLVSIKGIGERTAWSILAYIGDINFFSNSKQIASYAGLTPKIIQSGTSIDKSSLSKLGHKRLRKSLYMPALVAIRHNPSIKGCL

SEQ ID NO: 375098 - protein, 354 aa, unidentified
MRTDYQGKGFLAKNQEAFIGIDAHKESWQVTIRAEGEEVFHSRLPSQYPALGKLIERLPGCKVKVAYEAGPCGFSLYDKLTADGIETIVVPPTLIPIESGNKVKTDRRDSRKLAHLLERDMLKKVYVLSEEDRADRELVRTRRQINEHRSDTMRQIKSKLLFYGIKPPFTAEKSWSKAYVKWLKEYKFDSDLLRLSLDYLIGLYEYLTSQIVKLTKEVVLLAKSKKYSKRVKLLKSVPGIGTLTAIEILVELQDMKRFKSSDKLAAYIGLTPSEFSSGQYVRQGRITRSGNKRVRACLVESGWILIAKDPFMRKRYQELKNRKGGKKAIIAIARMLIIRVRRILLDNEPYLKAA

SEQ ID NO: 375099 - protein, 357 aa, unidentified
MDQVSTIGLDTAKRIFQVHGVDEAGAVVLRRQLRRSEVLKFFAKLPRCVVGMEACGGAHYWGREIAALGHEVRLMPPTRVKPPAFAGAGSTSNGRKSDKVDAAACCEAVTRPSMRFVPLKTVEQQAALMMHRARQLLVEQRTRLGNAIRGHMSEIGIIAAKGGAGLGALVAFIGNPEDQHLPAVVRTILVPLVEQWRSAGAQIAELDRQILAWHRNNADSQRLETIPQYGPILSSAMAATIGDAARFDNGRACAAWIGLVPTQNSSGGRERSGGISKTGDRYLRQLLVIAATGMVRRARAHPEDHPWFAGLLERMPPKKAAVALANKLARIGWAVLRHQTPCRARRPTAVAPALEAA

SEQ ID NO: 375100 - protein, 418 aa, unidentified
MDNRPPFLYQATVGIDWADQKHDVFVRFTNGDSYRRKIDSRPEAIQEWLLELRSVCAEGKIAIALEQRRGALFYQLCTHLNWIDLYPVNPHSLSSFRLTFFSSRAKDDPIDSQLLEELVRTHSDRLRPYRPESVTERKLDQYCRHRRSLLDLATKTELKLISTLKQYFPLAVNLFAAVGMKSDIALSFLSRWPTLSELQRAKAHTVRSFFYAHNSRSQSRIEKRLQQIGQAHNVTDDLALIEPLVLTTKCLVGQLRQFNHAIKEFDHEIKELFKSHPDHFLFENFPGAGEQLAPRLLSLFGSDRARWADATDIQKYSGIAPVIERSGKSVWVHRRLSRPKFICQTFHEFAQQSVQHSSWAKQFYQHQRDSGKSHHSAIRALAFKWIRIICACWKANKPYDESFYLQTLAGKNSPLPST

SEQ ID NO: 375101 - protein, 452 aa, unidentified
MKHKRAGRGGAVPSLECIEPNAAGIDVGAREIYVAVPANRDPKPVRCFSTFTQDLQALAAWLLACRIRTVAMESTGVYWIPLFQILEAAGIEVCLVNSRHVKHVPGRKGDVLDCQWLQYLHSVGLLRASFRPEDVICQIRCLLRHRDGLVEMAAQHVQHMQKALSQMNLQLHHVLSDLTGQSGLAMLDAILAGERDPRVLAELRDGRVKASAETIVQALVGDYRREHLFTLHQSLQAYRYYHQLLAACDQEIEAYLRELDSKIDVEQNPLAPEPKPHRPRKNEFRFDLRSELYRILGVDLTAVPGLNALSVHTLLGEIGRDVSRFPSAAAFASWLGLCPQADKSGGKVLSAKTRRTKNRLNRSLRLAAQALHRSHSYLGDYYRRMRSRLGAPKAITATAHKLARIVFHLLRTGEAYNESIFAAEEQRCRVRTEHRLRRHARQLGYDLVPLPA

SEQ ID NO: 375102 - protein, 414 aa, unidentified
MVEETIAWFAGVDWGSAKHQACLLGAQGAIVGEREFPHSGKGLSELADWILSMTGIASAVAVAVEVPHGPVVDVLLDRGFIVHAINPKQLDRLRDRFSIAGAKDDRRDAYVSADGLRTDRHLFRRLQIADPRLIELRAWSRLAEELQEERVRLSNRLYQQLWRYYPQMLKLTDDLTATWLLELWLRAPTPAKAARLRVSAVERLLKQYRIRRVNAEGVLRTLRQPAIKVSDGVAEAAGIHIHSLIVRLQVVNRELNGAERKLDELCTAIGETGAAPEERAEHRDVAILRSLPGIGRINLATLLSEASGPLSRRDYQALRTLSGVAPVTKRSGKSHVVVMRYASHVRLRNTVYHWARVAIQHDHESRTRYAALRRRGHSHGRAIRGVADRLLAVACVLLQRQTLFDRYFRQATTS

SEQ ID NO: 375103 - protein, 354 aa, unidentified
MSKILAIDLGKFNSVTCLLETDTNATEFWTMATERHYLETVLKRYAPDLVVIEACAIAGWIHDVCTSLGYRVLVCNPAQEPWKWKHLKRKTDRDDALKIAKLAALDQLVPVYVPGREQREFRSLVKYRKAVLGRRTRVQNRIRAIFAQRGMAMTGGLKAWTLGRREELTCHGKPLADCTTDELWRGELDLELAELARLSEQLAQIDKKLDALGTDDQRVRLLRTIPGVGRRTAEVVVAYLDDPRRFKNARQVSSYAGLVPRRYQSGQMDRQGRIHKRGPRLLRSALVEASWVMLRLNPWARALYDRLCGGQKTRKKKAIVAVARKLLVRCWVMLLRKEPWRAVTPLAEPAGACV

SEQ ID NO: 375104 - protein, 344 aa, unidentified
MENYAGIDVSLELSSVCVLDAQGKILKEAKVASEPDALVEFFERLGFAVRRIGLEAGPLSQWLHAGLKGAGFETVLLETRHVKAALSAMTVKTDRKDARGIAQLIRMGWFRPVYAKSVDAQEIRALLVARKQLLGRLIDVELSIRGILRGFGLKVGPVTRKNFEARIRELVAGQATLERITTAMLSARSALKAEYGRLHKAVLAIVRDDAVCRRLMTVPGVGPLVAVTYKSAIDDPHRIVKSKAAGALFGLTPKKYQSGEKDVTGGITLAGDEIVRTVLYEAANVLLSRITRFSKLKRWGMDVAKRRGSKRAKVALARKLAVILHRIWVDGTTYRWTEAEPIAA

SEQ ID NO: 375105 - protein, 348 aa, unidentified
MAVYIGVDFHARQQTLSYLTTEEGEIRREQLEHGQPDEVRKFYRQFAGQEVIVGFEASGYAAWFEELLEELGYQIWIGHATAIRSFARRRQKNDRRDADLILDLLVRGDFPRIHRYSAASRAVLQQLRYRQRLVKMRTMMVNHLVFMASSRGVSLRTQLKSRRGLERLQQISLPEPQRQQRDELCRLLLELQPKIETVERWLEEKAAADERVQRLRTHYGIGPLTGLCLAHTLESVERFANPRKVTAYVGFDPVEDSSGERQRIGSISKQGSRLLRFFLVEAGQVAIRKDPDLARVYKRVWLRRGHAKAKVAVGRRLLVRAFIMLRDEIDYAEFLRRGVAARSSRATA

SEQ ID NO: 375106 - protein, 451 aa, unidentified
MSKRKQVEGLAIVNPNAAGLDIGSAEIWASVPADREGETVRCFGTYTTDLLDLATWLETMEIQTVAMESTGVYWIPVFEVLEERGLQMLVVNARHIKNVPGRKSDIKDCQWIQRLHSYGLLSGSFRPQAEIASLRAYLRHRDGLIEHRAAHIQHMQKALLQMNLQLTQVLSDITGETGLAILRAIVAGERNPYTLAKMRHGNCAHSIADLVKALTGHYRPEHIFALKQALALFDAYTEQLRECDEEIERQFENYKPDLPNDLPPLPPNPKPGSHSKNGPDYDARALIYRKVGVDLFAIPGMNAVLVQTILSEVGMDMSRWPTAKQFCSWLGLAPHNGISGGKVLYSHVPKTHNRAGQAFRLAAQAVSRGKSVYSEFYRRVRARSGPAQAIVATAHKIARIFYYMLLRRQPFQSMDIQEYYRRQREKDIQRLSRNAARLGFQIQPVTAGNML

SEQ ID NO: 375107 - protein, 355 aa, unidentified
MEYIAFDAHKHYTVASVERPTGEIVREQRLAHQRGAIREFLARCTPGSPVAVETVGNWYWLVDEIEEAGMVPRLVHARKAKLMSGMINKTDKLDVRGLNRLQRTGTLPTVWIPPAEVRDQRDLPRTRMVLVRTRTRLKNRIHATLAKYALTVPDISDLFGKQGRAVLTRQLAHLPPHTRFATDQLLEQLESLDKQVAEFEDRMRQVFKKTPALEWLMSLPGVGFILGMVILLEVGDVHRFPDAEHLATYAGTTPRVRGSGDKIRFGQLRPDVNRYLKWAYTEAAEATCRHRQHWPHRHVSQLYSRVCHRKNHQKAIGAVARHLAEATYWILMKKELYQEPKRRSGVHEGVSAGDP

SEQ ID NO: 375108 - protein, 466 aa, unidentified
MKDNHRRRAGTPRMSPSVLDRINPHAAGIDCGAAEHYVAVPADRTLSPVQSFKTFTPDLVRLAEWLIVCRVTSVAMEATGVYWIPIYEILTARGIEVLLVNARHIKHVPGRKSDVSDCEWLRDLHSVGLLRGSFRPSDGIVALRAYMRHRQTVVESAGIYVQRMQKALVQMNLQLPLVVSDITGVTGLKILRDIVAGHHDPERLASHRDYRCRASRSEIIAALTGHYRPEHLFVLQQNLELFDACQIQLAACDRALEAHVQLLTASQAIPATPLPAPRVHRRIIDNDPHFEIRTPLHHLTGGVDLTQIDGIGPYTALKLIAEIGTDMHRWATEKHFTSWLTLAPKNKVSGGRLLSSRTEPSAHRAAAMLRMAAMTLGRGPTALGAFYRRLAGRIGKPQAITATARKLAVLVYRALKGELVYRDPGANAYERQQRTRVLRRLHQTATTLGFDLVNRASGEILATGPG

SEQ ID NO: 375109 - protein, 343 aa, unidentified
MNEYDGKQFVGIDLHRRHSVIVRQTSTGERLSAVRILNDPDSLALQLEEAGEHPDVVLEATYGWYWAVDALQAAGATVHLAHPLGVKGFRYRRVKNDVRDAGDLADLLRMNRLPEAWIAPPATRELRELVRYRAKLVALRSGLKAQAHAVLAKAGVLIAVSDLFGVAGRQRLARVPLGAAYAQRMSSLLELIDVLDTHERRFAEQIAAKLHGDRGYCAIQELPGVGPVLGAVFVAEIGDVHRFADPSRLCSWAGLTPQHRESDTVVRRGHITKQGSKLVRWAAVEAIQRQPDTTKISVDRKRIESRRGKNIAKIAAARKLLTLVYYGLRDGHIRALTRQRATA

SEQ ID NO: 375110 - protein, 337 aa, unidentified
MNYSGIDLHSNNSVVSVIDETDRVVAEKRLPNDLTRILAFLAPWQAELTGVVVESTYNWYWLVDGLQAAGFVVHLANTTAIKKYEGLKHSGDETDARYLAHLLRLGILPTGTILPAKHREVRDLARKRMQLVRSRTTHILAVENITARQCGTRITSNQVKQLDETAVDQLHLPDDVALAVRANVAVITTLSAQIAIVEKRLQEKVAPLADYALLTTVPGIGQTLATVIVLETGTIERFASAGNFASYARCVDSQRMSNGKKKSEGNTRNGNPYLCWAFIEAANFAMHFSAEARQFYERKKARTNPVIARKALAHKLARACFHMLKERKPFDVTRCFA

SEQ ID NO: 375111 - protein, 429 aa, unidentified
MTRISVGVDVSKNRSTVCIMDQDGKVIMRPFLVWHSTEELDFLADTLKRLNGEVRVIMESTSIYQYPIALHLEEKGIFISIVNAYEMKQFANIDFRGGKTDKKDSRTIASYGISYWDKLVEWQIPKDTYFNLDLLNRTYMNAKKHRQIILQELQHYIDCAMPGMDKELHSLNLSTKKDFMLDFVEKFWHRDEIVNKTETEFTEVFTAWAKKKGYRPVEGKAAKIYAIAKSCIPYYPANPTVKTILQCIVDKLSGVNRTLVTIVTQMIEEAKKLPEYQIVREMPGVGDPLAARFFGSAGDIRRFKNSKALVAYAGIDSPPDESGDFSSTHRHITKKGSKVFRDTGYEIMMALRAQKRTWEKVRKNPDVYDYMLRKEAEGKPPKVAKIAALNKFLRIIYARIKELYDNMALAERAKTKTRSKTRAKTKVTA

SEQ ID NO: 375112 - protein, 471 aa, unidentified
MAKAARKPASRPSRLTSARPRFSKRYPRLEDLPVVHRHAAGIDLGGDVSHFVALEVGDEVEVREFGGMTPDLHSLVAYLTTHGVTTVAMEATGVYWMPVYDLLEAAGFEVYLVNPSHVKNVPGRRKDDKLDCRWLQKLHKYGLLSASFRPGEEIRPLRSFYRQRTRLVQLCADETRRMQKALDVMNVRLHKTISDLCGVTGLRIVRAIVAGERDPAVLAAMREPTCQCREEELRQALTGHYQADQVFALRQALARYDFFVAQLAAVDQEIEAYLTALIPLPEAEITAKVTAATQPRPKGTHVPAYNVAAYVELFTGHDATVLPGIGPQIALGLLAELGRDMTKWKTQRHFGSYLALAPQPKISGGKVLATRTRHGSHPAAVLFRQAAAAVIRSDSALGAFYRRLAVRIGTAKALTATAYKIARMYYHLMREGRAYVELGEHVYAERYRRQQIAALEKRAKRLGFQVTPVAA

SEQ ID NO: 375113 - protein, 406 aa, unidentified
MKTLQKRCAGLDVHKKEVVACLRLVIRGKATYEVRRFPTTTRGLLELADWLEQAGCTHVAMEATGVYWKPVWHMLEGRFQQILANAAHIKGVPGRKSDTNDATWISDLLAHGLIRASFVPPQPIQELRDLTRTRKQLTREIVQHTQRIQAVLEEANVKLSSVITDILGLSGRRILKAIVAGETDPVRLSELGGTRLAATRSELADALHGRVHSHHCFLMGQHLKTIEQLEETITAFDARIEAALDLFRDAVERLKDVPGLSETSAQILIAEIGMDMKQFPTAGHLLSWAGLVPRLDESAGKRRSTRVRKGAPWLKPVLVQCAHAAARKKNSYFEAQYLRLKARRGPKKAVVAVAASILTTAYHMLADGTCYQDLGADHFARRNPRRVVAKLANRIRSLGYEVEAAA

SEQ ID NO: 375114 - protein, 427 aa, unidentified
MAEEKIGLEPEFVGFVGIDWADRKHVWCLEAAGSRKRETGELEHQVEAVEAWVGELGRRFGHRPIAVAVEQVKGALVFLLNKYECLHLFPVPSTMTAKMREALYPSGAKDDPRDADLLLDILGQHRDKLHRLSPDDEVTRRVQNLVEERRKLTAEKTAQSNRLTSYLKIYFPQMVEWFEKLDMPLVCDLVERWPTLEELQTVSREELRTFFRQHHCHRGLRERRILAIGGAIPAGGDRAVIEAKSTVVKVMVQLIRSLLQGIAELDRKIEESAAEHPDFFIFESLPGAGAVMAPRLLAAFGSQRDRYSCADELQTYSGIAPVTERSGKRKWVHFRWACPKFLRQSFHEWAGHSIAQSAWARAYYQQQRDRGSDHHAAVRSLAFKWIRIVFRCWKDRVAYDENKYLAALAKRGSQLGKLVVVGMGTGL

SEQ ID NO: 375115 - protein, 294 aa, unidentified
MKHYAGLDVSVKETAICIVDENGRICREAKVVSHPEDLSKALTGTGFRIERIGLEAGPLSQWLFEGMARAGLPVICVETRHTKAFLKAQINKSDRNDARGIAQMMRVNLYRQVHVKTLASQKRRALLRARKLLQEKAIAIENDIRGLLRNFGLKVGIVGAAKFEARIKELIEDMPDLEEFIDVLLAARRKLRDSFSRLHGKILELVGNDAACKRLMTIPGVGPVTALAFISTIDIPARFRSSRSVGPALGLTPVLKQSGESERVGRVSLCGDGMMRGLLYEAAQSMLTRVKKWS

SEQ ID NO: 375116 - protein, 355 aa, unidentified
MKNQQVNEKPNFLGQEIYVGIDVHKKQWNVFIMSKLKEHKGFAQPPRAAVLADYLRSNFPGAIYYSVYEAGFCGFWPHRDLIKEGINNIVVNPADVPGMDKEKKNKSDKVDCRKLCRGLRNGDLKGIFVPDRVLLEDRELVRLRSKLVRDIRRCKCRIKGMLNFYGIHTPSSGWSNAFINWLKELEFNTPSGTFALRTLIRDLEHITDLKKQIARQLRSLIKQERYAGPIKLLFTIPGIGLVTAMTFLTEVGDTSRFNRLDQLCNYIGLVPSIHGSGDTIHVGSLTPRKNTHILTLLIESAWTAVGKDPALMHTYHKLCTRMKSQEAIIRIARKLVARMRFVLLNHTQYQLRLAA

SEQ ID NO: 375117 - protein, 426 aa, unidentified
MKNREVLSTLFVGIDVSSKNNEICAIDFDETRYLRTSFSNNQPGAVALAMKLAGIMKGHPEFSRLVIALESTSCYSMHIATFLSSTDILMPYKPYVYCLNPKATANYKKSYISVGSTDPIDAFMIADFARVGRIRSEPWRGSQFLALQRLTRHRLHLIEAITREKTYMLTNMFLKFSGLAVPSEGNKPFSDKYGATAAAVLTEFLSPEEIVSMPSDELVEFICKKSKNSFNDPAKVAALLKKAAADSYRLDKCLYEPLTISIASSFNCINAMEGEVKKLNKAIERAIKGFNTNEYQSLVSIPGIGPVFASGLLAEIGSVKAFRSHDAIAKYAGLVWNPNESGDFKAEDTNMSKAGNRYLRYYLFEAANSVKNHSTVYNDFYCKKFAEVKKHQHKRALALTSRKLIRLIFGLLDNNQLYSKSVEQKI

SEQ ID NO: 375118 - protein, 346 aa, unidentified
MDFDPKETDVKYCGIDLHSNNSVVIVSDEEDRIVFNKRLPNDLGQIRAALEAHQEGLAGVVIESTYNWYWLVDGLMDAGYQMHLAHPSAIKKYEGLKHSGDFADAAYLAQLLRLGLLAEGYIYPREERGARDLARKRMQLVRYRTAQILSIEGILMRQTGARMKGEAVKRLTAEQVDEFAFAPDVALAVEANRAVSQALGQQIEALERRLKERVSLRPEYRLLKTVPGIGQTLATTIMLETGSISRFAQVGNFSSYCRCVDSLRESNGKKKGEGNTKNGNKYLAWAFVEAANFAMRYCPQAKSFYDRKKSRTNRVLAIKALAHKLARACYHMLRDQKPFDVSRCFG

SEQ ID NO: 375119 - protein, 336 aa, unidentified
MIAVGVDTHKHEHLARAVDGLGQILGGLTIRADLSGYIELTQWLRTLGEDVVVGIEGAGSYGAGLCEFLLAEGIAVVEVERPRRQDRRRGKSDEIDALMAAKKVLAKDGLSTPRAGGTRQALAALLIAQRSCVSERTRLLNQLQALHTTAPVALRERVGPGNGRKLAARLVKMRGRSEAPGSEQLIFTVLRDLARRAQELAAQADAYKHELTELISSLDPTLLDEYGVGPISAAKLLVCDPRRLKGEAAFARCNGTAPKPASSGQTIRYRLSRGGDRQANNALHTIARIRARHDESTRAYLERRQSEGKTPREAMRALKRHLSRSLYKKLITIPLT

SEQ ID NO: 375120 - protein, 318 aa, unidentified
MNTKINQSINVGVDTGKTQLDIHIRPLDLFFSVENNDKGIKKALKTIKNHNPERIVIEATGRLEMPFVLACAEAQLPIVRANPVHIKRFAGAIGRRAKNDRLDAELIAHYGEAIKPVLTIIKPKNIRLMSDLVIRRNQLLSMQTMEKNRIQILPASLHATIKPMLTTIKNQITKLEEKLVKLIEDSPEYQTKNTILQSVPGIGNIAAASIISNVPELGYITNKQAASLIGVAPITRESGRYKGKRVIQGGRAQVQTVLYMAMMSAMQCNPIFKATYARLLDAGKPKKVAIIACVRKMVVTLNSMLRDGAMWDENTAKS

SEQ ID NO: 375121 - protein, 398 aa, unidentified
MAQVLEHSKSQVMIAVDPHKASWTAAAVDASLQLLATIRVPVSDDGYRSLRRFARKWSNTHWAIEGATGLGAPLTHRLSDDGVNVIDVPAKLAARVRLLSTGHGSKSDDADAVSVGVAALTAHGLSTARMDAAVTALRAIVEHREDLVKTRTQTINRLHVVLTHLIPAGAHRGPSADRAAEMLRRIRPRYLAGKTMRGLAVDLVAEVRQLDRRIAKAAGDIEAAVVESGTSLTELCGIGVLNAGKILARVGSIDRFRSPAAFASYTGTAPIEASSGDVVRHRLSRAGDRQLNCVLHTMAITQIGRETAGRTYYRRKRAAGKSHREALRCLKRRLSDVVYRQLLHDSETELEASPGGGHSGGGSIVLRGRLTPRTPALRTSHFPNPPHSTLQPRTKGSS

SEQ ID NO: 375122 - protein, 341 aa, unidentified
MSEVSTIGLDLAKNVFQVHGANASGAVVFRKKLRRDRVLKFLAAQPACTVAMEACASSHYWGREIAKLGHEIRLIAPDYVKPFVKRQKNDAADAEAICEATQRPTMRFVAVKGEEQQAAAVVFRARDLLVRQRTQIINAIRGHLAEFGMVVAKGPFHVAKLVAAIEDNHAGVPAMAQPILRLLADQLRSLDERVVVLDRELARRAREDEEAKRLTTIPGIGPITATALVALAPAAQAFKRGRDFAAWLGLTPLQRSTGGKQKLGETSRMGERTLRRLLIIGASATVRWAMRKGSTTQPWLARMLNRKPPMLVIVALANKMARIAWALMARGETYRAPAMAK

SEQ ID NO: 375123 - protein, 344 aa, unidentified
MTNIQPKETAREAKPDLFAGIDVGAEELILVIRKNGKPFDPQKFANTPADRTRLVKKLVKLPGIIVCLEATGVYHFDLSLALHDAGVLLMVVNPKAAHNFAKVLMKNSKTDAVDANTLAEYAARMDFVAWTRPSNETIALRSFARRIDGLTCQKAAAKNHLHALTATSETPKAVLKDVKLAITQLQKRIDRLTAEALILIGKHPNLERILTLLTGIKGIGNTSAIALMGELLLLPPGLSHREWVKFAGLDPRAFDSGKSIHKKTRISKAGNRHIRSALYMPALSAKQHDPHVKAYFQHLVANGKKPLQAVCAIMRKLLHAIHGMLKKDEPFDNTRFYSIPECNG

SEQ ID NO: 375124 - protein, 409 aa, unidentified
MSTNASSNVFAGLDWAVHIHAVCVIDIAGGVLERFEIAHDRAGLAELMRRLGRFGSSVRIAIERPSGLIVDALVEAGHHVFPIHPNAVKASRPRYRSHGAKSDASDAYLLADLLRTDGHRWRELSPQSDSIRALRALVRSRDDLVATRVALGNQLRGTLEAFWPGAACIFCDITSPIGLAFLKRYPSAVSAARLSEAALNRFCRSQHYSGRRSPAELLVRLNSAATGLAGPLTNEAAGQLVRSMVAVLQPLVEQIAELTRRIERFVESLPDGQIIMSFPRAGHVCAAQILAELGDVRERFPTFDQLASEAGAVPVTYQSGKTRSVAFRWACNHRLRQAITCLADNSRHANEWAHGIYSAARARGCDHPHAVRILARAWLRVIWRAWTDRTPYDPARHLGALKLASSGGG

SEQ ID NO: 375125 - protein, 410 aa, unidentified
MEAVLERCAGLDVHQASVVCCILISVPGRRPQKLLRRFGTTTRELEALRAWLAEHGVTHVGMESTGVYWKPVYAVLEGHFDLIVGNAHHIKNVPGRKTDVKDAEWIAQLVRHGLVAKSFVPPPAIRDLRELVRHRRTLIETRTATRNRVLKLLEGANIKLSGVASDVFGVSGMAMLEALAAGTANASAMASLARGRMRRKHDALEAALEGRMREHQRFLLAMQLRTLKAIDHDIAALDAQIEAQLEPFRAQHQLLMQIPGVDWVTAASILAEIGPDMSVFATARRLAAWAGVAPGNYESAGKPKGAATRKGNVFLKSALFAAASAAVRAKGSYYCDKYNRLRARRGPVRALMAIAHKLLIAVFHMLTTGEAFRELGESYLDQVTRKRSTTRLVQRLSSLGYDVVLVPKAA

SEQ ID NO: 375126 - protein, 309 aa, unidentified
MKESFVYVGVDVAKAYLQVAAGEQNVGYANTPAGHRELVGWLRSLGKVAVVLEATGGYERALVEALQAGGIVVSVVNPRQVRDFARAQGRLAKTDKIDARVLVDYARALHPRPTVAQSPGQRRLTELVRTRSQLIASRVIQENQLEHVAEPVARRCLVEMVRAFALRIARLEKTIAELVQADSVLAARARKLLEVRGVGATTAALLLAELPELGSLAKTEAAALAGLAPRNRDSGRFRGQRRIGGGRHAVRTGLWMPTLVAVRHNPVLKAFYQRLRANGKPAKVALTACARKLLIYLNSLLKNHQLSPC

SEQ ID NO: 375127 - protein, 346 aa, unidentified
MSVSSPAPRYQLYGGVDIAAKTLTAAWMAPGATPGRPLTVDQTPQGFATLQDRLLATGHPAATILVVMEATGSYWVGLATTLAQAGFVVSVVNAAQAHHFAKALLKRAKTDAIDAQTITQLAARLEPAPWTPPPAIYTELQQRLAQRDSLVTLRQQVRNQRHALQHLPVVIASVQERMEALIATFDAQIEAVEQEIEQVLAHDSSWATTATLLLSITGIGLLTAAWLLVTTLNFTICATAEEATAYAGLAPHPYESGTSVRGRAAIGHGGNGRLRTALYLATLSAAQHNPHIKHFYARLRAAGKPKKVARCAAARKLLHLAWAVATKGVAFDPTYQTHHACSGSST

SEQ ID NO: 375128 - protein, 435 aa, unidentified
MSSKAYRATRVNEVNWEQIARGKEGLGVTMGIDVGKFDLSVICRWADGRFERPWRVRNPWEIPTLVGVLMQVKADRKLVVALEPSGTYGEALRQALGDNGIDVQRVGTKASHDYAEVFDGVPSQHDGKDAAVVAELAALDKAKPWTYQAADSWEEELAYWVEEMVAQRQMLTPWQGRLEGLLARHWPEASQVLKLSSGTLLRILKRYGTPQALAADACAATQLARWGRSLLSAAKIDKFLAGARSSVGVRAGPWERRQIQEYAERVLAARQQANRAQRRLRQLAEGHPVLEAQGKVVGVPTACVLWTSTGDPRHFDSAGAYRKAMGLNLAERSSGTYQGRLRISKRGSALARQWLYFAVLRLVQRCGVRPWYEAKKARHEGEARRVLVAVMRKLAVALYHVGVRNQEFQPRRLFGRISRRSGRSAQRPGASKQRA

SEQ ID NO: 375129 - protein, 346 aa, unidentified
MKKIFIGIDFSKEKFDATVIKAVGVEECAERQHEVFDNKVSGFRRLLRWVKSVQDEQDTSLWLFCGENTGGYSKALCNYLYASGYDMWLENALSIKRSSALQRSKSDKADSGIIAEYAMRNYDQMCLYKPLEKNLERLREVFLYRHNLVKLKASMTVRKGEKKLTQDKSDISRFMVQSSKHLITEFNKKIKECDMRIEMIIHEDEELLRNYEIISSVPGVGTQNAVCLMVYTDNFNRFDYNSRKIACYYGVAPFGRQSGTSVNTPPHVSPFANKLIKSLLSQAALASIRFSPHLAMYYHRLIESGKKSPVALNNLKNKMLHIITAMVRKGEKYDPEHDYYAAIKAA

SEQ ID NO: 375130 - protein, 432 aa, unidentified
MNTAPYDLVIGLDRSDRKADLHLIGVSDSKRRSQTIDTSPEALWEWLLQLRQEHPQGRIALCLEQPAAHLIAYLEAYEWITLYPINPLTLQKYREAFVTSRAKDDTKDARYLAELLLAHHDKLKAWAPEEEPTRAIQQLVFHRRSVVNERVGLTNRLKDLLKQYFPQALVLCGEDLWRPLATRFLLKWPSLQAVRKAKTEKLKEFYYLNGSRSAKLMEQRLSLIDKAVPVTDQTAVLESFILRVQLICRQLQDVVVTIKTFDLRITEAFQEHDDHEIFSSLPGAGPVLAPRLLATMGSQRERFESAANLQNYTGIAPVTKQSGGKCHIHRRYLCPKFHRQSFHEYAKESILWSRWAAAFYLQQRTKGSYHHAAVRALAYKWQRIIWRCWQSRKPYEEKTYEAALRKAKSPLVKLFDQVELGKSPFKNKVNKN

SEQ ID NO: 375131 - protein, 310 aa, unidentified
MLSFCGIDVSKDRLDVVVLPEGWFFSVSNGTAGWAELVVRLRPLTVSAIGLEPSGGYERGIIRALLAAGLSVRRINPNKLRQFARARGVLAKNDRLDARLIAEYVAIMPTRVVQRDAAVERLAEIVTMRRQLCDEHVAAENQAAHLEDAMLRRLSKRRQMRLEADIRLLDKRLAEMVAANVALAQRYELLTSMPGVGPVLAVTLIALLPELGKMSRKQIAALVGLAPYDFDSGKLKGHRSIYGGRMPVRNVLYMAALSASRYSPALKAFHNRLADADKKSKVIIVAVMRKMITTLNAMLRDNAVWQPRSA

SEQ ID NO: 375132 - protein, 324 aa, unidentified
MNKDIKYFGIDISHLVFDVTDSDGNYYRFKNNELGFKKFTKLLSCKSHCVMEATGYYHYQLAYHLLETGIKVSVENPLSVKRFIQMGLSKVKTDKSDSRLICAYAGQVELKLWQGNTKEEIECLQIVRALSVYTKQSTMLKNKLHGEAVLGNPSKIVVTSLKRSLRQLEKEMKTLEDKLLVLVKQTHQDLFARLKTIPGIGPKTAIMLVVLTGGFERFNSASELCSYAGLTPVVRQSGSSVKARPRISKMGNQKLRNLLFMCSFNACKHNKACRDLYERILAKGKSKKLALIAVCNKLLKQAFAIAKSGLIYDGEYKSTPVKNQ

SEQ ID NO: 375133 - protein, 438 aa, unidentified
MSMCTLGVDLGIRATHVATLCDSRGEVVWSKRRFRNRHDELETLVGQVGECDDLTVVMEPTRNAWVPVAAHFMAVGATVVLVPAERSADLRRYYAKHTKNDRIDSYVLARLPLLHPEGLHPIGGLGPAEPLRRAVRRRVKLAEWRLACRQRIDAMLDLLGPGYADTFGGARYGKTALEVLERYGDPRKLRRLGVNRLTTLIRRVSGGHWGTDKATDLVDAATEALELWEHDGLDFDELAWDLASEVRVIRRLDDEIGRLETRIDELYGKADPSGIVISAPGVGPVLAGGILGRLGDAKRFASLAGIRSFSGMVPKVNQTGHTETRPGITKQGDAGLRRDIWFAADQARHTDPQLAAKYHRLIVERRLHHYSAICHLATTLLTRIAACWRRDERYVIRDIDGRRITPTEGRAIVQARYRIPPEIRTRARIPQETSGSAQ

SEQ ID NO: 375134 - protein, 405 aa, unidentified
MEIIIERGCGLDVHKGTVVACIMGTGIKKEIRTYTTMTNDLLRLKEWIQEAGITHVAMESTGVYWKPVFNILEDQFEVILVNARHVKNVPGRKTDVQDSEWLCRLLRSGLVSGSFIPPRDIRELRDLTRHKRKLIQAIVAEKQRVEKVLEDANIKLSSIASDSFGASGKRIIEELIKGKLRTEEMAELSKGRLRQKRGELKEALVGQVREHHKFMIKVSLKHIRAMEKILLDVERKIQEKMDRQYQEEYALLQTIPGVKGEASTLIAEMGVDMGRFPSEQHLSSWAGMSPGNNESAGKKKPGSTTYGNKCLKTMLTEFAWVASKTKDTYLRSKYHSLVGRRGKKKALVALGHKILIMCYHILKYRCAYKELGVDYLDRRRKDKIASSYIKRLHHLGYEVILKEAA

SEQ ID NO: 375135 - protein, 342 aa, unidentified
MESIHYIGLDVHKKTIAYCIKTVTGSIVRQGSISAERKALRQWLAELPGPWMGAMEATIFTGWIYDFLMPHAVALKVAHPEMLKAITAAKKKNDRADAEKIADLLRVNLLPECTMMPRELRELRRILRYRNMVVRTAVKMKNKISGLLMEVGATYDKRRLHGKKYFSQLLDRVEDVPGSVKELLLLSRGNLELFTAIQKKLVRALRQNPLIRERVERLQSIAGIGEVAALTWVLEIGDPIRFSNARQAISYCGLCSAQRESAGKEQRGPISKKRNKHLQTMLIEAAKLAPYWNPQLAALHERELARGNRNRATLAVARKLVEYLLAVDRRGRPFEEKLARVA

SEQ ID NO: 375136 - protein, 355 aa, unidentified
MAQVRQLDFSGQKIFCGIDVHKKSWKVCIRSEHMELKTFSQNPSASELTRHLKTNYPSADYKVGYEAGFCGFNPQREFTEAGINCIVVHPADVPTTDKEKQRKSDVVDCRKLSATLNDGKLTGIYIPSIEQQDDRGVIRAYQQFIKDQTRCKNRIKGWLNFQGISIPGDDEHRYWSKNFIKWLKELSLTPSARVSLDLLIQSYEQARIIVLAATKQARLLSKQHRHQDKIKLVRSIPGIGAIGGLLFTTEIGDINRFKKFDSLCDYIGLVPNVNGSGDRVTVLGLTHRCHHALRETLIEASWTAIRLDPALTMAFNEYIKTMKKNKAIIKIARKMLSRIRFVMKNQTPYVTGVVE

SEQ ID NO: 375137 - protein, 341 aa, unidentified
MQITTIGLDIAKNVFQIHGIDAAEKVIVRKQLRRGQVTAFFEALAPCLVGMEACATSHHWARELTKLGHEVRLMPAKDVKAYVKRNKNDAADAEAICEAVRRPTMRFVRIKSAEQQGQLMLHRARDLLMRQRTQVINALRAHLAEFGITAAQGREGIKELLAIVAQEEGSRLPPDAHASLTVLATQLQAVQTMIGSLEKRIVAQHRSNEASKRLETIPGIGVIGATTIAAVVPDPRVFRSGRDFAAWIGIVPRQDSTGGKQKLGPISKQGDQYLRRILIVGAHAVLRRARQQPETYPWLTQLLARRPFKVVAVALANKMARIAWALLAKGGTYRAPQLVAA

SEQ ID NO: 375138 - protein, 343 aa, unidentified
MESIYYIGLDVHKKSIAYCIKTVTGKIVCKGMVRAERRALHQWLVDLPGSWVGAMEATMFTGWIYDFLKPYAVELKVAHPAMLKAITAAKKKNDRADAEKLADLLRVNLLPECTMMSEELRELRRILRYRNMIVRTASKMKNKISGLLMEVGAIYDKRKLHGKRYFGQLLERVEDVPESVKDLLKLSRTNMELFEAVQKKLLKTLREDSLISKRVELLRSISGVGEVMALTWVLEIGDPERFSNSRQAISYCGLCSAQHESAGKEHRGPISKKRNKYLQSMLIEAANLAPYWNPQLAMLHEKELTRGNRNRATLAIARKLVIYMLAVDRRGEPFITEKESLVA

SEQ ID NO: 375139 - protein, 360 aa, unidentified
MKKVSTMRRGMARRGMAAVVGLDLSDKKGNYAVLSWRGDILEEGMVAMTGASLRKRFGDRCYRVVIEAGTHSPWVSRELQALGHEVIVANPRQLPLIYRNNRKNDRLDALNLARLARLDPGLLAPISHRGEEAQAHLALLRSRDQLVAMRTGLISHVRGSVKSIGERLPKCSAEAFAAKAAGLVPELLRPALLPILETIASLTSQIRGYDKEVERLGKEVYPQTQVLRQVNGVGPLTSLAFVLTLEEPGRFRTSRAVGPYLGLTPRSRDTGESHPQLHITKAGDIFLRKLLVQCAHYILGPFGKDCDLRRWGLRLAGTTSKDQKKRALPATARKLAVLLHQLWLTGEVYQPLREVTKAAA

SEQ ID NO: 375140 - protein, 343 aa, unidentified
MSVVIGVDPHKASHTAVAISAGEVELAQKKVRSGAAQVRQLLSWAEPFGSRCWAIESANGLGYLLAQQLVNAGETVVDVPATLASRARLLARGRSNKNDGNDALSVAVAALRAQGLRRVEPAGHVEVLQLLAKRNTDIGNQRTRVVCRLHALVAELAGGGIAKEINASDVDRFLETTTPVTPVEQVRYDLVAELLDDVRRLDTQLKLSHERIRTAVRASETSLTELFGVGPIIAGMLIGYSGDITRFASRDHYASYNGTAPVEFSSAGRVVHRLSQRGNRQLNHAMHMAAISQLRQPHSDGHAYVQRKLAEGRTKKEAIRSLKRHISNAVYRQLRMDAERCTQ

SEQ ID NO: 375141 - protein, 345 aa, unidentified
MEHYVGLDVSLKLTAICIVDRTGKIEREGVVSSDPEAIAIFIKSHAPHVARVGLETGATATWLWTELNKLGLPVICIDARHAKAALKMQINKSDRNDAVGIARIMQCGWYKEVHVKDLDSHAVKALLASRALLVKIKRDLENQIRGLLKNLGLVIGRAKMNVFAVRAAEMTEDRPELAAAVVPLLSARAAIEQQIADLHRKVMRLARNNAQARRFMTAPGVGPITALCFLATIDDPTRFKRSRSVGAYLGLTTRRYASGEIDWTGRISKWGDKMLRSYLYEAANVMLTRVARWSALKAWGIRVAKRTGLRKAKVAVARKLAVVLHRMWIDGTEFKWSKEAANQPA

SEQ ID NO: 375142 - protein, 341 aa, unidentified
MKPAMSVLGIDIAKRVFHAVGMDERGKIVLRKRLSRHDLIPFLAKLPPVLIGMEACGGAHYWARRFREHGHEVKLMAPQFVKPYVKSNKNDSRDAEAIAEAMTRPTMRFVPTKEVDQQDLQALHRVRERLIGARTALVNEVHGLLHEYGIVIPKGVAKFRQAVVGKLESEQDKLTPLSQEMFWKLIDEFAALEKQLAYYQEKLEALAQSHPECQRLMTIPGIGPLTATALVAAVSDASAFKNGRQFAAWLGLVPRQHSTGGKERLLGISKRGDSYLRKLLVHGARTTIRWVGCKTDRRSQWIRQLVERRGKNRTAVAVANKNARIVWALLTSHQDYQLATG

SEQ ID NO: 375143 - protein, 436 aa, unidentified
MRGCRCSMIMGFTKPIEHSNLTTKEGDFMNPLYVGIDVSSKSNVVYFMLADGSKHSNFSVANSHDGSTQLVKRILSTIESKSLDTVLIGLEATSVYGDNLVYFLREDASLASFNRKIYVLNPKQVKKFKDAYNDLPKNDYVDSYVIADCLRFGRINKEVYIGDYRYKALQNLTRARYFAVCNLTKEKQRFMNVLFKKYSTMTQEKVFSNTFSTTALAVYDEFESAEALAYMDLQELTAFIIEKGKNLFPDPDAVAKAIQKAARSSYRLPKTVNDSVNQVLSISITSIKALEAQIKEFDKAISAQMELLPNVLISIPGIGPVYSAGIMAEVGDINRFDNQAQLAKYAGLAWTQYQSGDFEAQNTRLIKSGNRFLKYYLCEAAFSLVRCDKEYKAFYHQKYKEVNRYQHKRALALTARKFVRLVFRLLKDNRLYRPAE

SEQ ID NO: 375144 - protein, 368 aa, unidentified
MKSVLYVGMDVHKETIVIACAAEGEEIRMVGTIANTAAALDAIVRKLVSGGKCPSFVYEAGPGGYVICRHLREMGFTCMVAAPSLIPRKSGERIKTDRRDAVMLTRLYRAGELTGIVVPDADDEAMRDLYRARNDAKKMCKTAKQQLLGFLLRMGVVYPTGTHWTKTHYKWLDALSLGHPAQQLTLQEYLDAIRQSESRVVRLEGMLQSSAQSWKRLEEVKRLQSLRGVSFITAVGLLAELGDLRRFKSARQLMAYTGLVPSENSSGNAVRRGRITKTGNANVRWMLIESAWSYRLKARKSRRLLKRQAEVDPQTAELSWKAQVRLCGRYQRLLQKGKPRGKVITCVARELAGFIWALGIMQPMEQAA

SEQ ID NO: 375145 - protein, 313 aa, unidentified
MSQNNTVILYVGLDVAKLSLQLHLAGRFHTLANDAKGHVQLLKLLRPHSNAHIICEATGGYEQPVVRALQAADISVSIIEAARVRYYARAQGQRAKTDPIDAAVLTAYGHAFKPVATLVISPQQQRLADLSQRRRQLIHTRTAEHNRAEHYTDPLCVRQAGQLHKTLDKQIQQCDQGITTLIAEDAVLAHKAKRLEAIAGVGPVVAATVLAELPELGTLNPQTVAALAGVAPYNRDSGVQKGARHISGGRRTVRCALYMATLSAVRHDRILKAFYIRLLATGKKPLVAMTACMRKLVILMNHLLKNDKFQLAN

SEQ ID NO: 375146 - protein, 343 aa, unidentified
MDYFAGLDVSVNNTSVCIVDGAGKVVREVKVASEPDALLQVLRNPAYCFKRIGLEAGPLSQWLFSALGEANLPVICVETRHMRAVLKAQINKTDRNDARGIAQMMRVGLYRPVHVKTLRSQKLRMLLTHRKLVQSKAIAIENDLRGTLRNFGLKVGIAGWTKFEARIEELVEDVPDLAVLVESLLVVRRVLREQIAVLHRRLLTIVRDDEVCRRLMTIPGVGPVVALTYRATVDVPARFRKSKSVGAVFGLTCSRDQSGERDRPGAISRCGDEMMRAMLYEAAQAMLLRSAKWSWLKAWAMQIARRRGMKRAIVALARRLAVIMHRMWVDGAEFRWTKEAAAA

SEQ ID NO: 375147 - protein, 343 aa, unidentified
MARFVGLDVSQKLTSICVVDDAGRRLWRGQCYSEPEPIERAVRRHAGDDASIGIETGPMTPWLVHELRGRGLNVVCLDARHASAALKMQMNKTDQNDAEGLAQIMRTGWYRSVHVKSLDAHRTRALLGARAQLVGMTTRLSNHIRGVLKTFGMLPGAMRGVPFDRRVEALLADHDDVAAIVRPMLTAWRRLREQIAVFDKAVRTLAKNDPTCRLLMSVPGIGVVTVLAYVSTIEDPARFARSRSVGAHIGLTPRQYQSGEVDRSGRISRCGDTLARTLMYEAAVVILSRVKKASGLKDWAQAIAKRSGIGKARVALARKLCTILHSIWRSGQPFRWSAQPAGA

SEQ ID NO: 375148 - protein, 357 aa, unidentified
MEYIAFDSHKRYTLASIEKQSGGQPYEARVEHDRGNVKYFLSRFNPGSPVAVETVGNWYWIVDEIEEAGMVPQLVHARKAKLMLAMVNKTDKLDARGLNRLQRTGTLPTVWIPSRELRDQRELPRTRMVFTRMRTRLKNRIHATLAKYALSVEEVTDLFGKKGRELLQGVLEQLPPQTRFATEHLLEQLDVVGKHIQLFEERIRKVFDPSPELALVMSLPGVGFILGIVILLEIGDIERFASAEHLASYSGTTPRVNASGGKVRYGQVRQDVNRYLKWAFMEAANIICLHHRCYPQRHVHRLYERVARRKGHQKAIGAVARHLAEATYWILKKGESYREPQSQKRGFVHGGVSAERS

SEQ ID NO: 375149 - protein, 331 aa, unidentified
MNYSHFVGLDVGKKTFDASLMSAAEKELSHKSFDNTPEGIQSLLDWIAGYHLSLSKLLFCAENMGSYVTELSVSSVSMGFSLALVCPLTIKKSIGLQRGKNDRIDAKRIANYAVLHYRKLELYKLPNKDLVRLRGWIIIRDNLVKQKVSNIKLLETFSQMAKLADVTESISFLEEQLKSIKERILEVEEDMEQLIAASTSLYTNYLLLRSIKGIGIINAIVLLCVTDNFQRFDNPRKFACYCGVAPFEHTSGISIRGKTQTSSLANKEVKVYLTRAAITAISWDPQMKAYYKRKIAEGKHKASVINAVRAKIIARSFAVIRRQTPFVTLAV

SEQ ID NO: 375150 - protein, 607 aa, unidentified
MSTIASLDRIGVGIDTARYGHRVSFLRPDRKPAAKPLTVMENRAGYQALQDRLNQLHEQHPTAYFHVRIDAAGQYAVNLELFLRGLKLPMTISVGEPKRNKDYQKAHFPKRTTDDTESQAMARFAVIELPNATPAPSTPMILLREVAGRLQSKVKQTTQAINRLHNLLARVFPELATLTEDMSVGWVLKLLDKYPTAERIAQAQIASLEKIPYLSVEQAHAVHQAAKQSVASLRGELAEALVRDLVNQLRLCQKAEQHLHQLLLEAFADLPASPHVQVLTITGIGEATAAALVAKIVDINRFATPNHLVSYFGVFPEESSSGVDKHGKPLPPGTLIMSPKGNDLVRFYLWNAARNAIQHNPAIRALYRRLRAKGKRGDVAFGHCMRKLLHLVYAVWKTDRPFDKEHFPWEGSSDTQPSATTPPSADAGTTPSANEEAVGHKRDLPAEEVVTTADSTLEPASPAVKPASQSAAPRPKVDFACVREHVTMEQVLQHLGYFASLRGRGRQRRGPCPVHSQPTAPERTFSVHLGKNAFQCFHAECAVKGNVLDLWAAIHRLPLYEAALDLAETFQVPRNREEEPVKGTSSPRTATAKTSAPAAATATDGAK

SEQ ID NO: 375151 - protein, 385 aa, unidentified
MNQISCSATSSHTLHCALELSKKSWLLAIQFPDREQPSVYSIKGGDTEKLMAKLTAARDYWAKVSGSLPVITVCYEVGYDAFCLARFLKARGIECLVIDPGSLQVNRRGRRVKTDRVDVKMLLRTLIAWCRGERHVWSLVRIPSVDEEDLRRSHRERSRLVRERTAHINRIKGLLFAQGIRDVKVKSQYKTLAVDKLLTADGHRLPPRLASEIARELQRLAMVQEQIAEIERERDTAPTPCEATERKRQLLLQLKSIGPAISALLSREVYYRQFANRRQVGSFLGLTPSPYSSGEEERCQGISRAGSGQVRAIMIETAWLWIRHQPKSALTRWFVERTAGQSTRMRKIMIVAVARKLSIALWRYVEQGLVPQGAILNPPTTGRAR

SEQ ID NO: 375152 - protein, 344 aa, unidentified
MSKQVVRGGDVAGLLERFARLREKARARTGKVFPFVVIQEAGLDGFWIDRALQNEGIESHVVDPASIATSRRRRRAKTDGIDGEVLVRALLAYKRGEPRVCAMIKAPTPEEEDRRRLCRERKVLIVERVRHVNRVKGLLFSQGISGYEPLRRDRRRRLDTLQTGDGRLLPVHLKAQVCRELDRLELLLEQIKAVEAERDVLLAAQQVAAPAPAAMLLDIKGIGPEFAAILWSEGLFRHFDNRRQVASYAGLAPTPWQSGSVDREQGVSKAGNPRLRTTLIQLAWLWLRHQPHSALALWFEERVRRNGGRLKKTTIVALARKLLVALWKYATAGVVIEGAVMKRT

SEQ ID NO: 375153 - protein, 343 aa, unidentified
MNKLNAIGVDLAKNVIQISILSPSNRELRNSALTRRKFAEFLARQRPSLVAFEACATAHYWARTAQRHGHQVKIIPAKVVAPFRQGHKTDENDALAVAEAARRPNVKLAPLKTVEQQGMQAVQRSRELLVHERVALSNHIRGLLMEFGIVIPQGFASLYRRVPEILEDGENELPDLYRPTLDLLYRRLRELRDDLERLNREIETLVRQHPACRRLMALEGVGPISAVLLYATLGTGEAFANGRQFSAYLGLTPKQFSSGGKVNLVGISKRVANKRLRAVLIQGARAYVYHMKEPKTTKDQWLWAIIERSGKCKAAVALANKNVRTAWAMLTQNTEYLRYPIAV

SEQ ID NO: 375154 - protein, 444 aa, unidentified
MDKSLLLGIDVAMAENACCPLLDDGTEARRRFTLPNNLPGTEQLVKEILMLMERYGLNRLLVGLEATNLYWWHLACFLISCPELAPFKPQVYAFNPRMIKAFKKAFSDTGKSDIADAHTVAERLRFGRLPAPFMVNEVYQPLQRLTRFRYHLMGQITREKNYFLSFLFLKFSEFQNLDPFSNTFGAASQAVLTDYLTVDEIVAAPLEELASLLATESRNRFPSPEAVAAAVKRAARDSYRPHPSLNEPLNLILSATLENIRTLSQQVKKIDRAIEREVRKFPNTLSSIPGLGPVFVAGLLAEIQDINRFPDHASLAKFAGLFWRTRESGSFQAEETLLGKSGNAYLRYYLIEGANSVRMHSAEYGRFYQAKYNESTKHKHKRAVVLTARKLVRLVDAMLQRNQLYIPTPLNLTTEVSKQGSTKARPAKQHCYRRPGSPSPALCA

SEQ ID NO: 375155 - protein, 367 aa, unidentified
MSRMKRLAVQQLDVSKDYLVIGLDLAKTDTAVIAITTDGELYAIDRLKYSDLLNQARQLGSTVFAMEPCNGMTYLVHELEELGHECRVINGEAVKDYVKSHFAGQKNDLNDAQAIAFLAQDEMLKFIRVKAKSEMTMQTLQVVRQQLIKQRTCSVVCIKGICQNYGLVISKSIMSEAKIRPIIEETQKLPDEIKEPLKRLLRNAARFTIDIKQIDKAIEQGLKGNETAERFLEVPGLGPQCVSRLLTTIGDINRFEGPKNLAAYYGLVPRSHTTGHNEKMGKITKHGDRLMRAFIVQGAHAVLIQHTKGRLPKSALKKWIDKKLSAGMPCSKLSIALAAKLLRIAFAVLKYKKKFDIKKAGVARCSL

SEQ ID NO: 375156 - protein, 367 aa, unidentified
MGEISTIGIDIAKHVFQLHGVDGAGEIVLCRRLRRGQVAGFFAALPPCIVGIEACGTAHFWAREIAGCGHDVRLMPPSYVKPYVKRNKHDAADAEAVCEAVRRPSMRFVPVKTPEQQAALVAHSVRDLLVRQRTMLANALRGHLAEFGIVAPRGIQKIDELVAVVADETDGRIPTSARKALQILVAELAALDFRITRLETEIVARAKTDAVARRLATIPGIGAIIASRLSAMVPDPSIFRSARDFAAWIGLVPRQSSTGGKPRLGGISKHGNGSLRRLLVGGAMAAMFRSKALQNDPWLSQLRARKPVMVAAVALANKIARAVWAVMRRNAVWRPAAERSSARPHQPGVVLTAVKTMPPAAVAFGQS

SEQ ID NO: 375157 - protein, 428 aa, unidentified
MDEVDRNRLEEFRQLRQAVRHSEEYLIVGIDIAKDQHHAFFGTATGKTLLRRLVFSNDYEGFRKLLDQAEALRVRHGLKKVVYGMEPTANYHKPLGEYLITLGRTVVLVSGVTVKQNRESLDGRWDKHDVKDSANVADLISQGKCLYYEYPPAGIRGLRGLLSLKRRLKRQEHGYRVRIRNHLIAQYFPEMDRDYERLGTEGLSIMKWCFPPSQMTQLDVDPFIQRVTSRRIRMEKRRRLEGVWEKAGETIGCDGVPGVEHEARVMVEGLRQIREMIKETEDKTEDLCKQFPQYQSLLTIPGFGPDVSSKVLGAIGDPDRFENGKQVLKLAGLDLSANRSGKNSDKAVPQISKRGKSDLRYALYQAALIASLKNRDIMLYYTSRIRGREKEKGIQIKMRVKLAAKLLVIAWTLMKKKEVFDPAYLSAE

SEQ ID NO: 375158 - protein, 312 aa, unidentified
MTSECFVGIDVSKRWLEVDVHGEQATWKVENGLDGFATLVGRLKERKPALIVFEATGGYESRAVHALAAAGLPVAVVNPTRVRRFAAALGILAKTDKIDACLIAHFASVVRPVVNGQQTPLEEQLAACVERRRQLLVSLTAEKNRLSTCPACVQEDIDAHIAWLEERIVRLEDEIHTCILQKAEWQVRAELIDSVPGVGPVTATTMVAELPELGQLNRQKIAALVGVAPFNKDSGPKRGKRKIFGGRSGIRRTLFMATLSATTHNPVIRTFYEKLLKRGKEKKVALIACMRKLLVIINAMVRKGEAWRSSPA

SEQ ID NO: 375159 - protein, 457 aa, unidentified
MNPKRSKPKNDRTMPMIHPNAAAIDIGATMHTAAVRADRTPEPIRSFGTFTTDLHRLVDWFTECGVETVVMESTSVYWIPIFELLDARGFAVFVVNARDAKHVPGRKTDVSDAQWLQRLHSYGLLRASFRPKGQIAELRAYVRQRERLLEYAASHIQHMQKALTEMNLQLHHVVADVTGATGLRIIRAILAGERDSKVLACLRDYRCHSSAEAIEKALTGNYRAEHLFALELALALYNIYQDKASACDARIEAVLKELSISRGRDAGPLPSPRRRLHGKANGPDFDVRAALFKLLGKDLTQIDGLGSYLSLRLIAECGDDLSAWPSAKHFTSWLCLAPSNKISGGKVLSSRTRRSGSRASALLRLAAVTVGRTDTALGAFYRRLSARIGKAKAITATARKIAVLFYSAVRHGMEYVDPGSSYYETRYRTRVVENLHRRAKAFGFVLLPLESKAGAVS

SEQ ID NO: 375160 - protein, 272 aa, unidentified
MATFAGIDIAKHTFDLAFEPQQKIHQFHNDAQGIRQCARLLQKLDPQLIVMEPTGGYETNLQIHLQQAALPVAVVNARRIREFARADGKLAKTDTIDAQVMARFAEKMRPPAQQPLDAHSRKLKACVARRHQLVHMRAAEVNRTEHATDPFIKQSIRAVLKMLDKQIDKLEQQIQKRIQTVETLRHKAEKLRSVPAVGATTAALLVTELPELGQLNRKKIAALVGVAPINRDSGNYRGKRMTGAGRKDLRARLFMPTLCAIRSNPVIRHFYQ

SEQ ID NO: 375161 - protein, 385 aa, unidentified
MDQSTTVYVGLDVHKDSIDIALADAARDSEVRHLGTVAGGTDAVSKAMRRLVSAGHRLYIVYEAGPCGYALQRHFAGLGWRCEVVAPSSIPRPPGERVKTDRRDAMKLARLARVGELTPVRVPDEADEALRDLVRARDDAVREQRNARHRLKALLLRNAIAYAGRSAWTAAHLRWLAGVKMEHAAQQIAFQEYLHAVSESGARITRLEHALRDALPTWTLAPVVAALQALRGVQLIAAVTLVAEIQDFWRFTNPRQLMAYLGLVPGENSSGARRRLGAITKAGNAPARRMLVEIAHLYRHPARVSPVIARRQVNLPKTVTDIAWSAQTRLCGCVRASAGWPHAACRTTRSWWLSRVSSPASSGPSRARSPQRLQHHSSDIESLGH

SEQ ID NO: 375162 - protein, 356 aa, unidentified
MDGFKSLLQTIQDCSQKSDKIKVGLEATGHYSCNILGFLLDNDLPVYVMNPLHTNLYRKSLSLRKTKTDRVDAKTIATMLLSDVDLKSYTDTAYHNEELKSLTRYRFDKVQERAKLKQSVSRLVTILFPELEQLVSSIHGTSIYALLSEYPGAKQISEAHLTRLANILVKTSRGHYRKDKATHIRDAARTSIGSVMPAKSLELKHTIKLIQELTSEINEIEDAIRKIMDELKPPILSIPGMGFHSAAMILAEVGDFSNFNSPDKVLAYAGCSPSTYQSGKLTNCYAHMEKRGSRYLRYALYTATKYVCYWNPVFTEYLTKKQAEGKHYNVALSHATKKLVRLIYALQKSGKAYVQW

SEQ ID NO: 375163 - protein, 392 aa, unidentified
MIYVGIDVSKDKHDCFITNSNCEVLFKSFAIPNNREGFETLFQRIQSVSDDLTEVKVGLEATGHYSYNLLGFLLDKGLLTYVINPLHTNLYRKSLSLRKTKTDKVDARTIASMVMSNMDLKSYSDTSYHNEELKSLTRYRFDKVKERAKLKSSVSRLVCILFPELEKLVPQLHIASVYALLSEFPSADAIASAHLTRLTNLLSTSSHGRYGRDTAIIFREAAKNSIGSHMPAKSLELKHTIKLIQELTVEIDEIEAEIKSIMDKMDSPILSIPGISYNMGAMIIAEIGDFNRFDSADKILAYAGMSPSTYQSGQLDNCYSHMEKRGSRYLRYALYNATKYVCHWDKSFGAYLAKKRAEGKHYNVALSHATKKLVRLIFAMEKSKQAYLPAAA

SEQ ID NO: 375164 - protein, 394 aa, unidentified
MIYAGVDIAKTDHVIGAVDERGAEMCRPMPFKNTEAGLERAVAWLEGLAGSPSDVVVGMEATGHYWMACYSFLVARGYSVAVINPMQVKAVRKLKKLDKVKNDRIDAWLIAETLRIGQYDETRLATDEVASLRSLSRYLQSLRGMAAELKTQCVCLMDAHFPEYAGIFSDMFGAGSRAVLSKSPLPFELARRRADSLARDIAEASRRGGKSAGYAARIKAAARSSIGVRLDQEAASFQVKSLIRQIEFADSECAKVEARVRALLDEVEPLVLTIPGVSYATGAQIVSEIGDVSRFRNASALVSYAGLNSSVSQSGQFDSGGGPITKHGSPYLRRALWLAANRARQYDPGLRAFYDKKRAEGKPHRVAVTAVARKLCHIVFAVMRDQVPYDPGRE

SEQ ID NO: 375165 - protein, 357 aa, unidentified
MMADDTKVVIGVDLGDKWSQLFILHRKTGEVEERRIQTTPEALNRVFCQYDPARVALEVSTHSPWVSRLLEDLGHEVVVANARMVGLIHGDRKKDDRTDAEKLCLLADYNPELLAPVTHRSAEAQAEVAVLRARDALVATRTKLINHVRGAVKSVGGRIPKGSAAGFATSAGAAIPKELKPALEPLLRQIGEITSTIKAYDKQIAELGKKHPETERLRQVAGVGPITALAFVLLLGNPMRFRKSRDVGPYIGLVSRRHQTGSSDPELRITKAGDVLLRRLLVQSAQYILGPFGPECDLRTWGLALASRGRKNAKKRAVVATARKLSVLLHRMWVSGDEYEPLRHGSSAKRLAQLAEV

SEQ ID NO: 375166 - protein, 346 aa, unidentified
MSYSTTVGVDLAKNVIQISVVNGRGKELSNRSLSRKKFAEFLGKQKPSLVAFESCATAHYWARAAVRHGHEARLIPAKAVAPFRQGHKTDSNDALAVAEAARRPNIKEAPMKTTEQQGLQAIHRSRELLIQESTALSNHLRGILLEFGVAIPQGFASLLRTLPEVLEDGDNELPDLYRPTLHRMYTRLLELREDIDAMTEEVARLVKEHPVCNKLTALEGIGPIGALLLYATMGSGKAFSGSREFAAYLGLAPRQYSSGGKTNIVGLSKKVGNSRLRSVLILGARAYTYRMKEPKGSKDKWLQAIVERNGVSRAAIALANKNVRTAWAMVTQGTEYQRRPQLEMAA

SEQ ID NO: 375167 - protein, 335 aa, unidentified
MVLDADGKVPLETIVATEAARLIRLMQSLNGPLHVTFEETTQAGWLYDLIRAYAQEVVVCDPRRNRLLSEGSKADKPDARRLAELLRARLLRSVYHGHEATRRLKELVRAYETLSIDTMRTMFRIKALYRRRGIRTPGSGVYQLKQREQWLHRLTESGLRQRVEWLYEELDHLRSLRKRAKLAMLTESRKHRAFSLLRTIPQLGPIRCALIVATLDTPHRFRTQHQLWAYSGLAVVTHTSSEYEIKAGRVVRSRKPISTRGLNRNGNRRLKDVFVAAATGGTQAEPYRTYLRGLEQKGMRAEMARLTLARKIAAITLSIWKKGETFDPKKLNGTT

SEQ ID NO: 375168 - protein, 473 aa, unidentified
MSKGSGTTRGDRRRNERRERLRRVLPRDGAVIGIDLAEDKQAIAVIDHDVRVLARKMVRMKTFRLGPSLDWAVAQARAKGFAPVTVACEPTGPRWLQVQQLCAERGLPLVCIQPLVSHIAREQQDYTPHKTDEADCVLIARLATELHCYLPEQLDEAWAYLRHLGRRRAQLITAATASVQRIRDFLSVAWPTVTEACAQPLESVTWLAALQVVTSRCGGQPGRLAGMRPQAFTALVRGTVPGWGGQRVWGKICDRIFAALTDTEGVVVSCRRGLLRRCADELGDLQRTRTQLRAVEADMTAVLAELGLSRLADIPGLTAVGAAAILAETGDPRRYDSSSSLVKHAGLSPSDNASGAFYGEARISRRGRPGLRLTAWRAVWPLLTHDPVMAAKYQAMTQAAGTAAQAAAARADAGSRQVSAAAAAARARRAKARVACAASLLRWIYSMVVHDTSWDPAVAAGSQHALRDQPEAA

SEQ ID NO: 375169 - protein, 347 aa, unidentified
MTVYIGVDFHARKQTASYLTTEDGEIQQVELEHEKDIVRAFYDQFRGQKVIVGFESSGYAAWFEELLEELEYETWIGHAQAIRQFARRRQKNDRRDADLILELMVAGDFPRLHRYSREGRETLQQLRYRQRLVKMRTMVINSLRFMVASRGVSLRGTLQSRPGQARLMQVALPGPLGQQRDELLRLLVEVQQKVETVEVWLKQKAEADSRVQRLRTHPGIGLLTGLGLVHTLESIERFSHSRKVTAYVGLDPVEDSSGERRRMGSISKQGSRLLRLLLVEAGQVAARRDPELGQVYRRVTLRRGHATAKVAVARRLLVRAFIMLRDEIDYAEFCRRGVAARSSRGSA

SEQ ID NO: 375170 - protein, 334 aa, unidentified
MENIALIGIDLGKNSFHIHCQDRRGKAVYRKKFTRPKLIEFLATCPATTIAMEACGGSHFMARKLEELGHSPKLISPQFVRPFVKSNKNDFVDAEAICEAASRPSMRFVQPRTESQQAMRALHRVRESLVQDKVKTTNQMHAFLLEFGISVPRGAAVISRLSTILEDNSLPLYLSQLLLKLQQHYHYLVEQIKDLESQLKRKLDEDEVGQRLLSIPCVGTLTASTISTEIGDGKQYASSRDFAAATGLVPRQYSTGGRTTLLGISKRGNKKIRTLLVQCAGYSYKNWNTSLANWPIGSGIYCAGKSNFVVTCALANKLARIAWALTARQQTYVA

SEQ ID NO: 375171 - protein, 347 aa, unidentified
MTIVEDTRVITGGVDTHAGMHVAAALDSIGGLLGVREFPATAAGYAGLPGWLRSLGNLALAGVEGTGSYGAGLARYLAAAGVRVVEVDRPDRQDRARQGKSDPLDAVSAARAAQSGRASGAPRGRDGAVEAIRALMVAKRSARQERTQAVNQARALIMTGPEELRARFARRSPAQLIEAIAVLRPRPGDVPGYATRVALRELGRRAQFLDAQLGRLDELIVPLVTARAPGLLSLHGVGPDTAALLLVAAGDHPERLRSESSWAHLCGAAPIPASSGKTAGRYRLNRGGDRQANSALWRIVIVRLKSHPATRTYADRRGKEGLSKKEIIRCLKRYVAREVYRQLRAES

SEQ ID NO: 375172 - protein, 340 aa, unidentified
MDTHRDTHVAAVLSPLGAVLGTEEFPATAAGYHGLLGWVGDLGTVRRAGMEGTGSFGAALSRYLLSQGVEVFEVNRPDRTDRRLRGKSDPLDAQNAARAVLSGRARARAKTGDGPVQIARMYKLAKGSAVKARTQAINQVKAVLITAHPDLREELAQLNTPDLLRTCARFADDSKDDEGEEETVLQATRATLCLLAHRIEQLTEQIQDVERRLALLAERHVPQLLAVVGIGPDTAVTLLITMGDNPERLGSEASFAALCGVSPVERSSGARQYRRLNRGGDRQANAALHRIVQTRLRCDPRTQDYYERRTKEGKTRREIVRCLKRYAAREVFHLVRPTQA

SEQ ID NO: 375173 - protein, 341 aa, unidentified
MSDLALVGIDLGKHTFHLHGQDKPGRELFRKKLSRQQMMRFFANLPACTVVMEACAGAHFVARELTALGHQAKLISPQFVKPFVKGNKNDFVDAQAICEAASRPTMRFVSPKTEGEQTLSVLHRLRESLIRDRTKAVNQMHGFLLEFGISLPQGLAVMKRLSAVLAEHELPVRLTVLLQRLHDHFVYLDEQIKQLDKELAGQLADDDLGRRLLSMPCIGPITASLLAVEMGDGQQYGCSRDFAASLGLVPRQYSTGGKANLLGISKRGDKNLRSLLVQCARVYMRHLERQKGALADWVRSLLTRRHSNVVACALANKLARIAWAISTHHTQYEAGPDVLKA

SEQ ID NO: 375174 - protein, 351 aa, unidentified
MQYIALDSHKKYTLASVEPYQGGPSRETRIPHEPGMLRGFLKRLDAGSPVAVETIGNWYWIVDEIEAAGMAPRLVHARKAKVMMGMVNKTDKLDAQGMNRLQRTGTLPTVWIPPAEIRDKRDLARTRMALVSERTALKNRIHAVLAKYALSVEAADLFGKKGRELMGLAVQKLPAETRFSTQRTLDILDELKVQIKFLEDRMEAVFEETEEVRLLRTLPGVGFILSVVIAGEIGDVKRFSRPEQLASYSGVVPRVSSSGGKTRYGSMRTESNQYLRWGFIEAANVVCLHRSKHPEQTVSRLYERIKSRKGHGKAIGAVARNLAEATFWVLTKKEPYRDPALGSTAVLPTKA

SEQ ID NO: 375175 - protein, 345 aa, unidentified
MNYCGMDVAMKSSYLYISDAQGRLKAKGQLPSRAEALRGALGRFVGGGLKVAVEAGPQTAWIHDLLVAMGAEVHVVNPNKVRLIAESRRKTDRMDAKLLCQLLRLDGLPEPVHVPDRQTRGLRGLLLARRQLVCARTKVCNVVRGMLRQEGISLPCRFLTSLAAWERLRKLEFEHSHLRPVVEAYAETFKTLTRSIQALEEQLAGREKADERAARLQTMPKVGRIAALTLLAAVDQVERFSSSRKLVGYSGLAPRVRSSGERTEYGSISREGRRELRAVWVQIAQLVAMDRGKATAPLRKWFAKVAYHRGKKTAMVALARKLLTIAYQLLKQKTVYDAKRLGRAA

SEQ ID NO: 375176 - protein, 405 aa, unidentified
MNAVGIDVSKGKSTVTIRRPGDIVVMSPRNIPHTQSAINNLIDLIRGLDGETKVCMEHTGRYYEPVATWLSDAGIFVSAVNPMLIKDFGDDSLRSPKTDKADSKKIARYTLDRWSKLKQYGSMDKTRNQLKTMNRQFGFYMAHKTAMKNNLIALLDQTFPGANDFFDSPARSDGSQKWVDFVHTYWHVDCVRSKSLDAFTEHYQNWCKRKGYNFSAAKAEDIYQLSSDMIAVFPKDDSTKLLIRQAVAMLNTASETVESLRLKMDETASTLPEYPVVMAMDGVGPTLGPQLMAEIGDVTRFTHRGALTAFAGVDPGKNDSGQHIQKSVPTTKKGSPYLRKTLFQIMDGLIKRSPADDPVYAFMDKKRAQGKPYYVYMTAGANKFLRIYYGRVKEYLSTIAEVKET

SEQ ID NO: 375177 - protein, 481 aa, unidentified
MEKHYVNIGIDLGIKAQNHAQIRDENGKKLGHDYSFFTTKESLDQICAQTETYSPNLKIRLIVEATGMAWFPIAIYGKTHNHSVVRVKPQKTRDLRKVCGRNKKYDGLDTKTITMMPVVDPEGIQEIYLQPAKAFALTRRCRQRERLVDTITAQKNRIGSFFDWAFPGVMKCFSNPFGTVAKMFYRYYLNPFKVQKLTPKELADFLSVVSNQKVDLATAQAICEKAACACALYENSSEYIDFEEVAREILPEIELLETYEEQLKEVESEIERLYEEVHPKKYIESLPGISKRLGPALCGVMGSPHRFNSEKLGRAFIGFIPRQDSSGEMDKKGLAMSKEGPPQGRRDFYLASDVARQWDPQLAKVYHDEMVYKGHCHTQAVCAVGVRMINRVLRILKDNRTYEFRDIDGRRITKAEARRIVKERYQVPEEVRKRLRNRKKRERNNFHKGLPRDNRDTPNIRSQNNNSEAERKRQGVILKCL

SEQ ID NO: 375178 - protein, 411 aa, unidentified
MHNRQNYLYVGVDLHKEHHTAVIINCWQEKLGEIQFENKPSAFSKFLLEVETYVSDGLSVVFGLEDVGGYGRALAKYLVDHEQVVKEVNPALSFLERKSQVMIQKNDSWDAECVARILINKLNQLPDAKPNDLFWSIQQLVSRRNALVKAQSALKNQLHIQLNHHYPSYKKFFSELDGKTALAFWEQYPSPSCLEGVNIKRLTAFLLDVSNNTCSVRKASEILRLVKEDGQTMKEYQEMRNFLVRSIVREIEFKKKEMKYIERELKQLVNLLDYQLETMPGIELVTASALIAEIGDVRRFPNANKLARFAGIAPVYFGSGGKGKTHKSKQGNRALHALFYNLAVQQVQVAKGSKLPRNPVFHAYYQKKLKEGKTKGQALVCIMRRLVNIVYGMMKYKIAYELPVVEEKEVV

SEQ ID NO: 375179 - protein, 346 aa, unidentified
MRYSTTVGVDLAKNVIQVSVVNGRGKETLNRSLTRAKFAEFLGKQKPSLVAFESCATAHYWARAAQRHGHEARIIPAKAVAPFRQGHKTDSNDALAVAEAAGRPNIKEAPIKTVEQQGLQAVLRARDRLIQECIAQSNHLRGILLEFGIAIPQGFASLLRTLPEVLEDGDNELPDFYRPTLQRMYHRMLELREDIDAMTREVGELVKNHPVCSRLTALEGIGPIGAMSLYATLGSGQAFSKGREASAYVGLTPKQYSSGGRANIVGLSKKVGNRKLRSVLIQGALAYVYRMKEPRSCKDRWLKDLVERAGTRRAAAALANKNVRTAWALIAQGTEYQRRLQLEMAA

SEQ ID NO: 375180 - protein, 345 aa, unidentified
MEHYAGIDVSLESASLCVVDATGRIVREAKVASEPDVLIGWFRGLEFAVTRIGLEAGPLSQWLYAGMREAGLSVELLETRHVRDAFKAMPVKTDRKDARGIAQLMRLGWFRSVHCKSLPAQEVRALLTARKLLQTKNHDVEMSLRGVLRGFGLKVGRTTPRTFVGRIRELVAGHATLSTVAEALLAARGTLFEQWQKLEKRLRSLAREDRRVRLLMTAPGVGTIVALTFVSAIDDPGRFRSSKAVGAHFGLTPKKYQSGETDVTGRISKIGDGGVRTALYEAANVILTRPVKGSTLKSWGMRLAARTGMRKAKVALARKLAVVLHRMLADGTSFLANKAAAAVAR

SEQ ID NO: 375181 - protein, 431 aa, unidentified
MRKKAAVCLPFILARGLLWFWPEQSRTNGRDTRVPEALQSKQFELANTPMNSELYLGLDVDKEWIVIAVAEWGRNAPVHDLGAISNDVHALEKLLARLRKRYGPEVMMRACYEAGPCGFGIARRLGQLGVECAVVAPSLTPTRAGDRLKTDKRDARKLARLLRAGELTAIYIPEPTDEAIRDLCRARSDAVDDRRRSRHRLKAFLLRHGYHYQGRTAWSAAHERYLRELVLPHPAMKVILEEYLISVQLASERIARTEAAMSDLLGKWRLEPAVRALMAMKGFQTVAAMIVVSELGALDRFTHPRQLMAYLGLVPSEKSSSDRRRQGSITKCGNAHARWLLVECAQSRVGGTAPPKVSKELSRRQQNQSPQVRLISWKAQNRLHQRYRRLMARRLQRNKVIVAVARELCGFIWELLRTQECYHAPCPSGIN

SEQ ID NO: 375182 - protein, 391 aa, unidentified
MIYVGIDVAKDKHDCFITNSDGEVLFKVFTITNNLNGFNDLYQRIESVMEDITKVKVGLEATGHYSYNLLGYLLDKGLPTYVINPLHTNLYRKSLSLRQTKTDKVDARTIASMLMSDVNLKSYSDTSYHNEELKSLTRYRFAKVKERAKLKSSISRLVCILFPELEKFVPTLHMASVYAMLSEFPGAKHVANAHLTRLTNLLSESSKGRYGKETAITFRDAARNSIGSNMPAKSLELKHTIKLIQEISSEIDEIENEIKIIMDKINSPILSIPGINYRMGAMIIAEIGDFNRFDSPDKILAYAGFSPSTYQSGQLDGAYAHMEKRGSRYLRYALYNAAKYVCHWDPAFAEYLAKKRSEGKHYNVALSHAAKKLVRVIYHLEKTNQQYIKAA

SEQ ID NO: 375183 - protein, 360 aa, unidentified
MRREILICLGKETNLNLWRCLMKLYAGIDLHSSSSYLAIIDDRGARKYKKKLPNNLEGILQQIKPYKKGIAGVVVESTYNWYWLVDGLEAEGYAVHLANPSAIQKYTGLKHADDKHDAFWLAEMLRLGILPEGYIYPKEERPLRDLLRKRGHLVRLRTSLIISLQNIISRNCGIRLTGDEAKRLKEDRVTPLLSQNEDLRLAGTVSKESIDFLTQQIKSIEKVIESKIELKEPYRHLLSIPGIGKVLALTIMLETGPICRFEHVGNYVSYCRKVGSQWISNGKAKGKGNKKNGNKYLAWAFSEAAEIARRYNAQVRAYYNRKLQKSNLMVAHSALAHKLVRAAYYIMRDEVPFMPEKLFS

SEQ ID NO: 375184 - protein, 283 aa, unidentified
MRSKSIDFTGKNIYVGLDVHKKSWSVTVLLDEVEHRTFTTSPNAHVVSAYLKKHFPGGTYLSAYECGFSGYKTHRELVEQGVQNIVINPADVPSNNKEKTTKTDKVDSRKIAKGLRNGELRGIHVFDKIHEEFRSLVRQRTTFQKDFRRSKQRIKSALMYHGIEVPEEFDFQNWSKSFESWLSGLELSTTNGTYMLENLYQNYLFNKTQIRMLAIDIKKYARRHYKEDYFLLRTIPGIGQLTAVAIISELGEISRFKNLNHLSSYVGIVPLTHNIGESERVVE

SEQ ID NO: 375185 - protein, 341 aa, unidentified
MNVLKQVLGVDVAKKELVVTLGFLDHDLQINLNLHRVFSNKDTGFTALLKWLKKNTDSSVSLQIVMEATGVYHQKFANFLIDNDLSVCIVLPNKISSYMRTLETKTITDKTCSEAIAHFGLSRKLENWKKPNKLYKNMQQLTRERDQLVNERSMIKNQIHAEESEGEPNTNSIKRFNDRIKFINRQEREIKEEITQLTNSDKTLKQQIERMTTIPGIGELTAVTILAETNGFELIRNKKQLSSYAGFDIKEKQSGTSVKGKPRISKRGNRYLRKCMHLPSLSAVKKIDVYKDLYIRIVSKNGIKMKGLIAVQRKLLELTFIIFKNNSAFEQDYEIKKRVPL

SEQ ID NO: 375186 - protein, 413 aa, unidentified
MKKNSNSQTKSGQKTKPTKARGPVQRDSKEVMAELVAKLSEKLEQKPTQEKAAEGKPKGAPGPNRDRLTVGVDLGDQWSNYCILGLEGETLAEGRLRTTREDVAELFRALAAARVIFEVGTHSAWVREVVVGCGHEVLVANPRLMEGTKRRKRKNDRLDAQKLARLGRVDPQSLFPIQHRSTEVRQDLVVLRARDALVSVRTELINTTRGLVKSLGARLPKCSSPSFPKKVEEALPAEVREALLPLVRLAEELTDCIKVYDQKIEKRGREKYAHTELLRQVKGVGPLTSLAYVLTLENPDRFAKSRDVGPYLGLVPKQEDSGDSQPQLGISKAGDMMLRRLLVGSAHYILGPFGPDTDLRRHGLQLCERGGKNAKKRAAVAVARKLAVLLHRLWVSGEVYEPLRHGAPTAEAA

SEQ ID NO: 375187 - protein, 342 aa, unidentified
MEHYVGLDVSLKLTAICVVDRTGKIKREGVVPSDPEAIATFIKSHAPRVARIGFETGATATWLWTELNNLGLPVICIDARHAKAVLKMQINKSDRNDAVGIARIMQCGWYKEVRVKDLDSHAVRTLLASRALLVKIKRDLENQIRGLLKNLGLVIGRAKMNVFGRRAAALAKNRPQLAAAIDPLLTARTAIEQQIADLDRKVMLLARHNAQARRFMTAPGVGPITAVCFLATIDDPTRFKRSRSVGAYLGLTTRRFASGEVDWTGRISKCGDKMLRSYLYEAAHVILTRVKKWSALKAWGVKIAKRTGLLKATVAVARKLAVILHRMWIEGTEFHWSKEAVS

SEQ ID NO: 375188 - protein, 339 aa, unidentified
MNHVAIDLGSRESQVCIRAADGTILEEGKRPTKGLLQLMPAWPKSRVILETSSEAFRIADAALQAQHEVRVVPATLVKSLNVGARKIKTDRRDAQALSEASCRIDLPSVHIPSAQSRELKSICGAREELVETRTKLINNVRGWMRTQLWRIRSGGAASFHDRVRAHATDLESTLPEHVERTLKVIEVVTMQLREADAQVRRFAKTNPTCIALMTVPGVGPITAIRFFAAIDDVTRFRSAHGVQSYLGLTPGERSSSERQHRTGITKAGAPATRRMLVQSAWAALRRAPNEPMVRWAMKVAERRGKLVAVVALARKLAGILFAIWRDGTTYRSERSAMTS

SEQ ID NO: 375189 - protein, 400 aa, unidentified
MLSIGIDVSKGKSTVCGMKPGGEIVYAPFEVQHTREGMSELVSLLRSSGEEVRAVLESTGSYHCPVVAALLENGIFVSVVNSLRMKRFCSQSIRKVKTDRIDAMQIALYGLAYWQELQPTRLPEDTYRELQRLARQYYQMTSMLIKAKVDFNALCDQVLPGMQELMSDHAGRHKLSDFVLRYHHTTHILEMGETRFRKDYCKWAEKKGYRNCERMAVLIFATAQNGIPVLPNAPSTQIVITEAIRVLHTVEASRDAILTQMQALAKTLPEYSLVRKMPCIGDTLAPRLIAEIGDVRRFHSKRALIAYAGIDAPPYQSGKFRANNRHISKRGNRYLRKTGYEVMQSYAMHKPANDPIFTFIEKKRGEGKSGKLAMVAGLNKFLRVYYGKVTELYRSLPAIE

SEQ ID NO: 375190 - protein, 419 aa, unidentified
MNNDNPLFFVGVDWGSQSHCVCVIDRDNRVVGERSFKHSGEGLLNMGEWIIKVAGSAAGKVAAGIEVTRGPVVESLMACGFSVHSINPKQLDRFRDRFSLAGAKDDRRDAMVLASALRTDRRHFRSLEPQCDDTRTLRTLSRRREELVTERTRHINRMGEQLWVYYPQFRELVGNDTIRPWIIELWQLAPTPDAARRIRVSSVQKILERHKIRRVSAEEALGILRSKKINISPSAASDCVWRIQSIVEHFDLVSRQIRETEVLIKEMLDAIISRQRAENAGTARPSDLEILLSMPGVGPVTAATLVGECYDLIRRRDYRALRCVTGTAPVTKQSGKSKYVMRRRTSSCRLQAAICHWARVAVLHDSVSKAQYRSLRARGLRHSRSLRSVGDRLLRIACVLLKKGELFDKNFKELQKEAA

SEQ ID NO: 375191 - protein, 323 aa, unidentified
MKTQAEMRFAGIDVSKNVLSLGFHDVPEVTDVPNDEAGFDRLVQLLVDSKPGLIVMEATGGYERACVCELQAAGLPVVVVNPRQARDFARSMGLLEKTDAIDARALAELAKVLADRKPLHELVRPLPDEATQQLVALVTRRRQLVAMLTMERNRMSMSHRRVRSSVETTIKFLKKQIDQLDVQAEQHCQEHATGTMSLLTSAKGVGNTTAATLIAELPELGKTTTRRLAKLVGVAPLTWDSGKMRGQRHVFGGRASVRNALYMATLSAVRFNPVIRLHYVQLVARGKLKKVALVACMRKLLGILNAIVRTQTPWNDQMHAKSA

SEQ ID NO: 375192 - protein, 388 aa, unidentified
MQFAADRLEAPTAIRTDLGAIFISLELSRSSWVVTSLSPGGGEKMSKHTVRGGDVAGLLKRFAQLREKAKGRTGKVFPLIVIQEAGLDGFWIDRVVQNEGIESHVVDPASIATSRRRRRAKTDGIDGEALVRALLAYKRGEPRVCSMVRLPTPEDEDRRRLCRERKVLIAERVKHVNRIKGLLFSQGVSGYEPLRRDRRERLDALQTGDGRPLPPHLKAQVRRELDRLELLIAQIKTVEAERDALLAVEQTTAPVPPAMLLGVKGIGPEFAAVLWSEGLSRPFENRRQIAAYAGLAPTPWQSGSVDREQGISQSGNPRLRTTMIQLAWLWLRHQPDSALALWFHDRVKRNGGRLRKTTIVALARKLLVALWKYVTAGVVIEGAVMKTA

SEQ ID NO: 375193 - protein, 357 aa, unidentified
MPAHTKSAKSNAQIAVIGIDIGKNVFHLIGLDRGGAIVLKCKLARGQLGKFFANLSPCLIGMEACTGSHHLSRRLMALGHDARLMPAKYVKPFLKGHKNDYRDAEAIAEAVQRPTMRFVATKTVEQLDLQALHRVRARLVSERTATVNEIRAFLLDRGIAVAQGIQRLRKALPEILAQHTDLLLPRIIRIIEALAADWRRLDDRIEEIAREIGELAEKDAPCKRLMTIPGIGPLISSATVATIGGGDMFSKGRDFGAWLGMVPKQLSTGGRTILGKISKRGNTYLRMLFVQAARVVLIKRQSWERYGLKPWIEAAARRMHSNKLAIALANKLARIAWAVLRHGRDFEVRHADAPQHA

SEQ ID NO: 375194 - protein, 357 aa, unidentified
MHQPTTNIFPMTIGLDLGSKTTQCAIYGTNGKRIEERKVTTDREHLTTLLGRFPGSRVVMEASTASRWINNLAKELGCEVIIANPRSIPIITASVRKCDRNDARLLAELGQFKPDLLSPVQLRADRYQEVRALLFARMQLVKQRSALVTFIRSEVRVLGYSLPSCGTKVFAAKCRGLIPDSLRMALGPIFDSIQTMTEGIKTYDKSIDELGDRQFPETMVLRQVHGVGPLVGLAFVATIGDPHRFDKSRTIGAYLGLVPRIHQSGKSNPALGITKCGDGYMRSLLVSAATRILGPHGPDSDLRRFGERIAAQGGKRAKARARIAVARKLGVLLHCLLRTGEVYEPLRNNEEACTEAA

SEQ ID NO: 375195 - protein, 439 aa, unidentified
MAKEAIFETVHENVAGIDVGAEQIYVSPDGKEVTVFETFTSGYHACARYLKEKGIKKVAMEATGVYWIALYFLLEESGMMVCLVNPKETKQVKGRKTDVKDCQWIQRLFTAGVLRHSFIPEGKYMELRMLVRERIDIIEMGSTYVNKMQKCLELMNIKLKEVISQIQGASGIRMIRSILSGERNAASLLSLCDERIQKNKKAKVLKALEGTFNETYLYMLGQNMELWQIHQDRIEKIDAKIAQLLDELSMNKEEVPTGKTKRIRHHAPKIEGLQTTMARLYGVDLSSISGMNDYTVLRLIGETGTDMSRFPTAKQFIAWLCLSPKTHKSGKIKKNVRGTPCNPAGQIFKECAQGLMNSKFIAIGAFMRRIRGRKDSGIAIKAGARKLALAYYNALTKGMAYVEQGTKQYEEQIKRRELISLKKLAKKYNMQLIENQIAA

SEQ ID NO: 375196 - protein, 348 aa, unidentified
MKNVYTIGLDLAKNVFQVHGAEDDGSPVFNRKLRRSEVMKFFHEQPACLVGMEACGSSHYWAREIAKFGHDVRLIPPTYVKAFVKRGKTDAADAEAISEAVTRKTMRFVPIKTADQQAAAMVLKARALLVRQRTQAINALRAHLAELGIIAAGGVAKVEALIRIIRDDEDARLPDPARFALSMLAEQIEALTSQNDKLERAIVTEVKRDEDARRPTSIPGVGPIIAATVKALVPDPGGFKSARHFAAWLGLTPRAHSSGGKERLGKISKMGNPEMRSLLVAGATSVLRIARSDAKASPWLKALLARRPFKVAAVALANKMARIIWALLNKGGIYKKPEMPMTIPATAG

SEQ ID NO: 375197 - protein, 403 aa, unidentified
MRVPAAADKAWAGIDVGKRHHWVCVVDRDGRQLLSARVANDEAGIAAVIGSVTGLAAEITWAVDIIGAPSALLLAVLSQSGQRVRYASGRLVAAMSGAYTGEGKTDPKDAFVIAETARIRRNLPVIGHKGELVCNLSLLTAHRADLIADRVRMINRLRDVLTSVFPALEREFDYSSCKGALVLLTGYACPARIRRTGQARLASWLRQRRVRGYASVAARAITAAQAQRITLPGQDIAADIIAELARNLLALDERVTELDTQIAALFAEHPQAEIIQSMPGFGPVLGATLLVTAGDLAAFPSPGHLAAAAGLVPVPNDSGRRSGNLHKPRRYSRPLRRVFYLSAQTSMMREGPSRDYYLKKRQHAHPHNQAVIALARRRIDVLWALLRDNRTYAATPPAPAKAA

SEQ ID NO: 375198 - protein, 403 aa, unidentified
MEGPLISLDVSKGKSNYRFFENGTDRKGKKGVIRHDIQGFDSIRDEAEKMEERLRIKPSVIFESTGVYSDVVEKYFTDKGFDVYVISPLLSASMRKEGVRPAKNDSLDTLSIAKVFYSKDDLRKCSENDKKAERLREMSYELDMMNRRIRPMKCQFLRLLDKVWPCLDEVSDYSSRFMLDFIIAFGHPENIKTVKGVLSVIRKSEMGTAGRKDKIAQDLFDYCHTHLSAVSKDSSYVELLKRMAIELKAMAKKKSELIDRMAEEARNKDEFARLLTIPAVAKTTALKIMARVGDVSRFRNAEALVAYCGLDPRVYQSGKMTGEHRTITKKGDCILRSTLFLAVKLMVMLYPDTKVARFVAAKAKNGLSYKQAVVAGSAKLARIIYSMLTHHENYVEFNADIVA

SEQ ID NO: 375199 - protein, 455 aa, unidentified
MSNGSRRGLSRGDRRRNEKLARLRAIITRETAVLAFDLASDKQVCALTDPDSRVLARRTARVKAWQLAQTLDWGLAAAAEAGFTSVVVACEPTGHRWRVLDQLAAERGVMLVCVQPLLVSRAREAEDFTRNKNDDTDATIIARLVTELRCYLPERADPAWARLRHLGARRARLVVEVGAARQQVRDLLECAWPAVLDAASKPLDSANWLAAVATGLDRVAATGELSELAQRGWEQFAAAVRAELAPTRWYSVIVRAVFDAAADPAAAAVGVVDQRAGALERVRFALADLAHLRAQIAEVETRMTRVLDTLGLTELVTGIPGVSAVGAATILAEAGDPTRFSSARALVKHAGLCPRANESGNYAGTTSISGRGRPELRLAAWRAVFTALQHNPVLAARHAHLTGRADNPLTDTQARVAVAASLLRQLHAVVVTRTAWDPAVAAGLDRNHQGAAAAA

SEQ ID NO: 375200 - protein, 405 aa, unidentified
MDTNANPLPRVIGFDSHPDTFTAALLQGPTPAAAVTEKVFNQIPLAQLPAWAKKHTTLQDLFVLEASGNSFQVVRVLAALERKALVLESCQMGKLKEAHANNDKISAVRIAKAYLAGTAKEVWVPDAKTQERRDWFHAHQKAVKRTTQMRNRLLSYLSDNGVRLKKGTPLAKGKAAQEQLSKTQDWSPRQWQVIQGMLMELRHADEQRTHWRSLIAQEVLADPQLLSIVRLCGIREMVAFALGAIIGNIHRFAQPKKLVKYIGLNPAFDDSGQEQWRGGIGGHGRKDLRGLLIESAHSILRSKDPLAQWGKKLLRRKGQVKLAVAAMARKLAVAVWYLMMGRWTPLEELDERLVMKVGKILTSVGAGRLKQLGKTRKAFKEEIYGSLRAGRVYLLDLDKKYVPAA

SEQ ID NO: 375201 - protein, 368 aa, unidentified
MGHKSSKLYVGMDVHKESIDIAVADEVGEVRHHGQIGGDMNALWRAVRKLESLGRELVFVYEAGPCGFGVYRGLIGRGHACWVVAPSNTPRRVRDRIKTDRRDSLKLAGLARAGELTPIYVPDVRDEAMRDLVRTREDAVVMQRQARQRLAALLLRNDVRYAGKTAWTAAHRRWIADLKLPQSAQRLAFEEYVQAVEEASARVQRLSQYIEQELATWRWRTVVAALQACRGIQVIHAVRIVAELGDLSRFSHPRRLMAYLGLIPSEDSSGEHRHQGAITKAGNSSARRALVEAAWAYQYTAKVSALIARRQADVPKAALDIAWKAQVRLCARFRRLAARRVNRNKIVVAIARELTGFVWAIAQHVKPV

SEQ ID NO: 375202 - protein, 426 aa, unidentified
MNTNTNIAATIGLDWADQKHDLWIRPAKGAKAQHLRLEQTPEALHEWVAKLRKRFGNRPIAVGIETSRGPVISALMAYDFIVLFPVNPKAMKDYRAAFSVSGAKDDRTDAQLLEEFVRLHRDKLRALEPDTELTRRLAGLVENRRHLVDERTRIVNRLHSTLKTYYPLAETLLGHQMNQPIAADFLARWPDLENLRKAGSEKLRAFCYKHNSRSSVKIEERLAALERATALTTDQAIITPARLLVVALASILKPLHQAIAQLDKEIETAMDQHPDAPIFRSFPAAGPALGPRLLVAFGTNRDRFADADEVAQFYGLAPVVVQSGNSRVVHHRYRCPKFGRQTFHENAGCVAKMEPWAKCYYAQQKRKHDDKHHQACRSLAFKLIRIYFACWKNRTTYSADIYLRALEKQGSPLLKQMQIPTPVHGE

SEQ ID NO: 375203 - protein, 404 aa, unidentified
MNKRVALQEPSIKEVHFMEGERAEVGIDVHKRTYSVTLWSEQRDEVITRWTQPADPSVLIRSMTPFKEHVNRVVYEAGPTGYGLVRALRAEGFRADVIAPSRTPKSTGQEAKSDRLDSRRLSMWSAKKLLKAVRIPTLEEEGDRQVFRTRDDVVAKRRRVKQQIKSFLLQHGIAEPDGLRTWARRGIESLRKTKLSPQLRFSLDFLLADLEHYDSQVQKADAALKSLAATKRHKRASEALQTVGGVGTVTAMAMRTELIAPERFDKGRQVAAMTGLAPLVSGSGETTRQGPLMKCGNARLRKILIEAAWRWVARDDWAAVRYGQLVRNTGDRKKAIAGMARRLVIILWRISVTGEPYRPRPVEEPAPGSRTVRKGCQPGLPDKNIRKRAPSTSRQRPVSVQPPR

SEQ ID NO: 375204 - protein, 385 aa, unidentified
MKSKTFMPTDYDVFGGLDVDKRSISVTFSNHQGFLKSIRMPYRVEHLVNHVRKHYGDKKVAFAYEAGPTGYGLYDRLVAQQYPCLIASPSMIPKAPGQRVKTNRLDSRGLSENLRGGQLKSIHVPSAVYRELRHLTQLRDTFVSEMVGMKQRIKSLLLFEGIEFPAAPAGRQWSFMVKDKLRKLECSQTVRFKLDQLLDSLEFSEKQVLKATREIRRFCRNDAELSQCIGYLMTIPGIGWIVASQLVARIGDWRELQNIRQLGGFLGLVPTEDSTGERTDRGSITHTGDGRLRSKLIQASWSAIRQDGELRDFFRSVCRTHARHLASRVAIVAVARKLSVRISVVLMKQRPYEVREKVQSTPLTQEETSPQGTTRREPEPGEKNS

SEQ ID NO: 375205 - protein, 400 aa, unidentified
MRTVFGIDVSKASSEVAILVNGKRVYGYTMPNDIIGFSRLLEDLKTVSNPEIVFEATGVYSRRLQAFLEEYSYDYTRLNPLEAKKQLDGLRVRKTDKIDAEKLASSQFVLNRKPTYVQEEVYQNLHDLSRFYQNLTEDIVRTKNRLHKVLQIAFPEIENLLSTPTGEQYWNLVSIFPTKHWVLELSEAELKEAIRNSTSKRISENRVGNLTEKLVGLAKQSYSGISKTSPMVEEVKYDAQELIKLTNRREQVLQQLIALAEPLPEYEILLSIPGIAETTATSIIGELGDIRRFKSANQINAFIGIDLKHYESGDFLGQEHITKRGNPYARKILYKCIHNIASASHTNPCHIADFYEKRKRQSQITSTKPHTIASIHRLIRTMYYLIMHNKLYDYTLAQSH

SEQ ID NO: 375206 - protein, 368 aa, unidentified
MIQETFTFHNHLQGFEQLRTVIQRCSEAEGSGQIKAGFESTGHYSGNPEAFLRSTGVELVVFNPLQVNLYRKSLTLRKTKTDKVDAKCIAQLLMTAESNPVSVSYQIQELKALTRHRFRLVSQRSKLKVSISRLVVILFPELPTACHSVTQAAIRALLLELPGAHQIAACRIDRLTNMLTKASKSRYGREKALQIKSLARESIGANSPAASMELQLTLQQLDLLLRQIHKLDKAIQNAVAQTQSPILSIPGIGSTLAGIILAAIGDIRRFRSPDKLQAFAGLKPSTYQSGKFKADNNPMVKRGSSYLRWAFMQAARLAAVHCETFGRYLATKQAQGKHYFVALSHTTKKLIRVIFRILSANEVFVPQT

SEQ ID NO: 375207 - protein, 344 aa, unidentified
MDHFAGLDVSVKETSICIVDDAGKIVREVKVASEPEALLAVLKNPAYHFKRIGLEAGPLSQWLFSALAEAGLPVICVETRHMQAVLKAQINKTDRNDARGIAQMMRAGLYRPVHVKTIRSQKLRMLLTHRKLLQSKAIAIENDLRGTLRNFGLKVGMVGKVKFEARISELVENLPDLAALVEPMLIVRRTLREQIVILHRRLLAIVRDDEVCRRLMTTPGVGPVVALTYRATVDVPARFRKSKAVGAVFGLTCAKYQSGEVDRNGRISRCGDEMMRVMLYEAAQSMLHSKKWSWLKAWAMQVARRRGMKKAIVALARRLAVIMHRIWVDGTEFRWTRERATAAA

SEQ ID NO: 375208 - protein, 416 aa, unidentified
MLFIGDDWAEDHHDLEIEDQDGHRLARSRLPEGLEGITRLHALVAGHAPAVWADLPPEQVAGQVVVGIETDRGPWVTALRAAGYQVFAINPLSAARYRQRHSTSGAKSDAGDAHVLAEIVRLDRDHYRAVAGDSDLADAIKLLARAHQSAVWERTRQVLRMRSTLLEYFPAAVQAFADLAAPDALALLGRAPDPDQAAKLTRSQLVSALRTARRHHVEVKADMLLAVLRAPALRQPGTLQGAYAAVVTGQVGIIAALNEQLAGLHEVMAEHFGRHPAADIYLSQPGFAVVLAARTLGEFGDDEDRFASSRARKNYSGQSPITRASGKKSVVLARYATNRRLGAALHLQAFAALGASPGARAYYDALRARDIGHHAALRQLANRLVGILHGCLKTGTVYNEHTAWAHHNTDTATVAA

SEQ ID NO: 375209 - protein, 417 aa, unidentified
MNSPPETIPIQRYIGIDIHKHYLMIGGQNRHQEWTLRPRQVQMARFRSWAEKNLKPEDEVVVEATSNVWDIYDIVVPLVRKTVVANAYKVRQIAETRVKTDKEDIKRLITLLIADIVPEVWVPPMHVRELRSLISFRWRLTKQITMSKNRLHSVVQRFNLHAPEGGLLTDKNKSWWEEQEFSELTGFQVDRDLEIVEHLEEQKEAIDRKLMELSNTEPWASEMVYLMQIPGFGLIFSMVILSAIGDIKRFPHPKKLVGYAGLGAGVHASGEKYQEKSITKAGRKELRWALVEAAWVAVRSDPYWKAQFIRLKKRMHVNKAIVSIARRMLVSIWYILTKREPYRHFDEETIAYKMLIWSWAMDEKSRGGMTPQQFAKYGLLRLGVGQDLERIERGGALRRIAPTEEILALKPELAPPR

SEQ ID NO: 375210 - protein, 468 aa, unidentified
MTPHKDFFLDPCPPTPPLPQPSVLSEVLQVCHPHAAGIDIGEAEHWVAVPPGCDPQPVRRFGTFTADLDALADWLIDCGITTVAMESTGVYWIPIYEMLEAAGIRVFLVNARHFKIVPGRKSDYNDAQWLQKLHALGLLEGSFRPDEEMCILRSFLRHRAQLIEHRSPHILHMQKALKLMNIQLPEVLSDVTGVTGLAILRAIVAGERRGDVLAKLRRPGCRRTEEDIIHALHGTWRDEHLFVLAQSLDLYDHYTAKVAECDRRIDQQFSAMKPRFDIEGEPPAPPTSRTKKNSNSKNQPAYNVRAHLVRILGIDLVDVIGISESLAQTIISEIGTDMSRFPTSKHFCSWLGLAPHNDISGGKVLRSRVMKVHNRAGQALRQAAQSCSRSHSIFGAFYRARSARSSSEEAVVATAHKIARVIYHMLTCHEAFQPESIRAFDQKRQERDVKHLQTRAKALGFILQPMTV

SEQ ID NO: 375211 - protein, 420 aa, unidentified
MNESTSINIAPGSVLIGLDWAKHKHDYCLKTPVGSYEHGQVEHGQSELRQLIDYLSGRFEGRRISICMEAGRDPLLWLLETYDDVDLYVVNTATAARYRKTFTPSGDKNDQRDAASILDLLERHPEKVRVHKKSSLPARAMHQLSAARRNAVDRRTAVISSFREVLELYYPVAPKLFEDLSTGLALEFIKRWPDPQSLSKARKTTLTDFFHRHRSRSQERIEKRLEQIEQSHPTIEDLTLLEVGRMRISDHISQIQILNESIKRYEKQIEEVFEAHEQSSLFSELPGAAKNLAPRLLAAFSLLEPKDAVEMQTMVGIAPIRVQSGQSTKTFMRQRCPKFIRQSFHEFAGCSVKSSAWAKAYYDHMTKTKRCGAHAAKRALAFKWIRILFACWEKNEPYNEIKYIAALQRRNSPLVKLILT

SEQ ID NO: 375212 - protein, 404 aa, unidentified
MWYAGIDWADAHHDALVIDDAGKQVGSIHVDHSQEGLTKLSNFLEGITGPEKKDQMACILETNHGLLITFLLEAGWHVYPVNPRTVDRRRSASGAKTDTIDAYLLAKTGRADFADLRRLTPDSAIITELKALTRDQDSLIQMQTRLVNQLTACLKAYYPVALKLFTKLQQPTTLTFLQHYPNPHAALAASVEQIQEVLNNAGHPTAQKTATKIFETLHQPHLLADSLTTRTKSRLMLALVAQLQPLIQQIAQYDQEIEDLFLTHADSAMYSSLPRAGKRLAPRLLAEIGDDPSRYSNAASLQALAGTSPVMFASGNYSKAHRRQGCIKPLRNALHQFAWQSTLSEPWAREYYQRKRREGKSHSVAVRALSNIWVRIIFAMREKQQCYHVATFQAARQAHARRAA

SEQ ID NO: 375213 - protein, 369 aa, unidentified
MPHVTSIGLDVHARSVAAAAFNPFTGEVVHRDFGTDAAEIAEWALGFEEPRACYESGPTGFHMARELRALGLDCAVAAVSKMQRPAADARRKNDRRDAEFIARMLATHNIVEVPLPDAAVEAARDLDRALDDATVEYRRARQRLNMFLIRLGHVWDERNADGTRKGSWTRAHWRWISGIGLEGPQRDVLEYYVTAARCAESDRRQLEKKVLALARTDRWRPAVEALSCIKGIDALTAFRLAAEAGSFTRFRTAPAFASWCGLVPSERSSGETERRGGITKTGNRLARTALVESAWHYLTCTPRPKAPAPGADVPAAIRARADDCTARLCRRREALAAAGKSSCKANAAVARELACWVWEIGRRAEGTLG

SEQ ID NO: 375214 - protein, 355 aa, unidentified
MSQEKYIGMDVHQATISVAIRDSSGKLIMECILETKAATILEFIAGLRGTLSVTFEEGTSAAWLHDLLKPHVSHLVVCDPRRNALLKDGSKSDRIDARKLAELLHGNQLHAVYHGEHGLRTLKELGRSYLTITKDLTRVMSRIKALYRSWAIPCSGATVYAPRHRAEWLAKILEPGVRLRAERLYQQLDLLQPVRQEARRNLLAESHQHHAVKLLRQIPSIGPIRAALLVALLQTPHRFRTKRQLWAYSGFAVETHDSGEYRFARGKLVRNRERITVRGLNPNHNHDLKNLFKGAALSASARPGPLCDFYGALVEKGMRPTMARLTLARKIATITLTIWKKGVQFDTKQLHRQAA

SEQ ID NO: 375215 - protein, 375 aa, unidentified
MNNNNTLYVGLDVHKESITVAYAINSESVELMGKIGTSPTDIQNLCKRLRSKSSQVSIVYEAGPCGYGLYRRLVKSGFDCMVCAPSLIPKKPGERVKTDRRDAIRLVRSLRAGDLSAVYVPGIEDEAFRDLARAWASARDDLRHARQRLKSFLLVHGGHYVGRADWGPAHRRWLSKYSFESPWRQLAFDEHRRTIEDRQAQCERLESALKEAVTEWRLYPVVEALQAMRGIQFITAVGLISELGDLTRFEHPRQLMSWFGITPSEYSSGGSRHQGSITKAGNSYARKLLVEAAWSYRHPARISPAIQKRQENLPRPVIDRVWDAQLRLCKRYRKLQAKGKNVNITIVAVARELAGFIWDMGRIAMSVAQQPQCHK

SEQ ID NO: 375216 - protein, 343 aa, unidentified
MDQYVALDVSLRKTSVCVLNSLGGVVTEADVPSEPGALIAFIRARAPHASRIGLESGPTSTWLWHALKAAGLPVICMDARHAHAALSVRPIKSDRNDARGLAEMVRVGWFKEVQVKSLGAHERMALLGVRRRLVDIRVEIDGQIRGILKTFGLVVGSGNKGAFAQRARMLAQDHPILSALVEKLLDVREVAAAKVAVLDKEIRRFVRDDPTLRRFLTVPGVGPVTALAFRATVDEPSRFRRARDVGPYLGLTPRRYQSGETDRQGHISKCGDRFTRTCLYEAANVLLTKVQRWSPLKAWGTRLAKRIGSKKARVALARKIAVILHCIWTDGTEFWWTKEMAAA

SEQ ID NO: 375217 - protein, 375 aa, unidentified
MSKIRFVGLDVHADTIAVAVAEPSGEVRSFGIIANRPESIRKLIHKLSPSQQLRVCYEAGPTGYVLYWQLTGLGVRCEVIAPTLVPVKAGDRVKTDRRDAMKLAHSYRAGDLTPVWVPDAAHEALRDLVRAREAAKRDQLRARHRLGKFLLRSGWQRPEHLKTPWSKPHLEWIKTKVHFAQPAQEVALADYVHEVEHVAMRLERLDRAIQEAARLAPPRMRAVIAALQALRGVAEIAAVTIVAELGEISRFRTPRQLMAYSGLVPSEYSSGSKRRQGSITKTGNAHLRRVIVEAAWAYQFRAWLGGYLLRRQTGLSQEVRDIAWKAQNRLHLRYRKFLARGKNKPQIVTAVGRELLGFIWAIGVKVEAEQQRIAA

SEQ ID NO: 375218 - protein, 424 aa, unidentified
MNFKMQDKQNQLIERISDTHLIVGVDIAQQLHIARAVNFRGIVVGDPLSFENNEEGFVKLLSWIQNLQKLKKLDSTIVGMEPTGHYWINLSKWLDKQNIEVVTVNPHLVKRNKENRDNTQSKSDKKDALVIADMVKNGYYSFVRPTSESFEKLRVLISNRDVIVKRLVMSINQVNRWVDIVFPELRQVFKDVSCKGAIATLRLFPTPDEISSLETLDVMRGWKSLMKRQPGPKKAQLLINLAKSSIGTGQALDAYKFHLEQLLEEYDLAAKQLERVEEQVKDVLNKIPFVKKLLMIKGISEISLAGILGEAGDLSGFSHGNSLLRHAGLHLAEASSGKWKGQIVISKRGRSRLRRFLYLATMSLVMNNPEFKAVHSHNVKVKKIKKMKSIMKLIGKLARIFVGIARSNESYCPSKVQVLIPIAA

SEQ ID NO: 375219 - protein, 343 aa, unidentified
MDHFAGLDVSVKETSICIVDETGRIVGEVKVASEPEALLQVLMNPAYYFKRIGLEAGPLSQWLFSALGEAGLPVICVETRHMQAVLKAQINKTDRNDARGIAQMMRVGLYRPVHVKTLRSQKLRMLLTHRKLLQSKAIAIDNDLRGTLRNFGLKVGMVGKVKFEARIKELVENFPDLAVLVEPLLVVRRVLREQLGILHRRLLAIVRDDDVCRRLMTTPGVGPVVALTYRATVDVPARFRNSKAVGAVFGLTPSKYQSGEINRTGAISRCGDEMMRMMLYEAAQSMLVHSARWSWLKAWAMKIARHRGMKKAIVALARRLAVVMHRIWVDGTEFRWTREVVAA

SEQ ID NO: 375220 - protein, 424 aa, unidentified
MHEEQRWFVGIDWASKEHVVSLLDYGGRKIGQRKVAHGGAGLAEMIAWLLKASGGEPGEIHVAIETPHGPIVEALLERGFNVYSINPKQLDRFRDRFTVAGAKDDSLDADVLGDSLRTDMRLFRKLSVAEPVIVELREWSRINEQLKRERIRLTNRMRDQLWRYYPQILELVDDDLAADWLLALWELVPTPEKAARVRETTIARVLKKHRVRRFDAAHVLSELRKPALTVAQGTIEAATAHIRVAIEQLRFIDRRITDTERQIDRLCEKLAEPVAGEDGVSARGQQLEQRDVAILDSLPGVGRIVLATLLTEAPEALQRRDYHALRTLSGAAPVTRRSGKSRVVLRRYACNRRLRNALHNWARVAIQRDATSRAKYDALRARGRGHARALRSVGDRLLYVACAMLKSGTLFDPSLASRKNAVGS

SEQ ID NO: 375221 - protein, 341 aa, unidentified
MQVTTIGLDIAKNVFQIHAIDSDDKVVVRKQLRRCQVLRFFQELPRCLVGLEACATSHYWARELTKLGHEVRLMPAKDVKAYVKRNKNDAADAEAICEAARRPTMRFVQVKSAEQQAQLMQHRARDLLMHQRTQLINALRSHLAELGIIAPQGREGVKELLAIIADDANTHLPNDARASLIVLAAQLQALQTTIGAIEKRITVQHRATKESKRLQTIPGIGVIGASAIAATVTNPKIFRSGRDFAAWIGLVPRQMSTGGKPKLGPISKQGDRYLRRILVVGAVSVLRRAKHNPQKFPWVARLLARRPFKVVAVALANKMARIAWALMISGKTCRSAWFAAA

SEQ ID NO: 375222 - protein, 319 aa, unidentified
MTPAQVYIGIDVAKRRLDVALWPTGELRTVANDATDINELVTWLQTQRPALIVLEATGGYERAVVASLGAAGLPVVVVNPRQVRDFARAVGRLAKTDSLDATVLARFAEAVRPPPRPLPDAQMELLRALVTRRHQVVEMLTAERQRFASARPAIQGLIQKHIAGLEKELAHLEEELDRTIRQSPLWRAKERLLRSVPGIGPAVAAVLLAEMPELGQLDRRQVAALVGIAPLNRDSGQHRGRRCIWGGRARVRAALYMAALVATRRNPVVKNCYQRLLAAGKAKKVALVACMRKLLTILNAMLRDGTAWQEVPAAHAISA

SEQ ID NO: 375223 - protein, 331 aa, unidentified
MDIKEVIGIDVGKLNNEARIHTNQKSIEFVNTKEGFKKMENWVLKNTDCYEQQIIFAFEHTGLYSHPLSIFLSENEYSFIMIPGLELKRSMGIVRGKNDKIDAKRIALYTYEKREKVKPYQMPEDDIIQIKRLLSLREKLVGQRAGYKSTLGEYKQFLKKKDNKMLFDVHEKMIIELTKQIEKVESKLDDVIKGNNQLKDMYNLITSVKNIGPQTALFLIAYTNGFTRFKTWRKLASYCGIAPFPYQSGISIRGKTKVNHLANKKLKSLLDLCAKSAIQYNAEMKHYYEKRTKEGKAKMSTINIIRNKLLSRVFAVVQRGTPYVNIDKYAA

SEQ ID NO: 375224 - protein, 418 aa, unidentified
MFVYVEAQDVKSFYTFTEDFELLAQYLLKHKVQTVAMEATGVYWAILYDILEEAGIDTWLVDGRQTKQVPGRKTDVKDCQWIQELHSHGLLNRCFVVKDLVKELRSYHRLREDHLRSCVMHINHMQKALTEMNIRIKEVLSQIHGASGMKMIEAILQGERDKNFLLSMCDRRIIKNKKTEVLKALNGRYTKVGLFALQQAYDGYSFYQTKISECDNEIERIIHKMGNGVKDKNLPAKRKPIRHNKPNVKDLGANLIDIFNGKDATVISGITDYTWMQLLSETGTDLSRWPTEKKFTSWLGLAPGQHRSGKMRRTKRKQGRPKAGQIFRQIAQGLLNSKTIAIGAFGRRLRSRKGPAIAIKAMARKLAELYWRVMVKGVDYAEHGIKKYEMQLVAQKQKSVERLAKELNLQLVNLQPVT

SEQ ID NO: 375225 - protein, 403 aa, unidentified
MNSVGIDISKGRSTIAVMRPFGEVVISPFEVRHTDSELSELARQLKILDGETRVVMEATGNYHASVAKLLHDAGLYVSVVNAKLVHDYGNNDLRRVKTDKKDAVKLANYGLDRWLTLPRYIPEEDTRLLLKNCYRQYRQYSKVQTVLKDNLISLLDTVCPNANRLFSSPIRGDGSEKWVDFVAEFWHCRCVSEKSERAFTSKYLRWCRKHGYNFREAKAHTIYAEVSGHIGVMPKSETTKLFVEQAVSQLRATSTALAALKHEMQALASQLPEYPVVMDMFGVGPTLGPQLIAEIGDVRRFYFKKALVAYAGLDAPPNDSGDVTGRHKSMSKIGASSLRRTLFLVMSVYLQTAPLDEPVYQFMDRKRAEGKPYRVYMMASANKFLRIYYATVKAYLESLEHTA

SEQ ID NO: 375226 - protein, 345 aa, unidentified
MQPMYYIGLDVHKQKISYCVKEGGGKVFAEGWIAATRFDLDRWRKTLPQPWSAALEATMFSGWIYDQLKPHAAELKVAHPLMLRAIAAAKKKNDRIDANKICDCLRCDFLPQSYMAPTAIRERRRTLRYRNLLVRQMVQMKIKISTLLMEAGVSYNKSKLHKAGYFRDLLATNPDINESLRSLLRQCWETVVRLSKMETALIHSLQQDRLLVERVERLMSIPGIGPITALTWALEIGEVQRFSSIKKAISYCGLCGDEQRSANSVQRTPISKQRNKHLQTTLIEAAKMAPRYSPTLAMLYEREEQKGNANRATLAVARKLVAYLMAVDRGKTHFLVIDQETRAAA

SEQ ID NO: 375227 - protein, 312 aa, unidentified
MPVKAEPDFVGLDIAKDQLDYCLNDRTEGRCPNTTAGRVLLIQQLRQLAHPRVIAEASGGYEKVVVAELLQAGIEVCVVQPGRVRALAYAEGLLAKTDRIDARLLRRYGQKVELRLTVPTDPATANLRELLEHRRALSTQLVEVEGRLALAGPTLHKLLEVQRAFLEQQLATVEKLIHEHIDQNPDLRAKAERMQQVKGVGPILAATLLAYVPELGKVESAQLSALVGVAPHPKDSGPRSSPRHIRGGRPQVRIVLYMAAVCATRWNPILAAFYRRLRANGKPAPVCLVAVMRKLVCLLNRLIQNPNFALAS

SEQ ID NO: 375228 - protein, 323 aa, unidentified
MAVVVGVDIAKRSFDLAVLQSNGKYRTKGKLSNDQAGFAVFADWLQQHAEPGAWIVMEATGIYHESLAGHFHALGYRIAVLNPAQIARYAQSQLQRSKTDKLDAKLIATYGQRHEDSLRAWHPEPVSIRTLRALTRRLEDLQSLRQMELNRLEISPEKVQDSIRAVLQRLDEQIAWTLEQIKRHIDDDPDLRGKRDLLVSIDGIADKTAALILAELGDIVRFADARAVTAFAGLNPRLQESGLARGHTCISRMGSVRLRSALYLPAVVALTYNPAIRAQAERLKARGKKGKQTVCAAMRKLLTIAYGVLKSGKPFDPALAIAH

SEQ ID NO: 375229 - protein, 337 aa, unidentified
MIIKVLGIDLGKRYFHVHGVDSNGKLVTRKKLKRKELLLFLSNLAPSLIGMEACGGAHYLARKASEYGHTPRLMAAKFVKPYVKSNKNDFLDAEAICEAVQRPNMRFVTPRTPEQQTLGAQVKHRESMVRRRNAAINQVHGFMLEFGIAYPKGRKTILRLREIIGKHEGELPASMVVVLYRIADEYRFLSEQISDLEDEINALVVHDDRGRRLLEVHGVGVITAACLLAWVGDAKQFRSGRDLAAWIGLVPKQSSTGGKTTLLGIGKRGHTRLRCNLIHGARSALQWHIEKPSRWSHWAKTLKATKKPNVVAVAMANKMARMIWVILARNEDFRALA

SEQ ID NO: 375230 - protein, 320 aa, unidentified
MENIALIGIDLGKNSFHIHCQDHRGKAVYRKKFTRPKLIEFLATCPATTIAMEACGGSHFMARKLEELGHFPKLISPQFVRPFVKSNKNDFVDAEAICEAASRPSMRFVQPRTESQQAMRALHRVRESLVQDKVKTTNQMHAFLLEFGISVPRGAAVISRLSTLLEDSSLPLYLSQLLLKLQQHYHYLVEQIKDLESQLKRKLDEDEVGQRLLSIPCVGTLTASTISTEIGDGKQYASSRDFTAATGLVPRQYSTGGRTTLLGISKRGNKRSELCWFSVPGYSYKNWNTSLASWPTGSGSCCVGKATLSSPVLWQTSWPE

SEQ ID NO: 375231 - protein, 428 aa, unidentified
MQRKAAVCLPFILTRGLLWFLPEQSRTNGRDTRVPEALQCKQFELANTPMKSELYLGLDVDKEWIVITVAQWGRNGAVQDLGAISNDLHALEKLLARLRKRYGPEVTIRACYEAGPCGFTIARRLRQLGVECAVVAPSLTPTRAGDRLKTDKRDARKLARLLRAGELTEIYIPEPTDEAIRDLCRARSDAVDDRRRSRHRLKAFLLRHGYRYQGKSAWSAAHERYLRELVLPHPAMKVILEEYLISVQLASERIARCEAAMSDLLGKWRLEPAVRALMAMKGFQTVAAMIVVSELGALDRFTHPRQVMAYLGLVPSEKSSSDRRRQGAITKCGNAHARWLLVECAQHYAAPPKVSKELSRRQQNQSRAVRTLSWKAQNRLHQRYCRLMARRLQRNKAMVAVARELCGFIWELLRTQECYHAPCPSGIK

SEQ ID NO: 375232 - protein, 350 aa, unidentified
MNITTYGLDLAKKVFQVHWVEPDTGEVKRKTLARAELSAFFARRVAGVIAMEACGSAHHWGRVLQALGHEVKLIAAQFVRPFVKTNKTDAADAQAIWEAAQRPQMRFVALKSLEQQAVMGLHRIRAQLVKMRTMQAHQVRGLLYEFGVVVPQGWRALLLEAGPRLADESHTAVPELVRGELAKQLEGLRALSSRIAEVERQMWSWQRRELECERLAEVPGVGRLTATAMVASVGDAKSFRSGREFAAFLGLVPRQAGTGGRVQLLGISKRGDPYLRTLLIHGARTVVSHQGRAGRRPDPWLKDLLSRRPKNVVIVALANKMARTIWALMAHGRTFDRNWSRAAMPAPASS

SEQ ID NO: 375233 - protein, 433 aa, unidentified
MNNNIVVGIDVAMEKHQYQICDTETIYSKGAIQNDIAGGNKLLAKIKEAAKDREVVVGMEATNNYHICLQTFLQNNGLKVIVINPLKTSAYSKIDDFGNKTDPIDAKGICNFLLDNKHKNIKQMNQKYLKLRELCRCWLKLKGDMTRISLRLRSRLIIINPEFESYFQKTLCKSGLWLLEEYLIPENIAELDVDKLQYELRKIAGVFGKKDTAQRIVDLAKNTFGVKNDIEGYLRYIQYHLDEFKFLREKIFEIKKEIRRETEKDYCKVEIEYISSIRGIGTEVAAGILAELGNFDNFEKQSSIVRFAGLTVLRKQSGKSEGKSRMSKQGSSYLRCFLYQAAMGTKLHSATFAAVYANRKLKVKDLNPIDKRIANAKALANIARRILETVYTCNKKKRLFNDKIAFESLKIDDFIRETIAVQFKEQLAKATRQ

SEQ ID NO: 375234 - protein, 418 aa, unidentified
MKSIKAEKIKTINEKTLVVALDIGKKIHYGYFRTPKNQDMKPFPFYNSGQSFNKFWEKLCRFKEKHMLDEVVIGFESTGPYAEPIANYLRKKPVKLVQVNPMHTKRVKELTGNSPNKTDRKDPRVIADVISLGHSLTVVVPEGAAAQLRRLTHARERAMERRTAMNNQIQDLIFVIFPELGDIIKPSTKTGMYLIKNYPGPERIVSIGIETLCNIVRKISRGKFGIDRVEKLYNAAKESVGITEGKESILLETSHLVSNIETENRYIKSLEEQMIVYLDQIPYSHSILSVKGIGNITVAGLIGEVGDFNKFKTISEVMKLAGLDLFEVSSGKHKGRHHISKRGRALMRKLLFFAAINAVKSHGIMHARYHKMLNNGTPKIKALIAVSRKLLRIIFALARDNAQYEANYNRKHDFKLAA

SEQ ID NO: 375235 - protein, 372 aa, unidentified
MEKDSELFVGLDTSKLKISVAVADGERNGEVRFFGDISAEPASVVSMVAKLAKRGAKLHFCYEAGPTGYELYRQIIELGHCCEVVAPSLIPKRPGDRVKTNRRDAVSLARLHRAGELTAVWVPDETHEAIRDLVRAREVANDGLKKARQHLQSFLLRHGRVYAGRSPWTRVHSRWLAIQSFAHPAQNIVLAEYIQAIEDAAVRLDRLTKQVAEAMASWSMGPVVKAYQAMRGVALITAVTFVVEIGDVRRFDTAPQLMAYLGLVPSESSTGDRVRRGGITKAGNVRARRVLVEGAWTYRFPARVSRDIEARLDGLPRSVREIAWKAQIRLCARYRKLIMAGKTKTVAVTAIAREMAAFLWAIGREVSPAAQA

SEQ ID NO: 375236 - protein, 347 aa, unidentified
MEATVDQYIGLDISLKDTAISIRQDGKRIWRGKCPSDPKLLAEMIRKHAPHAKRVVFETGPLSTWFYHALTAEGVPAICIEARHAQKVLNETLNKTDANDADGLAQLAEAGFYKVVRVKAFDSMLTRTLVAARNQLLTISTQLSNQIRGLMKTFGLIVPKGKGRIFDGNVRQLLDGSDGLGKIILPLLEAWRDIRRRAADLDRQLLAAARESRETKLLMTIPGIGAVTAISYVAAIEDPENFKTSRSVGAWLGLTTRRYQSGEVDYDGHISRRGDNHLRGLLYEAATVLLTRTSARNENSLRSWGLKLRERLGFKRAAVAVARKLAVIMHSMLKTGEVFNALAGATA

SEQ ID NO: 375237 - protein, 335 aa, unidentified
MAKDHCDVVAYNADNKICFTKANWAYPHLMEWLANAQPAVVLMESCKGCHVRARDIADLGHDTRLVKGADVKALRNVCQKNDIRDADYIARLLYVPGTKFVFVKNQRQQSLQFLQNEYKSIQELRIQVGNQIHAGLEEFGCPGPKSKKFIQSRMMAHLEKNAELIPDEVMSSFLRRREMWLNLFEQEEEAKKRMEEIAKTDDDAQRIMTVPGVGAQTAVGMLVHIGGDIGRFKNSGQFAASIGLVPKQNSTGGNTTLNGITKCGPKRLRANLVQCGQVILMHADKLKGNFGDWVRKMRDSGMKRGVIACAIAAKIARIIYRLMKDKVDYTPVPSR

SEQ ID NO: 375238 - protein, 356 aa, unidentified
MVMIGTDSHKRTHTVVALDEVGRRLGTKTVRTNAEGHLALVEWATQFADHDEQGVRFALEDCRHLTRRLESDLLAAGQRVLRVPTRLMAGARRSSREPGKSDPIDAEAVALAALRHPDLPVAELDGPAREVKLLSDHRHDLVVQRSRIAQQVRWHLHELDPDLMIPSRGLRRQKVVRELLGELERFDGVVARLARRHLLRCQELTTLINDLERELRDLVRQLAPSLLEIPGCGVLSAAVIVGETAGVHRFRDKDAYARFTGTAPVPVWSGSSAGKVRLNRGGNRSVNCALHMIAVTQARGVGPGRPYLDKQLARGKDRVAALRLLRRRLSDAVFTALRADLRAAQQPASSPLQLAA

SEQ ID NO: 375239 - protein, 379 aa, unidentified
MMVLGADTHKRSHAIAAVNDLTGRVIADLTVRATRRAFEELLVWARGLDDRERVWAIEDCRHVSGALERFLLARGERVVRVPPKLMAGARTLGRERGKSDVIDAVAIARAAIREGVDSLPVAQLAGSELDVRLLVDHRERLVAQRTALINDLRWNLHDLWSEYEIPARALIHRGWQDRVDGRLKRAEQSARVRIARDELRRIRELTRAITTLEAELAPLVAAIAPCLVAERGCGVLTAAKLIGEIAGIGRFATDAKLARTAAAAPIPASSGRTDRHRLDRGGNRQLNCALHRLAVSKGRLDPETAAYLARKQAEGKTRREALRCLKRHLARRVFRLLQPPPSPSPSPAAATAIGKRPPVVAKAGRMIACTTTSGPFTLT

SEQ ID NO: 375240 - protein, 359 aa, unidentified
MAAAEGGLRGEVREYGRIANTPAALDRLAGKLGHEGVWLRFCYEAGPCGYGIQRHLSARGHECVVVAPSLIPKRAGDRVKTDRRDAASLARLHRAGELTAVWVPDPGHEAMRDLVRARLDAVHALRRARQQLSGFLLRHGCHYGRPAWTKLHRRWLAGLKFEQPVHHLVLEDYVQAVEAAEARRDRLTAQIAAMLPDWTLAPVVAALQTMRGMALVNAATLIAELGDLSRFANPRQLMAYLGLVPSEHSSGASVRRGGLTKPAPGGEQGAGNGAARRLLIEAAWCYRFPARVSRELLLRQEEQPKRIREIAWKAQVRLCARYRKLARTGKPANVVTAAIARELAGFVWAIARSVPPAAD

SEQ ID NO: 375241 - protein, 352 aa, unidentified
MGYFAGLDVSLEMTSICIVDADGTVMKEAKVASEPDDLIAFFAQCGMVMKRIGLEAGAPSQWLYGGMAEAGLPVVCIETRHAKAALSAMPNKTDRNDARGIANIMRTGWFRAVHVKTQTAQELRFLLVARQTLVRKLMDIELAIRGMLRSFGLKMGVVSKRDFEARVLELAGDRAMLMRARNPMLAARRALAVEYANLQKGAMDVARDDEVCRRLMTVPGVGPIVALTYRATIDVPSRFRRSKSVGAHLGLTPRAYQSGEVDWTGRVSKSGDAMARAALYEAAHILLVRVKRWSSLKAWGMRLVKNRGHKRAVTALARRMAVLMHRIWVEGTTFLWKTGDGQAIGQKPIPAV

SEQ ID NO: 375242 - protein, 423 aa, unidentified
MGCLDIGSGSPSFLGGAGRWCNGRLWGPLKQSARSLRRYLMARSLAAFLRGFYGKAVVPQTDGVIESESGNGACSKHHRGTTMDHYAGIDVSVEYSSVCVVDGCGKVVREGKVASEPEALIGWFGSLGLSLARIGLEAGPLSQWLFAAMRDAGLAMELLETRHVRNAFKTMPVKTDRKDARGIAELIRLGWFRPVHCKSMAAQETRAILTARKQMQSKLHDVEMSLRGILRGFGLKVGKTTPKQFDGRIRELVGGHPTLEVIAEEMLGARAALLRAFNGFEKRVRAMARHDAKARLLMTTPSVGAIVALTFASAIDDPARFRSSKSVGAHFGMTPKKYQSGETDYSGRISKIGDSCVRTGLYEAAHVMLTRPVKGSALKSWAMRLAKRAGMQKAKVALARKLAVIMHRMLVEGKPFNLATPAA

SEQ ID NO: 375243 - protein, 388 aa, unidentified
MEVQTVDTLPPVAADHDPVRCLLAIELSKKSWIVAITTALSDKISRYTLDGCDWKGLLELMERVRTRVAREVGRPVEMISCYEAGYDGFWLHRLLERQGVRSHVIDPASVQVDRRARRAKTDHIDAKRLLRSLMAYLRGEPKVWSVLCVPSVAEEDDRRLHRERDRLIAERGQHVNRIKGLCAIHGIYDYEPMRRDRMLRLEQLHTGDGRELPPRLKAEIARELQRLELILGMLKEIEAERDAIALTENVSAHTNAKKIQNLVKLKAIGAEIATVLTGEVFYRPFNNRHQVASYVGLTPSPFQSGPKCRDQGISKAGNPKARSTMIELAWLWLRHQPDSPLSIWFQERVGTLKGRIRRITIVAVARKLLIALWRYLETGMVPTGAVLN

SEQ ID NO: 375244 - protein, 374 aa, unidentified
MHGVDENGKAVLIQPKVPRDKWLELVAQLPPCLIGMEACSGAHHWARQFRQYGHPVKLMAPKFVTPYRMSGKRGKNDAADAAALCEAVRRPQMRYVPVKEEHPQIILCLHRTRQGFVEERTATYNRLRGLIAEFGVVLPQKVTCLRREIGAHLEDLPGYANACVGDLLAHADPLDERIEAYDWLIAQAARDDARSQRLMQLPGIGPNTANARLASIGGGHDFQNGRQVAAWIGLTPGQYSSGGKTRLGRITQAGDNYLRSLLVMGARRPQWAGREAGPLQPLGEESGGTTRLLAHRGGDRRQERPAGVGGTEIRRGFSAQTRRCLGRPTPQKASAEERKELTRNSPGRSPPATNHRCTARVDVKRVGPAPGGPE

SEQ ID NO: 375245 - protein, 403 aa, unidentified
MNMNAVGIDVSKGKSMVAILRSYGEIISKPFEVKHTVSGIRSLIEQIQSIDGESRIVMEHTGRYYEPLVRELSKADLFVSAINPKLIKDFGDNSLRKVKSDKADAVKIARYTLDSWTELRQYSLMDEIRNQLKTMNRQFDFYMKHKTAMKNNLISILDQTYPGANTYFDSPAREDGSQKWVDFSATYWHVDCVRKLSLNAFIDHYQKWCKRRKYNFSRSKAVEIYEASKELVSILPKDDLTKLIIKQAVEQLNTASQTVEQLPTMMNEAASKLPEYPVVMAMKGVGKSLGPQLMAEIGDVSRFTHKGALTAFAGVDPGVNESGSYEQKSVPASKRGSSTLRKTLFQVMDVLIKTKPQDDPVYLFMDKKRAQGKPYYVYMTAGANKFLRIYYGRVKEYLSSLPE

SEQ ID NO: 375246 - protein, 346 aa, unidentified
MPIVGGLDIHRKQITFDYLDTETGQVQRGQISPADRLHLRAWLARFAGREDVAFAVEGCAGWRYVAEELAAAGIAAHLAEPADTAFARGRKRHAKTDRTDARHLRVLLAEGRLPECWIPPARILECRALLETYNDLRRERTAWAQRIHAVLFHQGAPALGEGALRTEKGVTALREVAAAHLSPAGQLQVATALEVIDALEARLHVVRHQLTDAARHLAGARALAARLYGVGPVTALALTCWLGGAGRFSSSRQAVRFAGLDITVHSSDRKGPPGRLSRQGPPVLRWAVYEAGKAHARTSAPDHRYYAQVKDRKNSKRACLSEARKILRQAHHILAELGDDALAPAA

SEQ ID NO: 375247 - protein, 346 aa, unidentified
MKIKTIGIDLAKNVFQIHGVDSSGKPIFKKQLRRSQMATFFVKIEPCLIGMEACASAHFWARKLSAMGHTVKLMAPQYVKPYVKTNKSDAADAEAICEAVTRSNMRFVPIKNIEQQTVLSLHRVRQGFVKARTAMANQIRGLMAEFGLEIPVGIGYISSRVPDLIEDANNELTGSFRLLIQGLLDHFKTLETQVVTIEEQIVLWHKQSEDSRRLAEVPGIGPLTATALIASIGDVKNFKSGRQVASWLGLVPRQHSTGGKQNLLGISKRGDSYLRTLLIHGARVVIYHAERKLKLDQTSRWINELVQRRNKNVAAVALANKNARTVWALLAHDRRYESNRQELVLQ

SEQ ID NO: 375248 - protein, 372 aa, unidentified
MRFYTQEHRFYAGVDLHARTLHLCVLDHAGTVVFDKNLPSNPDVFLRAVAPFRDGLIVGVECMFAWYWLADLCAQEEIGFVLGHALYMKAIHGGKAKNDQIDAAKIARLLRGGTFPLAYAYPKGMRETRDLLRRRTYLVRKRAELLTHVQILNAQYNLAPFSKKLGYAANREELKVAERFADPSVQKSAAVDLALIDRLDELIGEVELYLTRTAKVDDVQTYHRLRTIPGVGPVLALVLLYEMHDVQRFATAGQFLSYARLVRCAHESAGKKLGSGGKKIGNAHLRWAFGEAACLFLRASERAKQWKQKQAAQRGEGKALAILAARLGRAVYQLLRKREAFDEERFWQGGGRGRAATGSSSLSPKEVRDAGS

SEQ ID NO: 375249 - protein, 423 aa, unidentified
MSQNQPEIQYAAFLAIDWADQKHVWSLQEANSSTRLRGEVDHMPEAVETWVAQMSQRFPGRPIAVAVEQSRGALVFLLSKYEQLHIFPVPPAMTANLRKAFYSSGAKNDPSDADLLLDLLQRHREKLRRLSPDTEATRRIQNLVEERRKLVDEKTAQSNRLEAHLKIYFPQIPRWFGDVDIPLVCALLERWPTLEALQKARLDTLRSFFRKQHSRKEELIESRIKAIGEAMPALKDRAVVEAKVAVVKVLVQLIQVLHEGIEGLNRQIQEAAEAHPDFFIFDSLPGAGAVMAPRLLAAFGSQRERYQNAAEVQIFSGIAPVSESSGKSSWVHFRFACSKFLRQSFHEWAALSITQSQWARAYYELQRRRGKKHHAAVRALAFKWIRIIYRCWKEQVAYDENVYLAALAKHNSPLVAATKAVAL

SEQ ID NO: 375250 - protein, 421 aa, unidentified
MKESVRIVGFDCAEDEHSVVLLDAAGGFEKGVDVINERGQIQESLAELMLAAGPEAQLVVVVESKRSHGRIVADVAVELGCEVWQVNTVALNHFRDLEGQPRKDDEWDAYLGARMVYLRMGGCRKAIETTEEERVLSRLTRAYSRVTNDRKRQVARLRAVLLELAPEMLHAAWEGPQPDSKAMLYLLERWPGFEGIERAQLRSIEKILHQCRYGSKATHVAKLIREMARGIVVAAEERSAVTLELSLLVRQILVCNESADQVYAEIARRVERHPVGQKLLEMHGIGPVIAGVLVSELLPVARTSTEPKCATYAGVTPLSRKSGKSLDKDRLTQGVNKRVLHALYTSSVVAIKNSAVDRAYYRKKLRDYAGHPKPHVAAFIALSRQRHKLIHKVMTTDAWYDKEILIARHLERLEQARAAAA

SEQ ID NO: 375251 - protein, 316 aa, unidentified
MQSALFIGVDVAKDNVVVACSQETFASRTLLNKTSALKAFLVSLPPQSSIAMEATGSYHQNLADLAHRLGLRVYVLNPRDLYHYAKAMGLRAKTDRVDAALIARFLASEGARLRPYHPPTAAQRQVDHLLRRRAKIVSLKTALQLTCAEAPSIRAETASVLKSFAALLKKIDRQLDELQQAMPGRTQQLERLQTIPGVGALTACWLTNLLDRIRFRNSDALVAFAGMDPRPCDSGQKRGRRRLSKRGPAEGRRLLFNAAMAASRCTAWKEVYTRCRQQGWASTEAFMILARKILRIALAMYKTQTNFDSAFIGKRA

SEQ ID NO: 375252 - protein, 403 aa, unidentified
MYSSFVGIDIGKWNHQAAFLEVSGKETARSLAFQNTSEGFQSLSESLAPFDKGQTVIGLEATGHYWLALFSFLVDNGWTVKVINPMQSDALRNMNIRKAKTDRKDCVVIADVLRFGRYTETVLPDEDLLQLRELSRCRVAHVELLGDLKRRALGILDRIFPEFASCFSTVFGAAPTELLQECTDPEELADYDVDKLIKLLEKESRGRHSREKAEELKAKASRSVGTRFGRDALKFELKMLLEQLDFIKGQVKEFDKFLKKLMKNHELIYTIPGISVTLGSAILGEIGDVKRFGTPQQLQAFAGMDPSVTQSGNFQGTQGKMSKRGSPYLRRAVYLAANAARRFDPVFKEFYDRMIARGKHPKQALAAVGTKLLRVIHAVMTSQKPYNPQKLLPPAARISQFNP

SEQ ID NO: 375253 - protein, 377 aa, unidentified
MYRIIKIGMDVHSKNYTLCAMEPVIGEEDRVFANIQVTADYKNVLMFIEDLKLKLGPDNEYDIVCGYEAGCLGYSLYNQLTAAGVKCVILAPTTMLTQQGKRVKTDARDALMIAQCLSYGGYRAVYIPTEEDDSVKEYLRMRDDHKDALKKIKQQINALCLRHGYHYEGTKWTIKHVAWLRKLELSPLYRETLNEYMASYDEQTAKIERFDKRIEEIALQEQYQEKTKRLGCFLGIKTHTALSLIVETGDFTRFAKGNTYAAFLGLAPGERSSGEKISRTGISKAGNSHLRLLLIEAARGICKGAVGHKSKELRTRQNGNPAEVIGYADKANTRLRSRYYKFIRHGKAKNVAVAAVARELACFVWGMMTDNISLKTA

SEQ ID NO: 375254 - protein, 334 aa, unidentified
MENIALIGIDLGKNSFHIHCQDHRGKAVYRKKFTRPKLIEFLATCPATTIAMEACGGSHFMARKLEELGHFPKLISPQFVRPFVKSNKNDFVDAEAICEAASRPSMRFVQPRTESQQAMRALHRVRESLVQDKVKTTNQMHAFLLEFGISVPRGAAVISRLSTLLEDSSLPLYLSQLLLKLQQHYHYLVEQIKDLESQLKRKLDEDEVGQRLLSIPCVGTLTASTISTEIGDGKQYASSRDFAAATGLVPRQYSTGGRTTLLGISKRGNKKIRTLLVQCAVVFIQKLEHQSGKLADWVRELLCRKSNFVVTCALANKLARIAWALTARQQTYEA

SEQ ID NO: 375255 - protein, 341 aa, unidentified
MTIVMGLDQHRAQITAEWIDTETGEISRGRVAPAHRESVRRFLARFYGQQLEVALEATTGWRFVVEELRRVGAKVHLAEPAETSALRGKKKHAKTDRADAKHLRELLMAGRLPECWIAPDHVLDLRAQVRLRHTLVDDRGEWQQRIHAVLYHHGIPRRKDLDLLTAAGREWLAQLPLPQTAREQVDVGLKTIDALDCQIPPIDKQLRAYARRQTGCKALIAAHYGIGELTAVAILAELGNCTRFSSSRLAVRYSGLDITVYQSDQRRAPGHLSRQGPPVLRWALYEAAQAAAREGSPDRDYYLQAAERLGHNRACLALARKLLKRAYHTLRALGEDALQPA

SEQ ID NO: 375256 - protein, 355 aa, unidentified
MNSRKYIAMDVHQATISIAVRDDAGKLVMESTVETKATTILDFIRGVGGSLWVTFEEGASAAWLHDLLKPHVTKVIVCDPRKNALLKKGNKNDRMDARKLSDLLRTGLLSPVYHGDSGVRTLRELARSYLTVTKDLTRVMNRLKGLYRSWGIPCAGQTVYSTGHRNEWLAKLSEEGVRRRAEWLYHQLDSLAPLRREIRRELVREGQKHRASQLLEQIPRFGPVRVALLIALLQTPHRFRTKRQLWAYCGLALETRISGEYRITKGQIERSKRLPALRGLNDNYNRDLKYLFKSAATHAGAASDPWSGLYEALLRKGLKPHLARLTVARKIAAVVLKIWKKGGRFDQEQLKRPAA

SEQ ID NO: 375257 - protein, 464 aa, unidentified
MKTRLQNQKKKKEKVNLDSLPLLEPNAAGIDIAHREHWCAVPSDRCEKPVRPFGTFTEDLEKMADWLQECGIQTVAMESTGVYWIAAFQVLERRGFKVLLVNARHVKNVSGRKSDILDCQWIQRLHSYGLLNASFRPADSMCVLRSYLRYRDDLVGARAVQCQHMQKALQQMNVQLHQVLSDVTGLSGLRIIEAILAGQRDVKKLAALADRRVHASQATIQKALQGDYRAEHLFVLQSALDLYQSYERKIHLCDEQIIAQLAQLPARVDLAEKPLPPRKPGRPWLQDMVAGTDLREELYRRTGVDLTAIEGIGVLTAQVVISEIGLDMKRWPSEKHFCSWVGLCPDNRISGGKVLSSHTRHVLNRVADALRIAASTLQRSNTALGAFYRRMRARLGAASAITATAHKLARIIYRLLKHGELYVRQGMEAYENKYRERLLHNLKKTAASFGFELTPTQQLPPSVS

SEQ ID NO: 375258 - protein, 474 aa, unidentified
MSCRRLVGIDLGIASAHAVRVLDGEGTTLAKRKAVPTVESLSVIESSALEGTPAGTRLEVVIEPTGPAWLPIAVFFMNRGHVVYRVSSTESADLRRYLSRHAKTNGIDADTLARIPLFHPGGVQPLELPGADTASLDRRVRAAYRLTRQVALHKTRIKALVRQVMPMSPLPGKITQADLAVLERWADPNMLVRAGRKRMAAVIVKASNNHNGIERADEWLAAANAAIELYADNPAVAFADVAAEIATEVRLLRAIEHELATHTTERETAYGKVDPGGLARSLPGVSEVGGPALVAKLGDAARFTHAKQVRSFAGLAPKASETGDTDRKGQSLSKAGPSLLRTTLVIAADTARKQDPQLARIYYVQMVERGKNHIGALSVVAATLAERAWTVMRRQTPYVIRDIDGTPVSQEQAAAIIAEHWTVPAEVRARRRNKKGGKAPQAITTGSQARGDLPQTASSTRQTPQVNTRTRRIA

SEQ ID NO: 375259 - protein, 349 aa, unidentified
MIARSDAACFVGVDLHKDTLTACVLRGRDREVSYTKVACKCRDRIRSFFASLPQPSVVAIETVGFYRWLWTELEPLAGQLVLCDARGARALAGRRIKTDREDALNVALLLADGRLPLAWAPPENVQVLRNWTRHRNGLTRQHAKVLHHVKSTLNRLNFPGPVRLDAAALQRYLLAGVERFTADDLTMLWQHQRRLVEIEQDRAQSERRISELMRAPEFTRLRELLESVPGVGLVTAATVIAEIGDFGRFPDSKAIGRYAGLTPTVYASGNSSRLGHISKTGAPDLRWVLQQAAWTAIRCDAGFKKTWLRIAKTAGKKAAAVAVARKILVLMWTLQRKDEPYKSREPVAV

SEQ ID NO: 375260 - protein, 333 aa, unidentified
MNFKWFIGIDVSKSTLDCCVMFQEQKLFHKQIANTPKSIKEYLKFLKKELPNFLIQDALFCMEHTGIYNIHLLEILDNVKASVWLESAIHIIKSMGVQRGKSDVVDAHRIAKFAYKNRDEVKLWTPKREVITELKSLTTLRSRLLNCKKQLNSVFKNENHISKEEFKLIKQNCFKSLKAIENDIVKVELKIQEIIKSDKRLNELFNIITSVDGVGKITATQILITTNEFKSINAAKKFACYAGVAPFEYSSGSSVRGRTRVSKMANKQMKQLLHMAALSSISMKGELKQYYDRKVEDGKNKMSVLNAIRNKIILRIFACVNNNKMYEKNYEYC

SEQ ID NO: 375261 - protein, 316 aa, unidentified
MSETPIFVGIDVAKAQLAMALRPTGERWCVANDEASITALVGQLHAVQPTLIVLEATGGYQRAVVAALAAAGLPIVVANPRQTRDFANATGLLAKTDALDARALAHFAEAVRPTPRPLPEAQTADLQALLTRRRQLVAMRTAELNRLSMAPGRLRAEIEAHIAWLDQRLAALDDDLDTTLRASPVWREREALYRSVPGIGPVCARTLVLDLPELGTLTRQRIAALVGVAPFNRDSGTLRGHRTIWGGRAHVRATLYMGTLTAVRHNAVLKAFYERLVAAGKAKKVALTACMRKLLTILNAMVKHQTPWQPREAIIA

SEQ ID NO: 375262 - protein, 321 aa, unidentified
MNAPIYCGIDVAKRNFVIGFSHQKKTKTETNNAKGIQHTLDYLSQFNVALITLEATGGLEIPVAKALARAGYRVFIANPLKASEFAKSQTRAKTDAKDAVNLAFYGLTCELKGEVEHQLYVPLSEQEEQLEALVVRRRQLVDMRVAELNRLQQSHETQLDNIQQHIEMLDKLIAELDKDIDDQSKHFSDKADLISDIKGVGKNCVAVMMSSLPELGKLSSKRIASLVGVIPHPQESGQWKGKSFCHGGRAIVRNALYMAALSAIRFEPVFKAFYTRLVAKGKAKKVAIMACMRKLLTIMNALVRRNEKWDATRYLSTESVG

SEQ ID NO: 375263 - protein, 337 aa, unidentified
MKYSGIDLHSNNSVVTVTDEDDRVVAERRLPNELGKIVGFLSPWREELVGVVVESTFNWYWLVDGLQGAGFKVHLANTTAIKKYDGLKHSGDEADARYLAHLLRLGILPTGTILPPAQRAVRDLARKRMQLVRSRTTHVLAVENIMARQHGARMSGNQVKSLTAEAIERMPLPAEVTLAVKANVAVIATLSTQIDILEKRLQHLLGERAEYRLLTSVPGIGRVLAATILLETGPIERFASVGNYASYARCVDSQRTSNGKKKGEGNTKNGNKYLAWAFVEAANFALRYCAEARRFYERKKAKANRVVAIKALAHKLARACFHILSQGKPFDVTRCFA

SEQ ID NO: 375264 - protein, 363 aa, unidentified
MNTTTVGVDLAKLIFAVCMLDGNGRVLLRRELRREAFAEWLAQLPAGAIVAMEACSGAHYWARRCLALGLQPRLIAAQFVTPFRKSRRSKNDRNDAEAIATAARQGNMRFVAVKTVDQQARLSWHRVREGYKEESLKVTNRIRGLLAEFGVVLAKSHVALRRALVDILEREDLPREFVEMLQGLREHWQQIQARLRMCDQRIETHALGDERCRRVRKLTGVGALTADAVVASVGNGCDFKHGRQMSAWIGLVPQQDSSGGHQRLGPISCSGDAYLRTLLIQGARSSVQAANRVTPEKATPEQIWIRQLATRLSFGKLLVAVANKHARQIWAMLARGEAYDPHAWLRHPMTQRSATRKSMQGAA

SEQ ID NO: 375265 - protein, 357 aa, unidentified
MKKTHYKKAYLGFDVSGKTIEIFGRTAESDEGVSIQITNSKVAIKKFIEALPCPEKTVIAMETGTDSPWMSDYLSSFGCEVIVAHARDLALIWGSTAKCDRRDAEMLARLACFDQKLLHPVKHQDIEKRDDLCVIKARDTLVRVKITLISTVRNLMRSHGTDVSTLTPENFSQLAPKLLPDELRPALEGLLIQICYIRQEIKKYDRIIAKLCNKYPETKKIRQIKGVGPITALAFLLVIGDSQRFSSAERLAAYLGLVPKRDQSGEVDRQLGITKQGNTFVRRYLIQGANYILGHFGEDCDLKRYGERIAARGGKIAKKKATVAVARKLSGLIYMLWKNDVVYDPNYKQNQRQAKTV

SEQ ID NO: 375266 - protein, 393 aa, unidentified
MNGRSVENDGEARFGGVDWSWERHAVCIVDAAGAVIERFEAEHQAAGLQAMVRRLRRAGALRVAIERGDGPVVDALLAAGLEVVVVSSRQVKALRLRYGTAGNKDDRFDAFVLADVLRSDGHRLASLTPDSSATIGLRTLVRARKDLVKHRIGLGNQLRANLLGAFPGAVGLFAEIDSPISLTFLTRFCCTERAVWLSDKRMAAWLAGVGYCGRQTPEQLMAHLRQAPAGLTGAAGAACATVTEQLVATLVELRARIDLLDDRIAETLALHHDAAVFTSLPRAGTNRAALLLAEIGDCRARFPDDGALAAAAGVAPSTRASGKRHHVAFRHSCDKKLREALIDFAADSRQASPWAADIYRRARDRGARHPHAIRILARAWLRVIWRAWIDRRP

SEQ ID NO: 375267 - protein, 351 aa, unidentified
MNQNIILTTDYHDENCVIRWFDESNGKEQLHKIATCSKLLSDLVARAEAIAKPRGGHVVWIQESTTGWARVEALLGRRVEFHLANVVQMPLPPKGKRRKTDKIDTARIQREYRNGELPLAHRPPAWWRQVRRLVALRENLVNRRTALRNWMNRYFAHETWEDRTGFWSQKGRARLQKLAEVAPRWDRLVMETKLAELDQLIVQVESVEAAMHGVFKQWPQAQRLDKIAGIGVISATSIVARIGPINRFASPEQLIAYAGLAPGVQQSDGTRRHGRIGGGGTDRHLRHYLIEATMWARHIPRYHATYERTCQRRGARIGRLMVARMMLRSIWRILRKGETFDPKAPGAGKMK

SEQ ID NO: 375268 - protein, 419 aa, unidentified
MAQKKDSPIVTIMHPNCCGLDVHKESISACLLTVSESGEDQFEIREFGTFTKDLIKLRAWLLEIGCPIVAMESTGVYWRPVHNVLEGFTEVVLVNARHLKNVPGRKTDISDCKWLAGLLRCGLVKASFIPEKQVRQWRELDRLRKSHVETVGDYKRRVHKLFETANVKIDSVVSDLFGVTGRNLINLLSDERVDLTIDDIEKCAKGSLRKKVEELYDSVTGFFDDHHRFQLRGMMRIISELEREILSITERLRELMKPHQDLLNRLDEVPGINETAAQAVLGNIGITMKEFASDGSLSRWAGLCPGNNQSADKRKSGRTPVRSHPFKKIMVEIAWAAVKKKYSHYREKYYRLKSRLGPKKAIVAIANRIAKAVYRIIKYGESYREIGEGFLDKKNRHRKIDNLRRQAKKLGYILVSARG

SEQ ID NO: 375269 - protein, 451 aa, unidentified
MMKSVAPIFEETRRNVAGLDIAGHADHYVCGPRRDDGEYDVAHFGTSTPELHKMLAWLKERRVVSVAMESTSVYWIPVADLLETEGIEAILVDTREVKMVPGRKSDVKDCQWLQRLHSCGLLRGGFRPPEAVSAIRTLLREKESLVAIRAQCVLQMQKSCDQMNVRIHHAVSDIDGKTGMDIVGAIVGGQRNPAALAKLRDKRCKQTEAQITAHLTGTWREEHLFTLEQAYRTLVFIDARIAEYEDKVDSMYKRLADACSNPPPPPPDAKPSAKDRRHAEEKRNLQRIAGFDMTGIPGIGYDTAAVVVSELGADFSRFPSECHFASYIGLAPSLGKSAGKNVRQRKRCKNTSRAGRALRMAASTLYKSGTEMGAFFRSVARRTDRKTAVKATARRMAHIIYRGVRFGAAYVDKGAEAFEARAREKAVRTVKKLIKTHGINELELKTSLTAA

SEQ ID NO: 375270 - protein, 348 aa, unidentified
MTRVADRVVVGGVDTHKEIHVAAAVDGAGRILGTKEFATTPAGHKAMLRWWARKGRLARVGVEGTGAYGAGLARFLAEEGVDIVEVDRPNRQLRRRRGKSDPVDAEAAARAALSGEASGAPKARNGNVEMIRALRVARRSAIKARAQATNQMHALVATAPDSVREPLRGLSSIRLVERCARFRPGDVDTPEAAMKLALLELARRHQSLTQEIKRLDGHLDRLVAATSPGLVARFGVSTDTAGALLVAAGDNPGRLRSESSFAALCGVSPVQCSSGQLQRHRLNRGGDRAANQALWRIVMVRLAHDPRTRHYMEMKRKQGRSKKEVIRCLKRYVAREVFADLSRVPDLT

SEQ ID NO: 375271 - protein, 328 aa, unidentified
MHARLQSETLNHREYKMQSYNNFVGIDIGKFNFVVAVYGQKLTKEYENTSSGISQFIREFKKELPSSLCVLEPTGGYEIRLLFSLCEEGFAVHRAHTRKVKNFIRSFGNEAKTDTLDAKSLSQYGFERSNSLDLFKPQSKEGSKLYELVQRRRDLKQMLIAEKNRIKSPRTEFIRDRIEASINFFSIEVDLITQEIDKLMEQDVSLKEKKETLKSIPGIGNIIANELLVLLPELGQLTRREIASLVGLSPISKDSGKSKGYRRTGHGREGIKPILFLAAMAARNSKSRLRTFYEDLLNRGKNKMVAITALMRKIIVIANARLKTMSTT

SEQ ID NO: 375272 - protein, 285 aa, unidentified
MLYLAIDQHRKQLTVNLRDEQGDVVLKRQVSTEWTRVRIFLEEVQTRSLPEGGFVTIVEVCGFNDWLLKLLVEYGCRETVLVQPGKRTKNKTDRRDANALGELLWTNRQRLLAGKKVQNVRRVVPPSEGDSEDRQLTALRQRLGRLRTRTINKVQHLLLKHNLQQECPTKGLQTQRARKWLAKLPLSTIDRLELDQLLVQWELWDKQLEELEERIRQRHAENKTSLIVGTVPGAGAYGSLALACRIGSIERFPHARSLAHYWGLTPRSRNSGDCAKKLGRGGQQA

SEQ ID NO: 375273 - protein, 422 aa, unidentified
MEEITEDAAELVARVAGLDIGKASLVCCVRTPHDSRPGRRRQQVRTFATTTGQLRELRAWLAAEGVTRCVMEATSVYWKPPFYLLEDAVAECWLVNAREVKNVPGRPKTDKLDAVWLARLAEQGMVRPSFVPPVWQRELRDLCRYRRTLTQERTREKQRVEKLLEDTQIKLPAVISDIFGVSGRAMLGALVAGQRDPRVLAQLARASMRGKISVLAEALTGQFRDHHGYLLAMMLGRIDALTAQIEQLTTRIGEAIAPFAHQVAQLDEIPGIGATGAQEIIAEIGVDMARFPTPGHLVSWAKFAPTARQSAGKSKPGSTGKGNPWLGGALGEAVIGAARTKTFLGARYHRLARRRGKRRALVAVGNSILTIAHRLLSDPAARFSDLGPDWHDRIAPLRRKRQLIAELERLSGKKVLLQDAAA

SEQ ID NO: 375274 - protein, 479 aa, unidentified
MQGTTLRTTMPGIISCGMDVHRDHIDVCVRIGDGSEDGVLHERAFSTMRKALFELRDWLISLNCFKVLMESTGVFWMPIYWILEEVNGLNVGVGNSRDLKNSPGRPKKDKEDARWLSRLCMFGLVLKSFVVARPFRALREYTRYHKKLIQERARHINRIEKLLQMNGFKLSSVLSDITGVSGIRLLTKLVEKGNLHVADISAVLDKRCKHTPEEIECAINGDMKLSSRLLLKMQLEKLKKHDSEICEIYEHMLDLSEEYAGAIYIISSIPGMSTLSAIYIIAEIGTDLSSFKTANHLAAWAGLAPKDNESGGKARPSKTQKGNQYVRSLLIQCAWAATNARGARLSLWYWRNMSRLGKKKAITAVARKLLCYIYAMLKSGTLYDNSLDVAYANNIGAKKLEAAQKIVGSRTRNAPPFDQCGTNNVAQLAYDRDNHHKESEQTTKLQADSDKQPKNGIKSPNGTATPKKRGRPRKTAAPS

SEQ ID NO: 375275 - protein, 388 aa, unidentified
MNFIGIDISKYKHDCFILSDLGEVINEGFSFTNNAEGFAMLHAELECYNKGGVRIGFESTGNYSINLKLFLERNGYDYMEINPVLIKEYIKGQSLRRTKTDKQDARFIAGYLIEKEYRPNPTSFYQNFALKQLTRLRGSLVSQRSRYLVQLTNVLDCIFPEFKPLFGNKFSVTALYIISNYPSAEAIANMNSRSFDILRRKSHGKFSMDKFIKLKSLAKNTVGVHDKCYSIELETLLDLYSQLDSKIDEVETQIAEIIEDLNPPTLSITGVGTISAAIILAELGGVSRFENPDKILAFAGLEPGHFQSGTVEYNGHMVKHGSTPLRCALMNCSRSIRLHNETFAAYYQKKIDEGKPHCVALSHVAKKLVRLIYALETKGVIFDIAKLR

SEQ ID NO: 375276 - protein, 397 aa, unidentified
MKGFCISLDVSKGSSFYQGFKGIDEPITKPKKIEHNLEGFKELLKLKEIIRKEYDSDCIVIFESTGIYHKALQNYLDEHDFKYTIISPLLSAKVRKSDIRGTKTDAKDCASIAKVFYLKELRIYSKTDEIYSDLKEKCRYYDFLVDEMKRWKVEFRRLLDIIYPGFDKIFEDLYIDYVQALLLEYPHPEIIRKKRLDTIAKFIEKHTCHKESFSLKQAQALKEYAENCASGCSYKSYLVSQFDTVIHTLNSQIKHLETTLDEIIEIAKKLPNYEIIRSIPGIADNLASRILAEIGDIDRFDNASQLVAYAGIDPQIYQSGQISGLHLKISKKGNKKLRCLLYLAITCMIRTNRDTKIVEFYKRKKADGLPARSALVASMNKLLRIIHSLCKNGCLFK

SEQ ID NO: 375277 - protein, 332 aa, unidentified
MHNCIGIDVSKATINVHISKNNQDLVLENNLKSFKSLFSKLKKIYKKDIKNIIFIFEPTGSYSEALRKYCSEKQIKCFIINPKQFSNYAKALGEEVKNDVNDARVLSKALRLARDGEVKVPVFNEDVEHIKELMSFYKFTKKQETQQKNHLESLTSKDGDKFSIKELEKLIEESKKTGFKILEQVQTLIDSTDEYRVAYENIISIKGVGQIAAIALFHLFLKYPDANQRQITSLAGLNPVYKQSGTSVQSNSKISKTGSSFYRGVLFMAVLSATRYDKNFKAFYERLKSNGKHTTLAQMAVMRKIIITAHSLYKNNKKYDENFNTKEDDVEE

SEQ ID NO: 375278 - protein, 407 aa, unidentified
MAVYIGIDWSAAKHDVCVLNENGSVIATTVLPHTADGLLKLEALRQKLGVVPAECLIGIETAHTLVIDFLWARDYSHIYVIPPNVVKSTRGRYRQSGARTDTSDALLVADLLRTDRARLHPWRPDSLLTQQLRNRVGLVSHLTQTAVRLSNRLSAVLMRYYPAGLTIFSGLQTQIALQFLLAYPTPTAADALTFEQFKAFATEQRYPHPQKLAAAFARLKEAHPVSAAQTITVFEAEMQQLAHLLLEVVQAKCSHVRELQLLFQQHPDFSIFSSLPGAGDILAPALLTKFGDDRQRFPSAESVQALAGTCPVTEQSGKRRVISFRTACDHDFRAIVQQWAKASLKHSVWAQAYWQQTRPQCRSDSHGYRCLGNRWLAIAWKLWQTRTPYDEAYHLQQRLKRQRPRTA

SEQ ID NO: 375279 - protein, 345 aa, unidentified
MAEVSTIGLDIAKAVFHAHGADARGQMVFSRRLTRAKLLEFFAAQPRCVVALEACGGAHHWAREIASLGHEVKLIPPAYVKPFVKRNKNDAVDAEAICEAAQRPSMRYAAIKTEAQQAAGMVFRTRDLLVRQRTQLINAIRGHLTEFGWVAPKGPSHISVLASLLDEGEEIGASLPEAARTMFLVMTGQLEQLNEQVALLDKEIDRRAREDEAARRLMTIPGIGPITATALLALAPPVEGFARGRDFAAWLGLTPRQHSTGGKERLGSISKMGERTLRRLLIIGSSAVVLQASKRGTPRGSWLEQMLARKPRMLVTVALANKTARIIWAVLTKGEDYKAPVAAAA

SEQ ID NO: 375280 - protein, 432 aa, unidentified
MRSTKMAKQNEETIAAYIGLDWADSEHEVTMLVVETGEVESRKLKQESEALAAWVQSLRERFSGRKVAIAIEQRKGALIYALMCYDFLILYPVNPKTLARFREAFYTSGAKSDPGDSGLLLDLIRLHRDKLRPWVPEDADTRLLQMLVEERRALVDEGTRLTNRLKSTLKQYFPQALEWAGELDSRQALDFLTRWPTLESIRKAGAVAVEKFYRRHSIRNQDKIEQRVKAIKEARALTTDRAVLGASKMKALAIVRQLRALGKSIAEMEARIQELFEQHRDHEVFSSFPCAKKVLGPRLLAAFGGDRTRYESALELQTFSGIAPVTRSSGKSKTIHKRMACPKFLRQTFHEYAAQSIKKAGWARVYYRRHRDKGVKHHAAVRALAYKWIRIMFRCWQEQEPYDEAKYIASLKRRSSPLVSGLPPAPGSLVEV

SEQ ID NO: 375281 - protein, 399 aa, unidentified
MLAVGIDISKSKSVAAILNQDGSMHTSPFEFHHTQPELDAFIKYILNSKQSATILMENTGHYHYPVLKAFREAGLPVCMVNAYQIKKFGDMDLRKAKTDKKDAVRIARYALEKSYSLVPYTSMEQKYEDLRFLARQYNQRMLTLKTNKVFLLNILDETMPGITNILPLTTRTPETSLSVLFINRFKSYDRIEKMGKSRFLDAFEKIARKSRNRQTKTYGLAIYEAALRNITTRGENEYTLAAQDQCLELVCESQKAADSIILKMQTLAETLPEYAVLRSMAGVGDRLGPLILAEIGDIRRFHSGKALNAYAGNDAPPYQSGIFESHNRHISKRGNAALRKYCFEVMQALKLTRPQDDPVYLFLLKKEQEGKPYNVAKMAGVDKFLRIYYARSMETLKQQ

SEQ ID NO: 375282 - protein, 344 aa, unidentified
MEHYVGLDVSLKETAVCVIDGEGNRVWQGKCASNPEDMETVIRQRAPLAVRIALETGPLCVWHWHALRAVDLPVVCIHARHAKAALMMQLNKTDPNDAFGLAQIVRCGWYREVEVKSIDSHRVRLLLSARSRFVEMRTTLYNQIRGLVKTFGIVLGPGKGGTFVREVEAKMPADPVIETVIGSLLSIWKTVTLQLQKLDREIGAIARKSTVHQNLMTVPGIGAITAAAYVATIDSPERFSRAKDVGAYLGLTPRRYQSGEVDRTGRISKCGDSMLRSLLFEAAHALLTRTRRKSALRNWGLALAKKTGPAKAKVAVARKLAVIMHRMWAEGTAFRTFEDVPVAA

SEQ ID NO: 375283 - protein, 304 aa, unidentified
MNGIGIDVSKRQLDVGTTDGETLQVSNNLAGFSELDVWLRKHPAAQIVLEATGGYEQPVLDFLHKAGHPVVRANALRARRLAQGMGHIAKTDRLDAYALAQMAALVKLPPYQPLQPWQQRMREFVRARRQAMEALTIARQQQEMVGDRELRRLLQANINRQQALVERLGKQIAEQVAQQPQLAVLKSMKGVGPALQAVLASYLPELGRISGKRIASLVGVAPMSHDSGTMRGKRSIQGGRAEIRQVLYMAAMSAMRHEPRLRDFYQSLRARGKEGKVAIVAVMRKMLVILNARVRDAESGPIPA

SEQ ID NO: 375284 - protein, 369 aa, unidentified
MEKGTTYVALDDSKRKIVAGILRPGDAQPELREIANDPRQIRHLFERLKREGPVTACYEAGVSGYDLYRQLRALGLACDVIAPALTPRRPGQRIKTDRRDAAKLVRLFRAGELTAIHVPAEAEEAVRDLVRCRDDIRRDVLRWRHRVLKLLARHGRTYLTGKNWSQAHWRWIREQRFDLPPLQRAFEATMFALEQALARQAELDKELEAVAATAPYRESVGWLRCFRGIDTLSAIILLAEVVDFQRFRRPRELMAYLGLVPSEYSSGESQRHGALTKAGNSHARRVLVEAAWHYRHRPTIGRALASRSHGQPDEIVSQAWRAQQRLHRRYRHLVAHGKRTPVAVAAVARELVGFIWAAMTRHESRRAAA

SEQ ID NO: 375285 - protein, 364 aa, unidentified
MEEVSIIGVDLAKNVFQLHGASADGAVLFRKKLSRPQFALFMGEQPPCIVAMEACAGAHHWAREMTRHGHQVRLIAPHYVKPFVKRQKNDVADAEAIVEAALRPTMRFVEPKTAEQQARAVVFRTREQLLKQRTEAINALRAHLYEFGHVAPVGIGYLPRLADVVDDPKSGLPELARDICRLALEQIGHMTARIDALKAKIATMSKEATMPRQLQTMPPLGHACMPCRAAGVGPIGALVIETFAPPMDQFRRGRDFAAWLGLVPRQQSSGGKQRLGKTSKMGQRDIRRLLITGAPLMPVNMHCRAVDVGDPLGFAQRRACEPLARADVGAKAANGCCCGVGQHPSHTCTHVLPGSEWRVASGRC

SEQ ID NO: 375286 - protein, 359 aa, unidentified
MASVSIAHDPAAGVTVGVDTHGEVHVAAAFTSDLGRPLGHLEIPTTPAGYGRLLRWAQAFGDETPRFGVEGTGAYGAGLAGHLRGAGCTVIEINRPNRQTRHARGKSDPIDAEAAARAVLSGEASSVPKSNEDHVGMIRTLRVARRSAIQSTTQISNQIKGLIVTAPAELREQLRSLGGRALIETLAALRPGSITTPMAASKMTLRSLARRHQYLGVEIATLNAELERLTQEAAPQLCAIKGIGPDVAGALLVAVGDNPDRLRSEASFAHLCGVAPLPASSGKTTGRHRLNRGGNRQANNALWRIVIGRLRWHQPTKDYVARRTAEGLSKKEIIRCLKRYVAREVFHVLVAQTELAEAA

SEQ ID NO: 375287 - protein, 438 aa, unidentified
MSNKVIFNLDELFISVGIDVGADFSWMSIALPNQQFVGKPYKILHNSIDSLTTAVSKIKEAEELYSLESRIFLESTGIYHYPLFCYLRDKGFNCSVINPIITKNSTNINIRKVHNDRFDSKKAALVGLKPDLKVSLMPSDLALNCRNLCREYFDLMDNRSAYVNKLQGELRMAFPQYLGIFSKVTINTSLTLLETYTSPSTFLEADKQEIIDIIRSTARFGLTYAQNKYNAIIQAATDANQFGYIIDSNIKRIHLYISFIRKYDEEINSILELLHELVDANEDADFVKQIHLIETFKGAGFLSAVSIMGEIGDFSAFSKPKQLFAYFGLDPAVKQSGKFEGTKVQMSKRGSAIARRVIHTLTLQSISISRNGEAKNSVLREYYLKKCDSKPKLVAMGAVSHKVCNMIFAILRDNKPFKIIAPQEHIKQYNAAKCDIAA

SEQ ID NO: 375288 - protein, 302 aa, unidentified
MEILAIDVSKANLEVFDGSVSREVKNCVGEIEALLLSHPNAVVVCEPTGRYHYFLVETAVRLDHTVYLVNPREAKNYKESMSFRAKTDKLDAHYLYQYVMRNSDLLRPYRPASKELAQLRELLGRRQGVVESRTALTQSLGKELSASEQALLSTFDAVLRDIEAKMDAIASQYPTYELVRSIPGVGRISGCALVYVLESKSFENSDQLIAFLGLDVRIRQSGKFRGLEKLSKRGDPILRFLICFAGRGLLHSLLGRDKRKRLEDQGRKFPERLVIAARKILRVAFQLHKTQTAFQAAKWTWA

SEQ ID NO: 375289 - protein, 402 aa, unidentified
MKKFNAKEMRLETASALETIHQFQAGRKYPAFIGLDVHKESIVVAVARAGREAAESRREIANKPKAVAKLVGRLSEEFGGAVLLFCYEAGPCGYGLYRQLLGLGHDCQVVAPSLIPRKPGERIKTDRRDARKLAPSLRSGDLTAVWVPDEEQEAMRDLTRARADFKAQEHKARQQLNAYVLRHGHGWPSGKTRWTKTHYNWLEALRFAHDWQQVVLQEYIDAAKAASQRVADIAAQMERVLPQWSLAPVVASLVALRGIDKLAAMVLLAELGDISRFDSPKQLMAFLGLVPSEHTTGGRRRQGAITKTGNRHARRMLVESAWSYRFPARQTAHLKRKAGSACEEAKGIAWKAQKRLCGRYRTLTRAGKDTKLVCVAIARELVGFVWDIACREMAKVQPQTAR

SEQ ID NO: 375290 - protein, 350 aa, unidentified
MDTTTQPLASIGIDIGKEVFHVVGFGTDGKIAFRRKIKRLALLETFRRLPPSVVGMEACLISAHFVSRALRQLGHQPRIIPAIYVKPFVKGQKNDYNDAEAIAEAALRPNLRVVREKTQDQLDLQALHRVRSRLVSRRTGTINQIRAFLIEQGIAVRTGAGALRNSLLAILENRQDEISSRMRGLIVGLYEDWICLDQRIEALTGEIDQIGEKEANCRRLMSVPGIGPLITAVVAAIGTGEAFERGRDFAAWLGLVPRQYSTGGRSILGRISKRGSKYLRTLFIQAANVILMRPHNWQRFSFGTWLQNAAPRLHRNKLATALANKLARIAWSVLRNETIFDAARREVMAI

SEQ ID NO: 375291 - protein, 450 aa, unidentified
MREPREIEDREDELAVARVAAVDVAKASAVVCTRVPREGGPGRFVTRVWPVGATTNEIIELAAHLAGQRVEKVVLESTSDYWRPFFYLMEAAGLHVELVNARDVKNAPGRPKTDRLDAVWLAKLAGWGMLRPSFVPPAEIRQLRDYTRLRTDLTRERTRHWQRLEKLLEDALIKVTAVASRIDTMSVRDMVEALIAGQRDPRKLADLARGRMKAKRAALIEALTGRFDAHHGELAAILLAQIDGLTAQIGALGARIEELIAAIPGAQGVDADGTTGPQAGRGPDAAVLPAIDRLQEIPGISRHAAQVIIAEIGLDMTRFPTAGRLVSWARLCPRTIQSGASERPGKTAKGNPYLKGVLGDAAAAAGKTTTFPGQRYRRLARRRGKLKALVAVARTLLVIIWHLLADRAARFEDLGDDYYLNTIDTDRRARSHIRQLQALGFTVTITPAAA

SEQ ID NO: 375292 - protein, 386 aa, unidentified
MQASTVDTPTAGHIGTIFVTIELSQKTWLVTLHSPDRDRMSRHKLEGGDHAGLLALIESIRARAALKLGSAPKVVSCYEAGYDGFWLHRLLMTAGITNYVFDPSSIAVDQRARRVKTDRIDGEKMLRTLMAYLRGEPRVVRIVRVPPPEQEDARRASRERGRLTKEQTAHTTRIKALLRLLGIAVGNPRRRDWLTWLVKQRDWQGQAVPPRIMAEIEREHARLMLVREQLDALTQASAQADLAPAAVQMAQRSKLLLRLKCLGPAFATTLTHEVFYKDFRNRREVASYFGLTPSPWQSGGIDRDQGISKAGNPRARCAAIELAWLWLRHQPDSKLTQEYRRRTLDASKRIKRVAIVALARKLIVALWRYLTTGLVPEGAMLKTAEV

SEQ ID NO: 375293 - protein, 405 aa, unidentified
MTVMIGVDPHKGSHTAVVLDDSERPLGELRVRSAVNQVERLLGWAAPFGERTWAIEGTGGLGYLLAQQLVAAGERVVDVQPKLAARVRLLATGASNKNDPNNARSVAVAALRSPAVPEVHVEDHAAVMKVWAKRHRDLSRQHNRVACRLHSVLCDLVPGGIAGEISPAQATRLLDELEPVGAVAAARHELAVELVADLDRLRVQRRAARQRVATSVTASKTTLTELFGVGPIVAATVIGDVGDVGRFPSRDHFAAYNGTAPIEVSSGGRRKVFRLSRRGNRRLNHAIHMAAVTQIRFRHTDGRAYYDRKIAEGHSGKEAIRALKRRISDALYARLRHDVEQAAGRSRGPGGQSRNDTVACVTGSHPEHRLFDEATPGPDLTIRPTATPGRSPRPKAASRRARTAP

SEQ ID NO: 375294 - protein, 341 aa, unidentified
MNATTYAADIAKNVLQVHWVDALTGEVCRKKLSRAKFSEFFASRQPARIAMEACGGAHHWGRTLGAMGHEIELLPAKQVRAFVRGNKDDAADARAIWLAAQHGDIRRVQVKSTEQQAVQFLHRTRSHWISVRTATVNALRSMLYEFGVVLPQGKNLGLKVLGEQRAAIDASLPATVQRLVDAQMHALRDLEQQVQAVEAEIELVQKHSDTAKRLRQIPGVGLLGATALAAMLGKDATGWRNAREFSSCLGLPPKHTGTGGKVRMGGMSKRGDPYVRTLLISGARSLMSQKTPPQWIAKLLSRRPPNVVAVAVANKLARTAWALIANARHYDPLWRPEILPS

SEQ ID NO: 375295 - protein, 474 aa, unidentified
MANRNKARPDLTDLPMLPHESIYIGVDIGKFKHVAGFVSKTLLERHQHFEHCPAFLFEQSREGFRAFVERIRAYCPLEQCFIVMEQTGHYHRPLLQYLLELDLPVYVMHVQSREATILKTDKRDALGLANHLYNQLALGVQVSNKLQVIRRAVPPSEAAAQLKGLMRHRYELVNEATQRKNKLTAICDEIFPEFTHVFKNPNLPTALDLREKFPTPQAVATASLTALREVRRRNRPSEVELHLLQQLATQSIGTKDLARQRGLLLEQELLIKELRLIQTHLERLEGEICQIVEQCREGKILLSIPPISPLAAATLIAGIGHIANFEDAGHLKSYFGWAPKRAQTGITFDRTSLTLGGSRELKRVMYLVAWNAIKAETEWASLYKRLVPRLCTYDERMQVYKGKGKAVGHVIGRLITLIYALLKQDDETLSRLAPGTPPPEPVLYDPELHRHHRTGHYQPLRKKLPENRIVLVQP

SEQ ID NO: 375296 - protein, 424 aa, unidentified
MKYKMQDKQNQLIERISDQHLVVGVDIAQQFHVARAVNYRGIVIGNPLTFENDETGFARLQEWMNELKDSKGYRTEIVGMEPTGHYWLNLSKWLYDHEIDVVTVNPHLVKKNKENRDNTQSKSDKKDALVIADMVKNGYYSFIRPTSEAFETLRVLMSNRDVIVKRLVSSVNQINRWVDIVFPELREVFKDVKGKGAITTLRLFPTPVELRSMKAEDIIDGWKTLMKRQPGLKKAKKLIQLAKRTVGTTQALDAYKLHLEQLLEEFDLATSQLQKVEEEAMNALKKITFANRILGIKGITEITLGGIIGEAGDLSKFAHGNSLLRHAGLNLAEASSGKWKGQIVISKRGRSRLRRNLFLATMSLVANNPEFKELHAYNVQVKKMKKMKSIMKLVGKFARILVGIARNNEPYCPEKMQPLASIAA

SEQ ID NO: 375297 - protein, 354 aa, unidentified
MIIFGIDLGSTSGKPSKSYISVLDTETGEIQRTSCPTTADALLSQLGAHRPHRVVVEQTIGTGWFVDMCRGANIPEVQVVNPRDPAWRNRTSKTDRQDADLLAHLSTTGQVRTVHVPEDHIRQWRILIDYRHELVQRRTRIKNRIKSLLRNRGLPTGSLWNREGMASLRAMAKPIDTCSVHDLWRGQLFTEYNQLKEMEEHLGSITECLDRLVEACVPAREMANLPGIGPRTAEAVVATIDDPLRFPDRKKVGGYLGVVPRVRQSGAVARYGGITKAGDALVRTMLVQAVHSAIRRQEGWLYDLYLKTHRPDESSPNRAALATVRRACVILWAKFRDHRRANPQQPLFPERVAA

SEQ ID NO: 375298 - protein, 430 aa, unidentified
MRDNYNMKSEKFGKINDKTLVGGIDVAKDIHEVKWVNWRGEQIGKGLRFNNNRQDFEKLIRQAKQVQEKIGAEKIIMAMEPTGVYGFALEEYLQQIGIDVLIVNGRDVKRTSEVLGNDSSKNDARDARIIGHLVSLGCYSESTRHKEGPYCELDILLRRRASEKEDLIRFTNRLHKELAMLFPEYGVFKNTGLSMGVLTLFKEFGNLEAIIQAGEEGIYACWRKHRTNGYGKSEAKQMHQMAKNSIGIRQTSQAVTYTMRAYIDDYLRSLKNLEAINQLIEQQLAEIPQAKRLMAIDGIGPIITAEILAGIGDIHNFTSPKQILKLAGLAPVTNESGKHKGKDKLSKMGRKRLKTAFYQVGICLIANNDAFKQIYHHYTQERANPLIKMKGVIVIANKFIRVIYAMLKNGTAYDEQRMLADIQRDDQTAA

SEQ ID NO: 375299 - protein, 320 aa, unidentified
MSTKKAKSFIGIDVSKQLLEVAAHESDYQLRCANKTSGFAELIGELTRLRPVLIVLEATGGLEIPVTAALQAAALPVVVINPRQVRDFAKATGQLAKTDRLDARVLAHFAAAIKPPLRPIKSANELELDALVGRRGQLVEILTAEKNRRGSATTDTVREEIDQHIDWLDQRIAALDKQLKGLLKTSAVWQSNDAILQSVPGIGPVVSVSMLAELPELGTLNRQRISKLVGVAPLNRDSGPQRGSRHIYGGRKRVRSMLYMATLSATRFNPVIKAFYQRLLAKHKPFKVALTACMRKLLAIINVMIRDQTHWKTEVEPLSA

SEQ ID NO: 375300 - protein, 312 aa, unidentified
MKGEEPSVGIDVSKSVLDVSLYPSGKTWQVEYSPLGITALAEELADLGPAVVVVEATGGLEMSLTAALSVAGLPVAVVNPKRVRDFARATGRLAKTDKLDAQVLAQFGAMVRPPIRSLPDATRQELRALVTRRQQLLEMITAEKNRLRRTTPGVRHRIEVNIQFLREQLKELDRDLGDFLKSSPLWQEEARLLRSVPGIGPVVTATLIARLPELGSLNCKQVAALVGVAPFNRDSGAFRGKRKVWGGRGALRTALYMATLVATRYNSVLQAFYQRLCAAGKPKKVALVACMRKLLVILNSMIKHHRTWNPAS

SEQ ID NO: 375301 - protein, 347 aa, unidentified
MLHAGLDLSRRRLDYCLLSEEGERVEVASVPPDADGLRGFARGVRERHGPLRVRASIESMNGARFVHDALERCGWEVEVADAQKVKGLAPLACKTDRIDAWVLGELSRRDLVPAIWLPSFEQRAERERARWRLYLVRKRSSLKHRIHAQLLAFGHTCPVSDLFGRQGRELLASLDFPDPWRGGVLAAVRMIDELDAQIAGIDRELKALGADHPYIPTLMSAPGIAWVLGYTIAAEIGDIHRFSSPGKLCGYTGLCPRVYQSGSTDRRGHLTHAGPKYLRWALMEAATHACRHPYRARYQRNKARLGRQRGAKVAQVDIARRLAEAIWHMLTRNQPFAPAGATPALAA

SEQ ID NO: 375302 - protein, 373 aa, unidentified
MNYTTVYVGMDVHKETFSLCCYTNEKEQAEYPQKVDGHYSKVLNYLEAMRFHYGDDAMFLCGYEAGCLGFTLYHQLTSHNVKCIILAPTTMPKPAGKKKVKTDKRDAALIARCLAHRDYSPVHIPTEQEEQVKEYIRMRQDHKLALKKVKQQILAFCLRHNYRYDATKSHWTQAHLKWLRSLKPEGLYQEVLAEYLSTYDQLTDKLERLDKRIEELAAGPVYQEKVRHMSCFLGIKTQTALSTLVEVGDFKRFANAQQFASYLGLTPGEDSSGGDQNRLGITKAGNSHVRTLLIEAAQSYTRGRIGHKSVTLKARQYGNPTEVITYADKANERLRRKYYRMVLNEGKKANVAKTAVARELACFIWGIMTGNIQ

SEQ ID NO: 375303 - protein, 450 aa, unidentified
MQPEVEEIPDAEHELLVEWVAAIDVAKASGKVCVRLPGRAGRRVSRVWDVAATSGAVSELAEQLAGQGIEKVTVESTSDYWRIWYYLLEAAGLSVQLVNARDVKNVPGRAKTDKLDAVWLAKLTEKGLLRPSFVPPAPIRRLRDYTRLRTDLTHDRSRQVQRLEKLLEDALIKLSAVATDIMGVSGRAMIEALIGGQRDPKVLAGLARGRMKTKRSALVAALDGRFDDHHAELARMLLDQIDALSTQIDTLSARIDELLVALPDAWPADPRPDGPTPGPSIDTVSHTAPGAVGRLDEIPGIGPNAAQVILAEIGLDMSRFPTAAHLVSWAKLCPRTIQSGPATRAGKTGKGNPYLKGALGDAAAAAAKTDTFLGERYRRIVKRRGKLKALVAVARSILTIVWQLLSDPTARFHDLGPDYHTRHIATERRMRNHIAQLTAMGFRVTLEPAA

SEQ ID NO: 375304 - protein, 308 aa, unidentified
MPIEVCYVGVDIAKSEFVVDLSGHSRSFPQTAEGHEDLLATLPIGAHVVCEATGGYERGLVAALHRKGTRLSVVLPRRVRSFAVAQGMLAKTDRIDAVLLSAYGRACEPRLHIEIPPKLQELSSLVRARQAIVERISLEDNYAEHLVGALLVRQANQREKVLRKQLDELDRAIQVLIASDTQLAKKCARLEQVDGVGKVTAWTMLSEMPELGTLAKGEAGALVGVAPHPHESGQRRGPRHIAGGRAAARRVLYMAAISASQHNAVLKLFYQRLRANGKGGKVALVAVMRKLVELFNLILKDDTFLLAG

SEQ ID NO: 375305 - protein, 390 aa, unidentified
MEVRLENTASATTNNDPAHCFVAIELSKSSWVLGFQTPLAKQTSRYQVKACDAKALLELIERVRSRMARELGRPVEVMSCYEAGYDGFWLHRVLEAHGIHNHVLDPASLQVNRRARRPKTDRIDADRMVRALIRHLRGEPEACSVIRVPSPEQEDARRLHRERDRLIAERVAHVNRVKGLCATQGIYDYEPLRSDRLKRLEKLRTGDGRALAPRLKAEIMREIKRLEVVLEMISTVEAERDAILTEKKSTHLNADKIKMLAKLKAIGAEFSTTLVGEVFYREFANRRQLGSYVGLASSPFCSGSLDRDQGISKAGNPKARVMMIELAWTWLRYQPESALSRWFRERVGNLKGRPRRIAIVAMARKLLVALWRYLQTGVVPTGAELKAQSN

SEQ ID NO: 375306 - protein, 402 aa, unidentified
MTIYAGLDVSDKTTHICAVDADGKVKWRDVCATDPEVLAKTLMKRFPDLSRVVLETGSLSAFLYHGLVERGVPAVCICARHAKGVLSARVNKSDVHDAEGLAQLARTGWFKSVHIKGSATHLDRTQLKVRDQLIKSHHAMVNQLRGLLKLFGLRMGKATTPGKRAERLEALFAQKPELRITLAPPVAAIAGLEEQMKVPLRGIKARAEADPVCQRLMSVPSVGPIIALSYKSSIEDPGRFARGEDVGAYAGLVPRRSQSGERDYKGRISKAARLLDEIREALRNGNYHPEPVRQRLIPKPGKPGQFRPLGIPTLIDRVVQSALKLILEPIFEADFYPTSYGFRRGRSTHDALERIQKCLHPSSRGSSVYRFVVEGDIKGCFTAIDHHVMMERVRRLRLVTVR

SEQ ID NO: 375307 - protein, 402 aa, unidentified
MNAVGIDVSKGKSMVAIMRPFGEIVSAPFEIKHTASDINSLVELINSVEGESRIVMEHTGRYYEVLAHQLSEANLFVSAINPKLIKDFDNDSLRKVKSDKADAVKIARYALDKWQNLKQYSVMDELRNQLKTMNRQFGFYMKHKTAMKNNLIGILDQTYPGVNTYFDSPARSDGSQKWVDFASTYWHVDCVRKMSLNAFIDHYQNWCKRKKYNFSQSKAEEIYGKAKELVPVLPKDNITKLIIKQAVNQLNIASATVESLRTLMNETASQLPEYPVVMAMKGVGSSLGPQLMAEIGDVSRFTHKGAITAFAGVDPGVNESGSYEQKSVPTSKRGSSDLRKTLFQVMDVLIKTHPQDDPVYQFIDRKRAQGKPYYVYMTAGANKFLRIYYGRVKEYLSSLPES

SEQ ID NO: 375308 - protein, 445 aa, unidentified
MSESMISPTAEREWAAFAAIDWADQKHFWRLVPAGSQRQEQGELENTPEAVEAWASSLQQSFGGRPIAVILEQSRGALVYMLTKYPHLVLFPVHSTTAAQYRETFAPSGAKADPSDTASLLDLLLRHRERLHPLQPDTVETRLLHFLVEERRQTVDERTRESNRLTDCLKLYFPQILRWFDDVSVPLIGDLLERWPNLEQLQRTHPGTLRKFFQEHHCRSEERIEERITAIYQATAATTDPAVLEGCAAIARGLVALLKTLRSNIAALDRRIAELVAEHPDGALFASLPGAGDALVPRLMVAFGTRRDRYQSAYEVQCYSGIAPVTEASGRTQWVHFRFAAPKFLRQTFHEFASHSIGQSTWARAYYDYLRNDKKKDHHAAVRSLAFKWIRIIYRCWQDGKPYDEEIYLRSLRRRGSLLGRAFGSATVDGWQTVAGFQRFSENKA

SEQ ID NO: 375309 - protein, 313 aa, unidentified
MPQTGDVVGIDVSADRLDVVVLESGEVLAFPNSAEGWTALGMALTGRPVKAIGIEPTAGYERGVVRFLQAAGLPVRMVSGYRLRRFAQACGVAAKNDKLDAWMIARFVQAVPCREPRQDPAAEALAELVGVRRQLSEEKVRLLNQAGHHQDALVKRMTGRRLKRIEADILLLDRRLAEQIQANPVMADKERLLRSMKGVGPVLANTLLALMPELGELTARQIAALAGVAPYDHDSGKLKGKRSIWGGRASVRNVAYMAALSASRANPALKAFHQRLRDCGKAPKVALIAVVRKMLTTLNAMLRDNKPWTQLTA

SEQ ID NO: 375310 - protein, 501 aa, unidentified
MEIVYQCCTGLDIHKKDVKACLITTGQDGEVHKEIRTYPTKTQDLLQMRDWLKEAGCSHIAMESTGVYWKPIYNMLEGHFGLLVVNPQYVKALRGHKTDVKDAEWIADLFRLGMLKASFIPSAEQRELRELTRYRTRLVEERAREVNRLQKTLEDTNIKLGDVVSDVMGKAARMILQAMANGETDPHRLASFAVGRVRASQELLERALTGKVSAHHRFMLGEQLKQIENLDAAIKRVSQHIADRFRESDTDPTKEKPESAEPKEERRETTKQTQESLSSCRSDHMVGHSSIDGQVSTAGSREPRAQGRQAQKDEDVQRAIQATSTGTCCRAAELLSWHQAMELLLSIPGISKRAAQAILAEIGLNMGQFPSARHLASWAGVCPGNNESAGKRFSGKTRQGNPWLRRILVQAAHAAAHSKKSYLAVQYRRIASRRGAKRAAMAVAHSILVIIYHVLLEQKPYQDLGSNFFDERDRQAVEKQLVRRLERLGYQVDLQPLSLAG

SEQ ID NO: 375311 - protein, 368 aa, unidentified
MFMRSNYKVGCDAHKHYSLFAVLDGDGRLMQRTRVNHLAGAIRAFLSQFPEGTSVALETVGNWYWIVDEIEEAGCIPLLAHAAKAKSMMAYVHKTDKLDADGLGTLLHLGTLPAVWIPPAELRDERELPRTRMTFSKVRTMLKNRIHSTLAKYALSLDTDSDIFTAKWRPQLMQLLDHLPPETHRCVDQELELLDLLQAHIRRLEERILEKVRLTPTIRLVMTIPGPAEILSIVIDREVGSIDRFPAPKHLASYSGLVPRVKASGGKVHYGRMIKQANNYLKWAFIEAANVIVRQRHHSNWRGKYVVRLFERIRQRKGHAVAVGATARYLAEAAFWVLKKGEPYREPVLRRPAGLKSPASPKQGQARA

SEQ ID NO: 375312 - protein, 316 aa, unidentified
MNEKEIFIGIDVSKDNLEVFVKPLGQRPAFAQTEDGLLLMIDFVQSFSPRLVVLEATGGLERAAVGALGAKGLPVVVINPRQIRDFAKAKGILAKTDKLDAEVIAEFAEAIRPEIRPLKPQETQELEALVTRRRQVVQMITAEKERLPTAVRATKKDIEAHIQWLEKRRDKLNKDLERKIQNTPLWRAKDEILQSPKGVGPVLSHMLLAKMPELGTLNRKQAGKLVGVAPLNRDSGKFRGKRTVWGGRAEIRSVLYMATMSAIRSNPVIRVFYQRLIEAGKPHKVAITACMRKLLTILNAMVKNNTPWRAPQAEKA

SEQ ID NO: 375313 - protein, 468 aa, unidentified
MWKAGSPRPRQQTKVMNQSPPRRIKHVGLDVHATSHAVAVAESGTEEVRYHGEIPGTPEAVDKILRKLGGEGVELRVCYEAGPTGYGLARHLLARGIACGVVAPGLIPRKGGERVKTNRLDAQRLARLSRAGELTFVHVPDAGDEAIRDLVRARMSAVEDLRRQRQRLLGLFLRQGRRYPGTGRNWTRAHMAYIAGMEWEREEHRFLCQEMLQAIDTEQARVDRLAAALESRLPGWRWASVVGALRCLRGFDTVSAMTMVAEVGDFSRFESPEQLSAYMGLVPGEDSTGSRRVQGSITKTGNAACRRTLVEAAHHYRCAPAVGEKLRGRQEGQPEAVVAHAWGAQVRLCGRFAHLKGQHKKTVVVVTAVARELAGFVWAVAMLAMGKGLPERRHRGAAPRARLGDAGVGTPGQAEKTKAESIGEKPAGPRGAKGPRVYVLRPFEKAGAGSPGERPARRRVAEGRGSNG

SEQ ID NO: 375314 - protein, 338 aa, unidentified
MTIVMGLDQHREQITAEWIDTATGEISRRRVSPAHRAGVRRFLEDFGDQELEVALEATTGWRFVVEELQRIGAEVHLAEPAETAARRGTKKRAKSDRADARHLRELLMAGRLPESWIPPQHILDLRAQVRLRHTLVDQRCEWQQRMQSVLYHHGAPKRSWLTGGEGRAWLEALKLPAQAREQITAGLAMVDALQAQMDPLDRELRAYARRQPGCKALQAHYGIGPLTSVTILAELGDAARFSSSRAAVRYAGMDITVHQSDSRRAPGRLSRQGPSALRWALFEAAQCARRPHSPDHRYYVEAAARLGGNRACLAIARKLLKRSYHTLRELGEEALQPA

SEQ ID NO: 375315 - protein, 399 aa, unidentified
MLNDTSTPVTASLSNDLSGATEIKNHILDLNHTYHFERIVIGMEATSIYSFHPAMFFHEDSQWKELHVEIMVEQPNKIKKYREAFEENKNDTIDAFYIADYFRIERFSPSFLKEEKYMAIQHLTRTRLQIIEQLTRTKQHFIENIYYKCNTLTYQFKKEELSTNLWSSTMMTLMTDEMTLDELANMPLQELADWLQQMGKGHFKDSDKLAQTIQAAIRGSYRLSKLQQDSVNVILGLLAREIRNLEKMIKEIDKAIEDMVETIPEYQCLTSIPGVGKVYAAGIIAEIGQIKRFKDHPQVAKFAGLNWREKQSGNSNSQHTSLVNRGNRYLRYYLVEAANSVRRYDDEYKDFYKKKYHEVPKHQHKRAIVLTARKFVRLVDVLLRNHQLYTPPRRLMEDK

SEQ ID NO: 375316 - protein, 356 aa, unidentified
MEIISFSVGVDVAKDTFVCYIESLFTNRTTKRVNRRKFNNNKTGIKLFLKWLKKNCKAVPLIHVTMEATGRYHEPLAYALFDAKLRCSIVLPNRIKSFAYSLNEYSKTDPIDARIIASYASMHNPAAWTPANKSMRQLRELTREREDVMKSRTQAKNRIAALQVGHLPPAKTIKRLSAQIKLLNAQIKAIDADMERLKDKDAQLAESVDLLVSIPHIGAITAYAIIAETNAFNLFENRNQLIKYAGLDIVERQSGSSIFGKSKISRRGNSHLRSAPYPGALSVKRSQSVFQETYCRAITNGKEKKQAHTAVVRQLLQVAYGVHKSGIPYDEEIHRLRLKKSVDELKGSPTVTSLAN

SEQ ID NO: 375317 - protein, 352 aa, unidentified
MIIIGVDFHPEFQQIAWVDTDSGEFQEKRLAHPEEAEKFYRALTGQKVRVGMEASGHARWFERLLAELHFELWIGDAAEIRAKRVRKQKTDRQDARLILQLLLEERFPQIWVPSWENRDLRQLLWHRHRMVQARTRIMNQLQAIALNEGLRCKKRLWRERGREQLEAFRLAPWASRRRCDLLEMLDRLNPIITELTHAMEQEVEQCPAAQRLMTHPGVGPLTALAFVLIIGKADRFQCGKQVASYLGLVPLEDSSGNRRRLGHITKQGSSMLRFLLVEAAQVTVRSLPEWRSKYFHLAMRRGRKIAKVAMARKLAVRLYWMWRKGWDYEQLKKFGSHAGQPGHRDGVSLNTE

SEQ ID NO: 375318 - protein, 340 aa, unidentified
MKIHTAGIDIGKYVFHFVGLSESGEIVIKKRFSRTQLLTFTANLSVGVIGMEACSGSHFLARALQGQGHQVRLMPAQYVRPFVKSNKNDYIDAEAIAEAVQRPTMRFVPVKTNDQLDLQALHRTRERWVARRTAVANQMRSFLLERGLAVRQGLEYFRANLPTLLNDAESKLSECMRTILLELWHEWEELEERITRANEAMARIAAESEACQRLQSVPGIGIITATALVAAIGNGATFRKGRDLAAWLGLVPKQFSTGGKPRLLGISKRGNSYLRQLFVHGARAVFSRSKRNRHRFGAWLNGLELRKKRSTSIVALANKLARIAWAVLTKEQTYRTALST

SEQ ID NO: 375319 - protein, 361 aa, unidentified
MRIIGVDLHARQQTVAALDTDSGEVMETTLQHSPQDQEEVRSFYAALPRPALVGLEASGSMQWFLGLLDELGVEYSVGHPTEIRKAESRKQKHDRRDAALLLRLLRENRFPAIWLPSAEQRDQRSLLLHRHQLVRMRVGLENVLQALALNHGLRLGTALWSVRGQQQLAELPLAPYTAGRRNRLQALRQKLETQISKLDEQVQREACRRPLARLLMTHPGVGPVTALASEVFLGDPARFADGKAVASYVGMIPSEHSSGGRQRLGRLSKQGNPFLRFLWVEAARQAVRKDPALQRFYRRKVAQKGFAKALVAAARKLGIRLWIMLREQIDYQEFCRRGQQRQSCGAAYAGMPVKDFGPATP

SEQ ID NO: 375320 - protein, 415 aa, unidentified
MKVVFPTCCGVDVHKTFVVATIITTPADSLQPHYQKKRFSTFNSDLNRFAAWLLEHNCLDVCMESTGKYWVPVFNILEKRGIRVVIANPKWVKAVKGNKDDTKDSKWIGDLFRIGLVKSSFIPDLDIRILREFTRYRYKLVSMKSSEKNRFQNAFTVCNVALDSVVSDMFGKSATAITDYLTSDGSFDPDHCVSLLQRSLKKKAEQVLESIEGFSIADEQKARIKMIREHYDFIEKLIAKVDTCVNEMVAKYEGEINLLCTIPGIDRNSAITIISEIGTDMSQFGSSKRLCCWAGLTPGNNESAGKKKSVRISRAGVYLKPALVQVAHAAVKDKAHPYYALKYERLVKRRGKKRAIIAIARMILTAIYSMFSTGEVWNPVDLFKIDMPDQLKEQQLAKAIKQATRFLEKQGLSVA

SEQ ID NO: 375321 - protein, 402 aa, unidentified
MNAVGIDVSKGKSMISVMRPFGEVVVSPFEVQHTDSELSELAKLLKSLVGETRVVMEYTGNYHTPIARVLQSAGFYVSVVNAMLIHDYGNNSLRRAKTDKKDAIKLANYALDHWLSLPRYVPEEDTRLMLKNCYRQYEQYAKLRTMLKNNLISLLDQVFPGANRLFNSPRRADGSEKWIDFVAAFWHRERVCSFTEEAFTQRYQKWCRKHGYNFSEEKARNVYSAAYSCINVLPKTDATKLLVEQAISQLQATASALSKLQHQMRELAAFLPEYDVVMQMYGVGPALGPQLMAEIGDVRRFHSKKALVAFAGIDAPPYQSGQLNVKSRSISKRGSSSLRRTLFLVMSVILQNSPVDEPVYQFMDKKRAEGKPYKVYMMASSNKFLRIYYAQVKAHLELLDAS

SEQ ID NO: 375322 - protein, 487 aa, unidentified
MGEYGMAKRRMSTFERLQHGKLNRKQRRELQRQLHLEDPGLKVVHPDAAGIDIGNESHFVSIPPGRDTIPIREFGSWTNDLREMASWLKEHGIRTVAMQSTGVYWIAVQEVLEHAGLEVYLVNARGTKNLPGRKSDVQECDWLRKLHTYGLLRNSFRPPEQIRAVRTIWRQRDRWVKESGRAVQQMQKALTTMNVQLANAISDISGVTGQAILRAIVSGIRDPWKLAKLRDRRIAASEDEIAYSLQGNWREDVLFELRQVLAAYDFYQNQVAACDQELKKYTAAVATRQITAKQDLPKEASALPSSKPVRRSKTRKKNQSGFDLATELQRTMGVDLTRIDGIDVITAQVIFSEIGPDFSAFPDENHFASWLTLAPQRDISGGKVIRHIPAAGRNRVANALRMAAQSLSRSNSYLGARYRRLRMRLDGPLAVKAMARYLACLVYRLVTKGQAYVDRGAAHYESKHQERERLVLERRAFRLGLKLVPAA

SEQ ID NO: 375323 - protein, 388 aa, unidentified
MNYVGIDISKYKHDCFIFTEFGDVVNAGFTFTNNADGFGLLQKELERCGRGNVRIGFEATGNYGINLKMFLEKIGFDFMEINPLLIKEYIKSMTLRKTKTDRLDAKAIAEYILSKEYKPHRTSFYPKFALKQLTRLRSSLVSGRSRYLVQLTNVLDCIFPEFKPFFGNKFSVTSLYILAHYSSPEAISNMNSRSYDMLRRKSRGHFSMDKFVKLKSLAKNTVGVFNECYRIELESLLDLYCQIDAKIQELESKITEIITAINPPTLSIKGVGAVSAAIIVSEYGDFSRFDSPNKMLSFAGLEPGFFQSGTSEFNGRMVKRGSSQLRCVLMNCSRSIRLHNETFATYYLKKISEGKPHSVAISHVAKKLVRLIFALETKGISFDPALLK

SEQ ID NO: 375324 - protein, 411 aa, unidentified
MDRIYDNCCGIDVHKKLIVACFRKGNRQEVREFGATTRELLELADWLQSGNCEMTAMESTASYWKPLYNILESSNLNAMVVNARHMKAVPGRKTDVKDAEWIADLLQHGLLQPSYIPDKDQRELRELVRYRKSLVGERTRELNRLQKMLEGANIKLSGTVSDINGKSARSILEYLLTGKFIDEAKYDEMYAQKIIAHNLKATKEQIIDDLNGVMSPLQRRMMKELLNHLDELNVHIKNLDDEIDNFMKPEEKKASKAIQDVTGIGNTSAQAIISVIGTDMSRFPSDKHISSWSGLCPGDNESAKKRKSGKTRKGNSLLRTTLITCAHAAVKNKKSYFYAQFMRISAHRGPKRAYVAVAHSMLIAIYHILKDGVVFKDLGADYYNQFNKERKINAYLKKLKALGWEVPVVAA

SEQ ID NO: 375325 - protein, 461 aa, unidentified
MPKSGPKSERRDHTSPTTLLRMNPNAAGIDVGGASHYVAVPADRDDQSVREFAAFTGDLYRMADWLKACGIETVAMESTGVYWIPVFQVLEERGFEVRLVDARQLKRVPGRKTDVVDCQWLQQLHSFGLLGGAFRPDNQVCILRSYMRQRAMLASYAGQHVQHMQKALVQMNLQVQHVIDDITGATGMRIIRAVLAGERDPHRLAALRDERCKNSAAIIAKALQGDWREEHLFALAQAVELVEAYQAKIAACDARIQAHLQTFADRSDGRPLPPGPPPRADRHDLSFDATAELYRLTGVDLTAISGLQAHTILKVLSETGLDMTRWPTSKHFGSWLGLAPNNRVSGGKVLSRHTTPNANRAAGALRVAAQTLHHSKSALGAFLRRKAAQLGMPKAITATAYKLARIIYTMLTEGAAFVERGQDYYERSYQQRVLKNLTRRANELGYCLIQREQAVPHPASG

SEQ ID NO: 375326 - protein, 345 aa, unidentified
MVVLGADLHKRSHTVVVIDETGRKLAEKTIAATDAGHLELRRWAGQWPERTWGLEDCRHLSRRLDAELVRLGEAVVRVPPKLMAGTRQSGREPGKSDPIDALAVARAVLREPDLPVATLDGPDRVVRLLVDHREDLVGERTRHEQRLRWFLVELAIDEPKPRSLNRAVVQTVLAVTLARRTEPVARFARDLLARIVELSATIRALEREIEALVRNAAPTLLALPGCGFLSAAKIVGEAAGISRFRSKEAFARHNGSAPIPVWSGNTVRHRLNRGGNRQLNVALHRIAITQVRLGGPGKAYLDHRLAAGDSRTEAIRALRRRISDEVFRRLRADEAAGWAGLAVAA

SEQ ID NO: 375327 - protein, 410 aa, unidentified
MTNTNITQSEPVLVAIDISKARHEVLIAVPGKKRRRRLTVLNQLDDFNRLIATLSDYGCPVRVAFEATGNYHRALSYHLAAAGFEMKLVSSVALARTREALHNSWDKNDPKDAQVILHMMEIGNEQFYHDPLMRGTNDIQELSKTHDIVSKSKTELWHRVLTHYLPLYFPEADRFHRSSRSDWFFAFLERYPSPHLISAMGKDAFIADAWAVVGRKVSKERLLTDIHETAKASVGLPVAPDSDAISMFRLVLGEGRNLIAQRNQIEDRAVALLKDLPDYQLLTSTPGIGPINALTILAEAGDLRRFGHHRQFLKFCGMDLATMQSGTFRGQTKLSKYGNARLRRTLWMAGQVAILQRTNSFRDKFERYIAKDRHNTNLRRKAYTAIAAKMARTVHGIIKHGEPYRPFFEG

SEQ ID NO: 375328 - protein, 342 aa, unidentified
MSVSYVGVDLGSSNFHQVALNHSGTHTLNREFTTSEANLIKVFADLHGEIHVHLEAGELAPWASEIIRPLVTRVVCSHPQTNAWIARDRDKCDRIDAYKLASLLRLNEFKEVHYPREQSRRDFKTLVQHYDELTQQQARLKTKLKARLRMQGVIVRGEEVFSARGRKAVLEQVKSPVVRTALKQLYAVLDQSIASQTEAQSLMLRAAQALPEIRIMRTAPGVGPIGACRFSAYIHTPQRFSSTRKLWKYCRLSVSHRSSNGKPLRRPRLDRMGCGRLKDVSRKAFEAAMRRHDNNGFKRAYYRALETTHDATHARLTVQRKIVSTLRAMWINQTPYCDELMR

SEQ ID NO: 375329 - protein, 416 aa, unidentified
MEKEPAIFVGVDWASTEHQVCIIGPSGPVQRAFAHDAGGLGAMVDWLCAQTANPSDIVVAIEVPHGPVVEALMDRGLFVYAINPKQLDRFRDRFSPAGAKDDRRDALVLASSLRTDRHCFRRLEVLDPVIVELREWSRMAEELKEERNRLTNRVRQQLWRYFPQALDLSEDPGAEWFLDLWALAPTPAAVSKLTEKKVACILIAHRIRCIGAADALAILKRRALTVAPGTTDAAKAHIAAVAERLRLVNRQLKEVVHRIDLLVNRLAVSEYQPGQIAEQRDAAILRSLPGVGRIVLATLLAEAHQAVQTRDYRALRTLTGVAPVTKRSGKSRRVEMRQACSIRLRTAVYHWARVATIHDARSRARYASLRGRGHSHGRALRGVADRLLAVACAMLESRTTYDPLKVSAVTAALKTA

SEQ ID NO: 375330 - protein, 406 aa, unidentified
MGGDAMSGLKVSFDCFVGIDVSKDKFDACGITGSEAKLFQFSTTMDRKGFEKLKGYLVAFSISSILIGMESTASYHVNLFSYLVSEGYKVLLINPLLISNYVKMQLRKTKTDKKDAVVIAQFLLTNGDTLLQRASPSLISDLRDLSRQRESLVDEMTSRKIEIKQLLNITFPELEHMTGIFTKAILKLLQQYPSAFALRDVDLGQLSQMLIADSYGHKREAFAAELIKTAHSSIGSKSTAKEMILKQKIALLLHIEDALQEITVMLIEMSRKLMEEEINIMTSIKGIGDKSAANFLIEMGGDINQYERSGKIIAMAGLDPAVYQSGKHDGKGRITKRGNRHLRRIIWLMTTSVIQYSDVFKVYYLKRRKEGLPYKMAVLATAHKLVRVIYAMLTHRTTFCSQVENS

SEQ ID NO: 375331 - protein, 370 aa, unidentified
MQKRVLYIGLDVDDKKFHGYCICEKTGEAFPFTSRPNASKLISTLKKIESKGFSLKLCYEACYLGFALYRELEAAGIHCDVVASNMIPSKPGERVKTDRKDSEKLALLYMKDMLTPVHVPTKEDENDRDLVRSREFLREQLNSFQRHLISLCRRSALHFKDETGKLCHWTKSHVRWIQEKVSSLPAGSLKNNLNFLMMQITELRETIASYDAEIEKLSREKKYKKKVQALTCFKGLSELSAMTVITEIQDIRRFPHPKKLVSYLGFDISEYSSGGKEKKYGITKMGNSRVRKRLVESCQKCHMPTFGHSKKFRDRSLVPKNVLSIADKCSKRLFKKSTRLIAREKNKNKVKVACAREMSTFIWESLMMVA

SEQ ID NO: 375332 - protein, 387 aa, unidentified
MPQPNDLSRSLVAVDQNSTIIAVIEMSQSSWLVGGVVPGIERQPRKKLEPSPERLLGLLHRRRDEAVRAGRTITRIALAFEAGRDGFWLARWLEARGVEAHVIHPSSVPVSREHRRAKTDRLDTELLKRGFLGWLRGERGHCSMARVPTIAEEDAKRPNRERESLVGERTRIVNRIKSTLARLGIRNFKPTLRKAAERLASVHTPEGMPLPPNALAELQRDMARLGFVVSQIREIEDARQKRLEQQPETGAHAMVRLLARIVGVGVETADMLVHEVLSRPMRDRRAVARYAGLTGAPDESGGQRREQGLARAGNARVRRGMIQLAWRFLLFQKESALAHWYRARTADSRIGTRKTMIVALARKLIIALWRFVTTGEPIEGVVLRPAS

SEQ ID NO: 375333 - protein, 422 aa, unidentified
MLEQTQDREEILARVAALDIGKASLVCCVRVPDGARPGRRLQEVQTYSTMTRSLAGMAERLRGLGVTRVVMEATSDYWKPAFYLLEAYGFEVWLVNARDVKRLPGRPKTDKLDAVWLCKVAERQMIRPSFVPPPPIRMLRDLTRYRVDLVAQAGAERNRVEKLLEDAQIKLSVVVSDLFGVSGRAMMAALIAGRRDPRSLAQMARSSLRRKIPALEEALTGHFSDHHAFLLGKMIARVEAIEADIAEVDARIEAQLAPFAEAAARLGEIPGVGAAAAAAIIAEIGVDMSRFPTPAHLAGWARFAPGIKESAGRKKGSGSTGHGNPYLARVLGQIAVSAARTNTFLGERYRRIARRRGAKRAIVAVGRSVLTIIWHLLTDPETHFHDPGVHFYLSRTDTERRKRNHVSQLEALGYRVALELAA

SEQ ID NO: 375334 - protein, 314 aa, unidentified
MAYLHHPPCRSMGFDISKDTIAVSDGCSVTIIANRRKAIRRFLRGCGVDLAVCEPTGGYENILLDECLRRGLPIHRADTRKAKAFIRSRGRLGKSDAIDARELAAYGLERWASLALWRAPEPCEAKLKALVRRRNDLVAIKVAEQNRAKAPNGLGGPELAASYKAVLALLKRQIKAVDEAIRKLVSGSPLKRKVAVATTMKGIAETTAAALIATLPELGQMDRKQAAALAGLAPHPNESGKKVGYRSMRGGRPAVRTILFMPAMQAARGTGEFAAFYKRLLSAGKKPIVAIAAVMRKIVVTLNARLRDTQKQQS

SEQ ID NO: 375335 - protein, 407 aa, unidentified
MIFVGDDWSEGHHDVHVSDGEGRRLASRRFGEGLEGMSGFHALVAQYVSDPGGVVIGIETDRGLWVQTLLASGYQVLVVNPLSMSRYRKMLHLGGGKSDPADARTLADMVRSYRHQLRAAASDTALAEGIKTLARAHQGLIWERTRHTNRLRSALREYYPAALAAFGDLDHPDTLAVLAAAPTPARGRSLTKPQIKAALRRGGRRRNLDRRAAEIQTGLRSPQLETSTVIGDAYAAVTTTTVGIISELNTGIGTLETELGTHFEQHPDAGIVRSQPGLGVILGARVLGEFGDNPNRYHDAKARKNYAATSPITRASGTSRVVSARWIGNKRLVDAINQWAFCSINASPGARVFYDQRRAKGDTHNQALRALGNRLVGILHGCLKHHTVYDEHTAWGHRQTGLEQTAA

SEQ ID NO: 375336 - protein, 429 aa, unidentified
MTRISVGVDVSKNRSTVCIMDQDGKVIMRPFLVWHSTEELDFLADTLKRLNGEVRVIMESTSVYQYPIALQLKERGLFISIVNAYKVKKFANTDFRGGKTDKKDSRTIASYGISYWDKLVEWQIPKDTYFNLDLLNRTYMNAKKHRQIILQELQHYIDCAMPGMDKELHSLNLNTKKDFMLDFVEKFWHRDEIVNMTEAEFTEVFTAWAKKKGYRPVEGKAAKIYAIAKSCIPYYPANPTVKTILQCIVDKLSGVNRTLVTIVTQMIEEAKKLPEYQIVREMPGVGDPLAARFFGSAGDIRRFKNSKALVAYAGIDSPPDESGDFSSTHRHITKKGSKVFRDTGYEIMMALRAQKRTWEKGRKNPEVYDYMLRKEAEEKPRKVAKIAALNKFLRIVYARIKELYDNMALAERAKTKTRSKTRAKTKVTA

SEQ ID NO: 375337 - protein, 337 aa, unidentified
MTRSDEVGTDPVVIGIDVSKRELVIAVHPTGESWTSGTTASAIDAVILRLAGLQPSLLVVEATAGYEVAFVAACAAAQLPVAVVNPRQVRAFARAIGRTAKTDAIDADVLALFGARVQPSPRPLPDAETRALADLVARRRQLLEMLTAEQHRLSHVSTGPIARDLRNHIRWLERRIADVDGDIGGAIERSPVWRVHEDLLRSVPGIGPATARTLLAELPELGRLDRRAIAALVGVAPFNRDSGQWRGRRMIWGGRTAVRNSLYMAALVAARYNAVLRPYYQRLRAAGKPGKVALVAVMRKLLTIVNAMMKHERRWNPEAASTPASPSRLARAAAVAR

SEQ ID NO: 375338 - protein, 387 aa, unidentified
MFYCGIDIAKHKHSVSLMNDQGQKVKAVFTITNTRPGFDQLLAELQTLQSSVTIGLEATGHYWLALYDELTRTGYPVIVLNPLQVAAYRKSGVRKIKSDTTDAVWIADYIRIANLPAAKQDLPVILQLRELSRFRFRLTEQVGDIKRKLLTILDRVFPEYERLFTNVFLKASRTILKEAVSAQEFADFDLQELSDLLAQASRGRFGQDKAETILQQARQSVGVAFLTNAVHLEMYCLLAQLDLLDDQRSQVDEAIADLMQQVPQYITSIPGIGPVTGAAILAEIGDIQRFDTADKLVAYAGIDATVYQTGQFEASEAHMSKRGSPYLRHALWCAATAAILHDPSLQQYYQKKRSEGKHHGTALGAVCHKLLARIFVVLKEQRAYVIR

SEQ ID NO: 375339 - protein, 340 aa, unidentified
MQETTKFYMGIDVSKSWFDISLMPVVNHQKQAMQTERFVNTVEGIKLWHQWLKKLEVPFNKNSLLVIENTGVYHRLIWRFCSKHNLPLYIGNAAHIKWSLGITRGKNDIIDSQRLCNYACKEADELKTTPVLDIIFMQLKDLMTARTKLLSQLRSTQVYIKELKLSNDASVQKVLEKAHKAAIEGLKKSIQQIEAEMQSIINNNEAIKTNYNLLITVPGIGTFTAIYLICCTNNFNGKISGKQLASYAGVVPFGHTSGSTIKGKNKVHKMANKDLKKLLHLCALTTIRYYPEFKDYYERKKQEGKHSMCILNAIRNKIVLRAVAVVNNKKAYVENYAKAA

SEQ ID NO: 375340 - protein, 411 aa, unidentified
MVKLKFAGNTDDLIELVSYLLKNNITTVAMESTGVYWEVIYNLIEEAGITVYLVNPTHVKNVPGRRKDDKSDARWIQKLHKFGLLSASFRPQLEDRVLHTLHRQRVKLVQLSSDELRRMQKALDLMNVRVHKAISTINSYTGMNIIRAIVNGEHNPKVLAKMRDSRCKCSTEELEAALTGYYSPHQILALKHALERYDNLKKQINEIDAAIEETLRKLIPLSEEVIKKEMEKAPKQPKKNSNEPSFHFMAYNMMLVGKDPTVLPGISIQSAMGLLCELGRDFDKWPTVKHFTSYLTLAPVQKISGGKLLKSATRAGAPPAAVIFKQSAATVTRTDTALGANFRRLAIRKGRGKAVTATARKLAEQYYYLMKFGREYIDKGAEEYEKIHHQKQLVGLTKMAAKLNMTVIPNQ

SEQ ID NO: 375341 - protein, 321 aa, unidentified
MYVGIDVAKASLQVCVLSTPDQQQSFANTKAGWKALESYLSQWDEVWVALEATGTYGEGLTRSLFEAKYRVSVINPARIKAYGKSQMKRHKTDAIDAHLIADFCRTQQPLLWQPLSAESEELKELVRHLDDLKQSRQREKNRLEAKPKSKVVLKQIEQLIGYLDKQIDQAKENIRRHIEQHPQLKSQSDLLTSIPGIGLQTSAQVLAQLGDLTRFDNVRQVVAMVGLDPTLRQSGSSMNYTVGIARMGQASLRAALYMPAMVAVRCNPLLKVFAERMVSNGLKPLQVIVAVMRKLLHLAYGVVKNQLPFDPNYGKAKVAFP

SEQ ID NO: 375342 - protein, 405 aa, unidentified
MSTEIFVGLDWAVHTHAVCVIDAAGAVLDRFEIAHDRDGLAELMLRLARFGERVRIAIERPSGLIVDALVEAGHHVFPIHPNAVKASRPRYRSHGAKSDASDAYLLADLLRTDGHRWRELSPQSDSIRALRALVRSRDDLVATRVALGNQLQSTLEAFWPGAACIFADITSPIGLAFLKRYPSPASAARLSEAALGRFCRSQHYSGRRSPAELMARLHSAAVGLAGPLTNEAAAQLVRSMVAVLHPLVEQIAQLTRRIERFVESLPDGQIIMSFPRAGHVCAAQILAELGDVRERFPSLDQLASEAGAVPVTYQSGKTRSVAFRWACNHRLRKAVTCLADNSRHANAWARGIYTAARGRGCDHPHAIRILARAWLRVIWRAWTDRIPYDPGLHVSAQKLASDQGG

SEQ ID NO: 375343 - protein, 414 aa, unidentified
MGTRGRVIAGIDTHKDSHVLCLLDGLGRKILSDSFPANETGYQRLADTIGNPENCIVVGMEGTASFGAGLNAYLAAMDYKVVEVLRPKRDKRIKGKGKSDAIDAEIAARNAASGYGTSVPKSHNNWVEGIRVLMVARNLNVQTATKITNTVKSLIITAPEDMRAKYGKLNAKALMSRLSRSHSRAEDTASDCLMSALQTLARTWLELEKRSCELLERIESILGKNAPALLELPGCGAVNAADLIIAAGGNPERLHSESAFASFCGVSPIEASSGQVTRHRLNRGGNRAANRALHMIVVSRMRSDPRTAAYIERRTSEGKAKREIMRCLKRYVAREVYSALLHPQDTKYPKGAELADARILLGISQKEIAGRLGVSNARISEIERGKRLHSELRQRYQQFLSECRFSKELGVDTI

SEQ ID NO: 375344 - protein, 395 aa, unidentified
MYSLLVGIDVSKDFFATAGIDCEGKESFSRSCSMDSNGFGDFLKTVTSHCEDLSKVIVAMESTGCYHINLFSFLTSQGIRTMVVNPLLIANFAKLSLRKTKTDKKDAMTIARFLLGHREEISQLSISQDIQDLRDLSRERESLCHLISATKVEMKRVLRTTFPELETIGDIYTGVMLRLIQEYPSARLVRAAKVKAIAKLLKQPYVGNKLTFSAEDILRAAKTSIATVSPGKEIILQGKIATLLHLQGRLDEITKLLTDLCKATRVDDLKILRSIKGVGPKTAAPFLAEMGAVGNFTSHKKLIAFAGMDPSVSQSGQFIGMSRLSKRGNRHLRRAIYLMTASVVSKNAWFKAYFQKRKAEGLPPQKALFATAHKLIRVIFAMLSQRTYFKVKEAI

SEQ ID NO: 375345 - protein, 362 aa, unidentified
MTINAGVDLHKTQFTVFVKQSGNQFEQYSTDEEGYTRFLGRIQRWKKNGMTVRIGVESTGNTRYFKNRMEQAGVETVVINTLKFKVVNESVKKTDRHDAATIAEFLEKDMLPESRLCSEESEQIRRLLKVRTTLVRTMVTVKNQIHALLTGLGMKDSRATLQSKRGRQKILDTLRKADNELVVQPLFETIEQLEKSVKSIEAELEKLTEGDRTVELLMTIPGCGKIGAWTIRAFTDDISRFASAKKYSAYAGLVPWVQNSNETIHHGKITKRGPEELRTALVQLVMGMRRCRATASWRLMEHYTELKRNKGSGKSIIATARKLSKIIWCMLSAKEEFNPALMIDKKLVRKAESMRNTAVKSA

SEQ ID NO: 375346 - protein, 310 aa, unidentified
MLFHREIVNTPESISSFINELKKLKGFKLEKAVFCMEHTGIYTAHLLSCLHKKKVSLCLEPATQIRNSLGNIRGKNDKIDAIRIAEYACKNHEYLTLWAPKRLVIQRLASLATTRARLIKAKNTLTVALAESKSFLPKEILKKDSSLCNPSIKAMESDLQRIDKAVDEIIASDPELTRLFALVTSVSGIGKVTATHIIITTNEFKDINDPKKYACYSGVAPFAKESGLFKGKASVSHMANKKVKTLLHMSALVAIQHNSDLKEYYRRKVDLDKKNKMSVLNAVRNKLILRIFACVRENKLYEKKYAKLVA

SEQ ID NO: 375347 - protein, 412 aa, unidentified
MRRVIGMDIPRTFAEVVIWEQGQLRRAGRVDMTRTALEGFGKSLQASDEVVVEATGNTMPVVRVLSLFVARVVIANPLQVRAIAHAHVKTDKIDAGVLASLHAAGFLPEVWTPPAETERLRRLVARRNQVVRHRTRIKNEVHSILHAHLVPRCPHADLFGRLGRAWLKRQILPADEIAAIDRHFRELDRLAEDLELLDREIAQSGLEDPSIKRLLTIAGVNVTVAAGLVAAIGDIKRFSSPQKLVSYIGLNPRVRQSGLGFAQHGRISKSGRSHARSMLVEAAWAAAKAPGPLHAFFVRIRAKRGHQIAAVAVARKLAVLCWHLLTKEADYLWARPALVAKKTRDMELASGQPMKKGGKPGSAYAYNVKTLRNQEKTIAENAEHAYEHLVGAWQTRRPKNAVRGRLKTTRHE

SEQ ID NO: 375348 - protein, 419 aa, unidentified
MSFKILKFNCCGLDVHKTWIYACIGITDSNNRTEYKQARFSSFTKGLNELCDWLAKYNCKDVCMESTGKYWIPVFNILEQHEIWVTLSHPKYTKPMKGNKTDRKDAKWICDLYMCGMVKPSFIPPADIRALRDLVRYRFKLTCMITSEKNRAQNCLTVSNLKLDDVFSDVFGKSSRSITEQILQHPGEKFDVSPFVDGRCKTPIEEIQAAVDGAISKEQAVKLRQCLDHIDELQKHISEVEREILRLSDKYEAALNLIRTVPGFDKNPMTAIQVLSEIGGNMSVFPTAKHLVSWAGCCPRNDKSDRKIKSTRISRAGSYFKPVLVQVANALIKSKKHPEFTTRYKRIKTRRGHKKAIIAICRMILTAIWHILTDLTPYTPEGFLESHPVNKEKVLTISQALNLLKQRGYLIKNDPSPVS

SEQ ID NO: 375349 - protein, 389 aa, unidentified
MVRPVSTDPAQLCGLRSKKPPAGREVFFLDFSFYRTSTKYIGMDVHTESISMAVRNSVGKVVMESVIETKASMILQFIEGLRGDLHVTFEEGTAAAWLYDLLKPHVARLVVCNPRRNALLKVGNKSDRIDARKLSELLRGNQLHPVYHGEHGLRALKELVRSYLTISKDLARVMTRVKALYRSWGIPCSGTQIYSRLHRVTWLSKISEPGVRLRAAFYFQQLDALRTLRQEVRQELLAESHKHSAWKRLCGIPSIGPIRAAVALGVLQTPHRFRTKRQLWSISGFAIETRSSADHRDVNGQLKKVKKRVSIRGLNQNHNHDLKNLFKGAAVIASTKPGPFQEFYTALLAKGMRPEMARLTLARKIATIVWIVWKRGVSFDAEYLKPQTV

SEQ ID NO: 375350 - protein, 368 aa, unidentified
MKQQTSAATETKIKGRNIIDFTGKTIYVGIDVHEKDYQVAKVFDGICLGNHRKAANHQMLIDHLNSRYPGATFKCVYESCAWGFTLQRALNSAGIECIVVHAADVSSSDKEKKRKTDKVDALKLARNLASGDLTGIHIPDEDLQKERNLIRFRKKLVGDLNRSKNRLKSLLKYQGIKIPEHLGKKNNWSYNFMNWVEQEANKDVLLKDTLLLMLEEIKFLRQLLLKTERALRKLMKERHNEKATLLMTAPGIGRTIAMQFVLEVGDIKRFHSFDALNDLIGFCPDTDSSGDMQRDRGITSRRHKQLRSALIEAAWTAIRIDPALMDAYQKLTKRMQGKYAIIRIARKLLRRMRTMLLTGQPYQIGVAA

SEQ ID NO: 375351 - protein, 412 aa, unidentified
MKRIRDRVAGLDVHRDTVVACCRVVEPDGSVEVAKQSFATTRKGLTELARFLSDRAVQTVAMEATGVYWKSPYYALEGLFPELWLCNAQHVKNVPGRKSDLADAEWLADVAAHGMVRPSFVPPPEIRELRELTRYRATQVDARAKEIQRLEKVLQDAGVKLTSVASAVWSMSSREMIEALIAGERDPAVLAQMAKGRMRAKIAQLEEALPGHFGAHHAIVCRRVIDHIDFLDQAIATLTVAITERLVPFEAAVAVVVSVPGISRRTAEVIVAETGADMSRFGTPGQLCAWAGVAPASYESAGKRRPAGTRHGSQWLRHALIEAARAAVHTKNSYYAAQYARIARRRGPNKAVVAVANSMLSTIWHLLSNGTFFEDPGGDYFERRHDPAVEAKRLARRIEALGFEVRVTEKAA

SEQ ID NO: 375352 - protein, 308 aa, unidentified
MPQAVIGCDLSRALIDICELPSGRTGQIANTPDAIAVWLDTLDLDVRVVFEATSGCDGDLIAALATRGHPFSRVNPRQAREFARATGTLAKTDRVDARVLAQMGTALNLPATIPLSPARSRLADFLRRRRQLVDMRKAEKLHRHSAGQPEIAQAIEAMITLLGQQITELDQQIAGFIAQDQALSEQAHLLNAVPGIGPTVLATLLGELPELGTLCRRKIASLAGLAPHARESGTWRGARRIWGGRRKVREALYIAALNASRRIPVLTAMRDRMRAKGKAPKTILIAVARQLLVILNAMIRKRQPLQLG

SEQ ID NO: 375353 - protein, 377 aa, unidentified
MNRILKIGMDVHSTNYTLCAMEPVIGAEDRVFANIQVTPDYKNIILFIESLKQKLGLKDTYDIECGYEAGCLGYSLYNQLTAAGVKCVILAPTTMLTEQGQRIKTDSRDAHLIAQCLSYGGYHPVYIPTEQDDSVKEYLRMRDDHKKALKKIKQQIGMFCIRHGYYYEGTKWTIAHLKWLKKLELAQMYQETLDEYLASYEEQTAKIERFDARIEEIASQTEYAEKVKKLGCFLGIKTHTALSLIVETGDFARFAKGNVYAAYLGLAPGEHSSAVKVNRLGITKAGNSHLRLLLVEAAGGICKGAIGHKSKALKQRQQGNSAEVIAYADKANTRLRSKYYRLIRHGKKRNVAVAAIARELACFVWGMMTDNIDVTAA

SEQ ID NO: 375354 - protein, 352 aa, unidentified
MKYYIGCDAHKKYSVFAGISEAGEIIPAQRVEHDRESYRSFLQSLPTACQIAVESVGNWYWMVDEMEKAGHVPALTHPAKAKLMMGQLNKTDKLDARGLAVLSRNGTLPAVWIPPGELRDQRELPRMRMAMSQVRTKFKNRIHSTFDKYGITFDEVSDLFGVKGRKLLEKSLDELPPETRLSVQEQLLLLDQVEQSIKKAEKRIGQAIKMDDTMQLLQTLPGVGPILAIVIALEVGSIDRFAAAEKLASYAGKVPRVNSSGGKTYYGRVRSDVNRYLKWAFTEAANAIVLHQKQLPDRHVVRLYQRVRKHKGHAKAITAVGRHLAEATYWMLRNNEPYREPGEKRQVSSTQG

SEQ ID NO: 375355 - protein, 340 aa, unidentified
MKKLYAGIDLHSNNIYLGIIDHNDHRVYKKRLPNMPDVILAELEPFKEEIVGVVVESTFNWYWLVDCLIDVGYKVHLANPAGIQKYKGLKHSDDKYDSFWLAHLLRLNILPEGHIYPKEERPVRDLLRKRGHLVRLRTSLINSLQGIISRNCGSKLGANKIKQVTEDHVTPFLSGEDDLALSGAVSKDSIDYLSRQISKIATAVRNKAKVKKTFMGLQTIPGIGKILSLTIMLETGSIKRFAKVGNFTSYCRKVPTSWTSNNKNKGKGNSKNGNKYLAWAFSEAAEFARRYDKIAKAFYNRKAARTNRMVAHTALAHKLARAAYYIMRDDVEFDSHKLFA

SEQ ID NO: 375356 - protein, 402 aa, unidentified
MRFIGMDVHRDFCDVAIYEDGKVRLAGRVESSPEQLGLFAQSLCDEDHVALETTGNALSIARILEGHVGGVLVADTRNVRAMTHAKVKNDRVDACMLAKLLAAGMLPGTWLCDEPTRVLRRRISRRNQLVRGRTRARNQIHAVVIRNLGGRSPKRDAFSKKGREWLAGLELPTDERETLEGCLREADFLSGEVALVDREIACYAMGSAEIRRLMTIPGVDVTTAATLMATIGDIRRFPSPRHLVGYVGLDPRSRQSGASPIYTGHISKQGSSSARHVLCEAAHATMRAPGPLRAFGQRVRSRRGSKIATVAVARKLLCLTWQLLTKEQDYLYERPALTFRKLRKLELAAGAPKRSNPRGRDGKGTPDNPAQWATDRAQALQTEDHYRTAVANWQPQPQASPS

SEQ ID NO: 375357 - protein, 410 aa, unidentified
MEILVERACGLDVHQATVVACVLAGEAGRKPTKEVRTFGTCLRDLEELRDWLTDRGVTHVGMESTGVYWKPVYTVLEGSFELVVGNAHHIKNVPGRKTDAKDSEWIADLVRHGLIAKSFVPPKPIRVLRDLMRYRRKLLNSRSSERNRFFRLLETANIKVASVATDVFGKSGIAMLEAIARGETSGETLAEFAKGRLRNKREKLAVALDGRVEQHHRFLLRLQLDRLRGFDASLRTLDECIDAKMDPYLTQQQALEEIPGVGVTTARALIAEIGVDMTVFKNEHHLAAWAGVCPGNHESAGKRLRGTARRGNVHVRSALVEASIAAVRKKGSYFRDKYYRLKARRGSKRAALAIGHKILIAAYHILADGRPYRDLGGGYLDSLHKVRTSRHLVRRLEALGFRVQVEPSAA

SEQ ID NO: 375358 - protein, 438 aa, unidentified
MNSLSYVERFRQIKNELRKNHDFLLVGIDVSKNSHVACIMDSSKHIYHKKFRFDNSANGINLMLTTTKTILQKEPKKEIIFALEPTGNYHKPLANYLHNLGYMGCYVSSVAAKENRKTINGRWRKNDPDDAYNVADLLNQGKIMFYNSEQQKEFNQLKPLNILRKKLQKRLCSIKAKIRNNVFAQCFPEIDSLYNQIDNPEVIEILKNFPSAEQIRNTSFKEFYSKLIQTGRITTQKKQRIHNVWHKAASSIGCPLNAAMEIETAFILQDIELIKCQIGKIDKKINAICSHSQDYKLLLEIPGFGPIYASIFLSVINNIKNYNHPDQIVKLAGLDLEYSQSGKYHSKSQCSKKGNALLRYALCGVVNGALKHKIFQQLFEEQLQKKGDDKDNRRILKVKLAVKMIRIAYAVLSKKENFDIEKIKVNSVKEPVFIERKG

SEQ ID NO: 375359 - protein, 299 aa, unidentified
MSPCAPDSKRPLSDVMKRRLVPDKRFLVKEKPLTQTKETAAMRNLYMGIDVGKKFCWICVLNEEYECVYFERVATLQEAAWREMLGLFEGHEVHAAFEIGAHYEWMFDLLSACCAKVEVVNTARFALISQSQKKTDKVDAEKLAQGLWRGDLPLVYVPEKWVRKDRRLVAHIHALTQSLTSVSAIGTITRFATPDELSSYFGLCGKVEQSGDRLRLGQITKRGNKHVRWLLGQAITHLIRRDPKARRKYLKWRRKKKAKVARVALMRWVTTVLWRMLTHKEKYRLSGVPGCHFKRKNAA

SEQ ID NO: 375360 - protein, 320 aa, unidentified
MSASSVVVGIDVAKAHVDVSVLGAKLDAQRFDNQAEAHSALTAALKPLDVALVVMEATGGYETELACALQGAGLPVAVVNPRQARDFAKSMGRLAKTDTVDARMLAEFAAVLLRRDDLARFLRPLADPQQQWLAALVTRRRQLLAMLLSERQRLQITPKGLHPSIEAIVAAIKAQLDEIEAQMVGHVREHFGELDRLLQSASGIGPVASATLIAELPELGRLNRREIAALVGIAPMANDSGSSKGRRRIQGGRFDVRRVLYMAALTASRRNPVVKAFYERLIAAGKLPKVALVACMRKLLTTLNAMVKSNKPWDNSLHGA

SEQ ID NO: 375361 - protein, 415 aa, unidentified
MDTLLFRVAGLDIHKKFVMACIRITDTQTGKVREEVRRFDSMTGDLRKLRDWLVAEQITDVAMESTGVYWKPVWNILEGALRLTLANAHELKQVPGRKSDVKDSQWIAHLLACGLITPSFVPEQAQRDLRDLTRNRTTLLQERTRVSNRIQKVLEDMNIKLASVASNVLGVSGRDMLAALARGETDPESLADLARGSLRGKSEELKRALEGHVRPHHRFLLRQLLDHLGHLEEQIATYDLQIRETIGPFLTPKTEAVLDKVPGVNKRTIEVVVAEIGTEMSHFPTAANLCSWAGICPANEESAGKRKRKRIKLGNKWLKSALVESARAAARTKDTYFRAQYARLAARRGTNRAAIAVAHSLLVVLYHLIKNPESEYKDLGVAYFDQRNPARQAKHLVKRLETLGFDVTLTPHTAA

SEQ ID NO: 375362 - protein, 430 aa, unidentified
MNCNTQNAKIAGITEESLIIGVDIGSEIHFARAFDWRGFEYSKKAFQFSNSDVGFNNFRIWMHDLQVKHQKTVVIPGMEPTGHYWFNLGIFLQEQGIKPVLVNPHHVKKSKELDDNNPTKNDRKDPKVIAGLVSSGRFSYPYIPEGVYADLRITSNLRFQAQKELNRVLNRIARWLSIYFPEYKDVYGKRDSISGMMILRQASLPSDIVALGVEGVNKIWRDAKLRAVGIKRATILVEAAKRSVGSREGVIAARMEIVTLLEDYETYSARVNDLLQLIEDMISEIPHVEKLLEIKGVGMKTVSGFIAEVGDISRFDNPKQLQKLAGLAIVENSSGKHKGKTKISKRGRKRLRYLLFEVAMSVVSKNDEFGTLHYYYTNRRDNPLKKIQSLIAIACKLIRVFFVIMTKGISYDGDKLLADIKRPAMLATAV

SEQ ID NO: 375363 - protein, 347 aa, unidentified
MNQIIRIGMDTSKHFFQLHGVDTAERPVLRRKLRRKEMAGFFAKLPPTEIGMEACGAAHYWGRVLRELGHTVKLIAPQHVKPYIKRNKNDGRDAEGICEAMSRPTMQFVAVKTEEQQAALMLVGMRERLVARRTQLSNAIRGYAAEFGLTAAKGLDKIEPLLAKIAADEALPVLARDLFAMHGREYVQLQAELKKIEARLMAWHRANTDSRRLAQIPGIGPVVATTLVMKAPDPRLFPSGRHFAAWIGLTPKDHSTAGKTRLGTITRAGDEMLRSVLVAGATAVIQQARRGRGRASPWLLALLARKSSPKLAAIALANKIARIAWKLLVTGESYHAGGKPIASAHAA

SEQ ID NO: 375364 - protein, 347 aa, unidentified
MRFYTTQHKFYCGIDLHVDWMYLCVLDADGEVRVHKNIRTNPTAFLQALQPFREDVVVCVECMFTWYWLADLCEDEGIPFVLGHALYMRAIHGGKAKNDRIDSHKIAALLRGGLIPQAYVYPRRRRATRDLLRRRNHLMHKRAELYAHIQNTSSQYNLGDPLGRIAKPQNRRGLLERFDHRCVQKNMAVDLALVDCYDPLLADLERSIEKTAQGHDPVSLALLRTIPGVGNILALVMLYEIEDITRFPRVQACVSYGRLVKSARESNGKRHGPSGKKIGNAHLKWAFSEAAVLLLKNNEPAQKYLTPLANRHGKGKALSILAHKLGRAGYFMRKQQVAFDQAKFLAT

SEQ ID NO: 375365 - protein, 347 aa, unidentified
MLYVGLDVHSKQSSLCILNAAGGTVNQIQLKGPRSAVVDRLRQLDQPFSICYEASCGYGHLYEQLRPIAHHVAVAHPGKLRLIYKSKRKNDKVDAQKLAKLLLLDMVPPVHVPSIDVRAWRSLIVLRQRVMSQVVRCKNQVRGVLRENDIAGAKWLWSKRQLAWLGSLELHPIARLRLELAVEEFKTLDARVKRIERELQAYADRHPAVTVLMTIPGVGIRTAETFLAWVDDVTRFRNNRQIGSYFGLVPCQDASADKNRLGHITRDGPPVMRKLICEATWTAIKKDGTFKAFFDQVMGGKPERKKIALVATMHRMIKVMGAMLRSGEPYDAVHGDARRCAARRGGL

SEQ ID NO: 375366 - protein, 371 aa, unidentified
MKSILYIGMDVHKENYTLCCYSFDKDELQYKQSIAPDYKMILKYLEQIRKRCPDEIEFVCGYEAGCLGYMLYHQLTDHGVKCVILAPTTMGITNNNRIKTDKRDAGNIARCLAFRTYSEVHVPTAEDEAVKEYIRMRDDQKKALKIIKQQILAMVLRHGCRFEEGRNYWTVKHVTWLKSLDLGGILQESLGEYLITYDYLTDKIERLDKRIEELAGGERYQENVKKLSCLIGVKTHTALSAIVEIGDFTRFARAEKLAAFLGLVPGEDSSGEKQCRGSITKAGNVHVRRLLVESAQSYTRGTIGYKSKELIRRQNGNTPQVIAYADKANERLRRKFYRMTLKNGSKRNVAATAIARELACFMWGMMTNNIA

SEQ ID NO: 375367 - protein, 341 aa, unidentified
MTVIIGVDPHKSTHTVVAIDRDERPLARLRLVAERCQTQRLLAWAEPLGTERTWAVESAGGLGKLLAQQLLEAGEHVVDVPPTLAARVRVLGSTKASKNDSNDALATAIAGLRHCGLRAVRVEDHTAVIRMLIDRYDDLVALRTQAACRLHVALRELIAGGAPRRLGASRATKLLRNIHPQGAAGLERKRLAVELLADLRRLDRDIATAKRRVSDAVTASGTSLLELHGVGPIVAGFILGHVGDPARFLTPERFASYNGTAPIEASSGPRKRHRLNPRGNRKLNHALHLAAVTQVRHDTPGRAYYQRKIAEGKSKKEALRALKRRISDAVWRQLQVDLGRR

SEQ ID NO: 375368 - protein, 330 aa, unidentified
MQKIQHIIGADLSKKTIDLFCHLKETHLKIDNNLQGFKKLLKWISQQQINPFELIIVMEHTGLYSFCFEEFLHWQQISFTKVSALTIKHSIGLVRGKSDKIDASRIAAYGYEKKDKLSAEPPTSKELQRLQLLHATRERLIKQKVGLINAVKEYRNIGLLQNDPVLQCQQRLIKNYEKEIAKLEAQLDNVFKSNSSLQKNHLLLQSIKGVGKVLATATIIKTKNFTRFTNARKFACFCGTAPFEHTSGTSIKGRTRVSHLADKQMKTLLDLSAKTAIQYDKELKEYYLTRTQNGKPKMSTINVVRNKILYRMFAVIKRQTPFIENYIQAA

SEQ ID NO: 375369 - protein, 352 aa, unidentified
MQGTSKGAVTQEIFAGIDLHKRTWHVTMTDEGGGTIYRGSMPADPHNLLKLFERYRGQRITAGYEAGYFGYWLHDMLEEAGISCVVIPPSLIPGAYGNRVKTDARDSAKLAELLVTKKNVKVVVPSPDERHHRQVIRTRRQLIRKRIQAQHQIRAFLMMYGIVLPPAMTAWTKAFVMHLHRMKLKNPYLHESFQNLLMAYDDADRLVVKQTGLLRKLAKEDKYRDRVAILTSIPGIGVISAMEMLLELQDVGRFSRADQLAAYVGLTPSQYSSGAHIRMGHITGIGKASLRTMLIEAAWVLVRKDEEWSRKYAGLRYRTGSKRAIVAIARRLLLMSRRLLLDNRTFESRSAA

SEQ ID NO: 375370 - protein, 389 aa, unidentified
MFYLGIDIGKNTHVASLIDDKKKVIFKAFSFSNSIDGANSLLEKLSPFIQSLEIGMEATGHYWLSIYSFLIEKNLSVHVINPIQTDGWRNGIEIRKRKTDIIDSILIADLLRYGDFLETSLSNEDYLSLRNLTRFRSYLISSVSDLKRKTIAVLDQVFPEYASSFSNIFGKSSKEILMSISTPQDFENITADKLEKVLENITMKKFAKRKIDELSSKATNSFGVKFCLDSFSLQIKLLIEQISFIESQVITVEQEISILMEKINSPITSIPGIGPITGAVILGEIGDISRFSNPSKLVAYAGLDAVISQSGEFESTSNRMSKRGSPYLRKALFQSALRAEFCDSVFSNYYQKKISQGKHHLVATNAVARKLCHIIFAILNKNESYLSQM

SEQ ID NO: 375371 - protein, 326 aa, unidentified
MQGKEASEQETKVKSNVGIDTSKCWLDAHVLPADEWLRVANTCAGIRQLKRWLSRHAIALVAIEATGKWHRHLHRSLVASAIPVAIVDPYRVRMFAKAQGILAKTDRLDARVLALFAAMMAPPVRPPAPQTMAELAELVVARSRAVEARAALKNQQATAESKFLKHQLDRRIVRAGKDIAALDREILKGIKADDGLARRYAVLTSIPSVGFAVAATLIACLAEIGTLTAKQIGMLAGLAPIADQSGERQGIRVIWGGRPAVRRILYLAALSATRFNADMKAFYNRLRNNGKPPKLALVAVARKLVVLANTLIGQDRTWQHRQTKIA

SEQ ID NO: 375372 - protein, 339 aa, unidentified
MRLYAAIDLHSNNSVLVVLDAKDKVVYEKRHPNDLQTILAQLKPHKKNIQAIAVESTYNWYWLVDGLMAAGYEVKLVNTVAIKTYDGLKYSSDEHDARHLAHLLRLGILPTAYIYPKEERAVRDLLRKRSQLVRNRTMHILSIQNLVTRNSGKPITQGGIRKLDEKALDLYCEGNALRIMAIKSSLEILRCLDGQVALLERKVFEQARLKPEFKQITSIDGVGEIIGMTIMYEAGDLERFEKVGQFASYARCVESSRWSNGKKKGEGNRKNGNRYLSWAFIEAAHHAVHYNERIRKYYQRKKAKTNGVIACKAVAHKLARACYHVVRDQMAFDEARAFA

SEQ ID NO: 375373 - protein, 428 aa, unidentified
MSEKNCTRLEEFRQLQKEIRGSDEYLIVGIDVAKERHNAFFGTATGKTLFRRLVFGNDREGFERLLLQAEAMRVQHGLKKVVFGLEPTANYHKPLGEYLITGGHRVVLVSAKSVKRNRELLDGRWDKHDTKDSANVADLISQGKCQYYDYPGLRLRELRSLLSLRRRLKRQEHGLRVRIRNNLLAQYFPEFDGYFGRSESEGLAIVRWCLAPSVIASLEYDQFARWVAPGNRGIRQQARLRAIWQKASVSIGCEVGEAVRFEAKLMVEGLKQIREALGETDEKITDLCVQFPEYECLLSIPGYGPDVSSKVLGAIGNPFRFTRGSQVLKMAGLDLVADRSGKRSDGVVPVISKNGKADLRYALYQAAMIASSRNREFIMWFTNRLRGRQREKGIKTRMRVKLSAKLLIIAWTLMKKKEPFNPDYLRIE

SEQ ID NO: 375374 - protein, 372 aa, unidentified
MESILYVGMDVHTSNYTLCTYSIEDDKEFGLVKFGPDHLNIIRYVKRLREHHGQDTRIVCGYEAGALGYSLYRLLTASNIECVILAPSTMPKAPNERKTDYRDAAKIARCLAYNSYRSVYIPDAEDEAVKEYIRMRDNTKDHIKQLKQRILALCTRWRKEFDGTKKFWTVAHMKWLQHLKFENPIAQEAFDEYIIQLNEANTRLKRYDERIEKWAELPRYAEKVSRLTCFCGIKTHTALATIAEVSDFDRFPNANRFASYLGLVPGEYSSGNNINRLGITKQGNSHIRKLLTEAAQCYARALPGKTSAELLRRQQGNDPKVIAYANKGNERLKRRFRSIAARKPKPLAVTAIARELACFIWGMMTEHLEQVY

SEQ ID NO: 375375 - protein, 372 aa, unidentified
MNYNTVYVGMDVHKESFTLCSCKYEDEKASHYQRTPASYKNVLRYLAFLRTIYGEYTRFVCGYEAGCLGYSLYHQLENFNVECVILAPTTMLEQRSKRRIKTDKRDAEIIARSLAQHNYSPVHIPTETDNQTKEFIRMRDDHKAELKKIKQQILSFCLRQGYQYDGSGNWTAKHVKWLRSLKPAGLYKEILDEYLLTYTILTDKLNRLDQRIEELASKEEYKESVSKLTCFLGIETHTALSVIVEVGDFQRFVSARKFAGYLGLVPGQHSSGDDRNGLGITKAGNTHVRRLLVESAQSYTRGKIGYKSRVLRSRQAGNSPQVINYADRANERLRRRYYKMVLKDGKKYNIAKTAIARELACFIWGMMTDNIY

SEQ ID NO: 375376 - protein, 333 aa, unidentified
MKDVAAFCGIDIAKHLISVHLENEDRKVISQKNMRRDSVLTFLSNMPPCLIGIESCGGSQHWARELRKFGHDVRLMNAKYIIPYRRKGKNDLNDAEAICEAVSRPSMKFVAVKTEQQQSILMVHRLRQQCISHRTSLSNQVHAYLLEFGISLPKGAKAIHKNLSAFFGNCELHPLVVEMLHELLAAIAREEEREAYFNKRIADWVKHDERAKALLKLDGIGPLSASAIVATAGDPSFFENGRQFAAWLGLVPRQYSSGGKSKLGGITKAGDRYLRTLLIHGARSVLLMASRGKGQQREWVNQLRTRRPENVVAVAMAAKQARMTWAIMAGKVV

SEQ ID NO: 375377 - protein, 346 aa, unidentified
MKHSVGLDVSVKETAICIVDEAGKVVREGKVATEPQAIIAFLSSAGVEYARIGLEAGPLSQWLVNGLSEAGLPVICVETRHMKAVLKAQQVNKSDRNDARGIAQMMRVGLYKPVHVKTLASQQARMLLTSRKLLRDKLQDMENELRGTLRNFGLKVGVVSPGHFEARIKELVAGQPPLEMIVVPLLTVRRVVREQLAKLDKMVLDQVRDDKLCRRLMTVPGVGPIVALTFRATVDQAQRFARSKTVGAHFGLAPRRFQSGERDYDGRVSKCGDAMMRTALYEAAQVLLTRTRTWSWLKAWGMQVARRRGAKKAIVALARRLAIVMHRMWVDGTEFLWRKEADTAAT

SEQ ID NO: 375378 - protein, 414 aa, unidentified
MDVIHSRCCGLDVHKRTVVACVLLSEPSGPPHREIRTFGTYTNELLALADWLAEHGVTHIVLESTGVYWKAVWNLLEDRFALLLVNPRHIKTVPGRKTDVLDAEWLAELLRYGLLKASFVPDRAQRELRELTRYRTSLTNERSAAVNRLQKTLEGANLKLASVASDVLGLSGRHMLAAVVEGTTDANTLANFAHGRLRDKLPQLEQALSGRVGPHQRFLLAEQLAHIDSLDASIERLNAEIAERLRPFDELIDRLDVIPGIGRTIAEVLLAEIGADLTRFATANHLASWAGMCPGHNESAGKKRSGKTRKGSPWLRAALVQAAHAAAHSKQSYLAAQYRRLTARRGTKKAAVAVGHSILVIVYHLLTHDCPYAELGPTYFDQRDPRGVQRRLVYRLEALGYNVQLTPLAEAPAA

SEQ ID NO: 375379 - protein, 332 aa, unidentified
MVEGTMGSHHKERSTKMNKHNMLCAGIDTGKRKLEVALTSGLRLQIDNNAEGHAALSGWLRKHRIKRVGIEASGGYEREVVAQLRRWRFVVVVFQPAQVRAYAKFHLQRAKNDKIDAALIALCTADVRKIHAPPDARLIPLAERLTFMEQITEDMARAKNRHESCRDPRTKRHWEAEIARLKGVLRIELKALVADIRQHSDLSKRLDLIASVDGLGIRTALAIAVRMPEIGRVTREQAAALVGLAPFDHDSGDQVGVRHIEGGRERLRKALYTAALPAVFQWNHQLKLMYRRLIAAGKPHKLALVACARKLLIYANTVVERGTSWTSLRAAA

SEQ ID NO: 375380 - protein, 352 aa, unidentified
MLIIGCDFHPGFQQVAIFDNLTGEVQEKRLQHRAEAEQFYQSLGGQEVRVGMEACGHYPWFERLLGELGIELWFGDAARVRASVVRKQKTDRRDAEHLLHLLMEDRFPKIWVPSLEVRDVRQLLVHRHKQVQARTRTKNQLQAMALSCGVQKKRKLWTKVGREELEQLPLLPYAAERRKRLLEALDGLEAEISELDRRVSEEARQRPEAVRLMTHPGVGPVTALAMVLTLGPAERFGSGKQVGSYFGLIPSEESSGGKQRLGKISKQGSSFLRFLLVEAGQTAARLDPQLKRFYRRLAVRKNRSIAKVAVARKLATRLYLMLREDWTYAQLCQAVMQVSPSHSVAGESEPSV

SEQ ID NO: 375381 - protein, 380 aa, unidentified
MKNILYIGLDVHKDSLSIAVAESGRNGEIRSYGKITNSLHAVEKAIARLRKQYGKDAELHFCYEAGPCGFVLVRRLVQLGHHCIVVAPSKIPRGSGDKIKTDRRDAEKLARAHRAGDLEAIYIPEATDEAIRDLCRTRSDAVDDHRRARQRLKAFLLQHGYAYQGKGHWGEAHMRYLRELVLPHPAMKAILEESLMAVADAGARVARCEAAMRDLLVSWRLKPAVDALMAFKGFQIVAAMITVSELGTLPRFEHPRQLMAYLGLVPTETTSGPNRRQGAITKCGNPHARWLLIECSQHYATPPKVSKELSRRQEGQPAGVRKISWNAQNRLHRRFTQLLGRRVHRNKALVAVARELVGFIWEALRDLPCYQAAEGQKSAA

SEQ ID NO: 375382 - protein, 427 aa, unidentified
MPYKIAGIDVHKRMLHVVVCDVEIDGEYEFTRQVFGSSPEGLRSLAAWLMEHQVEEVVMESTAQYWKPVWGALERYWKPICQRREGALATSGTLHLAHALSNRGRRGRKKDFRDAERLVKRLVANELILSFVPDAAQRLWRTVMRTKYQLTRNRVQLQNRLEALLEEAHIKLSSLVSDLLGVSARRMLKAIAEGETDPVALAALADERLRAKPEQIRDALSVCQELHPVYRRLIQMALEESASIDRRIDQLEQQMADLLRTYEGQIQRLAEVPGLGVDSAQQIIAEAGATAATFPSEKHLASWVGACPGNEESAEVNYSRRSPQGNHHMRRILNQAANAAVKLKGSIFEILYRRYVPRLGHKHTIGIIAHKLCRLIWKILHLGVRYEERGPEVSKLSKQRRTQKMIRELCRLGYRIELTTSQPAMSA

SEQ ID NO: 375383 - protein, 413 aa, unidentified
MEVVCQRCAGIDVSKRDAKVCVRVQGRGSARTTSQVTTWSSVMPQILKLREQLVADRVELVVIESTSDYWRPFFYLLSEAVPVMLVKASDVKAMPGRKSDVSDAEWLADLAAHGLVRASFVPPEPLRQLRDLTRARVGLFQERTRELQRLEKELEDACIKLSAVVTDIQGVSARLMLQALVDSEHDPKVLADLARGRLRSKVEQLTEALTGRFNDHHRFMVSFRLARVDQITASVDALDQRIDDLMDREGLTVARDLLVSVHGIGKHGAEELLAEIGPDMSVFPTPQGLASWVGVAPGSHESAGKKHPVRTRAGNRYAKRTLGIAARSATRMKNSFLSARFKRVCARRGYNRALVATQHSMITAIWHILSTGEYYRDLGGDYYSRRQPQQAIRRKIKDLEAAGYHMTLQPSPG

SEQ ID NO: 375384 - protein, 451 aa, unidentified
MKSYQGYQRKRSQVADKTIIGIDPGKSRHQAVIIDSNGIPMGKTFSFAVNHNDYHEKLWNELNKQNSSYSSSDLLFAVEASCNLWQTLSHYLRTAGYTVVLVSPMSTKQSRVMLNNNFSKTDPKDALLIALNAQRGYYFEMRDYSERSNNMHTLSIAYNKLRKDHSRYRGRLRAAIELIFPEFLEVITLGTKTSFYLLGKYLFPEEYINLNIEHEALQIGRISRSSYGINHLQKLQELAKHTISISTYDELCDRTIVLTWLEGMKEIGVRMKIILDQLIKLASTMKEFSILTSLMGISAETASLFLAEIRDISAFNNYKEIEKFAGYNLHLTQSGKHVGSRRISHLGNSRLRWVLYRMTEETMKYIPEVRIKYLKRQLKKQIYRKNLVACVPQLLKLIFSLLKENRYYEYYEDRVTVMEKLNIQYQVVKAERAARHKKKRPAISEELRKTA

SEQ ID NO: 375385 - protein, 354 aa, unidentified
MSQKLNTAIAVIGIDIGKNSFHVVGLDDRGAIALRQKWSRGQVETRLANIPPCLIGMEACVGAHHLSRRLRMLGHDAKLMPAKYVRPYSKGQKNDFRDAEAIAEAVQRPTMKFVATKTPEQLDLQALHRVRERLVSQRTGIINQIRAFLLDRVVAVRQGLRFLRAELPQILATRTDVLSARMLRAIEELASDWRRLDERIEGLSTEIEALARQDMACQRLMTVPGIGPIISSAMVAAIGNGAVFSKGRDFGAWLGLVPRQISTGDRTILGKISRRGNRYLRVLFVQAAWVVLIRPKTWERHGLKPWIEAAKKRLHHNVLAIALANKLARIAWAVLSKEREFEYARTDEMTSPSA

SEQ ID NO: 375386 - protein, 307 aa, unidentified
MFVGIDVAKDRLDVHVRPAGEAFTVARDGEGIAELAKRLSAVAPTLVVLEATGGFETIGAAGLAAAGLPLAIVNPRQIRDFARATARLAKTDTLDAAVIAHFAEAVNPPPRPLADAQSQLLGELMARRRQLIEMIGAESNRRRMLTVRRTLKSVDRVLATLKAQLEQIDDDIDIAVRATPAWREAEDLLISVPGIGPRIARTLIAELPELGRLDRREIASLTGVAPFNRDSGTLRGRRTIAGGRPVVRAALYMSVLVSIRRKLPLAETYHRLRASGKPAKVAIVACMRKLVTILNAILRDKKPWATA

SEQ ID NO: 375387 - protein, 430 aa, unidentified
MEQMNGIRLEEFCRFKKEIRGSTEYLIVGLDIAKERHNAFYGTAIGRTLHKGMFFDNTYEGFQKLLIETDALKVQYSLRKVVFGMEPTANYHKPLGEYLIKGGHFVVLVSAAATSKNRELMDGRWDKHDTKDAANVADLIAQGKCLYYDCPGEDLRSLRGLLSLKKRLKKEEHGLRVRIRNQLLAQYFPEMDQHFGSVASLNVVQRCLDPSLISIMEYDEFCRTVAPGKTNMAQQRRLTQIWRAAKQSIGCIVGEAVSVEAQIMVVGLHRVRETIKLVEDKIEDICLKFPEYSFLLMIPGFGPDVSAKVLAAIGNPERFTSGKQVLKMAGFDLCASRSGKTSQGATPVISKHGKGDLRYALYQAAIISSLKYKEFIVYHTNKLRGREREKGIGTKMRVKLAAKLLIIAWTLMKKKEPFDPKYLNQGGSKI

SEQ ID NO: 375388 - protein, 333 aa, unidentified
MVEGTEGSHHKEGSTKMSKLTTICAGIDTGKRKLDVALVDSAHRLQVDNDPDGQTTLSQWLRKHRVKRVGIEASGGYEQAVVARLRRDGFVVIVFQPIQVRAYAKFHLQRAKNDRIDASLIALCTAATQKIHTPPDPRLAPFAEHLTLVEQITEDISLIKTRRESCRDQRIRNLWKEEIVRLNGLLRIELKALVANIRQHRDLAERLDLIASIDGLGLRTAVAILVRMPEIGRVTREQAAALVGLAPYDDDSGDQVGVRHIDGGRERLRKSLYAASLAAAFHWNPQLNVIYRRLIAAGKPHKVALVACARKLIIYANTVVDRGTPWTKRPAAI

SEQ ID NO: 375389 - protein, 404 aa, unidentified
MIYLGIDWAEDHHDLCLLSEEGERLATARVPEGVRGLRSIHELVAAQTEDASSVVVGIEIDRGLLVHGLVASGYQVYGINPFAVSRYRDRHATSGAKSDRGDAKILADLVRTDRHNHRQLAGDSDLAEAVKVLARAQQNLLWARQRHVNQLRSALREYYPAVLEAFGTNLSRRDALAVLQLAPTPAAGAQLSVARIRGALLRAGRQRNLEETATAIHRALRAPQLLPPQSLAAAYGAATRATVALLAQFNHQLEQLEAELVASFEQHPDAEILCSLPGLGLVLGARVLAEFGDDPTRYHDARSRRCYAGTAPVTRASGTKTVVIARTARNRRMAHACYLWAFSALRPSPGARRYYDRQRARGKSHHQALRALANRLVGVLHGCLASGRPYDEAIAWPTLAEAAA

SEQ ID NO: 375390 - protein, 339 aa, unidentified
MKLYGGIDLHSNNSYIVLMDSGGTVVQRSRVGNEIGLVLRTLAPYREQIDSLVVESTYNWYWLVDGLKAAGYAVKLANPSAMQQYQGLKYSDDRSDARWLAEMLRLGIVPTGYIYPEAQRPLRDLLRQRSFLVRQGTGQLLHTGNILCRNQGRKSSRQQIRQMTVADAQQLFPDRERTLAVESSLRVIEVLEQQIASIEKQVLGRIKPEAGFQNLQTVYGIGPILAMTIWLETGDIGRFHQVGDYASYCRCVASTRLSNAKKKGENNSHNGNPYLAWAYVEAATYAARFYRQAARFVERKTAQVNRTLAIKALAHKLARACYYVLRDGVVFEPTRLLGS

SEQ ID NO: 375391 - protein, 315 aa, unidentified
MANLTKSKSVVNVGVDVGKQYLDIYLYEKQLHWQVSNTEEGIKQLLRRLAHYHVERIVMEATGRYEFELAQAAHGRGLPVCIVKPLRVRRYAGAIEQLAKTDKIDAALIAQFAAKVQPKITPQKSKNLIAIKDLIARRRQLMGLRTQELNRINIMGKALSISIKRIIRALDAEVLRIEKRLAQHVEQQAVWTDKQTILKSAPGVGDTLVYTLLADLPELGELTNKEISALVGVAPVNRDSGRLRGKRRIQGGRASVRTVLYMATLSATQCNPVIKSFYRKLVAQGKHKKVALTACMRKFITILNAMVKNKTEWAI

SEQ ID NO: 375392 - protein, 311 aa, unidentified
MTMLADQVDVVIGVDTHKHTNTAAVVRASTGGVLDEATVPTTPAGHEELLAIARSHGSLRAWAIEGTSSYGTGLTRFLRANDEWVFELERPTRSDRLGGKKNDPLDAARSAREALARPDLGQPRSTGDRTALSVLLAARRSAFDGATVTERQMLAILVAAPETLRERFSKLTTTVAVAKAARMRIVNDGDAETVTTTTVVRSLARRSLELRSEAKEHEGALTVVIRRWRPDLLEQKGVGPIVAATVLCSWSHRGRFRSEAAFASLAGVAPVPASSGLTVRHRLNRRGDRQLNRALHTIVLSRIRFDEETQA

SEQ ID NO: 375393 - protein, 347 aa, unidentified
MLIIGCDFHPGFQQVAIFDNLTGEIQEKRLQHRAEAEQFYRALAGQEVRVGMEACGHYPWFERLLAELGCELWLGDAAEIRATVVRKQKTDRRDAEQLLTLLRQDRFPRIWVPSLEVRDVRQLLVHRHKQVQARTRTKNQLQAMALSHGVQKKRKLWSQAGRTELEQLPLLPYAAERRKRLLEALDGLETEIVELDRRVAEEALQRPEAGRLMTHPGVGPVTALALVLTLGPAERFASGKQVGSYFGLIPSEESSGGKQRLGRISKQGSSFLRFLLVEAGQTAARLDPQLKRFYRRLAVRKNRSIAKVAVARKLATRLYLMLREDWTYAQLCQAVMQVSPSHSVAGE

SEQ ID NO: 375394 - protein, 294 aa, unidentified
MKEELVYVGVDIAKAYLDAAIGNEKRRFANDALGHRQLINWIKQMPASVQVICEPSGGYERALVRALVAAQLKISLVPANRVRQFARAAGILAKTDRMDAKVLCAFGEAMQPGTISASQLEQEHLRELESQRRHLTHLLVMEQNRAARMSDLWVCKLNRRLITQIKASRELSSKAEKLTAISGVGARTAALLLAQMPELGQLNRREVAALVGVAPFNRDSGRMRGKRAIYGGRRSVRHGLYMAALVAARHNPILRAFYLRLRAAGKPAKVALTATMRKLLIVLNSSLKPDLTYA

SEQ ID NO: 375395 - protein, 402 aa, unidentified
MHYLGIDVSKASHQCVILDAEGEALGKSFTIQSSKDDFANLVKKLSDLNIPQTDITAGLEATGNLWENLYVYLKERGFNIILLNPFQTSKFHQAMLKKAKTDSIDALVIAGLLRSGCAASSYIPDEEIQSLRDLIRLKDGYLKDTKNYKRKAYSLLNLVFPEFLTLIKDPFNISCTEILSKYQTASDFKKLKPKDLLKVARGHQGNNYDEAWADKVIQAARDSIYSGKASRARGIVVKSLVLNIKNLKEQMIELDNEIQNILKTDDDSSNNDIDNLLTIPGVGPKTIAVFIAEVGDITRFASCKDFIGFVGLYPKIEQSGSSLNRAKLTTKGSRLLKHALYMASVASLIHNPYLKSVYNDKISQGKCAKQALIVVARKIACIMYSMLKNNEAYNPGRVAIAV

SEQ ID NO: 375396 - protein, 330 aa, unidentified
MVAGASGSFDKAGSKKMTQLTAGIDVSKKTLDVAVHGRPERLQFSNDRAGWAALAEAFARAGVTRVGLEATGGYERGVSRRLRADGVEVHLLQPIQVKAYAKLKRKKAKNDRIDAALIAALAASLDAPRSEPDPRLCTLADELTFLEQIEEDVARLKTRLEHAAPRPRRMIRADIARLAARRKRQIERLVAGLRGHADLARRLALVCSVPGIGPRTALCLVIRLPELGAASREEAAALAGLAPFDDDSGERRGARAIQGGRKRLRRALYAAALPAAFRWNPALIALYRRLVAKGKGHKRALVACARKLVVYANTVVARGSPWTDRTATAT

SEQ ID NO: 375397 - protein, 410 aa, unidentified
MRYYLGVDWADQTHAVWVVDENGVKITALAVSHTAEGLGAWGRELDEWRAQGIDLWAAIERPDGRVVDFLLDHGVAVYPVNPKALDRARDRFRQSGAKSDPFDARVLADFLRTDHGHLHALQPSSEAAQELKLLTEDCQRLIRQQTRLVNQLTATLKAYYPRALEVAELTSALAREFLPAYPMPAALTTLTERQWQRWARAHRLTEARTGELWAVLRQPQLPVPAHVVRAKARLMQTLMEQLLPVVAAVAQYRKAIDDFFASMPAAQWARTLPIGKHGITAPTLWARLGDAPGRWESFRHLQAHAGTVPVTKRSGKQQRVVQFRFACDKALRSVVDQVAFLSMLSSVWARAYYDQQRARGHSHRQALRALGAKWLKIIFVMWQHQIPYDEQYHLATMTRQQLRQRQNQIA

SEQ ID NO: 375398 - protein, 400 aa, unidentified
MLSIGIDVSKGKSTVCGMKPGGEIVYAPFEVQHTREGMSELVSLLRSSGEEVRAVLESTGSYHCPVVAALLENGIFVSVVNSLRMKRFCSQSIRKVKTDRIDAMQIALYGLAYWQELQPARLPEDTYRELQLLARQYYQMTSLLIKAKVDFNAICDQVLPGMQELMSDHAGRHKLSDFVLRYHHTTHILEMGETRFRKDYCKWAEKKGYRNCERMAALIFATAQNGIPVLPNAPSTQIVITEAIRVLHTVEASRDAILTQMQALAKTLPEYSLVREMPCIGDTLAPRLIAEIGDVRRFHSKRALIAYAGIDAPPYQSGKFCANNRHISKRGNRYLRKTGYEVMQSYVMHKPANDPIFTFIEKKRGEGKSGKLAMVAGLNKFLRVYYGKVTELYRSLPAIE

SEQ ID NO: 375399 - protein, 367 aa, unidentified
MKGELEHKKVLVIGEEVFIGVDVHKASWHVTARTEGEEVFHGGIPSQYHALRKLLDRFKDCKIKVAYEAGPCGFWLYDRLTEDEIETIVAPPSLIPVESGNKVKTDKRDSRKLARLLESNMLKRVYVLKEEDRVDRELLRTRRQIVEHRNDVARQIKTKLLFYGIRSPFASRDRWGQKYLQWLRGMELPRESLRACFESLIELYEYLTDQLMKMNERVKELSQSLKYRQRLKLLCSIPGIGTLIGMEILVELPEMERFKSGDELASYIGLTPSEYSTGQYVRQGRITRCGNKRVRTCAVEGSWILITKDPWMRSKYLQLKAMKGAKRAIIAIARRLMVRVRKILLTGEPYRIGTLGAIRQRFAVSKA

SEQ ID NO: 375400 - protein, 315 aa, unidentified
METSAVFMGIDVSKAQLDVAQRPEGQSHVFTQTPVGIKSLVAHVRALNPSAIALEATGGLEVPVASALAVAGLPVAVVNPRQVRDFAKATGRLAKTDAIDAHVLARFAEAVRPAPRQLPDVATHEFSALLSRRRQLIEMRVAEHNRLGSAPHRIQQQIRKHLTWLDRQVAAIEEELAQRIKSTPIWRERDHLLQSVPGVGPTLSRTLVAELPELGTLTRHQIAALVGVAPLNRDSGTLRGRRTTWGGRAVVRAALYMGTLAAVRWNPVLKAFYQRLRAAGKAPKVALVACMRKLLTILNAMLKHRTPWSSVVQGT

SEQ ID NO: 375401 - protein, 388 aa, unidentified
MLVQQIAPVADEEFAPLFAALELSRSKWLVGVGAPGRWAVRRHEVEGGDLDGLLALLQRLVREEERRAGHSVKAHICFEAGRDGHWLYRALRVAGYDVYEIDPASVAVDRRARRVKSDGVDVDKLVRVLSRLVRGERDACRVVEVPTLEEEDAKRPHREYERLVKERTSHGNRVKGLLFAHGIRDFDPMASDRLERLAELSIPPKLKAELRRECRRLALLIADVAEVEAEMKAALVPSRKGKAKAAAAPPSPIESQIVQLFRLKGLGVHFSTVLSCEVFYRKFRNRRGVGQYIGLAPSPFRSGDMARDQGIAKAGNSRARKAMIQLSWLWLIHQADSALAQWFRQRVGDQKGRVRRIAIVAMARKLAVALWRYLETGLIPEGAVLKHA

SEQ ID NO: 375402 - protein, 360 aa, unidentified
MKKVNKQMRKMEAADKPEMTLGLDMGDRYSHYCLLNAEGDVVEEGRMQSTEAALRRHFEGKPRLRIALECGTHSPWVSRLLTELGHQAIVANARKIPAITGSESKNDRNDAEKLARFAAYDPKLLSPLEHRSPERQLDLNLIHARSTLVRARTMIVNALRGLIKSAGGRLPACSTESLPDRASSAIPAALAVVAKPLLQQIAFLNRQIDGMDKQIEKLAAKYPEIGLLRTAPGVGPIVAAAYVLTLDRPNAASNRSAGAFLGLRPGQSQSGDADPQRRISKTGDGCLRSLLVQSAQYILGRFGPDSELRRWGLKVAATGGKRGKKRAVVAVARKLAVVLHAMWRNSQRFQAFPQPVTAAA

SEQ ID NO: 375403 - protein, 345 aa, unidentified
MIIGCDYHPSWQQVSWVDTETGECGERKLVHATGEAKVFYQQLGAPALIGMEATGNSQWFIELVEDLGHAIWIGDAAQIRASYVRKQKTDKRDAAHILKLVVENRFPRLWTPDREQRDLRQLVLHRHKLVEIRSRVKNELQHLSMNKGMQKKATLWSQAGQKLLRQLPLKPWASCRREDLLGLLEMLNQQIGKLDQAVQKAAEEHPQARLLMTQPGVGPNTALAYVLTIGDVTRFPRGKQVASYLGLIPREESSGGRQKLGAITKQGNRLVRSLLVEAAQIAVRFDPGFRKQYLHRCHQKPKGVAKVAAARRLAVRLYWMLRTQTAYPEIVRIESSPRVPLVGAS

SEQ ID NO: 375404 - protein, 460 aa, unidentified
MGDEDRRSQTDGAGVDGFPVLRTNVAGIDVGSEHHWVCARARTGAGREVAVFGATTPGVEQMAAWLKERGVTSVALESTGVYWIVPHEMLERAGFEVVLVDTRELGRVPGRPKSDRRDCEWIQRLHSCGLLRGAYRPIEQVCLLRTLVRDKGTLVAERSDWLRRMQKSLDQMNVRVHRAVAELDGATGMAIVRAIVAGERDPHRLAALRDRRCRKSEAEIAEQLTGHWREDHLFSLQQGLKMHDAITERIQEYEREILRQLAQMTPAARRDDQAPTPTQVTKARAIKKRGEDPLRHALYRMSGVDLTAIDALGVETVSVVLSEYGPDLARFPTEKQFVSHVGLAPHRPISGGKPVKKRKKPASTSARVGAALRMAATSMRRSQTALGAYYRRVAQRLGADVAVFATARKLAQWIYRVLRWGPVYVDEGAAAYEKRYHEARLKRLATTARQLGYTLVSVEA

SEQ ID NO: 375405 - protein, 322 aa, unidentified
MDAIVVGIDVSKDKLDIAVLPQGQTFAISRDAKGLDGLIARLKPLAIEAVAVEATGGFEAVVAASLAAEGLPVIVVNPAQVRAFAKALGQRAKTDPIDAMVIARFAMATKPEIRPLPDEATRFLNDLVCRRRQIIEMIVAEKQRAMRLSNKRLQQSIARLIKALEKELAGLDTDIDVAVRGSPAWREKEDLLISVPGVGKSTARTLLAVVPELGALRAREAGSIVGCAPFTRQSGLWKGKSFISGGRPAARSALFLSALVAMQHNPQMKGFYERLVGAGKAKKVALIAVARKLAVLLNAILRDKRPWRFSSNQGLAHAKASI

SEQ ID NO: 375406 - protein, 371 aa, unidentified
MLQPIRYVGLDVSKERIAVAVAEPDGSVVEYGDIPHDPGSVRRLIERLSREGLVKTAYEAGPTGYPLHRQLTSLGIENKVVAPSLIPRRSGDRVKTDQRDAVQLARLLRSGDLTPVWVPDEAHEALRDLVRARDDARTEGLRAKHHLGKFLLRQGVIAPARVGRAWSAQHQTWLNTLTFPARAAQVTFDDYLACVRAAVERVRRLDAALLECGAAGPHVELLRALQTVRGIAFLTAVTIVAEAGDLHRFRSAPAFMAYVGLVPSEHSSGGSRRRGHITKTGNRLLRHVLGEAAHHARLQPRVSEALRQRQQGVPKAVVEISWRCQQRLHHKYRHLGGRIGRQRAISAVARELAGFVWAIGQAVQPVAVAAA

SEQ ID NO: 375407 - protein, 391 aa, unidentified
MIYVGIDVAKDKHDCIIKNSVGEVVCKTFTIKNNLDGFNDLYQKIESVMEDVSKVKVGLEATGHYSYNLLGYLIDKGLPTFVINPLHTNLYRKSLSLRQTKTDKVDASTIASMLMSDVNLKSYSDTSYHNEELKSLTRYRFDKVKERAKLKTSISRLVCILFPELEKLVPTLHMNSVYSLLYEFPGAKQVASAHLTRLSNLLAEASNGHYDKNVAITFREVARASIGSNMPAKSLELKHTIKLIRELDSEIDEIEGEIKAIMDTINSPILSIPGISYRMGAMIIAEIGDFDRFDSADKILAYAGLSPSTYQSGQLDNCHPRMEKRGSRYLRYALFNATIYVCHWNPTFNAYLAKKRAEGKHYYIAVSHAAKKLVRLIYQLEKSHQSYNKAA

SEQ ID NO: 375408 - protein, 412 aa, unidentified
MRRVIGIDIHRTFGEVVFWEDGRLRPAGRIDMTRTALEGFGKSLQATDEVVIEATGNCMAVSRVLSPFAKRVVIANPLQVKAIAHARVKTDKVDAGTLASLYAAGYLPEIWTPDAATERMRRLVARRYQIVRHRTRIKNEVHAILHAHLIPRCPHADLFNRRGRAWLTRQPLPDDERGAIERHVRELDRLGDDLAVLDREIAASALDDPAIKRLITITGVNLTVAAGLMAAIGDIGRFQSPQKLVSYFGLNPRVRQSGLGAAHHGRISKVGRSHARAMLVEAAWAAAKAPGPLHAFFVRIRARRGHQVAAVAVARKLTVLCWHLLTKEEDYLWARPALVANKLRAMELQAGNPQKKGNRRGPTYIYNVKALRQQEMRIAEQAERSYQHFVERWRPRPPKDRARGRLKPAGRE

SEQ ID NO: 375409 - protein, 345 aa, unidentified
MKKVVAGMDLHSNNVVIGVMDMDGKRLASRKVSCELKEVVKFLAPFKSRLEKVAVESTYNWYWLVDGLQAQQYPVVLANPAGMEQYSGIKHADDTNDAFFVAELLRLDILPTGHIYDAELRPVRDLLRRRMMLVHQRTALMLSFKSLYTRTTGQEMRLGELKDLEIKEAQKLYVHPANQLIAGMQVKHIEQLTESIEKIEKVVMACARALPPYSKVATLPGVGIILEMTLTMEVGDIKRFASAGDFASYCRTVAAQRTSNSKRKGENNSKCGNKYLAWAFVEAANFARRFDPACRKWYDRKAARTSNLIATKALACKLAQAAWHLMSGGTEYDSQRMFGQPAKIK

SEQ ID NO: 375410 - protein, 342 aa, unidentified
MQVTTIGLDIAKNVFQVHGVDAKEKVVVRKQLRRSQVIAFFSALPPCLIGMEACATAHYWARELRKLGHEVRLMPAKDVKAYLKRNKNDAADAEAICEAVRRPTMRFVQIKSAEQQGQLMQHRTRDVLIRQRTQIINALRAHLAELGIVAAQGDAGVNELRAIVADDRNERLPIDARASVIVLAAQLEALQTLIGSIEKRIKVQHRSNETSQRVESIPGIGVLGATAIVATAADPTVFRSGRDFAAWIGLVPRQDSTGGKQKLGPISKQGDRYLRRILVVGAIAVLRRAQENPGKYPWLTQLLARRPFKVVAVALANKMARTAWALMVHGGTYRAPELAEAA

SEQ ID NO: 375411 - protein, 339 aa, unidentified
MTEEKGFIWAGIDVSKRTFFAAIDIENEAEKLPVAKLPAKEFKRSKDGVASFIKWADELLEDQEFAVVMEATGSYSLELISLLKNQRTDLRISMQNPRMVSDFIRSLNQPHKTDKTDAQAIARFGTERKPEEVSLPEPHWAELREIERLRSAMVRVRVELENRAESLFTAFARRTNQRTIGSLNMEISELEREIKHLVLEHEDIHSEVRILTSMPGVSFVSACAILAELGSLKQYDQKQISAVSGLAPRRMSSGTSLNKSFMGRNGSKRLRQILYLDSIYAVAKVPLLNSMYERLIAKGKSKMTARCACMRKLLLILRAMVVNNKPYEENYSKTFPKSA

SEQ ID NO: 375412 - protein, 378 aa, unidentified
MGKYTTYVGMDVHARSIDAQAMSIETGEHFRKTFTGCPSAADVAEWLATLPQPVYSAYESGCTGFWMARGLNELGFACDVIAVSTLPKSTKDKQRKCDKLDAKAILREIANPASDYTTVWIPDEKTEAEGDPPRAHRAAVDAAKHAKQRLLAFLQRHGHVWCEKTRTGRPKKAWTRDFEAWLDKISFSEDAAEKAFEAYRRQVRDACQEVKELKALVRELAGSSEHKPYIDALALLKGVEVENAMLARVEFGLFSRFDAGRKTSCWLGTVPSNGSSGPAESHGRITKAGNKHLRRALIEGYSGIATWKSGRKAVPEGIGVSGAVQAIAAKANARLYERYTHLRACGVNANKAKVAVVNELVRWIWVIGCAIEKEQANA

SEQ ID NO: 375413 - protein, 351 aa, unidentified
MERYIGLDVHAASTTCAVIDARGKRVRVDVVETNGQALIEFLRMQPGTLRLCLEEGTQAQWLAEILSPHVAQLALVHVRESRGPKDDERDALALAEQMRTGKLDTTVYKQVGAFGALRNLVKTHSMVVQDVVRTQNRIRALFRSRGVPVAGKSVYATKERETWIAKLPEHARSAGRLLYAQYEAVNDVRADAEHKLIEESHRHPITRVLETCPGVGPIRAAQIVSVVVTPDRFRKRQQFWSYCGLGLVMRSSSDWVKNDSGTWARATVNKTRGLNFNHNHMLKQVFKGAATTIITQLPEHPLRADYQRMLDAGTKPNLAKLTLARKVASIVLAMWKHQEGYDTVKHSKPSS

SEQ ID NO: 375414 - protein, 319 aa, unidentified
MTNLSEKCYIGIDVSKAVLDVFILPLKKSMVVNNNPKGIEKLVKILKSFPAVTIVMEATGGYEKLIAQALAKAALDVAVMNPRQIRDFAKALGRLAKTDRLDSQVIALFAEKMQPKTNVACHENQQQLAQTHARRRQLIDMIIMEKNRLDKASKELRKSIKRIIKALEKELEEIEKTLETIIQNDTNFAQKSELLQTIKGVGIVVATGIIANLPELGNASAKAISGLAGLAPLNRDSGTLRGKRTIWGGRASVRSTLYMATLVAIRRNVQIKAFYERLCAAGKQKKVAITACMHKLLIIMNAMIKHHQPWQPEIATVKI

SEQ ID NO: 375415 - protein, 318 aa, unidentified
MTSFLGIDISKETFYASLLSDRCEAKKVFPNTQKGFEQLAAWLRNRHAKDISICMEATGAYWEGLAMYFHGLGHRVSVVNPARIKAFAQSELLRTKTDAVDAALIARFCKSQAPEPWIPSPPEIRILQALMRHYEHLKTTRAQQSVYEQSSEAAVVKMSIREVIATLDAQIAQVEKEIRQHFDDHPELKRKRDLLISIPGIGETTAGSLLAEIPHLDRFESAKAVAAYAGLSPRQRRSGTSIHGRPRLCKTGNSRLRKALYMPAIVALRFNPVLRVFADRLTALGKNKRLVIGAVMRKLLVLAYGILRSGTRFDPNYA

SEQ ID NO: 375416 - protein, 350 aa, unidentified
MSEQYAGKQIVGMDLHRRRSVLVRMTETGERLETVRISNDPEYLRAVMTRACEAPDVVLEACYGWYWAADTLAELGATVHLAHPLGVKMFSLRRVKNDERDAADLADLWRMGRLPEAWIAPPACRELRGWVRHRAKLVGLRSNLKCQVHAVLANAGVQVGMSDLFSAGGQDLLARVALTPESRARVDSALRLISGLDFEVELFGKLVANRLRSDPGYLAIQAIPGVGPVLAAVFVAEIGDIGRFARPEQLASWAGLTPKHHESDTTVHRGPITKQGSRLVRWAAVEAVQRVGGHTRLGQVRDRVGQRRGRNIGVVAAARELTELVFYGLRDGRLRCLTTPSASNTANPAA

SEQ ID NO: 375417 - protein, 361 aa, unidentified
MKVETPKKTKAPLESPLARVCVDLSKSTFHVVGLDAEGNKVLRRKFNRENFKEWLARPDLPKVIVAMEACGGAQWWGAYCQSLGHTPMMIPPHQVKPYATSQKNDFNDAEAIGEASLRPRTTSVPVKTPNQQDLSMLIAARQGMIKERTALASRIRAFLLERGFALPRGIGHLEGRLSDLLDDGTNSLTLVTRTLIRTLQSDLRHLSERIGEIDSMIKALARTDETSQRLQTIPGVGPIVAASLIAVIGDPGRFENGRDMAAFLGLVPSQHTSGDKIRLGRITKHGDTGLRSLLVEGAHAAIQAAETTGSGKMKDGKLRAWILELKKRKETPNKVAVALANKIARMAWAIWTKGTIYTAAA

SEQ ID NO: 375418 - protein, 340 aa, unidentified
MSLVLQSLLPYPHSCQGTSPHQQGWDTKMAMLSFCGIDVSKDRLDVVVLPEGWFFSVSNDTAGWAELVVRLRPLTVSAIGLEPSGGYERGIIRALLAAGLSVRRINPNKLRQFARARGVLAKNDRLDARLIAEYVAIMPTRVVQRDAAVERLAEIVTMRRQLCDEHVAAENQAAHLEDAMLRRLSKRRQMRLEADIRLLDKRLAEMVAANVALAQRYELLTSMPGVGPVLAFTLIALLPELGKMTRKQIAALVGLAPYDFDSGKLKGHRSIYGGRMPVRNVLYMAALSASRYSPALKAFHNRLADADKKSKVIIVAVMRKMITTLNAMLRDNAAWQPQSA

SEQ ID NO: 375419 - protein, 310 aa, unidentified
MLYCGVDLHTKSSNFCLVNRRGKRVAEGLVPSSRRGFTTLMVSGKGEEIHVVLEASTRSRWAAGVLEGLGAEVTVVDPRKVRVIAETKHKTDRTDARILADLLRTGALPPALWRAPRGTRELRDQIRLRWGLVQQRSSLLVRARSMLASVGISLGNRALARDAMWDRILKRREVTPKMKRLLEILRQSVEALSSAIVEVEREYASRLEDPDVRRLQGIPGVGPVVALTTLASLGDPGRFRDSRSAAAYTGLIPSERSSGGHQRRGHITKGGPSELRRVWIQAANAALRMRDHPLKAWAQKLIYRAGQWPL

SEQ ID NO: 375420 - protein, 350 aa, unidentified
MLIIGCDYHPGFQQIAFVDTGTGECGERRLDHMQGAEQFYRDLRGHGIEARIGMEASGHSRWFERLISELGFELWVGDAAAISTKRVRKHKNDRQDAELLLTLLLENRFPRIWVASREERDLRQLLWHRHRLVQMQTRLRNQLHAVALNEGVRLKKRLWRPKGRAQLESLVLAPWGSRRRQDLLRLLDQVDATVAELTAAIENEAEKRPEVVRLVAHPGVGALTALAFVLIIGTPERFARSKEVSSYLGLVPTEDSSGERRHLGHISKQGNTLLRFLLVAAAQITVRSDPDWRRRYLHLAMRRERAVAKIAMARMLAVRLYWMWRNEWDYAQLPKLGSHAGQPGNRLGRQ

SEQ ID NO: 375421 - protein, 355 aa, unidentified
MLYLGIDQHARQITISLRDKSGDVLEARQVSTQPERINAFFEQLTRQRLRKGELFVAVLEVCGFNDWLIRMLKDYRCHKVILIQPYDRKKRKTDRRDAAALSELLWVNRDRLLDGKPVRGLRQVDVASTSDQENRRLTTLRKEIGQARTRLINKIRHMLRRHNMQWEMPTKTFPTQAAIAWLKKITLPAIDRLEMNYLLVDLQHVEQRVKELEETIAQRCGASEDAVLLSSMPGVGCFTATGLASRVGRVERFPRAHSLANYWGLTPGCRNSGENNQRLGSITKAGSGMARWLLAQVARNALQKDARLRAWFKRIRRRRGASIARVAAMRKLATIIWHMLSKRKTYKECRALAAA

SEQ ID NO: 375422 - protein, 411 aa, unidentified
MQVVHERCCGLDVHKKTVVACILMTLTNGEVQRHIRTFSTMTAGLLALSDWLESLTVTVIAMESTGIYWRPVFNLLEDGRTVILVNAQHMKAIPGRKTDIKDSEWLADLLRHGLLKASFIPPAPIRELRDLTRYRKSLVQERAREVNRVQKVLETANIKLSSVATDVLGKSGRDMLSALIEGTTDVEILAELARGKLRKQLPQLQQALDGRVQAHHRLLLKHLLAHIIFLEETLEQLQQEIEQHLCPFEETMTLLMSIPGIAALAAAAILAEIGDDMTRFPSAKHLASWAGVCPGNKQSGGKRLSGKTTQGNATLRAMLAEVVWVLSHMKDNYLSAQYHRLARRLGKKKAVVAVSHSLLVIIYHVLSTKQPYSDLGADYFEQRDSARLTQRSVRQLEALGYTVTLVPKEVA

SEQ ID NO: 375423 - protein, 323 aa, unidentified
MSKIIGIDISKQTFDVSYLEKDKWIHKIFKNQNRGFEQFTKLIGTSDWIVMEASGPYYVQLATFLHASNFNVCVLNPLIIRRYSQTRLYRAKTDKKDAKTIAEYGAQYELKRWCPESKPSIEIKQLYTALELLKKQKHQTKRQLESFEVTGLLSPDLRKELKQVLILLIRHIDKFEKKIEQIGKLAYKDTVERIKTIPGIGLKTAIMMSVITDNFTKFENYKQLTAFVGFSPRLYQSGTSVKGKGHICKMGKPQIRKLLYLCSWSAKRVNKTCMEMYKRLKEKGKPDRVIKIAIANKLIKQIFAIAKNKKYYNENHQSLYCIN

SEQ ID NO: 375424 - protein, 351 aa, unidentified
MDATTVAVDLAKDVFEVAMANQVGRILERKRLTRRQFEAFIDALPGGTRVVMEACGTAHYWGRRCQAHGHDVQLLPVQYVKPYVRRNKTDRLDTEALLEAARCAGIHPVPVKTSEQQALQALHRVRTQWQRTRTARINTLRGMLREHGMPIAQGARSVLTKMPRILEDAENGLPAQLYLALARVYDEVRALERDIKDIDRQLARVAAADPVAQRLLTIPGIGVITATALLGAVAHIHAFRRARHFASWLGLTPRERSSGFRRHLGRISKRGDVYLRCLLTHGARAVLLTAQRTLRGKGHGTRVQHWAVAVAGRRGHNKAAIAVANKLARVVWAVWRGERDFSGGPQLPVAA

SEQ ID NO: 375425 - protein, 437 aa, unidentified
MERETIFEMVNFHSAGIDIGAEKIFVSVDGKSVVNFRTFTEDYLQCVEYLKSHQVERVAMEATGVYWIAFYEILEDNGFEVCLVNPKEVKQVKGRKTDVKDCQWIQKLFSVGLLKESYIPAGKLKELRMLVREREDIIDMGGTYVNKMQKALELMNIKLKNVLSQIHGVSGRRIIEAILKGERDPEKLLSLCYSSVIKNKSEEVKKALAGNYNESWLFLLSQNLKMWKQHQAHLLAVDKKIESLLTELTATRPTITSSSKQKPIRHHKPEIDSLHQKMLDLYGVNISTLSGITDYSALRLVGETGFDLNNFPSVKHFISWCRLSPRNSQSGKVNRRLRTKTSSKTGQIFREAAQSLLQSKNTAIGAFMRRIRSKKGAPVAIKAGARKLAAAYYNIITQGQEYVEQGLKKYEQKNREREIRLLSLLADKHNMSLIINT

SEQ ID NO: 375426 - protein, 438 aa, unidentified
MKVMYERVAGIDVHKDMIKVAVRSPGDKPWTRKTEILTFRTFYGVLRAMARELRRRGVTHVVMEASGVYTEPVYYALCEEDFTEVAVVNPAHAKALKGHKTDAKDCARLAELFECGLLQGSYIPAAGLKEMRDLSRYRMKTVQARTSEIQRLAKALESAGIKLGSVASEITGKGPVAMIEALISGERRGAVMADLAKGRARTAGKLADLSMALEGRFTDHHALMCRLHLDRITALDAAVADLEARIAATAADWQREIGLLKTIPGFGDIVAWAWIAEIGPAPHQWFASHHKLASWVSLAPGNNVSAGKRKYGRTGDAGTYIKPMLIQAAWAATQVRGRLQARYNRLVRRLGGPKNPAAKKKAIVAIAHTLLKIAYTVLKSGTGYQEPGADFYTRRESPGHRQAWLERQIQKLHPGCTVTITISPSPDPAPEAALPLGA

SEQ ID NO: 375427 - protein, 422 aa, unidentified
MEDERNWFVGVDWASETHHVRVSDARGRKLGERAFAHSGEGLAAMATWILEVTGAPPEAVFVAIEVPYGPVVESLMERGFRVHAINPKQLDRFRDRFSPAGAKDDTRDAEVLGDALRTDPRCFRALQPLDPVVVELREASRMAEDLKQERNRLGNRVRDLLWRFYPQMLGLTDDVAAPWFLDLWRLIPIPEKATRVREVTVDRLLKRHRIRRLSAADVLEALRRPAILLAPGTVSAAVSHLEAIAKRLDLVNRQMLAVDERLDRLTQSLAGAQERAGGQRPEPCDVTILRSLPGVGRIVLATLLAEAVEALQRRDDRALRCLAGVAPVTKRSGKSRIVLMRQAAHVRLRNAVYHWARVAVQHDPRSQAKYAALRARGHGHGRALRSVADRLIGVACAMLKAKTIFDPNLASQRAPNLGKPTC

SEQ ID NO: 375428 - protein, 359 aa, unidentified
MTDASRGEPMMTTAGIDLGDRYSYLCFLDTRSGEVIEEGRLRTTPQTFERRFCSERPLRVAIEAGTHSPWVSRLLEECGHEVLVANARKIRLIYAEGRKTDRVDAEKLARLAWLDPKLLAPIEHRGERSQAHLALIRSREALVRTRARLINHVRFTVKPFGHRLPKCSAQAFHKKVAEGIPESLKPSLAPILETIGELSARIGEYDRKLEALAEGFYPQTRLLRQVQGVGPLTALAFVLILEDPRRFASGRAVGAYAGLVPGKDQSGESDPQRRISRHGNELLRRLLVGCAHYILGPFGEDSDLRRHGEKIAHRGGKNARKRAVVAVARKLAVLLHRLWLSGEVYDPLYNARRAGEYAA

SEQ ID NO: 375429 - protein, 420 aa, unidentified
MNQNILTTLFVGIDVDSQFNVVYMMNFNQTKLDSFKVKNDINGVTTIKNKTLEVLTKNNLSTVTFVMESTSIYAFHAATFLSSDTSITKYVPKVYCINPKITCNYRASFPDKDKNDVIDSFLLADLARVGRCDKMSTWRGAQFVALQRLTRHRKHLAQILANEKNYALCNIFLKFSGICTAPNNESPFSDMFGVTSASILNEFVSPEDIINTPLEDLVQLLNEKSKGKIKNTNNTAELLKQAAVNSYRLDKVSLEPINLAITSSINCIRAYEKEIKVVSKEIEILTKGVNETEYLSLTSIKGIGPVFAAGIIAEIGSIDQFKNDEALAKFAGITWRHHQSGKFEAEDTPLTKTGNSYLRYYITEAANQVRKYIPEYSEFYKKKFDESTTHKEMRATILTARKLIKLIYAVMSTRTLYKQK

SEQ ID NO: 375430 - protein, 411 aa, unidentified
MDIVNARCAGLDVHKATVVAGVRVPGPRPGERRGETKTFATTTRGLRELTDWLIGHGVTDVAMESTGVYWRPVYAALEGLVQVVLVNARHVKMVPGRKTDVKDCEWLAQLLECGLLRGSFVPPRAVRDLRDLTRLRKALIRERGHHVNRIEKTLELAQIKIGCVVTDLMGKTGRAILEALSAGIDDPDQLAEYAQGLLRKKRAALREALVGRLTPHYAFLLQQHLSLIEALDAHLATLQARIETAMVPFADTAALVQTMPGVAARAAQAILAETGVDMSCFPTPAHFASWARLCPGNHESAGKRQNTTTGKGATWLRATLQETAWAAVRSKKSYYRTLYHRLKARRGAKKAIVAVQHAMIVALWHMLKHRVAHHDLGADYFERRNTARIRRHHIRRLEQLGYDVVLVEKAA

SEQ ID NO: 375431 - protein, 349 aa, unidentified
MIIIGVDFHPGFQQIAFVDRESGEFQEKRLAHREEAESFYRGLASAGEKIRVGMKSSGYARWFERLLSELQIELWIGDATEIERKRARKQKTDREDAQHILQLILKDDFPKIWVASWENRDLRQQLWHRHRLVQMRTRIMNQLQAVALNEGLSYKKRLWRGSGRQQLEGFQLGLWATRRRRDLLELPDRLNPTIAELSQAAEQEAEKCPEANRLMTHPGVGALTALAFVLILGNAERFECGKRVASYLGLVALEKSSGKRLRLGHITKQGNSILRFLLVEAAQATVRKNPEWRSKYFHLALRRGRSIAKVAMARRLAIRLYWMWREKKEYQQTRSFVSHAGQPGNLYRA

SEQ ID NO: 375432 - protein, 401 aa, unidentified
MNAVGIDVSKGKSMVCVMRPFGEVVLEPFEVLHTAQNLNDLAGKLKALDGETRVVMEATGNYHKPVAFVLHDAGLFVSVVNPVLIHDYDNNSLRRVKTDRKDAVKIANYTLDKWTRLRQYLPEDDTRLALKNCYRQYQQAVAVRTMLKNNLISSLDLTFPDANKLFSSPAKSNGCEKWVDFIGDFWHSECVSSLSSDAFAKKYLKWCQKHGYNFTRSKSDTIYACAVNAASLPKSPTSKLLIQQQVAQLKAVSQSVAAFQQEMLRLSQQLPEFDTVMEMYGVGPSLGPQLMAEIGDVRRFSSKKLLIAFAGIEPQPNDSGKIVGNDSGISKVGSAVLRRTLFLIMTVILKTQPQDEPVFQFMNKKRSEGKPYKVYMMASANKFLRIYYARVKAVMDSKHSK

SEQ ID NO: 375433 - protein, 395 aa, unidentified
MADGIRWVGLDVHAHESTIAIFDQGTGELGTARMVGRPHQLLERLMEVPVPARMVYEAGPTGYGLARRARAWGIEMSVCAPGRTERRPGDRIKTDKRDAVRLARLLAAGELAIVTVPSLERERLRDLVRCREDIRADLMRARHRLGKFLLRREVYWEGPGRAWSRAHRAWLAGLRFVDHASQVTMADYLHAHDVLVARRDRVEAELEKLVIESPCAQAVGRLRCLRGIDTLSALGLCAEIGEWERFDHPDRLSAYLGIVPSEHTTSSQRRQGSITKAGSTHARRLLIEASYHYRRQPGVGELLERRQRDQPPEVINIAWSAQRRLHARWRQLKDARKQPNGVVAVAIARELACFCWEIATWSGSHPDPVPPASLPAGDPLTQTRSIPPKQEPAIA

SEQ ID NO: 375434 - protein, 386 aa, unidentified
MRGKTFIPHDYAVFAGLDVDKRSIAVTFTNPQGFIRSLRVPYGVEHLLNHVRKHFPDQKIAFAYEAGPTGYGLYAGLVAQAYRCLIAAPSMIPKAPGQRVKTNRLDSVGLSENLRGGQLKSIHVPSGPYRELRHLTQLRDTFVSEMVGMKLRIKSLLLFEGIAFPPAPPGSQWSFRVKAKLRKLPCSGSVRCKLDQLLDSLAFSEKQVFKTTKEVRRFCQTDPELSQCLQYMMTVCGIGWIVASQLLARIGDWRELKNVRQLAGLLGLVPTEHSTGERTERGAITHTGDGRLRSKLIQAAWSAIRKDGELREFFRSVASTHPRNVAARVAIVAVARKLSGRISVVLRQQRAYGVREKVHSAPLTQEETLPQGTTRRQAEPGEAKDS

SEQ ID NO: 375435 - protein, 407 aa, unidentified
MDLLKTVFGIDVSSRKSNVCIMVNGQKVNDYAISNDMVGFNQLLGDLKQVTNPQIIFEATGVYSRRLQAFLDMHELRYVMMNPLEAKRKTKDDLHQNKTDKLDAMYLAKMQSEHPQRLAYVQSEEYQELMANNRIYEQASHDLITNKNRLHKAIQLTFPEIEHLLANPRGKNYWSIVLRFPHPDIVLETKEADIIDFLKGLTGIGKKRANDIAQSLIRLAKVACPAVKKNSAHIRGLKMAINNILSAEEECQTALQEMAKLAPKRDLEILTSIPGIGKNTALRIISELGDIRRFNNPSQLNAFVGVDPQVYESGNLTAHLSISKRGTAIGRKVLYLAINQIQSAKKVGNPCHIADYYEKRKRSSETASHKKAAIASIHKLLRTIFALIKNDQLYSYDVAKHNQRLLS

SEQ ID NO: 375436 - protein, 341 aa, unidentified
MKHYVGLDVSQKETSICIVDEAGRPIHQGRVKSDPGVLAAVIAKKAPNAERVGLETGAMSSWLWHELKRTGLPVVCIDARHAHAALSVRMNKSDENDARGLAELVRVGWYREVAVKSEESQTARSILVCRSRLVRVRRDLENQMRSMLKECGLLFPRAAGGQFQRRVNDLIADGHALGPILRPLLSVHQQTCSELEKIDRTIRDLAREDETTRRLMTVPGIGVVTALTYRHTIDDPTRFQNAAKVGAYLGLTPRRKQSGEMDVTGKISRWGDRLLRAYLFEAASVLLHRTKRWCSLKAWGLRLAKRSGMKKAQVAVARKLAIILHCIWVDGTEFEWGKQPA

SEQ ID NO: 375437 - protein, 326 aa, unidentified
MTTYVGVDISKDYYDVALMQAEDLVDEAQFDNTKEGFRQFGRWLKKRRSEDTHVVMEATGMYGEALAEWLYEKGYAVSVVNPAQIKAYSQAQLRRAKTDKADARLIADFARTQRPRLWTPPPPEIKRLRALVRYMNALQNEYQRERNREHAQQLADMKAMHGEHIAYLKAKIAEVKALIDAHIQAHPALADTVKLLMTIKSVGPLVAWHFVAEVDITRFSSAKELVAFLGLNPHINRSGKRQKTPSPISKMGNPALRRVLYMPTQSAKRFNLPVQVFYDRLIANGKHSAVATIAAMRKLVHIIYGVWKSGQPFDPHYETFQHALVA

SEQ ID NO: 375438 - protein, 357 aa, unidentified
MDSAQQLSFANTDFFIGIDSHLKNWKVTIRLEHLDLKTFSMNPSPLELLQYLRRHYPDGIYHIVYEAGFCGFWALRIFREHHIDCIITNPADVPTANKEKVNKSDPIDSRKLARELENKSLHGIYIPAIEREELRMLMRLRFRIIQTQTRIKNRIKGLLYTQGIPIPLQFSGRARWSHHFILWLQQLHLHTPAGDFTLQNLILQLTETRHHATNVLKQLRKEAQHPDLAPILNVLQSIPGIAFITARYLLTEIIDINRFPNDDTLANFVGLVPATQSSDETTYANGVSERQNKFLRPMMIEAAWTAVREDPAMTLKFKELTKRMKAQDAIIRIAKKLLRRVRHVWLHQEHYVYALVA

SEQ ID NO: 375439 - protein, 270 aa, unidentified
MRFYTNQHRFYCGIDLHARTMYVCILSYDGELLLHRNMPAAPEPFLKAVTPYREGLVVAVECMFTWYWLADLCAAQHIPFVLGHALYMKAIHGGKAKNDKIDSQKIAALRRGGMLPQASVYPAEMRATRDLLRRRTHLMRTRAELLAHVQNTNSQYNVPDIGKKIAYKANREGVAERCNDPAVQKTIEVDLALITYYDELLRDLELSIVQTAKQHEAHTLYLLQTVPGIGKILSLVLLYAIHDIGRFPRVQDFASYARLVKCSKESAGKR

SEQ ID NO: 375440 - protein, 342 aa, unidentified
MEHYAGIDVSLERSSVCVVDGSGKIVRETKVASEPAALIGWLGSLGFGLGRIGLEAGPLSQWLYMAMKQAGLAVELLETRHVRDAFKAMPVKSDRNDARGIAQLMRLGWFRPVHCKSIAAQEVRALLTARKLVQSKLLDVENSLRGILRGFGLKVGKTTRKNFAGQIRELVKGHPNLATIGEALLSVRAVLLGEFNTFEKQVRAMSCLNANAKLLMSTPAVGHIVALTYASAIDDPARFRSSKRAGPLFGLTPKKYQSGETDRSGRISKIGDTTVRAALYEAAHIMLTKPIKGCSRLKSWAMRIARRAGMNKAKVALARKLAVILHRMLVTATPFNDAAAAA

SEQ ID NO: 375441 - protein, 406 aa, unidentified
MAEETIGWFAAVDWGSEKHQACVLDARGGVAGEREFPHSGAGLAELADWVQSITGEASVVAIAVEVPHGPVVDVLLDRGFIVHSINPKQLDRLRDRFSVAGAKDDRRDAYVAASGLRTDRHLFRRVQAADPRVTELREWSRLAEELKQERVRLGNRLHHQIWRYYPQLLELTDDVAADWFLDLWTIAPTPAKGERLRKAAVEQLLKRYRIRRIDAETVLRNLRQPAIKVAEGVAAAASVHIRSLIVRLHLVNRELRDAERKLDELCASFEGGQQDDVAILRSLPGIGRINLATLLAEASGPLSRRDYPALRTLSGVAPVTKRSGKSHIVIMRYAAHGRLRNAVYHWARAAVRHDPKSRCRYTALRQRGHSHGRAIRGVADRLLNVACVLLQRQTLFDPDPNRPAVA

SEQ ID NO: 375442 - protein, 456 aa, unidentified
MGKSVKHIESIEIVHPNAAGLDIGAREIFACIPPNRDGETIQVFGTFTPDLHRLADWLISAGVDTVAMESTGVYWIPVFELLEARGLKVYLVNARHVKNVPGRKTDVQDCQWIQKLHTLGLLTSSFRPDGEMCALRTYLRHRAELLQHRAAHILHMQKSLQQMNIQLTQVLRDITGVTGMLIIRAIVDGERDGVKLAQFRDKRCRSSEETIAKALSGTWKEEHLFTLRQSLELYDFYTQQVATCDAQIQNQYSAMKPRWDAPTSKPDETSTPYSRKKKQKNEPQWDVRADIITLTGVDITAIDGIGPSLAQTILSEIGTDMSKWPTVKHFASWLGLAPHNDISGGKVLRSRTLPTRNRAGQAFRQAATSVSRSSSSFGAYYRRKRAKSGPMAAQVATAHKLARTVYHMLKYHVQYEELGALAFEQKQRERDVAALRKKAAKLGITLNIPEAVQNPA

SEQ ID NO: 375443 - protein, 389 aa, unidentified
MSKITTIGLDLAKKVFHVHGVDVAGNVVVARRLKRKEVLAFFAKLPPCLVGVEACGSAHHWGREIAKLGHTVRLMPPRYVKPYVKRGKTDPIDAAAICEAVTRPTMSFVPIKGVEQQGLSMLHSARSLLIGQRTQLINAARGHLSELGIVAARGLLGFAELAAIVRDERDQRLPATARAALMVLVRQIEAISAEIASLDSILMKENKASELGSRLDTIPSVGPVIASAFRARVTDAKLFENGRHLSAWIGLVPENDSTGGKLKQKGLSKKGDRYLRSLLVNGAMAVVRQAQKRPDKHPWVTKLLGRMSAKQAAIAIANKTARIAWAIMVHGGVYETGHRAPPISSAGVRGCPDKRLGDGVIAAAAAHDCNARARGTRRKASRVAEVLMA

SEQ ID NO: 375444 - protein, 452 aa, unidentified
MPARKDIIMHYQKVLKMLESIPYLSVGLDVGADFTWMSIMLPNGILTGKPFKIIHSDPQSRELAVTKIKEAQEMYSLESRCFLESTGIYHIPLLCFLRDKGFDCSVINPIITKNSTNMNVRKLHNDKFDSKKAAKVGQDTSLKTSIVPDDAIIDLRNLARDYYYFKDLQSAVVLKLNAELKVSFPAYLNVFSKITTQTSLKLLEAYPLAADMLAAPKDELVNIIRGTARFGEKYALAKYDAICVAAKDAAVFGRALPSNALRIRRYIKLYREYQEHLDSILEELHMAVDKLEGTPAYEHISITQSLRGVGFLSAVVLIAEMGSFDLFSSPKKLYAYFGLDPGVNDSGKLHGDRVHMSKRGSSLARRVLHMIAINNLKVDKATKAPVNPVIYDYYTRKCASKKKIVAVGAVMHKICNIIFAMLRDNKPFELITPEEHCERYATEHPRSVDVAA

SEQ ID NO: 375445 - protein, 386 aa, unidentified
MYFVGIDISKYKHDCFICTETGEVIEENLSFTNTNEGFIQLLNLLKSLDNSQKIRIGFEATGHYGMNLKLFLEKNNYSFMEFNPALVKRFISTQTLRRTKTDKKDAMLITKYLISVDYKPHPKQFYHKYSLKSLSRMREKLVKQRSYYEVQITNVLDIIFPEYKPFFNNDFSKTSLYILNKYKTPDKIKNMKDFDSIRKVSRGKFTSANFIKLKELAKYSIGISNDMFETELESLLILHSGIEVEINKLETKIESIIKELNPPILSIKGIGTISCAGIISEFGDLSRFKSADACVAFAGIEPSISQSGTESHTGHMVKHGSGHLRYFLMNAADYVFMHESIFTEFYYKKRSEGKSHRVALTHVAKKLVRIIYKLESENIIFNSNIN

SEQ ID NO: 375446 - protein, 342 aa, unidentified
MRPILYVGLDLGSSFCYQTVLNADGALERSRSIPTSEQNLRNAFADLQGDVRVHLEAGELSNWVYSMIAPLVAQVVVSHPRSLAWIGKDAVKDDRIDARKLAELLRLNRVHAVYCEADCSRQSFKQLVTHYEDLSREQARLKSKIKARLRTLGLIRKDGRLFSAAGQTALLDEIKEPIVKLMLAQSFAVLNQMLAALKEAKTAMRDFAAHFPEVELLQTAPGVGIITACRFVAYLQTPRRFSNKRKLWRYCRLGITRRESNGKRLAHPRLDNAGVGSLKDVSRKVFEAARRTKRDHLFKRFYEQSLTKTKNAVHARLSTQRKILATLRAMWLSMKPYQDSAD

SEQ ID NO: 375447 - protein, 315 aa, unidentified
MSDMPCFVGIDVATAQLDIALRPSGERWAVPNDASGVMTLVDRVQALHPTLIVLEATGGLERAVTSALATAGLPVVVVNPRQVRDVARATGQLATTDALDARALAHCADVIRPTPRPRPDAQTQELRALLGRRQPLIGMRTAEQNRLAGTNARLTKDIAAHMTWLNAAIATLDDDLETILRASPLWRENDDLLQSAKGIGPVCARTLLLELPELGTLTRQQIAALVGVAPLNCDSGTLRGRRMIWGGRAHVRTVLYMGTLVATRFNPQIKVFYERLLAAGKVKKVALTACMHKLLTILNAMLKHRTPWQPQEVQS

SEQ ID NO: 375448 - protein, 367 aa, unidentified
MSNYVTAIGLDVHARSISACAFDPMTGEVVRARFGYDPASVAEWVLGFESPKAVYESGPTGFHPCRALRALGVDCAVGAVSKMHRPAADRGRKNDRRDAEWLARLLACRNVVEVWVPDDRAEAARDLSRALEDARDDLQRARQRMSKFLLRHGLVFDETTPAGRRRSNWTEAYWRWARSIEFGEADDAAAHEHYMDAVERCAGAKRELGRKVEEAAARPERAPVVDALCPVKGIDVASAFLLAAEAGDFSRFPSAPSFASWRGLAPSGRSSGETESRGGITRAGNGHVRRALVEASWHVPMSTRHPEKPGPGHGVAPAASRHAAKCNRRLQDGRDAMSQAGKRPCVANCATAREMACRVWAIAPMAR

SEQ ID NO: 375449 - protein, 315 aa, unidentified
MTITSQVYVGIDVSKNRLDVAVLGQKVTTAAANTKRGITALVRQMHQINPKLIVVEATGGYEELLVLELYAAGLSVALVSPQRVRQYARARGLLAKTDVLDAQNLAEYGKNIQPRLFVAKSEEGRRLSAIVGRRRQLGDMHKAEKNRLRTAYSEMKSSIQTVIECLEAEMDRMDNEIRKFMKEHADFQEQEKLLRSAKSIGPVTAATLLADLPELGKLDRKQIAALVGVAPMNHDSGKKRGYRKTKGGRPEVRSVLYMSALSAIRYNPMIKAQYEQLVKRGKEKKVAITACMRKMLTILNAMLREQQPFQAVAMV

SEQ ID NO: 375450 - protein, 359 aa, unidentified
MEAQVTKIDFTGQNIYVGFDAHKKSWRVTVMAEDTIYKTFTQPPNPEILHNYLSRNFPGASYHSAYEAGFCGYWIHDKLLSFGIKSIVVNPADIPTTDKERVQKDDSRDSRKIARSLMSGTLTPIYIPSLKTQRDRSLLRTRSMLVRDLTRYKNRIKSFLYFYGISLDDSFNNTQSHWTNRFIKWLESIDTGEESGKETLRVLIAEVKHLRTSILDVTRQIRLLSQTEEYKEPVTLLKSIPGIGLITGMIILTELETINRFRNIDKMCGYIGLVPSTKSSGEKEKTGDITPRGHSVLRTALIESSWMAIRNDPSLMKSYLSYCKRMEPNKAIVKIAKKLLSRIRFVLNNNKPYICSVAK

SEQ ID NO: 375451 - protein, 342 aa, unidentified
MEHVAIDLGSSKSQVCVRAPSGEVLEESPMATASLAAYLSRRPRSRVVLETCAESFKIADAALKAGHEVRVVAATLVRQLGVGQRGIKTDKRDARALSEASCRIDLPSVHIRSLWAREQLTRIGMRHAMVTARTQLVNAVRGWMRTELTTVRGTTAHFPTNVRNLLLARPEGIPMHVEQLLKSIETLSEQIAAADAELKRLAKEHEVCRRLMTVPGVGPVTSMAFAAVVDDVQRFTTAASLESYVGLTPGEHSSSYTIRRTGITKAGPALLRHALTQASLTLRRVRPLDPACQWAARVKARRGGGIATVALARKLAGILWAMWRNGTTYEPRRAAEVPTQAS

SEQ ID NO: 375452 - protein, 343 aa, unidentified
MSEYVGIDVSLEEVWLCVMDEAGEIICEGKIVSDPDAIRDWILAYAPRAIKIGIETGPTSTWLWHALKALDLPVICVDARHAKRVLSLQLNKNDRNDARGLARLMRSGWYKEVRVKSLDSHLIRATMASRSLLVATRRDVQNQIRGLLNIHGLVVGKAYGHVFTTRVRELLASTPALLPAIEPLLNVRDELGRHIDALDRQTMAWAKDDEACQRSMSVPGIGPITALVFHTAIEDPGHFQRSRSVGAFFGLTPRRYQSGEIDRSGRISKCDDRMVRTCLFEAAGVLLTRVQAWSSLKAWGVRLAKTIGFRKAKIAVARKLAIILHRMWQDETTFRPGKEQPAT

SEQ ID NO: 375453 - protein, 348 aa, unidentified
MDHYAGIDVSLEYSSVCVVDASGKISREGKVASEPEALIAYFGSLRLAVVRIGLEAGPLSQWLYAAMKQAGLAVELLETRHVHDAFKAMLVKSDRNDARGIAQLMRLGWFRPVHCKSIGAQELRAMLTARKLVQSKLHDIENSLRGILRGFGLKVGHTTARSFAVRIRELVEGQANLETIAQALLAVHAVLLREFNGFEKRVRMMARQHGNARLLMTTPAVGPIVALTYAGAIDDPARFKSSKQTGAHFGLTPKKYQSGQTDITGRISKIGDAAVREALYQAAHVMLTKPVKGCPQLKSWAMRIARRAGMRKAKVALARKLAVVMHRMLADNKPFNPTAKTTAVAVAA

SEQ ID NO: 375454 - protein, 316 aa, unidentified
MEAVLECCVGLDVHQETVVACVVFGPLEHRPKKEIKTFGTTTPELLTLVDWLEERKCSHVAMESTGIYWKPVWNILETGPFQLILANAQRIKNVPGRKTDVKDAEWIGQLLRSGLIEGSFVPPVEIRNLRDLTRYRKKLLQDTTQEKNRIHKVLQDANIKMTTYISDIFGVSGRNILECLLNGEVITAENITKMVKGKIRSKVPGLVDALNNRLHRHHREMIRFSWEHLKYLERTILDVEVIIEQCLYPHRQDIELLDSIPGVGHTAAAVMIAELGTDMSVFPTDRHVSSWAGVSPGNNESAGKKKGLAQHQVIKR

SEQ ID NO: 375455 - protein, 375 aa, unidentified
MEHHSEAFVALDTAKLRNAVAIADAGRNGEIRYLGEIDNTEAETRKLVAKLASKHARLTFCYEAGPTGYGLYRLIKSIGHDCIVVAPSLIPYKPGDRVKTNRRDAVNLVKLLRAGELTAVWVPDARHEAMRDLVRARDAAVKDYRIKRQNVSSLLLRLGRHYPGKKTWGRTHINWLTGLKLEHREQRIAFEEMLLAVRQVRERIERLEQAMREAVADWTLAPVIEAVQAMRGIDMVGAIAFLAELGDLSRFENPRQLMAYLGLTPSERSTGESVKRGGITKAGNTRARRLLIEAAWSYRFPPRVSKDMQTRIGAAPRTAREIAWKAQMRLCGRFRTLTRKGKRPTIVVTAIARELSAFIWAINREVVGSHATANQ

SEQ ID NO: 375456 - protein, 373 aa, unidentified
MDRPCFRPASEHACAGQQQKERYAMPKSNTAVATIGIDPGKNTLHLVGLDARGGIVLREKVARARIVSRLANVPPCLIGIEAGMGTHYVTRELLALGHDVRQVPPVYAKPFRQTHKNDFRDAHAIAEAVQRPTTRCVPPKTDEQLDLQALHRVRYRLVGQRTAIINQIRCFLLEHGLTVRQRLHWLRHALPDILAQRTDVLSPRMVRILEDLAQDWRRLDDRIETVSGEIEALSKNTEPCRHLMTIPGIGPIISSAVVAAIGNGTAFTRGRDFAAWLGLVPKQISTGDRTILGRITKRGNRYLRMLFMQAARVVLLRPRNWMKNGYGPWLAAAAQRLHHNVLATALANKLARIAWSVLAQHRVYEARLSPAAV

SEQ ID NO: 375457 - protein, 375 aa, unidentified
MNTIAFIGMDVHTSSYTLCVYDEVTQDAKHVVRTEADPLNVLKYISNLRYRYYEPGTEFICGYEAGCLGYSLYRYLEGHNQRCVILAPSTMHREQSRPIKNDRRDAKLIAQCLAHGTYKAVYVPDEKDDAVKEYIRMRTDHKEALKKIKQQILALTARLGHQYAKGNYWTQAHLKWLRSLQLGGVYQETLLEYLATYDRLSEAIERFDARIEELAEDDRYRENVKKLVCFKGVRTHTALSLLVETGDFNRFEKAGQFAAYLGLVPGQHDSGGHGKNCGITKTGNKHLRTLLVEAAQGFSHGRPGSKGRVLKARQAGNPPDVLEYADRANERLRRKYGRLTAMSLKRSNVAKAAVARELACFIWGMMTGRLERRLS

SEQ ID NO: 375458 - protein, 337 aa, unidentified
MNAVIEAVVGIDVSKKKLDVVLMQAGKGKSKVFANNAPGHAQLGRWLVQHRCVQQSTHVCMEATGAYSEPVALALADAGWKVSVVNPARIKGFAQSELSRNKTDRADAGVLARFCAATKPELWQAPAREVRQLRAWVDRLQVLKDMRQQELNRIEALHSAEHAAIKAQVEAHVAWLEEQISALERDIDDHIDHHPQLRADAQLLQSIPGVGATTVAKLLAYAGDVRRFESAKALAAFVGTCPRQRQSGSSVRARTMMSRVGHKALRKALYMPSLVARRHNEPIKAFADRLAQRGMPPKGVIGAVMRKLTSVIYGVINSGLPFNPLLAMPRLDAQDGI

SEQ ID NO: 375459 - protein, 406 aa, unidentified
MDPTASNNPMEVIPMIIVAVDVAKDKHDCFITNTDGEVLFDSFVIRNDQDGFDDLFEKIRSVADSLQNVKVGLEATGHYHLNLLGYLLDKGLPTCLINPLQTSLFRKSLSFRKTKTDPVDARAIARLLMSDRTLQPYSLTSYQNEELKSLTRYRADIVRARAKLKSSLSRLVVILFPELEKLVPTLHMATIYDLLHEFPGASHIASAHLTRLSHLFSDASKGRYGKEDAIRIRNAARHSIGTVFPSKSLELQHTIAHIRFLDDEIDEIESQIFALLDKDPPKMLDIPGMGPRMAAVIVAEVGDFRRFSSPDKLLAYAGLSPTTYQSGQLTSTYAKMEKRGSRYLRYALINATKYVCVWEPTFRAYLAKKRAEGKHYNVAVSHAAKKLVRLIYHLETTGETYVSRAY

SEQ ID NO: 375460 - protein, 339 aa, unidentified
MEVIIGIDPHKATHVACAIDRTEAELAQLRVRAGKRQLEQLLAWAPPGRRVWAVESAGGLGYLLSQQLVSAGERVVDVPATLSSRVRVLASGRSNKNDPNDARSVAIAALRAPNLTVVTGDDHAAVLRMLAKAHLDLGRAKNRDASRLHALVCELVPGGIRKELVVSQAEAILAAVPLTSMVVRQRVELAHELLDDIVRIDAHMKASRKRIATSVAASNTRLVDIYGVGPIWASVLIGYTGDPRRFATADNYAAYNGTAPVEFSSGGRVAHRLSRRGNRTLNHAIHMVAVTQIRHAGTEGRVYFDAKVAAKKTKREALRALKRRVSDRVYRQLLADARR

SEQ ID NO: 375461 - protein, 334 aa, unidentified
MENIALIGIDLGKNSFHIHCQDRRGKAVYRKKFTRPKLIEFLATCPATTIAMEACGGSHFMARKLEELGHFPKLISPQFVRPFVKSNKNDFVDAEAICEAASRPSMRFVQPRTESQQAMRALHRVRESLVQDKVKTTNQMHAFLLEFGISVPRGAAVISRLSTLLEDNSLPLYLSQLLLKLQQHYHYLVEQIKDLESQLKRKLDEDEIGQRLLSIPCVGTLTASTISTEIGDGKQYASSRDFAAATGLVPRQYSTGGRTTLLGISKRGNKKIRTLLVQCARVFIQKLEHQSGKLADWVRDLLCRKSNFVVTCALANKLARIALALTARQQTYVA

SEQ ID NO: 375462 - protein, 528 aa, unidentified
MVVLPRLGDCAVSRSRPVRTNPSVRCVLMVKKHAPRSTMDFPVINANASGCDVGSEWVYIAVPPDRSDTEVRRFRTFTQDLREAVQWMLACGITTVAMESTSVYWIPFTQLLEESRIQVFLVNPRHVKNVPAAFKTDNRDSRWLRNLHAVGLLSASFRPEQAVCKVRSLARHRDNLTKQASRCVLHMQKALSQMNILLHEVIADVTGVSGLAVLDAILAGNRSPEHLARLFSPRVKATDEEIKKALVGDWRDEHLFTLRQSLASWRHFQSQIAECDTEISRLLSEFGDPPDPPDPPDPPDPTDTFVQAAAPEAPVQTEAPLEGDTSATCMASAESDASSKPKRKKPGRPANPTGTRAQERKKRDLLIRLFGIDITQIPGIGVGCAELFFTELGRDLSRFHSAQHLASWLGLAPNNNESGGKILSRKVRRMKNRLATQLRLCANTLGSTNTYLGAYLRKMKSRLGAPKGITATAHKLAVILYTVITRRTPYDETVFARQEERHREKRLNYLKQQAAAMGFDFVPRECVS

SEQ ID NO: 375463 - protein, 307 aa, unidentified
MTAVGIDVGKANLDLALDGQGSVIRFPNTQAGINKVVKRLQVLKATRIVVEATGGYEEPLLEACCDAGLWIARVNPRQARDFARATGELAKTDAIDARLLALMARLFADRLRCHVAPSPWQREMRDWLRRRGQVVTVLQAQKQQSAMAPASVRKLAARTIAALTREQAAIDRTIHALIKQHATPALRSSKGLGPVFQATVLGLLPELGHLDRRQIAKLVGVAPMNRDSGQGSGKRSIRAGRSAVRVALYMATLSAVRWDPLMKAHYQQLRARGKLGKVALVACMRKLLGIVNARRRDELRDEGLAMP

SEQ ID NO: 375464 - protein, 437 aa, unidentified
MEVRVIGIDLAVQAAHTAAIYAPAQQRFLVKGMRFRTRDKDMSRVLERACQDATEVRVVVMMEATGMSWHPVGLFFHRHGATVYRINGRYTKAQRKASWPYARSDRLDSMTLATMYASLPPQKLIPWTPVSGNLLALQRMGRELQRLVRFQTSIQLRLQAYNQWAWGGWRQLVPARYQEWVWRNFYDPWTVTAYGADWLTLRLQEAYPDADASWISRWVARAAAMQALYQDATAVGYDHLAQLIARELDRMAWVTQERTTLVKEHFLPLYHQLFPDDPLLSFQGIGPRSAAIYHSFILDIARFRNGDAFAQWTGMVPRSDQSGDARRPHMRLSKQGPNLVKATLYQNAEVARQWDVQLAAIYYTQMVDQGKHHTQSVCAVASHLARRIYAVLRDRRPYQLRDLEGNPVSKEDSRALILERFQVPESLRKQRRKYRQS

SEQ ID NO: 375465 - protein, 418 aa, unidentified
MKIVFPTCCGVDVHKSFLVATIIKTPQDSLQPSYQKKRFSTFNSDLNHFANWLHENNCLDVCMESTGKYWVPVYNILEKRGIRVIIANPKWVKAVKGNKDDTKDSKWIGDLFRIGLVKSSFIPAKDIRILRELTRYRYKLTSMKSSEKNRFQNAFTVCNVALDSVVSDMFGKSATAITDYLTSDENFDAKHCISLLHHSLKKKADDVFQAIEGYEMTAEQKTRIGIVRDHLHYIDALIERVDSCINTMVDKYEGYIALLCTTPGIDRSSAITILSEIGVDMTQFNSSKRLCCWAGLTPGNNESAGKKKSVRISRAGVYLKPALVQVAHAAVKDKHSPYYALKYERIAKRRGKKRAIIAIARMILTAVFVMLSNLEEWNPVDLYRVDMPEHLKEKQLAKAVKQAVRFLETQGLTVLDSA

SEQ ID NO: 375466 - protein, 343 aa, unidentified
MEAKRYIGIDLHRNCFTACLRLENGREYLKQWKLEDLAKFTFKLRPTDQVAVEVTGNTRLFHDAVAPHVERVVAVNPSQFKVITHSVKKTDPNDARNLALYLAKDLLPEVRMKDKTQAQIASLTQTRDTMVKLRTALKNKVNNLCSAHGVNLNKESLASEKGLRAVLEMQFDLLVNVELKIIVDQIRSLNKSIAELEETIGREGQKLEGHKNLTSIKGIGGLSSGILLSIIGDIADFADEGKLAAYFGIVPRVSNSNETERSGRITKRGTKLGRTTLIQCALIAQRYSPYLKTYYEKMKSRRGTGKAIVALARKFLGIIYRTLKNKWVFADFPNFVLAEEATA

SEQ ID NO: 375467 - protein, 401 aa, unidentified
MKYGVGIDVSKGKSTITILSLEGEIIESSFEINHDINGFIFLEEKLKNIDKDNSKIVMEETGIYHLPILNYLLSKNYFVVAENALKIKKYLDRGLRKVKTDKKDAYKLAEYCCDNWYRLNKARENSDIYNNLKLLSRQYLSQIAIKSKQKINFSNLCDLVFPGFYELLNDNIFLLGLQIFKKYYHPELVANKKQSQFVNEIDKMAKKLGHRRAGLTLASKIYTLARKTIPTCPNNNCIQLSATSCIDALILTIKTTDTIISEMDKLARNLPEYDVVKSMPGCGLKLTSRIIAEIGDIRRFKNAGSIIAYAGLDTPPYQSGQFEAKIRHISKRGNKYLRKTGYEIIKSIKCFCKDDSEIKSFIIKKENEGKVKKVAKIAGLNKFLRMYYGIVKNKYKTLNIW

SEQ ID NO: 375468 - protein, 371 aa, unidentified
MYIVGIDIGKNHHEASIVSPEGKQIGRSLRFATTHKGADSLMSFIFKNIGNSPCVFGMEATGHYWYPIYSFLKAKGYTIYVINPIQSDSLRKMYIRQTKNDSIDSFLIAEVIRFGQFGTTSMADENILAMRQLCRYRDSVISSRTEIKLRIGTIMEQIFPEYEKQFSSLWVSTSMGILEKYLTPENIENTPIDELFEIIKDKSHNRLTKAKAISIKEAAADTFGIKIAQDAFSFQLKQLIDRMNFLDKQIEALDIEIMKYYEQFDCYLHTIPGIGIIGAATILAEIGDISRFKNSSALVAFAGIDPTVRQSGEFNSTHNHMSKRGSPYLRHAIFLAATTCSFHNSPLNAYYKKKRDQGKHHLTATGAVARL

SEQ ID NO: 375469 - protein, 405 aa, unidentified
MPMNMQYERAFGLDLSKKTFHGCMLDGPDLGNRHFFTGEMGPQGKAKLAGRLCECDLVLMEAGTSSFSLARFLLENTEAEVVVLNPAKLYNIFNSTLKTDKSDSEKIARIARTMPRDEWPTVSIPTKEEQAERSTVSLEVFLAQEITMLVNRLYALFNSMGHPFIKKSDLKTEEARLTLANRLLCEEALAMEQAIMLSNQIEHVADQLEQCKQRLRDICLSHPKEALSLLSLPGVGLMTAASQIAFLNDGSRFNSPDSYVNYVGLSERRFDSGTKVSKGHISHMGNKCIRRNIIQAAWVASTKLKGNPLSMKYKDLILRGKNKPVAAVAIAKKMIQLSYILVKSNGIYEFTKQQGLGAFRRKLQYHKLTQLLDFLPEITKREMEEIDRTKRKEAAATTSSPKKFA

SEQ ID NO: 375470 - protein, 340 aa, unidentified
MSIVGGLDVHRRQITFDYLDEGSGVVRRGRIQANRQVLRRWLATEVIERPARFAVEACTGWRFVVEELATAGIEAHLAEPADTAAARGPKRRAKTDRLDARHLRDLLADRRLPESWIPPEQVTELRALLELFKDLRDEHTGWVQRLHATLFHHGAPAPDGDLLAPQARRRLEAGTGLSPAAHQQVLTALRVLDRLDSELVPLRRQLAAFARRQPGCRALQAHYGVGTITAVAIWAELGDTRRFSASRKAVRHTGLDITVHSSDDKRAAGRLSRQGSPLLRWALFEAAKCAARPGSPDHAYYTQVRDRAGGNRAALSVARKITRWAHHTLRDLGDEAFAPV

SEQ ID NO: 375471 - protein, 343 aa, unidentified
MEIYTIGIDIGKTVFNLVGLSVQGEVVVRKKFSRKQLLHFTANLRVGLIGMEACGGSHFLGRALRAQGHEVRLIPAQYVKPFVKTNKNDCIDAEAIAEAVRRPRMRFVPIKTDEQLDMQSLHRVREGWVGRRTAVINQLRGLLLERGITVRRGRRYIEAALPGILEDADSKLSGALRVLLLQAYSEMRHLQSQIDEADAAIRRMAGEDEACQRLVEVPGVGPVIATARISAVGNGAAFKKGRGFAAWLGLVPGQYSTGGKQKLLGISKRGNKYLRRLFVHGAHAVLQQRVKQSSGLSEWLGQLTSRVHRNVAVVALANKMARMAWAVLAKGERYRPPLLAETA

SEQ ID NO: 375472 - protein, 363 aa, unidentified
MILIGVDFHPSVQQVAYVDTETGETCERRLNHSDGEAERFYRDLERRQVRVRVGIEATGHARWFERLLAELNFELWIGDAAKIKAARVRKQKTDRQDALLLLKLLIEDRFPRIWVPTPENRDLRQLIWHRHRLVQMRTRAMNQLQATAMNEGVRRKKTLWSKAGRQQLESLKLAPWATRRRQDLLDLVDGLNGTIAELTAAIEQEAHKRPEVLRLMTHPGVGPITALAFVLVIESPDRFACGKKIGSYLGLIPEEDSSADRRRLGHITKQGNSLVRYLLTEAAQAAVRYDPDWRRRYIHLSKRRERAIAKVAMARRLAVSLYWMWRKGYDYQQHLKFGSYAGELELGHGVKKITAHLIGHPAP

SEQ ID NO: 375473 - protein, 345 aa, unidentified
MIVLGIDIGKREFFVSLQQSQDGGVIQVLGKRGPFANTPAGHQELTAWMLKRVSGDVQVVMEATNVYWERCAHHFHALGYVVSVVNPAQIKYFARSVLRRGKTDAMDAEIIARYGLVMHPGCWAPPSTALMDLKTLTREREFVLVRRTQENNHLIALRDAHHAAAVVLTLAQQRLDLLDQQLVALDAALHELVDADVTLAQPLKLLLSVPGFAFTSAATVLAETAGFSRLETAEEISAAAGMAPSPQQSGLKNGKGSISKTGNARLRRIAYLSALGTSKSHSRMKTFYQGLKARGKPPKVALIALGRKLLITGLAVVKSGKPYQDDFSRAQDGSGPTPHTAVSGS

SEQ ID NO: 375474 - protein, 446 aa, unidentified
MAKGKFKAQIWKGWIEKKRYERFEGSELVVGVDCAKKAFYAAVMAHSWLTFDLLYFEREEIVDFVQSLRALPFDRITLVFEPTGTYSDVLIHQARQVGIEVVRINGSRVNSAAEVFDGVPSLHDGKAAYLLARLHLSDVGSPWTPRSGEEREIRALVNTEQVLDSLVHRLYGPLEAYLARHWPELTGLLDLGSTTLLELLSTYGSPRAVADDGEGARRLMHRVGGSLLKPEKVEAVLRSAAGTAGLEVTEHEREMMRFLAGAALDLKRRGQPLKRLIEKTAQSDARIRPLCRFAGKRTALVIVAYLGALSEYESSAGLTKAFGLNLCERSTGQTRQDRQATPRGLHVSKRGATRPRAMLFFLAMRMLNERSASYCPVATAWYGERLRRNGGNKLKALVALMRKLTAALWHLARGASYDPSKLFDVERLVRLGHLSPAAVQARAAVG

SEQ ID NO: 375475 - protein, 359 aa, unidentified
MEAQRKALSFKGQNIYIGIDVHLKSWSVTLMSEATQLKRFSQSPDPDALYAHLVRNYPEAEYHSVYEAGFCGFWIHYRLVGLGIHNIVVNPADVPTTTSEKLRKTDAVDSAKLARSLRAGELKGIYVPGSESLETRSLIRLRDSITKDQTRLKNRIKSHLRYLGIEIPEEFSGPGRCWNRRFVVWLKGAETGTAYGRQTLDFLVRQYEALRGQRLEMLRAVMALSRTERFEKPLENLMTVPGIGQLTGMSLLSEIDDIRRFKSADQLAAFIGMIPMCHSSGEREGVGDITVRRSARLRSVLVEASWVAVRQDPALSMAYGNYCKRMAPGKAIIKIARKLVNRIYFVMKRNQPYVKRVVA

SEQ ID NO: 375476 - protein, 345 aa, unidentified
MEVLHPRCAGLDVHKETVVACVRIVSGGEVSRAVRTFETTTAQLIELAEWLEANGCTHVAMEATGVYWKPVWQVLAAGGFELVLANAAHVKNVPGRKTDVNDATWLAELLAHGLIRASFVPGPEIQELRGLLRTRKQLVREKASHVQRLQKTLEEANIKLESVLSDVMGRSGRAMIQALIAGETDPAKLAALAHPKVRAPQARLREALRGRVKRHHRFLLDLHLQQIDALDAGIAAIDREVDAGLASFRDAVKQLSTIPGVSQLSAQVILSEIGIDMSRFATAAHLRSWAGLCPRNDESAGKRRSTRLRTGAPWLKATLVQCGWAAARTKGPSRDKRAIWAMGIW

SEQ ID NO: 375477 - protein, 343 aa, unidentified
MISMKKSSSINDFKACLGIGIDVSKAELVVVGLGTKGNCIKRLKNRPRAIKLFLRGLKRIGYSNKIICESTGHYHLKLVIACHEVGLEIILLNPLQASKHSKSKVRKIKTDPEDALTLATMCITEPKLPKPVELTASKALLRLKIGQLASLEKQLQKMNRSLNQYEETYAELGLDSSAFQASLREHYQALKQIQKQLAKELELMFVSSMADDEAFERLQDLPGYSSFMAGMVGQFDRQVKGADSWVAYVGLDVSVRESGTWKGRGKLTKRGNAYFRKRLFQSSWGATMNYDYIRAYYDELKISGRGHKEALCMISRKLLKIAYQVVVKQKEYDPKIAFPAYFS

SEQ ID NO: 375478 - protein, 367 aa, unidentified
MFHLDYTVGCDAHKHFSLFAVLDGGGNLVQRTRVGHVPGAIVAFLAQFPQGTPVALETVGNWYWIVDEIEQAGCIPLLAHAAKAKVMMGNIHKTDKLDAQGLATLLYLGKLPSVWIPPADIRDERELPRTRMTFAKHRTMLKNRIRSTLAKYALSLDTDSDIFAPKWRPELEAALQRLPPETECCLRQHLQLLDALNHHIRELEVRILQRIQTSPSLQLVQSVPGPAKVLAIVIDRELGSIDRFPSPHHFASYCGLVPRLTASAGRAHYGHMVKQCNTYLKWAFIEAANVIVAHRQAAKWRPKYVVQLYERTRRRKGHSVSVGALARYLAESTYWVLKKGEPYREPPHWALAGSKSPVSLSREQARA

SEQ ID NO: 375479 - protein, 366 aa, unidentified
MRTKAIGIDPDSAGGVCVLVDTTVARVVVREYPITGEALGLFVRWIKEQADTVVALEGRNGPGKPFERALLGAGVPFYSFSAYEVAKFRSAVLGQNKNNERDAEAVARYALALETQNRLELSRRVWFVDEELQTVTRLYSQKRAEATRETNRLWKALRKASGDLYLAFRGSHPEFPFAQSLLKLKSVVQLLAVSPDVSSWHLLPRQELIEIAGGPRRGREPLLESLQRLSAKLPSFTSTTQLLIQSSAAVLLVLQATLEKLEKQMHELTSENESVQCLCEHRGIAVLTAATMMAEIVDIRRFSTNNHLASYAGLARHEHKTGQSGTEIARAEKDTKVVFADPVTLLYFRLSLRRKPCRTKTSMSKR

SEQ ID NO: 375480 - protein, 354 aa, unidentified
MNTTQNSTKSKIVKVIGVDLAKDHCDVIGYDENGKICLRLDGCSYAKLREILANLPQAVVLMEACKGSMFHARSIADLGHEVRLVKGTDVKALRNVNHKNDLRDAAYIANLYFVPGIKYVYIKSQQQQSLQFLQNEYKSLQELRIQVGNQIHAGLEEFGCPVRKSSKFIKTRMVAHLEKHAELIPEDVMASFKRRREIWLNLLQQEEEAKRRLEQVAATDANAKRIMTVPCVGPQTAVGLLVHVGVDFGRFKNSRQFAASLGLVPKQNSTGGNNTLNHITKCGPKRLRSNLVQCAQLVLMYAEKWKGNFGDWVRKMRDSGKKHGVIVCAIAAKLTRIIYRLMKDKVDYRPILSC

SEQ ID NO: 375481 - protein, 467 aa, unidentified
MSKENLQMPIINPKAAGIDVGSRSHFVGIGQGKEHIREFGVYTEDLKSLTQFLLKNDITTVAMESTGDYWQNLYTELIRNGLEVYLVNGKFTKTMNKKKTDVIDCQWIQKLHSLGLLPRCFLPDEATEKLRTLCRHRGNLITAKASTNKRMQKYLKLLNFRLDVVVKDITGLTGLKIITEICNGNTDPKKLAKHRHYNCRKSEEEIAKALVGNNRTDFLFGLKQELQKHDFLIQQLKECDIEIADLLKMYIASMEKTIDEAPSEKPHKRINKNSIKTVDLNIVAFQYFGGVDLLEIPGISHGTVLSIMSEIGPEGLDKFPTAKHFTSWLRLAPNNKISGGRRISSKVPKGSNRLKIAFRNSAYSIARLKDSPLNKFYKRMLFKKGSTKAITATARKLASIIWNMITKKIPYRSQEEYLFLDQKRKKIAQIRKNISKFGIDPNELGLFTRKEHAITYNNKVNKYNDLS

SEQ ID NO: 375482 - protein, 413 aa, unidentified
MLGRWVGRAIGVDVHRGFCVIAICEEGVVRSAGRVSSTPEGIEAFAESLLPSDRVALEVTGSAWELARILEPHVDRVVVVSPDDTGIVQARAKTDRLDARALARLLWAGELESVWVPDERCRVLRRRLARRQQLVHARTRSKNEIHAVLQRRLRGRPPCSDLFGVKGRRWLSGLELPLEERESIDAAIRQIEFLDWEIREVEQLIAHQALSWPEIHRLMTVPGVNLICAATFIAAVGEVNRFMTSRKLVAYLGLDPKVRQSGEAPARSGRISKRGSATARWALVEAAWQAARQPGPLHAFYQRTRARRGHGKAIVATARKLAVLFWCMLTRAEDYAHQQPSLTKRKLRQLELTAGAPKHARSTVGALSRNETLRQAERQIAEQAETSYLRMVKDQQAAAPTRKAGASVTLERA

SEQ ID NO: 375483 - protein, 406 aa, unidentified
MNAVGIDVSKGKSTVAILRPGGEVVASPFEVSHNPRELHELVKLIKSLDDDTKIVMEYTGNYYLPVALFLQKSGLFVSVVNPILVKDHGNKSLTVRKGKTDKKDSIKLAAFALDRWNELPLFSARSDTRTLLKAFNRKYNQYIKLKVMLKNNLISILGLTFPGANTLFNTPARKADGHEKWIDFALKFPHCECISRKTYSVFSKCYLSWCRKCGYHFSGAKAKEFYSFACNCAPSLADSETAHSLVSTAIAQLNTLNEALASLQKEMDLLASSLPEYDTVLSFFGVGSVLGSQLIAEIGDVLRFSNKKALVGFASIYAPPFQSGNFNPQSRSISKRGSAALRKTLFQVMSVILQNAPPNEPVFLFMDKKRSEGKHFYVYMMAGANKFLRIYYARVLEHLNALREAA

SEQ ID NO: 375484 - protein, 414 aa, unidentified
MSSKRIALERTLVVGVDVASEEHVALARGPAGLEVGPLPFANDRSGFRLLASKVSEAQAASEVEEVALALEPTGSYGEALARWAKREGWRVLGVLGAHTRRAKELWGNSPLKSDAKDARVICDLAVEGKWVTFSLREGAYAELKGLAIYRQQLVRKQTALKHQTRALLYVLFPEFVSVVRRGLFKKSGLNLMERFPTPGSYATIDVDQLTVLLRGWSRGRLGKERAERVLSAAQESVGVGAGLKTRSWVLRRAVRRLRSFEREIAAVEARMERWLKRIPYGACLLSMPGVGVVTAASLLGECGDLRDYPGTGELLKFCGLNLVSFSSGKRRGRNHISKRGSGLVRHQLYLLAGRLVKQDGAWRAAYNRLRSRGAARKEALIALSRKAVRVLFAMVRDNAFYSSPVMEEDLKLAA

SEQ ID NO: 375485 - protein, 459 aa, unidentified
MTASLAQAALKSLSLVAAIGVELQQEGEQPEQRAHQQHAAVAILDIGRMNDGLHQQALRIDQEVSLLAFDLLPRVIASRVDFAPPCILPLPAAKPSASLSVDGRPRPPRVIEPEKKRGAPSVGSIGNPNSRQGRKPSPHSQGRVMEHLAATPSFIGIDISKDRLDVHVVPSGWTFTARRDDKGLEQLVGDLRQLAPTLVVLEATGGFEITVAAALASANLPLAVINPRQIRDFARATGRLAKTDILDAEIIALFAERIRPKPRPLADADSQSLAELVARRRQVVEMIGMETNRLHQARNAHVQRMLRATLKTLTAQLAELDHDIDGTVKRSPIWRAADDLLTSVPGIGDITAHTLIADLPELGQLDRRRVAALVGVAPINRDSGQMRGKRTIAGGRIEVRNALYMATLSATRWNPVISGHYKDLVSRGLPKKVALVACMRRLLGILNAIMRTKTPWQCA

SEQ ID NO: 375486 - protein, 420 aa, unidentified
MSRIRAASTTPAWLAIDVAKSRHEALLEDSTGQRRRLTVQNTYEGFEKLAAVLAPHLPCEVALEPTGDYHRALANFLLRRGHRVHFVSSIATNRTREALFNSWDKNDPKDAQVILHLLKSGTTQTFADPLERGNQDLQELFGTYRQVADRKTRVQHSLMTHYLPLYFPEAEPYLSNPRGEWFLDVLRVAPCPSAVLQYRKATFVKKFTAKGGHFTSRQSLVASYYEIAKESVGIPIAADSQAAQMFRLTVEQYIDLTKLRRHLQELINRQLERNADYQLLRSIPGVGPIVALTVLSEGGDLRRFSHHRKFLNYCGLSLSAAQSGISRGRPQLSKRGNARLRWAFWVAANAAINQRRNSFRKKYDDYIRRDPLDADLKRKAYVAVAAKVARVAYGLIKSGKEYRHYLEAAVHDGRIPSLGR

SEQ ID NO: 375487 - protein, 364 aa, unidentified
MNTTSPAPNAKQAGVSVASPWLGADVSKSTFDAALYRPVPPGQHWEPRDIPVKQFHRNKEGVAKCLAWLATQWPATASAEDAAPEVRVVMEATGKYSRELAEWFTKAAPATSPAIINPRLAKSFAESLGVFTRTDKTDARSLARYGADRQPVALAPAAPEIAELRDMTRYRQTLVEQRTAETNRAAEGSVSREVCKMQKCRLEQIERNIARLDKALKAHVDKTEQLVHDVARLETIPGVGQLTAQIVLGEVGDLRRFKRARQITSFIGLTPTSHDSGTSVHKKSHVSKSGSAHVRRILYLAALAATRGDNELAAVYKRLTTAGKHPMVALVAVMRKLLLLMRAVLVHEQDYQPNYAKTRRATCG

SEQ ID NO: 375488 - protein, 341 aa, unidentified
MGEYIGLDVSMKDTAISVRCDGKRVWRGKCASDPEAIARVIRKHAQEPERVIFETGPLSAWFYHALQAEGLPAICVDARHAKAALDMAANKTDANDADGLAHLAEVGFYREVRVKGFDSMLTRTLVAARTKLVRIKTEISNQIRGLMKTFGLVVPAGKGSTFDANVCAKLGESSDLAGIILPLLEAWRSVRMRAAELTRRLIGDARQSEACQLLMSIPGVGVVTAPAFATAVEDPANFRTSRSVGAWLGLITRRYQSGQVDYNGHISRRGDHQVRNLPYEAACVILTRSSADSTLRDWGLKLRQRIGFKRAAVAVARKLSVVMHAMLKSGELFDKTAGAPA

SEQ ID NO: 375489 - protein, 386 aa, unidentified
MHHATTLPVPEETCIRGDCATLFVSLELSRSTWVATALAPGSRKMSKHTLVGGDGRKLLDLLARLKTRAEQRIAAPVKVVTIHEVGLDGFWIHRVLEANGVESHVVDPASIAVPRRHRRAKTDAIDGETLLRTLMAWQRGEPRVCSMTVPPSPSEEDRRRISRERATLLRERIQHTNRIRGLLFGQGVTNYNPLHKNRRVCLEELRTGDGRSMPAHLKSEILREIDRLELVLRQISEVEAERDEMLQPAEASSPAALLMRLKGIGAEFATVLYLEGLFRHFENRRQLAAYAGLAPSPWKSGSIDQEQGISKAGNPRLRTTMVELAWMWVRYQPASALSCWFRQRVGSERGRTRRISIVALARKLLIALSRYVTHGEIPAGAVVKAV

SEQ ID NO: 375490 - protein, 389 aa, unidentified
MIYVGIDVAKDQHDCFICNGDGEVLANVFTIENSKSGFKHLLSIINTCTGVDGKKKVGLEATGHYSYNLLGFLLDNGLPTYVINPLHTNLYRKSLSLRKTKTDKVDARTIASMLMSDVSLKPYSQTLYHNEDLKSLSRYRFDKVKECSKLKTSVSRLINILFPELDKLVCSVHMTSIYALLSEFPSAKDISSAHLTRLTNLLYSVSKGHYNRDTAIKFRDAARNSIGCYMPAKALELKHTIKLIRELNTEIKEIDIEIKRIMDDINSPILSVPGIGYSLGAMIVSEIGDFNNFSTPDKILAFAGLSPSTYQSGKLDNAYAHMEKRGSRYLRYALFNAAKLVCTWDNTFSAYLAKKRNEGKHYNVAVSHAAKKLVRLIFALEKSGRPYKV

SEQ ID NO: 375491 - protein, 341 aa, unidentified
MSVYVGIDVHRKRSQVAVINEGGEVLANRNVPNGTRPVLGVIGGLPPGTPVAFEAAFGWGWLVELLEDYGFAAHLVHPLQCKAIASARLKNDKVDAAILAQLLRADLLPEAWIAPPPVRQLRALLRHRAQLVRLRTLLRNRIHAVLADHGYDRPGGCWSGPGRAWLASLPLPAISREVIDDDLALIDALQVPIDRLDWEVHQQARRDPRVKVLTHLPGVGPYTALVLLAEIGDITRFGSARKLAAWAGLTPTVRGSDRTVRHGHISKQGSAWLRWILCEAAQTAKRHPSFAASYQATARRRGKKIATTAVARKLLTRAYHLLTDAASGGTPTSPEGSPGPG

SEQ ID NO: 375492 - protein, 345 aa, unidentified
MKVVKQVVGIDVAQKELVITLGRMFDDLSIDLYAYKVFKNTEKGFVGLLDWVKKLTSDQVKVSYVMEATGVYHQKLAYYLDQNDYDVCIVLPNKISNYSRTLEIKTITDKTCSQAIAQFGLERKLELWKRPKSIYKNLQQLTRERDQIVSERVTVKNQLHAEMSEAEPNEKSLKRIKTRIKLLNTQEKEVKNDISAIVKKEENLKKEIDIICTLPGVGELTAVIVLAETNGFELIRNKRQLASYAGLDVKEKQSGTSVKGKPRISKKGNRNLRKAMHFPALVAVKWNDNFRELYARLVSKHGIKMKALVAVQRKLLEMIFILFKNQTSYNKEYEKQKNSVQTQMV

SEQ ID NO: 375493 - protein, 473 aa, unidentified
MRRLLGIDLAITAENRACITDETGRVIAERRFGRTRRELESLHEVATEGMNEGGELVVVMEPTANAWVAPAALFSSKGAVVHLVPPEQSADLRRYYAKHVKNDRIDAKLLARLPLLHPEGLHRAPLPEGARGTLRRVVARRARLSAECARHRCRIRSLLQLSMPEMPAALGEELGKGALAVLGRYGDPRSLIRLGRARLTQVLIKATRGAWREERAEQVLAAARAAVELWRGLQGCDFAEVAEDLAAEVRLIRALESELRELDARAAGLLDEIDPAGLHRSMPGFGERTATTVAGRLGDVSRFSGASKVRSFAGVIPGTNQSGEKESRPHLTKAGDRVLRHALFMAAETARRIDPQLAAIYHRQVIERGSHHTKAICAVATALASRLVAVLTDGRPYEIRDTDGTPVDARAAKMIIAERFSVRPDIRAARRQPRSAQRMKGRPAHGIRSKASPPSPPVDEASATDATRVLVRG

SEQ ID NO: 375494 - protein, 420 aa, unidentified
MAPLSNQQFKAFVGIDWADTKHDICLQQAGDDRREFDCIPHQVTRIDEWAKALHQRFGGPIAIALELARGPIVSVLQKHAFFTLFPINPLMLAKYREAFKPSRAKDDPTDAELALDLLLRHPERFSPLRPQSAGMRSLLSLIEQRRELVGDKTRFTNRLTNALKQYYPQALEWFDDIDTVLFCDFLTRWPTLPAVRRASRKTIETFFHAHNCRRAKLIEGRLESIRCAASLTDDPGIVAPHRLLALMLVTQLRTALAAIDVFDKEIATVARTLPDFDLFDSLPGAGPHLTPRLLAAFGEQRDRFKGADELQKDSGIAPVTERSGKKCWVHWRWQCPTFLRQTFVEWAGQTINKSFWAGAYYRQQRAKGNSYQAAVRALAFKWIRILHRCWQTGTRYDESVYLNALRKRGSSLLRNLALPG

SEQ ID NO: 375495 - protein, 350 aa, unidentified
MHYIGIDHHKRYSYGTVMDGSGKVVWQGKFVTSEEGVREVFKGWGETKAVLEAGRNWGMMYDWMEEMAEEVKLAHPKKVKAIADAKIKTDKIDSRTLAHLLRADLIPEAHVPGKETREAKQVLRQRMFFIRVQTMVKNRIRILLERHPELEECPSKVLFSNKGMEWLKRIKLPDKEREILDGDISLLEEIKERVEASNELVERLAGEDENVKYLESIPGIGKFFGVLLAKEIDDVKRFRSDKKLHAYCGLVPSTYSSGERTVHGRITKQGNKWVRWAMVEAVWPAIQVDGQLRRYYEQIKSRRDANTAKVATAKRLLTIVYRVLKEKRFYQVRRLPSFLPGCSSKEGTSR

SEQ ID NO: 375496 - protein, 346 aa, unidentified
MTAFAALDVSKRSTSIHIVDEKGTCLWRGKTLTDPDALAVALSPFSNDLTLVGLETGCWTTWLWHELMDRGFPMVCMDARQAHAALSISINKTDANDAQGLAHLLRTGLYREVRVKSWDDMRKRTLLRARATMLRCVLDLANAIRGALRTFGISLPAGSGNGGAKIFERRVIDHLATRADLEVIIGPLLEAWRAGRAQVARHESTIRRIVRNDPRCQLLMTVPGVGFLTAVGYVGAIGDPATFTSGRTVAAWIGLTPRRYQSGAINQQGRISRQGDNLLRSYLYEAAAHLLTRAKTDSALRRWGLKLRERIGFKRANVAVARKLAVILHAMWRRGRPFEAEGSLPA

SEQ ID NO: 375497 - protein, 461 aa, unidentified
MANQDRRSLPGRGEGVEGFPVLRADVAGIDVGSEEHWVCAPARTGVGREVAVFAATTPGVEQLAAWLKERGVAAVALESTGVYWIAPHEILERHGFDVVLVDTRELGRVPGRKKTDRHDCEWIQRLHSCGLLRGAFRPVEQVCMLRTLVRDKGTLVAERGDWVRRMQKNLDQMNVRIHRAVADVDGATGMAILRAIVAGERDPRQLATLRDPRCRKSEAEIAEQLSGHWREDYLFSLKQALNKYDATTETIQESEQEILRHLEEMAGADRRGEQAPIPKNPEKVKAIKKRGEDPLRHALYRMSGVDLTAIDAVGVQTVSVVLSEYGPDLSQFPTEKHFVSHVRLAPHKPISGGKVVKNKKKPGSGSARVGAALRMAALSLRHSQTALGGYYRQVARRAGADVAVFATARKLAQLIYRLLRWGQPYVDEGAAAYEKRYQLARVKRLTATAKDLGYKLVSVEA

SEQ ID NO: 375498 - protein, 404 aa, unidentified
MFKFGIDWSEQHHNLCIRNSQGAIVSQVEFKHTLEGFQRFDDERRKLGVPPSECLVAIETAFNLLVDFLLDRGYLVYLIPPQATKGYRNRQRSTDAHTDDTDAALLSSILHTDLDSHRRLQPNSALTQHILAQVRLIDLLRRSIQRQCNQLRAVLFRVYPQALGLFGKLTAQINLHFLMAYPTAQEAQALTRAAFEAFCREHRYGRVDLISRRYAHLMDPAPEANPALVAAYRDQIRILAELLLPQVLRRTEALSSLAQLFSQHPDAFLFDSLPGAGELLAPGLLAKFGDHRDRFPAPNSVQALAGTCPVTKKSGKRKVVIFRRGCDREFRRIVQQFAKASVRQSGWALAYWRDVRPRCRSDSDAYRRLANRWLAIIWKMWQDGKAYDEFYHIQQRAQRRRPRS

SEQ ID NO: 375499 - protein, 344 aa, unidentified
MNVMIGVDPHKGSHTATMLDRDEHELRRIKVRAGHHQVGELLEWADGVTPRMWAVESAAGMGYLLAQQLVAAGETVVDVPATLASRVRVLASGQSTKTDPNDARSVAVAALRAPALAPVRASDHTTVCRLLVKHHTDLARWRNKLCCRLHALVAELIPGGISKEVVASQARSLLEETTPLGAAALERHRLAVELVAEIEHLDTVLRASRARITTAVAASGTTLTEIFGVGPIVAAMLIGYSGDPTRFATAARYASYTGTAPVEFSSGGRITHRLSRRGNRRLNHALHIAAITQIRNRHSVGRGFYDRKLAEGHTPREAIRSLKRRLSDIAWRHLIADTQRATQP

SEQ ID NO: 375500 - protein, 424 aa, unidentified
MAGVMIGIDPHKGSHTAVALDAREQRLGQLRVRASGRQADGLLGWAAGWPTRTWAVEGARGLGHLLAQQLIAAGERVFDVPPKLAARVRLLDTGQINKNDPNDARSVAVAALRAHDLPRLTVEDHTTVMRVWARRYHDLGRLRTQLLCRLHAVLCELVPGGFGKELTAGQAIEVLDRIVAESPVTLAKLALARDLVADLQRLDAQRREARRRTARAVAASGTSITAIYGVGPIIAGTVLGYVRDIHRFRSRDHFASYNGTAPIEVSSGDRKIYRLSRRGNRQLNHAIHMAAVSQIRYRGTEGRVYYEKKISEGMTGKSALRALKRKISDALYVRMINDARRLAGKDPGGQSGNDSDSSAAGSHPETPALRTSHSRARANSRTATTERMLASRPAPARRRTSRSAAGVHVEPRPGPRRGRGQDRP

SEQ ID NO: 375501 - protein, 409 aa, unidentified
MEVVHERCCGLDVHKKTVVACLVTPGRGGQPTREVRTFSTMTRELLALSDWLLEAGCTHAAMESTGSYWKPVYNLLEGSFELLVVNAQHMKAVPGRKTDVKDAEWIADLLRHGLLRPSFIPSRPERELRELTRYRTSLLQERAAEVNRLQKVLEGANIKLASVATNVVGLSGRAMLAAMVAGEYEVEAVAGLARGKLRNKIGALREALEGRLQPHQRFMLAAQLRHIDSLDSLIEEVSGEVERRLATLRAELKRLSTIPGVSTRISQAMLSEMGADMGRFASAGHLASWVAICPGHDESAGKSRSGRTRKGSPWLRSALVQAAKAAGRTQTYLGAQYRRIAARRGANRAAVAVAHSIIVIAYYMLKRGEDYRDLGGNYFDDRQHDQVKRRLTRRLEALGYSVQLTPDAA

SEQ ID NO: 375502 - protein, 339 aa, unidentified
MKEVTTIGLDLAKNVFQVHGVDRAGTVVVRRALRRSQVLAWFAKLPPCLVGMEACATAHYWGRELRRLGHEVRLIPPAYAKAYVRRNKNDAADAAAICEAVGRPAMRFVTIKTEQQQAAAAIHRVRDLLIKQRTMLRNQLRGLLAEFGVVAAQGRRGLNELLAVLSDPEDRRIPSPLREGLMMIMETWRGIERKLEEIDRQMVAAGRADATYRHLVTAPGYGPILSSAMAALVIDPGAFKRGCDFAASLGLVPRQDGTGGKVRLGPISKRGNGYLRRLLVNGATSLIKCQHARQDPWVAKLLASKPRKVVAVALANKLARIGWALMTRQEDFRSQPAAA

SEQ ID NO: 375503 - protein, 347 aa, unidentified
MEYFAGLDVSLKTVNVCIVNAVGDVLLEKKIEAEPAAIIALLKSFGQPFKRIGLEAGPTSSWLYSELRGAGYPAICLECRHAKAGLSAMRNKTDRNDARGIAQLVRLGWFRQVHIKSEEAQRVRMLLVNRQQLLTKALDLENSVRGSLKVFGLRVGTVTRRAFEARVLELVADDRSLLAITEPMLRVRRALIEEFERLDRLCQQLARRDSICRRLMTVPGVGVVVALTYRTGVDMPERFSRSRDVGAHFGLTPRRYSSGQTDYDGRISRCGDEMVRTALYQAANVLLHHGRWSSLRSWAMRIAKRSSVKAAKVALARRLAVVMHRMWIDGTDFRWTDAAASTPMVAG

SEQ ID NO: 375504 - protein, 426 aa, unidentified
MKNLDVLTTLFVGIDVSSQTNVAYAMDFHSNKLLEITVPNNHSGATTLADGVCDLMEGTAFEAVVFAMESTSFYGVHIANFLSSYPRMLGFRPYVHCVNPKLVANYRKSFVGLDKTDAKDAFVIADFARVGRITTAPWRGSQYLALQRLTRHRLHLVECLVREKNYMAANVFLKFSELATLKKSDHPFSSNFTATAEAMLTEFFSPEDIASMPTDDLVTFLCEKSRGRFADPSAVADILKHAAADSYRLDKILYEPLNTAIASSFNCISAFGKEIKTVDKAIERLAVGQSGNEYQILKSIPGIGPVFASGILAEIGSGSAFRSHDALAKYAGLVWRRNQSGDFEADDTPMSKAGNRYLRYYLIEAAGSVARYVPEYADFYQKKHDEVKTHQHKRALALTARKLVRLIYGLLAKDQLFTPDKVGGTS

SEQ ID NO: 375505 - protein, 343 aa, unidentified
MRHYVGVDLHKKLTVLCVMDQARRVLRTKRFLNSNPAALTGFLQGLGEFELVLEATASYEWFVKLVEPLAQRVVLAHPRKLRIIAESTRKSDKVDARLLAEFLVLDVIPPAHRPTPRQRAHRRLVRHRVYIRGRLTSLKNRLRHLAAEYNADRKDLFTRTGLAYLQKLPLEPVDRFLAQRLLRELRLYQVELRAVERELASFIRQAPPQEAQQRKLLDSIPAVGPVTRETFLAETAGPERFGSQKKLTSYVGLAPGQRESAGKRLDLGITHTGSPALRWVLHQAAWQLIRRDAYWAGLYDALARRRGRKKAITAIARRLLCLMLAVIRSGQPYRPRGPGVCAA

SEQ ID NO: 375506 - protein, 410 aa, unidentified
MDVFLERCAGLDVHQASVVCCVLIGAPGRKPQKLLRSFGTTTRDLETLQAWLAEHGVTHVGMESTGVYWKPVYAVLEGHVDLTVGNAHHIKNVPGRKTDLKDAEWIAQLVRHGLVAKSFVPPPAIRDLREMVRHRRTLIETRTAVRNRVLKLLEGANIKLSGVASDVFGVSGTAMLEALAAGTNNASEMAALARGRMRRKHAALEAALDGRMREHQCFLLGMHLRNLKAIDQDLEALDARIGTQLEPYRVQHRLLMQIPGVDWVTAASIIAEIGTDMDVFASARRLAAWAGVAPGNYESAGKPKGAGTRRGNVFLKSALFAAASAAVRTKGSYYRDKYNRLRARRGPVRAIMAIAHKLLLAAFHMLSTGEAFRDLGEGYLDQVARKRSTTKLVQRLSNLGYDVMLVPKAA

SEQ ID NO: 375507 - protein, 345 aa, unidentified
MIIGCDFHPSWQQIAWLDTETGETGEQRLVHAGGDADRFYRQLAAPALIGMEATGNSHWLVDLLSELGHEVWVGDAGQIRASYVRQQKTDKRDAAHILKLLVEGRFPRIWVPSSAVRDLRQLLLHRHKLVVIRARVKNELQHLCLNKGVQRQRKLWTKAGQKVLCELPLKRWAGRRRDDLLGLMTMLDRQIEPLDEAVKAEAQRDKMALLLQTQPGVGPITALAYVLTMGDISRFPRGKQVASYLGLIPREHSSGGQQHLGAISKQGNRMLRMLLVEAAQTAVRLDPGFRKEYQHRCHQKPKAVAKVAAARKLAVRLYWMLRTRQGYPEVVRIESSPRVRLVGEN

SEQ ID NO: 375508 - protein, 326 aa, unidentified
MTQVLGIDISKETYDACLMVEGATWQEKFDNAPIGFNKMQRWVSKHTHDKVHACMEATGQYGDGLAEFLYKENFLVSVVNPARIKAYASSKLRRNKTDKADAELIALYCLREQPALWSPPPDSFKGLQALVRHYEDLQTIYQQEKNRLKSGGTQPIVLADIKEHVAYLEERMKRIRQAIREHIQSYPELKQQQELLLSIPGIGEITASKLLGEIRDVCAFEDARQLAAYAGVTPRNFTSGTSVHKKSRLSKTGNANLRKALYMPAISAKHHNPIIKAFCERLLKSGLRPMEIIGAAMRKLLHLVFGILKSGKPFNPEFLNKTPATP

SEQ ID NO: 375509 - protein, 350 aa, unidentified
MLIIGCDYHPGFQQIAFVDGETGELQERRLEHPEAAKKFYRELAAQEMKVRVGMEASGHARWFERLLGELQFELWIGDAAEIRTKRVRKQRTDRLDAQLILKLMLEGRFPQIWVPSWENRDLRQLLWHRHRMVQTRTRIMNQLQAVALNEGLRWKKRLWREAGREQLVAIRLAPWTSRRRQDLLELLDQLNPSIAKLTEAVEQEAEKCPEAQRLMTHPGVGPLTALAFVLVIGTAERFGCGKQIASYLGLVPSEDSSGERRRLGHISKQGNSLLRFLLVEAAQVTVRSNQEWRSKFFHLAMRRGRNIAKVAMARRLAIRLYWMWRKGWNYEQLTRFGSHAGQPGNPHGVQ

SEQ ID NO: 375510 - protein, 403 aa, unidentified
MPLFAGCDWGGEEHAISVIDGTGAVVFTQRATHDGEGLAQMIRQLAKLGPPAELPIAIETPTGLLVDTLVDAGHPIVPLHPNVVKACRPRYRAAGGKDDAGDSYMIADILRTDGHRFARLHAQSDALRALRALVRTRDDLVAERVALANQLRALLQSCWPGAVEIFAEIDSPIALAFVQRYPTARSASRLDEKRVARFLTQHRYSGGRTAADLLARLRSAAPSKVGVREAQAKGELAAALADILAQVVAQLKTLTSRIEHEVAELPEGRIVMSLPRSGRLNAAQILSEIGDQRARFVSDEHLAAEAGVVPVTYQSGKQRSVVFRWACNHRLRQAITILADNSRHVSAWAAHVYQRARSRGCEHSHAIRILARSWLRVLYRIWLNNEPYDAAKHAAAAQIAAMA

SEQ ID NO: 375511 - protein, 409 aa, unidentified
MSAEAATELRWPASECRVRRLQRNGGCSGTEPIPRHWRRTVVENTLFLGLDVHKKTISVATVDGSARAEVRFYGTIENTPDAIRLLCKKLSKDGRRVHACYEAGPCGYNVQRHLTRLGHRCDVVAPSRIPRKAGDKVKTDRRDAMTLAQTLRAGQLTEVWVPDQAHEAMRDLVRLRSQAMRDLRKTRQHLLSFLLRHERISPFGHWTKMHRRWLGELKFAHPAQHLALEEMLHRIERAEELCERLKQAIGELVPQWSLAPVVQALQALRGISLITAAVLVAEIGSFERFDNPRQLMAYLGLNPSEHSSGATVRRGAITKTGNALARTSLVEAAWTYRFPARITQIIRDRLKALPEPIRAVAWKAQVRLSARYRALIARGKSAPIAIVAVARELVGFIWAIARMVEPKFT

SEQ ID NO: 375512 - protein, 342 aa, unidentified
MTEVTIIGVDLAKRVFQVHGAAADGSVVFRKKLSRAQFLQFLARQPACTVAMEACATSHYWGREIEKLGHTVRAIPPIYVKPFVKRQKNDAADAEAIAEAASRPTMRFVAVKTEGQQARALIFRTRDLLVRQRTQLINALRGHLAEYGVVVAQGVVHVKRLQDAIDAPEVKLPTMVRDIGRMYLDQIAMCSDKIGVLEKSIRTEAARGETTARLQTMPGIGPVCAMAIEAFAPPMDSFRRGRDFSAWLGLVPRQKSTGGKQILGKTSKMGQRDIRRLLIIGAMSMVRWAVRKGAPEGSWLARMLARKPRMVVAIALANKMARSVWAMLTKQEDYRDPVVAAA

SEQ ID NO: 375513 - protein, 408 aa, unidentified
MDTDFQYFAGIDWGTEKHRVCLMNREGAVVAERWVEHSGRCLAELVDWLRQHGPQSPQTLAASIEIPRGAIVETLLEHGFAVFSINPKQLDRFRDRYSPAGAKDDRRDAFVLADALRTDMHCFRAVRLDQPEMIRLRELSRLEDELGEEFNRAANRLREQLQRFFPQLLQLSEAASEPWLWALFEAAPTPRRAAKLTPAKIERILKQHRIRRIQAAEVRAVLKTQPLTLAPGAADAAVEHALLLLPRLRLLHQQRADLARRIQAILDELASAGQDQSEHRDAAILLSLPGLGRKVAATMLSEASQAIAERDYHALRCYSGAAPITRQSGKKKVVTMRYACNQRLRNALYHWARKSILWDPKSKKAYADLRARGKSHGCALRSMADRWLKVLVSMLRHKTLYDVQLRAA

SEQ ID NO: 375514 - protein, 352 aa, unidentified
MANQAHSAVVYGIDLGKTWFHVAGCDATGRSLHKVKLSRSRVFPFFANTSVALIGMEACPGSQWLARRLQALGHTVKIMPAQFVKPYVKSNKNDAVDAEAIAEAVTRPSMRFVQVKQTEQVDLQALHSARDLIVSTRTRLICQMRAFCLEYGIAMRNGAGAFKLDVLKVLNDDTNELTPAVRHLLRELWNQLQELEARIQKFTRQIESIASRSQFARRLLTIPGIGPLGATALLAAVGDGKQFKSGRDMAAWLGLTPAQYSTGGKSTLLGVSKRGHAYVRRLLIHGARSCVIHLDRTRDRLGSWITDLQRRMHINKVVVALANKLARIAWVVLTRPGALYQRVDPAFSGGST

SEQ ID NO: 375515 - protein, 424 aa, unidentified
MKFKMQDKQNQLIERISDKHLVIGVDIAQQFHVARAVNFRGIVLGDPITFQNDEEGFSALLNWINNLKRLHKLEVSIVGMEPTGHYWINLSKWLIKRNIEVVTVNPHLVKRNKENRDNTQSKSDKKDALVIADMVKNGYYSFVRLASEPFEKLRVLMSNRDVVVKRLVSSINQLNRWVDIVFPELRQVFKDITAKGAIATLRLFPTPMELGSMNPDEIVSGWKSLMKRQPGLKKAYLLLNVARKSVGTMQAIEAYKFHLEQLLEEYDLAVQQLNRVELTIKKELLKIPFADKLLKIKGISDISLAGILGEAGDLSGFSHGNSLLRHAGLHLSEASSGKWKGQIVLSKRGRSRLRRFLYLATISLVINNAEFKAVHSNNVKVKKMKKMKSIMKLVGKLARIFVGMARNNESYCPEKVRPLTELAA

SEQ ID NO: 375516 - protein, 349 aa, unidentified
MVIVDTRTVCGGVDTHLDFHVAAVLDHIGGLLGVETFETTEAGYRKLLEWLEGFGTVSRIGVEGTGSYGAGLSRFLHDHEVEVVEVDRPNRQLRHREGKSDPTDAVAAARAAMSGQATVRPKLRNGPVEQMRVLMVARRSARQQRIQTLNQIRHLVFTAPEPIRVRFLGRYQKGLIAELTALRPRKSSQDPISYVTLTTLRDLARRINALDEEAKRIRKVVEGLVGVMAPSMLKLSGLGPEGAATLLVAAGDNPQRIRSESAWAHLCGVAPIPASSGKTVRHRLNRGGNRQANAVLYRIVITRMSSDPRTRSYVARRREEGRTNGEIVRMLKRYVAREVYKHLPRDLLD

SEQ ID NO: 375517 - protein, 364 aa, unidentified
MKKISKKQRAVAAESKPEKIVGLDLGDRYSHYCMLTASGELMEEGRIRSTVAALEKQFANEPRMRIALETGTHSPWVSRLLECHGHQVIVANARKIPVITASESKNDRNDAEQLARMAAFDPKLLHPVEHRSLERQQDLNLVHTRSVLVRARTMLINSVRGLVKSGGGRLPACSSAAFPGKAREVIPEVLKMACEPLLEQIAQMNRGIGEMDRQVEGLDKKYPEISILRTAPGVGPVVAACYVLTLDCAEAMETNRQAGAYLGLRPRQQQSGDSNPQRGIAKTGNNYLRSLLVQSAQYILGRFGPDSELRRWGLKLAASGGKRGKKRAIVAVARKLAVLLLSMWRNRRKFEPFPQAAAGLTVAA

SEQ ID NO: 375518 - protein, 426 aa, unidentified
MKVVYPVCCGIDVHKSFLIATVITTKAGELMPHYQKKRFSTFNNQILALKDWLLECKCHDVCMESTGKYWVPVSNLLEDAINITIANPKWVRAVKGNKDDKKDSKWIAELFRMGLVKGSFIPTKDIRVLREFTRYRTRLVSHRSSEKNRLQNAFTVGNVAMDSVVSDMFGVSSKKVRDYLISTKEFDPNHVLTLLHGRMKPKGQELIESIEGYHFTNEQILRIQMIEEHKVHLDHSIDFLNSLLDQMVEPYEPAIQLLETIPGISRQSAVQIISEIGTDMSQFSTSKRLCCWAGLSPSSNESAGKKKSVRISRAGVYLKPALVQCAHAAKKAKEENPYYRLKYERIAKRRGKKRAIIAIARMMLTAIYHMLSTGEVWNPTDLYKIDMPDNLVQKQKDKVVKQATKLLISVGILPDDFVRKDRTDST

SEQ ID NO: 375519 - protein, 339 aa, unidentified
MEITTIGLDLAKNIIQAHGVTAGGQVAIKRALRRGQVLRFFERLAPCLVGMEACGTSHYWARELMKLGHDVRLMPPIYVKPYVKRGKTDAADAEAICEAVTRPTMRFVAVKSPEQQALLSLHRARDLIVRQRTQIVNMLRGLLAEFGCAVAKGIERALVLARALLASDGRPLPDVARQVTVSLCKQLLDLNATVRWFDKQVIKTSQGDARIKLLETIPGIGPVTASAIVATVGTPDQFGSGREFAAWLGLTPLNRSSGGKERLGRISKMGDRYIRKLLVGGMTSRVRAAMRRPDRVDPWLASLLERKPTRLATVAMANKTARIIWAVLIRNEPYKSIVA

SEQ ID NO: 375520 - protein, 347 aa, unidentified
MNYIGCDCHISTLDCAVVNERGHETKKQKINTGVKGLMGFVKSIPKPRKIIIEEGTLASWLLEVCTAYGEELIITDPKTNRWIGRAGQKNDEIDASKLAQLARGGYIKEIHHPIGHRRRYRELVLSYHDTVKSQTRIKNKLKAKFRQNGIKCSGETVYAATFRNEWRKKLPQDKVVQMMVEGLWRQLDQVHEVREELFGHMCKQSRRYSEIKRFKQIPGIGPVHAATISAIVETPHRFANKKKLWMYAGFGLAERSSGEKVYSRSLTRSYNRLLKNALKQSTEAAISAKDNQFRRHNLRLTLEKGIPSHRAKLTVARSILATLYGIWKSGEKYDPTIDKKRTESDNT

SEQ ID NO: 375521 - protein, 393 aa, unidentified
MICVGIDVAKDKHDCFILNSEGEVLADVFTIPNNAEGFDRLLQTIRRCARPEDKMKVGLEATGHYSYNILGFLLNEGLPTYVINPLHTNLYRKSLSLRKTKTDRVDARTIAAMLMSDVDLKPYTDTAYHNEELKSLTRYRFDKVRERAKLKQSVSRLVTILFPELEKLVPTLHLASVYGLLSELPGAKQVAGAHLTHLKAVLSDASKGRYGRDMATTLRDAARCSVGSVMPAKSLELQHTIRLIRELDSEIEDIEAAIQSMMDRMQSPITTIPGIGFRMGAMILAEIGDFSCFDSPDKILAYAGMSPSTYQSGQLSLSGSYSHMEKRGSRYLRYALYNATKYVCLWDPTFAAYLAKKRAEGKHYNVALSHAAKKFVRLIYAMEKSRKPYCSAA

SEQ ID NO: 375522 - protein, 331 aa, unidentified
MTNASSAQASIAQPTVFVGVDMAQKSFVWAVHGHSDTHCASNDDSGFEQLLDALAGQPVGLLVLEATGGLERALATYLLQHGLPVAVVNPRAAREFARSMGHLAKTDVIDALALAHYAQTLAARADQSGVRYAPASEQVQQLQALVMRRAQLLNMRTAEKNRLGGSIRVLRQSIQELIRVLDLQLARIDKDIDAHVRQHFQEQAKRLEAIKGVGGTTSATMLAFMPELGAIRAASAAKLAGLAPLNQDSGKARGKRHVWGGRAIVRSTLHMAMLSAVRYNPVIRVFYERLIAAGKPKKVALVACSHKLLRILNAMARTGEPWNEALHIKNT

SEQ ID NO: 375523 - protein, 298 aa, unidentified
MVSVGCGIDVHQKQVTASIRKSSTEVETREFEAYTSSLTSLREWCKNEGVTHVVMESTGVYWKPVFNILEEDFEVILVNARHVKNVPGHKTDKKDSRWLSKLLLSGLLKGSFIPPRDIRELRDLVRYRKKVVGLIASEKNRIIKVLEDANIKLSSVLDNVDGAVGTKVINDLLNGETSAEQLSRHYHGKQKVSKAEFRRALEGRMTEHHKLMLRIHKDSIADKEAQLKRLDIAIDKATEAYRLEIDLLDTIPGVGKESAISIISEIGVDMSRFPNEIHLSSWAGMSPGNCETGGKKKT

SEQ ID NO: 375524 - protein, 404 aa, unidentified
MWFAGIDWADTHHDILVLDERGQKLASFRVMHTSKGLDELASRLTAICGPEHKAELACIVETTRGLLITHLLEAGFAVYPVNPKTVDRKRSASGAKTDQVDAYLLAKHGRSEIADLRRLEPDSPLIAELKALTRDQDGLIQMQTRLVNQLTACLKAYYPVALTLFTKVQQPSTLHFLLAYPTPQEAMNASCEEIAELLKSTGYPTPKKTAASIVHQVHQPQLTADEVTCRTKSRLLIALIRQLQPVMEEIAAYDQEIERLFLMHADSHLFRTLPRAGKRIAPRLLAEIGDDRSRYQDTASLQALAGTSPVPYESGNYAKPHRRYACIKPLRNVLQQFAWQSIQTEAWASEYYERKRREGKSHTVAVRALANVWVRILFALWLKGEHYQSAIFEQARHLHAPRAA

SEQ ID NO: 375525 - protein, 456 aa, unidentified
MQPYYLGGDVSKGYADFVIMNKEETIEESEFQLDDTRQGHQRLEQILNAFFIRHPDALLYAAVESTGGYENNWFNTLRNLSLKYHLYAARINPKGISHDSKASMARTITDKISARHIAAYQIHHPKNVQYNVDDPYHALRRAYTTLGIQIKTKTQMINELETCLYEANPEIMIYRKSGFSKWLLHLLQSYPDAASLAQASVDELVKIPFVAVTKAKAIIARAKESVASISDEMVASSIKRLARTILYLDEEIDQELNELQKKLLIPQIKLLQTFRGIGLQSALGLFIEMGAIERFPTVKNLASYFGLHPVYKQSGDGTWGMHMSKQGRKKARVILYMVAVNAINHNPLIRAVYQRARNKGKTKKAALGVCMHKILRIVYGMLKHNQPFDESIDRHNQTKAVERKKTKKPDASRRYQSEDQSAPISYRQTQKRKERERSQSENVTMHEISVPAPSGV

SEQ ID NO: 375526 - protein, 351 aa, unidentified
MVVVGADVHKRSHTFVAVDEVGRRLGEKTVKATTEGHQVALIWARDQFGVELRWGIEDCRNMSARLERDLLGAGQSVVRVPTKLMAQTRKSGRTRGKSDPIDAEAVARAVLREPDLPVASHDEVSRECKLLTDRRDVLVAQRTSAINRLRWNVHELDPERGPAPRALNAVKHQQALQAWLQTVPGLVAELARAELADVIRLTTEINALEQRLSQRVREVAPALLEIPGCGDLTAAKLVGEAAGVTRFKSEAAFACHAGVAPIPVWSGSTEGQMRLSRSGNRQLNSAIHRIAVTQIRMHDTEGHAYNQRRIANGKTKAAARRCVKRGIARRVYRALLTDHHTRTQAHQPTAA

SEQ ID NO: 375527 - protein, 342 aa, unidentified
MEPITIGLDLAKNVFQVHGLDEAGEVIVTKRLRRGQVIPFFQKLAPCLIGMEACPSAHHWSRELEVLGHDVRLMPASYVKAYVKRNKNDAADAAAICEAVTRPTMRFVATKTKQQQGALMLHRARQLFVRQRSMLGNAIRGHLAEFGITAPVGRKGLEKLLAVIADQGDEQLPETARACLSALAAQHGRLNAEIAALERRIHAWHRASETSRRLEEIPGIGPLVATALTATVSDPHAFKSGRGMAAWIGLVPKEGSTGGKQRLGPISKQGNRYLRWLLVCGALAVIRYAKKHGYGHRPWLQRLLANRPIKLAAVALANKIARIAWVIMARGEHYKEPAPLAA

SEQ ID NO: 375528 - protein, 339 aa, unidentified
MKNYCGIDLHSNNNVIVVIDETDKILLERKLPNSLGAVLDALSIIREPINGIAVESTYNWYWLVDGLQEAGYQVHLVNTTAVKQYDGLKYSDDKYDAFHLAHLMRLGILPMGYIYPKEERAVRDLLRKRLQLVHQRTTHVLSIQNQLTRNTGRQFKSNEIKKLTPFIIKSRIKDENIQEAILSNLTIFSVLNSRIKILEKKVLKQVELKPQFQKLLNIPGIGIIMAMTVMLETGDIFRFAKVGNYSSYCRCVNSKRMSNNKQKGSGNRKSGNKYLSWAFMEIANFSIQYNEKAKQFYQKKLAKTKRVIALKALSHKMARACYYVIKNNEEFDNERLFAT

SEQ ID NO: 375529 - protein, 317 aa, unidentified
MSPMTMNELFVGVDVCKAWLDVGFAPEASVQRFSNDESGIGGCLDELSKRSPTLIVIEATGGFETLFAIHARGAGLRVAVVNPRQVRDFARATGILAKTDRLDATVLARFGAAIRPPVREAPDDETRDLAEQLTRRRQLVQIRAQEKARLTTMVGPRQTKSIKEHIKWLTEHIDSLDIDLTAALRSSPSWKAKEDVLKSAPGVGTVTTLTLLAQLPELGKLGRREITALVGLAPFNRDSGSHRGVRMIWGGRAEVRSILYMATLAATRGQNPIADFHQRLINKGKPAKVALVATMRKLLTILNAMLKTNTSWAPKCT

SEQ ID NO: 375530 - protein, 410 aa, unidentified
MAYKVAGIDVHKKVLMVVVLDIDDPESEPQRRRFGTTTSELRKLSDWLRQQGVGQAVMESTAQYWRPVWYELEPYMKLSLAQAFSNRAPRGRKHDFRDAERLIRRLVAGELTLSFVPEPKQRTWRMVTRARVQLTEDKSRLHSQLECLLEEMRLKLSSVVSDLLGVSGYRMLRALADGETDPRKLAALADDRLQCSEKQLIDALSGSPEPAHRRVLSLYLNRHQAMVEQIAELDGLIAQALKPHQEAVARLALAPGLGVDSAQQIIAEVGVDAGTFPTAGHLSAWVGTCPGRDESAEENHSSRSAKGNKYLRRVLNQAAHAAVKKKGSHFQAVFRRLLPRLGYKAAIWAVAHRLCRLVWKMLHEAVPYVERGSEPDARTKHRRARQLLRRLRKLGYQVDLRAINPTPATP

SEQ ID NO: 375531 - protein, 376 aa, unidentified
MDKDSRFVGLDVHAETIAVGVAEPEGEVRSLGTIPNTPEAVRRLVKKLGPPETLRVCYEAGPTGYVLYRQLSALGVPCAVIAPTLVPVKAGDRVKTDRRDAEKLARSYRSGDLTPVWVPDPGHEALRDLVRAREAAKKDQLRARHRLGKFLLRQGRRAPTGSKAWGVKHRAWLQTIRFAHAAQDATLLDYLTEIDHAADRIARLERAIATAADLTPAPVRAVIAGLQALRGIAKLSAVSIVTEVGALSRFAKPRQLMGYSGAVASEHSSGPHRRRGGITKTGNAHLRRIVIEAAWAYRHRPAIGGTLRTRQEGLSEEVKALAWKAQHRLHGRYVRLIAKGKAPTQVVTAIGRELLGFIWAIGVHIEQHTAGGAPAA

SEQ ID NO: 375532 - protein, 356 aa, unidentified
MRWSLPPSQYYAEDRLSFGEPSWKTLRLLVSIWVRTLSIFIVRIIVGRPFTVKNFTRPKLIEFLATCPATTIAMEACGGSHFMARKLAELGHFPKLISPQFVRPFVKSNKNDFVDAEAICEAASRPSMRFVQPRTESQQAMRALHRVRESLVQDKVKTTNQMHAFLLEFGISVPRGAAVISRLSTLLEDSSLPLYLSQLLLKLQQHYHYLVEQIKDLESQLKRKLDEDEVGQRLLSIPCVGTLTASTISTEIGDGKQYASSRDFAAATGLVPRQYSTGGRTTLLGISKRGNKKIRTLLVQCARVFIQKLEHQSGKLADWVRELLCRKSNFVVTCALANKLARIAWALTARQQTYEA

SEQ ID NO: 375533 - protein, 344 aa, unidentified
MIIIGCDFHTRFQKIAMVDTEIGEITKRRLEHGNGEARTFYVALPGPARVGMEATMNAQWFERLLQEYHHELWVGDAAQIRAAAVRKQKTDDRDALHILDLLVREKFPRIWIPSPENRDLRQMLRHRDKLVRIRTSVQNQLHALAMSQGLCRKAKLWTKAGRKELEGLPLDPWASRRRWELLQLFDQLDPQIDELDKVVIQEADKRPAAVHLMTQQGVGPVTALAFVLTVGPVERFPTSKHLVSYLGLNPSEDSIGGRQRLGAISKQGNSMMRHLLSEAAQTAVKFDPELRRDYLRLKFRRGISGVAKVAIARTLAVRLYWKLREAAQPNTAARMQGSPTSLSR

SEQ ID NO: 375534 - protein, 324 aa, unidentified
MKLSIGFDVSKSTVDAALFDGIRTEHFQVENSEEGFKMVLEKAGGYALEDIMVTMEATGVYHHRCASFFDSRGFFVSVVNPLIIKRYTDMRMSRVKTDKADAKQIARYGWSQQAYRYKAPSEKCQKIRAFLKVIEGLKREKTQHRNRLEALAQFASDMSEIAALHYAIIQHLDTQIRQAEQRILILAQEEHPERYAQLQTIPGVGKRVAGAVIGYFGNMEDFETAKQLVCFIGSNPSPKESGSSVKGRGSISRKGNSYLRKLFFLAALSACKWNRSCKDLYERLVAKGKAKKVALIAVANKLIRQVFAVTKYSRGYDPGFCAKS

SEQ ID NO: 375535 - protein, 440 aa, unidentified
MEVLHPRCVGLDVHARTIVACVRVAQGGEVSYEIETFGTSTPDLFRLRDWIEEHECTHGVMESTGVYWKPVWHVLEDAVELLLANAAHVKNLPGRKTDVNDAQWLADLLAHGLVAASFVPDTSVQDLRALTRTRKQLVRERVSHVQRIQKVLEDANIKLTNVLTDVVGMSGRRILGAIIKGQTDGHALAELASTRVHASKEQLAQALQGYVRDHHRQLLSLHLELIDALDKAIASIENDVGTKLAPFRPAAELLKSMPGVGDTTAQVMLAEIGPDMSRFPSPAHLRSWACLCPRNDESAGKQRSTRIRKGANWLKAVLVQAAWAAIRVKGSHLRELFYRLKTRRGPKKAIVAVAASMLTSAWHMLIQGVPYHELGETPLTAPARQRQAQRLVHRLRELGYDVTLPSTPTLATGNSSETRSSSLPIVDFPLTPAPATGVSL

SEQ ID NO: 375536 - protein, 406 aa, unidentified
MSMSERVCGVDVHRDLLVATILNGSTKETKRFVNDANDINNLKNWLKTHECKRAVMESTSIYWVPLYLALEETGFDVMLANAHQVKAIPGRKTDQSSSEWLAHLLQGGQIKPSYVPEKHVRELRELTRLRVKLVENRTAFKNRCQKVLNRVNIRLGSRLSDVFGKAGREILEGLMAGKTVEAILEHTENKWLMKRCDEVKAVAKGALSESDIFVLKELTEMVEHLNEKISRVEARIETLVNERDVAIVSSVPGVGKRSAAAIVAEIGDAKRFSDGKKIASAAGLAPSVYQSAGTFVTGSITKQGSKWLRYVMVEVAHAAVKKRNSRLRAFYLRVKAKKGEKTAIVAVARKMLTIIWHLLVKGERYVEEGFEKVVRTGRAVYAGHVPLEEMAEILRSAGYLVSGPNG

SEQ ID NO: 375537 - protein, 398 aa, unidentified
MTRKNTLKSLPTDTEFRVVGLDLAKSDVSVAAIPVDDNTPSLVDRMTYADLLDWAGKISPTLFAMEPCNGYSLLCLQLENLGHEIKVISGSTVSMWINTHLSGQKTDLNDAIALARLAVSDAELTPIRHKSITEIRIQTVQAVRQQLMSQRSKSIVSFKALAQQWGIPCAAGHRNLKKLRESIEAKVDLITRPVANAMLFLLDAVKSLDRQIGQLNQTLQELVMSDERGRLLQSVLGVGTQISARVITVVGNIERFNSPRSLVAYVGVAPRNFITGHKNLTKKKHGNCPDLSHKGQGKISRRGDKLLRSLFIQGAACLYMQFCKDQLPECQLKRWILKQLARQKPYGKLIVSLAAKLIRIVWAVLTYGEKFNIQKAGMTRSMWSEMALETPLNKEVPA

SEQ ID NO: 375538 - protein, 401 aa, unidentified
MNAVGIDVSKGKSMVCVMRPFGKVVLEPFEVLHTAQNLHDLAEKLKALDGETRVVLEATGNYHKPVAFVLHDAGLFVSVVNPVLIHDYDNNSLRRVKTDRKDAVKIANYTLDKWTRLRQYLPEDDTRLALKNCYRQYQQAVAIRTMLKNNLISSLDLTFPDANKLFTSPAKSNGCEKWVDFIGDFWHSECISSLSANAFAKKYLKWCQKHGYVFTRSKSDEIYACAVNSASLPKSPTSKLLIQQQVAQLKAVSQSVAAFRQEMLRLSQQLPEFDTVMEMYGVGPSLGPQLMAEIGDVRRFSSKKSLIAFAGIEPQPNDSGKVVGNDKGISKVGSAVLRRTLFLIMTVILQTQPQDEPVFQFMNKKRSEGKPYKVYMMASANKFLRIYYARVKAVMDSERSQ

SEQ ID NO: 375539 - protein, 372 aa, unidentified
MKKNSTCPPNRSRQRKAGARPSAIGMDLGDKTSRYCVLDEEGEIVREDSVGTTKKAMLQVFGSMARCRIAIEVGTHSPWVSRLLKSIGFEVTVANSRSIPLISASTQKSDRRDAQMLARLVRVDPELLRPIQHRGETAQSDLMRIKVGAALLEARTSLVNTARGLRKAAGERLPSCDADAMGDKQAEGLPMELQAGLRPLLQQVESLTEKIKACDAELKQIAKEKYQETELLQQVAEVGPLMALTFVLTVEDPERFKKSRDVGSYVGLRPKRSESGEQQPQLGISKEGDIYLRKMLVQGAHYILGRHGPDTDLRRWGLQLAQGGGKNAKKRAIVAVARKLGILLHRLWVSGEVYEPLRNSNARQTARQRAAA

SEQ ID NO: 375540 - protein, 331 aa, unidentified
MSVYAGLDIGAYAVDLVTRQADKASKARRYKQTPEGHNALIAQLKKAKPTLIVMEATGIYYFDLAVALVEAGLPVAVINPKSFRHFAELKLQTSKTDAIDSDLLAEYGQRMSPGPWTPPDQHHQALRSLGRQINRLVGCRAQARNRLHALKATRSTPSLLIEDEQEGITMLERRIDRLRQAALELLAEAPELQRRYQHLLAAKGIGEATALSLLAELCVLPTSLKSGQISRHAGLDVRQHQSGASVNRPARISKAGNVYLRSALYMPALSAVRYDPNVKAFYEALVARGKKKIQALVAVMRKYLTGLWACLKTDTPFDSTRLFQTAGLQKA

SEQ ID NO: 375541 - protein, 375 aa, unidentified
MNILAIDLGKFNSMCCLYDTDTQKYRFQAVATTRPYLTTVFTHHTIDLVVMEACGPSGWISDLCQECGLKSLVCSTNDEAWVWKNVKRKTDKDDALKLSRLAMMQQLTPVHVPKHQVREHRSLIKYRKKLVGRINGIRNSIRGLFLCHGIQIAKGPIAWRSGREQIDAYRKPLAECSMKEMWQGQLDTELTQLDSLGEQMTVVEQHLKAIAEKDERIQRVQTIPGVGRRTAEAIVTTLDDVNRFKNGRQVSSYIGLVPRQFQSGETDRNGRITKRGSRLLRTLLLECAWVSIQYNAWARTTYERVHGGQKTRKKKAAIALARKIAVVAWAMLKNKTDWDPEKAGIDLQSAVEEYPTGRCDRVNDLTHAGRAVSPT

SEQ ID NO: 375542 - protein, 316 aa, unidentified
MPTAEVFIGIDVAKGHLDLAIEGVAKGWRVSNDAAGIAATVERLTALAPSRIVLEATGGYELAIASALLAAGLPAGIVNPRQVRDFARSRNLLAKTDQLDAQVLAAFARVMTSPLRPLPSAEVQALRAIVARRRQVSDVLVAEQNRLEHAAGAVAAHITAHIAWLKDDLTALDAEAAAAVSASAAWQEQLTWLTSVPGVGRVVATTLLSGVPELGQLRGKEVAALVGVAPFNRDSGRLRGKRMVWGGRAPVRAALYMAALVGARHNPVLRAFYARLLAGGKPKKVALTACMHKLLVILNALLRQGMSWDAARQPAA

SEQ ID NO: 375543 - protein, 349 aa, unidentified
MSHKSTPSTISTIGIDIGKNSFHLVGLDQRGAIVLQQKVSRAQLERRLANIPRCLIGMEACSGSHHIGRQLAALGHDVRLIPAQYVKPFLKGHKNDYRDAEAIAEAVQRPTMHFVAIKTPEQMDLLALHRVRSRLVGQRTGVINQIRGFLIERGIAVRQGVVPLRKALPDILSSNTPALSPRIVNLIAELVQDWRRLDERIAAVSADIESLVELDEACQRVMTVPGVGPIISSAVVAAIGNGAGFTQGRDFGAWLGLVPKQESTGDRTILGKISKRGNKYLRTLFVQAAHVVLARRPSAAMRGLWPWIEQASRRLHRNMLAIALANKLARIAWAVLARGRSYQPRIVAI

SEQ ID NO: 375544 - protein, 309 aa, unidentified
MDGLNAAIDVGKHQLEVALGSNGELFAEPNQARAIARLAKRLGKLGCERVLIEGGSYQNVLVAALRAAELPVVISNPRRVREFAKSIGQLAKTDHIDAQVLALYGERIQPPVRELPDAQNQVLRGLWVRREQLIELLVMEENRLEHAPKALHRSLRAHIDYLRKQIKQSDSDLDSEVRNSPLWDKYELLSSVPGVGPVLSVALLSDLPELGRLNRSEIAALAGVAPFNCDSGTLRGQRKIQGGRKRLRRLLDSATVAAVRCNPALRPYYQRLRAKPAKVALVAAMHKLLLILNAMLKTQTVWRPPCPAA

SEQ ID NO: 375545 - protein, 410 aa, unidentified
MKIAGIDVHKKVLMVVVIDASTPQEKPWRRRFTTMPSELHRLLIWLREQGVEEAVMESTAQYWRSVGLELEPHMRLHLAQAFSNRAPRGRKHDFKDAERLVRRLIADELILSFVPNGEQRIWRSMTRMKVQLTRDRVRLQNQMECLLEEMRIKLSIVVSNLLGASGLRILQALARGETDPKMLAQLGDERLQCTEEQLVDALTGRVQPMHRTMLALQLQRLQLIDQQIAQLNGLIAQAMKPHQEAVMRLAEVPGLGVDSAQQIIAEVGVQASTFPSAAELTSWVGTCPGKEESAEQNHSSRSAKGNKYLRRVLNQAAHAAVTKKGSHFQVVFRRLLPRLGYQSAIWAVAHRLCRVVWKILHEGVRFIEQGREPDPQAKKKRAQMLARALRKLGYEVVLTPINQVAAPNAT

SEQ ID NO: 375546 - protein, 353 aa, unidentified
MSEDKYIAFDVHQATTVVSVMNAAGREVKTAVLPTQAQPLLGFLESLRGRLHLTLEEGTYAAWLYDLLQGRVAELVVCDPRHNALLKEGSKTDHQDAHKLADLLRTGMLRPVYHGNRSLRNLRELAHAYQALVQDTTRVMNRIKAYYRSYGIDCAGRGVYSRKQRESWLGRLPAGASRVRGELLHEQLEQLRSLRRRARRELLGESRKYLVAARLCGLPGFGPLRVALLIAGMQTPHRFRTRGKLWSYSGLGLVQKGSSEYRLVEGRAVRRPGALQLRGLNRSHRPGLKALFKSAALVAIRQPGPFQDYYQSRLQQGVDPAILRVTVARKLAALVLSLWKKGGRYRAEGVKQA

SEQ ID NO: 375547 - protein, 435 aa, unidentified
MSNIIKFDSFISIGIDVGADFSWMSIALPNQTFVGKPFKILHSDLYSLSMAVSKIKEAEEMYSLESRIFLESTGIYHYPLFCYLRDKGFLVSIINPIITKNSTNINIRKVHNDKFDSKKAALIGLKPDLKVSIIPSDLALDLRNLSREYYDLVDNRSAYINKLQAELRMVFPQYLKIFSKITVNTSLTLLEKFTSADDFLNASKDEIITSIRATARFGISYAEKKYNAIIKAANEAKTFGYSVNSNFKRILLYIRFIRQYNAEIEFILSDMRDIVESNEDTDFVKQIRLIETFKGAGFLSAVSLMCEIGDFSAFKSPKQLFAYFGLDPAVKQSGKFNGTDVKMSKRGSRIARRVIHTMALVSIALNRNGSANNPVLRDYYLKKSESKPKMVALGAIMHKVCNIVFAILRDEKEFKIITPEEHQTNYLKAKCDIAA

SEQ ID NO: 375548 - protein, 462 aa, unidentified
MKAKREDKASQNGRMQLQGLPLMKADVAGMDIGSETHWVCAPTRDGSGREIGDFGATTPELIRMAEWLKARQVESVAMESTGVYWIAPHEVLEAHGLKVLLVDTRQLSQVPGRDKKTDPTDCEWIQRLHSCGLLRGSFRPAEEICMLRTLVRDKATLVAESGDWVRRMQKSLDQMNVRVHRAVSDISGTTGMAIIRAIAEGERDARNLAQLRDPHCHKSEEEIAEQLTGHWREDHLFSLCQALKMYEAMVERISAYEKEILRKLGEMEQEEQGGKNAPPLKNTNKAKMIKKRGQEQKRQALYRMSGVDGTQIDAIGVETVEVIVSEYGPDLSRFPSEEQFVSHATLAPRVAKSGGKPVKKKKRNSASTRVATALRMAAQSLRHSDTALGAYYRSTARRKGPGIATFAAARKIATFIYRLLRWGQPYVDEGAEAYEKRYQKQRFAGLASRAKQLGYQLTPLTA

SEQ ID NO: 375549 - protein, 341 aa, unidentified
MNIITVGIDLAKNVFAVHGVNDSGKPALVKPKVSRADLLPLIANLPPCLIGMEACSGAHHWARLFRQHGHTVKLMAPKFVAPYRMTGKRGKNDAADAAAICEAVTRPAMLFVPVKEEHQQIILCLHRTRQGFVEERTASYNRLRGLIAEFGIVLPQKVTCLRREIGAHLEDLPGYANLCVGDLLSHTADLDAKIAEYDRVIAQAARENARSKRLMKLPGIGPVTASAMLASIGGGHDFKNGRQVAAWIGLVPGQYSSGGKARLGRITKAGDNYLRSLLVMGARAVLNSIGDKQDRFSRWARSLQERRGYWRAVIAIAAKNARLAWAVLKYGEDFKLEPGTI

SEQ ID NO: 375550 - protein, 367 aa, unidentified
MKKVSTRAAAQSRNISQQKLTIGLDLGDRNSWYCVVDEAGQIAVEQRVRTNAKALQEAFGPMPRSRIALEIGTHSPWISRLLSELGHEVIVANARKVRLIGESRKKDDRLDAQALARLARIDPELLYPVKHRSAQAQADLTVIRARAGLVRTRTALVNTARGLAKSYGQQLRGCNVRNMNPEKAEGLSPELQVALEPLLACIESVSEQICEYNERIEALAQQSYPQVALLKQVKGVGTLIALTFLLTLEDPHRFRKSRDVGCYLGLQPGRRNSGQSEPQMHISKEGDPYLRTLLVQGAQHILGPFGPDCDLRRWGLKLAERGGKNSKKRAIVATARKLAVLLHHLWVSGEVYEPLHNSSTTTVAAAA

SEQ ID NO: 375551 - protein, 320 aa, unidentified
MDQDHKRLFGKRLPNRLDKILTVLEPFKADLKGVVVESTYNWYWLVDGLQEHGHRVHLANPSAIKQYEGIKHTDDKWDSFWLAHMKHLNILPEGYIYPKEQRAVRDLLRRRLFFVRHRTANILSLQSTITRNLGIRMSSNQIKKLDMDDACDLFDSSNLVFMAQNNISTIKHLAKIISGIEKQVKPQVQLRKEFEMLTTIPGIGLILGLTIMLEVGDVGRFFKVGNYASYCRCVDSKRLSNGKKKGENNKKNGNKYLAWAYVEAAHFAKRYIPKAQRFYQHKMAKANGAVATKALANKLARASFFIMRDQVPFDEDMLFR

SEQ ID NO: 375552 - protein, 427 aa, unidentified
MKKTDCLSTLFVGIDISSRENVVAVMDFSSQKPILTFSVANNNPGAECMANRFAELLASHQELKRLVIALESTSFYGIHIANYLSTCLQLAPFHTAVYCLNPKTVANYKKSFVDLGKNDYIDAFVIADFARVGRITIEPWRGSQFLALQRLTRHRLHLVQTLTREKTYMLSNIFLKFSEFSLLDEDEQPFSNNYGATASAVLTEFLSVEEIIEKPMDELINFICEKGHNRFPNPEKTAQLLQAAARNSYRLDKCLYEPLTISIASSFTLISTYYAEIKKVNQAIEKTIKGLDPTAYQSLLSIPGVGPVMAAGILAEIGTIDAFKDNDALAKYAGLVWRESQSGKFKAEDTALSKAGNAYLRYYILEATSHIKNNCIEINNFYKKKYAEVKTHQHKRALALTSRKVIRLIFGLLAKHQLYSGNRVELN

SEQ ID NO: 375553 - protein, 444 aa, unidentified
MAMRKRDDEVFPNAAGIDVGASSHWVAVPRHLAERAGCEPVREVGAMTDDLNALADWLLVLGVDTVALESTGVYWIPVYEVLEQRGLKVWLVDARQMKYVPGRKSDVQDCQWLQKLMSLGLLRAAWRPDGEVCVVRAVARQREVLITDQAIWVQRMQKALVQMNIQLTEVLGDVMGTTGQAIIRAIVAGQRDPKVLARYRHSRVKASAEEITKALTGNWRDEHLFVLGQALAMYDDIASRLAECDAKLQTLLGERGRAQVDLGRAPKAGSKSRVEFDVRQSLANWAGVDLTRINGLGVTVVMKLLTEIGPDVSRFATVKHFCSWLGLCPGTKISGGKVLSSGSKRSANRARQALKMAAMSLSRSDSALGAFYRRLSGRMDKPRANTATAHKLARMVYFMLTRGEQFVDQGQQRYEDQQRQRSIAALKRRAAALGFQLNPTTVTA

SEQ ID NO: 375554 - protein, 315 aa, unidentified
MADTIAQSVGVDISKDTLDVHLHPAGTARRFLNTRTGRSGLIAWLAKFTIVRIVFEPTGPYHHAFERHLAEAGLPLAKVNPRQARRFAEAIGRHAKTDRIDAAMLARLAALLEPPIRPAPSQTLDDMAELIVARRARVKDRVAALQRDSVHRSTLLKRQAVQRLAQIERQIAAIDAALRNRLAADPYLRTRFDILVSIPGVGETTALIMLVEMPELGALDHRCAASLAGLAPIARDSGQHRGKRFIRGGRSHLRQALYMPALVAVRFNADLKAKYDALRNAGKPPKVALTAIMRKLVILANALMRDGRTWSTKPA

SEQ ID NO: 375555 - protein, 350 aa, unidentified
MLIIGCDYHPGFQQIAFVDTETGELQERRLQHREEAEKFYRDLAAQGMKVRVGMEASGHARWFERLLAELNIELWMGDAAEIHRKRERKQKTDRQDAQHILRLLLKDDFPQIWVPSWENRDLRQLLWHRHRMVQARTRMMNQLQAVALNEGLRCKKKLWREAGRKQLEAFRLAPWASRRRHDLLELLDRLNPTIAALSQAIEQEVQNCPEAQRLMTHPGVGPLTALAFVLIIERADRFQCGKQIASYLGLVPLEDSSGNRRRLGHITKQGNSLLRFLLVEAAQVTVRSLPEWRSKYVHLTMRRGRKIAKVAMARKLAVRLYWMMRKEWDYEQVKKFGSHAGQPGNRYGVK

SEQ ID NO: 375556 - protein, 345 aa, unidentified
MKPTTIAVDVAKSVLEVAVSLKTGRVSERHRLSGAQFARFLGRRKPATIVMEACGMAHHWGRQAVTSGHRVLLLPPHAVRPYVPRNKTDRTDAKGLLEALRNEAIRPVPLKSVGQQAIAALHRLRSTWIATRTARLNTLRAILREFGFPIPLGSHHVVPHVRRLLEDPDSGLPDSLRPVLQAAAEEIRALEQRQRTVERQLAAIAEETPVVARLQTIPGVGVLTATALVAFVGDIQRFPTGRHFASYLGLTPRESSSGLRRRLGAISKRGDSYLRMLLIHGARSILCHAQRSASPKRLQAWALRLQQRQGHNKAAVALANKLARIVWSVWKNGHDFTQVTGRELD

SEQ ID NO: 375557 - protein, 343 aa, unidentified
MERYVGLDVSLKQTSICVVSQTGSVMREGVVNSDPEVIAAFVRSKAPGAVRIGLETGPTATWLWTELKRLGLPVICIDARHARAVLKMQINKSDRNDAAGIARIMQTGWFKEVRVKDIDSHSVRALLASRALLVKIKRDLENQVRGLLKNLGLVIGRAKFNVFAARAEELVEDRPELVAAVRPLLEARKAVEQQVCNLDRKVLKLARRDAQVRRFMTTPGVGPITALCFKATIDDPTRFKRSRSVGAYVGLTSRCHASGEVEWSGRISKSGDAMLRSYLFEAAGVLLTRVPKWSALKAWGTRLAKRNGLCKAKVAVARKLAIILHRMWIDETEFNWSKKEVAV

SEQ ID NO: 375558 - protein, 394 aa, unidentified
MEAVTSQPHTPAAIRTDLAAISVSLELSRSTWLITSLSPGNGEKMSKHSVAGGDVAALLHRFAQLQEKVRSRTGNYVPIVSIQEAGLDGFWIDRVLKANGIESYVVDPASIAISRRRRRAKTDKLDGEALVRALLAFKRGEPRVCAMVNPPSPEEEDRRRICRERKVLIAERVKHVNRIKGLLFGQGISGYEPLRKNRRKQLHELHTGDGRPLPTHLKTQISRELDRLELLLEQITAVENERDTLLAAQKDSVAATATLIPAGAMLCDVKGIGLELAAVLWTEGLFRHFDNRRQVAAYAGLAPTPWQSGTIDHEGGVSKAGNPRLHTTMIQLSWLWLRHQPQSALSLWFTARVQSSGGRTKKSAIVALARKLLVALWKYVTAGVVIEGAVLKTA

SEQ ID NO: 375559 - protein, 439 aa, unidentified
MILIREVADAPVIMGISKPAGLKSPRGEVKTMNPLFVGIDVSSRNNVVYLMKPDGSKHSSFSVQNNLGGAKLLSEKIVSALHSMQLIDVVIGLEATSIYGDSLVYALREDGSLGRFRRKIHVLNPKQVKKFKEAYPDLPKNDFVDAFVIADHLRFGRIAKEVYMDDYRYQALRTLTRARFDVIQNLTREKQRFANYLFLKCSGMAQDKDIQNTSATTIALMEHFETVDDLANADLDELTAFIAETGRGRFANPNAVAKVIQTAARGSYRLPKTVNDTVNQAISVSIASMRALKEQVKVLDKAIEQQFEIIPNTLTSIPGIGKVYSAGIIAEIGDIHRFDSQASVAKFAGLVWLKNQSGEFEAEHSQMIKSGNRYLRYYLLEAANSVRRCDSEFRRYYDLKFKEVNKYQHKRALALTARKLVRLVFRLLKDNRLYIPSEG

SEQ ID NO: 375560 - protein, 341 aa, unidentified
MGELTIIGLDIAKSVFQAHGADAAGSVMFRKKLGRGRLLAFFAGQPRCVVALEACAGAHHWGRELEAMGHTVKLIPPAYVKPFVKRQKNDEADAEAICEAAQRPTMRFVPVKSREQQASGVVFRARDLLVRQRTQIMNGLRGHLAEFGYVAPKGVMYVERLVAEIEDPDSQLPPAARVSLQVMVRMLDALQTEIASLDAEIARRAKEDPVARRLMTIPGIGPVTASAMVALAPGAEAFRCGRDFSAWLGLTPVQRSSGGKQKLGQITKAGERTLRRLLVIGASAVIKQALIRGAPPGSWLAQMLARKPRMLMAVALANKTARIIWALLARGGVYRAPALTA

SEQ ID NO: 375561 - protein, 368 aa, unidentified
MWYIGIDVHKKMCNACIKDRDGDIQKELKFLNKSTGIDKLLEVIDGREAKAVIESTGNMWLRLYLSLEEAGVGVVLANPKKTKAIAEARLKNDKVDARTLADLVRTNLIAPCYVPPEPIRELRNLVRHRINLSRDMTRVKNRIHAILDKYELEFKGTDMFGEVGMKWLKSIVSKLSEVDQLIVDAELRHIGALKQLIEEVEARIAKESMESEGVKLLMGIPGVDYYTALLFTSEIGDYSRFSSANKLISWLGLAPRVHQSGDTSYNGRITKEGSPRVRWALVQAARSAVRWDDHFRTEYQRIQKRRGDGKAIVAIAREIAVAMYHMLNRGEAYRFSSDAFKTKKLKRLERESKKWAKMMKVPVGGMTA

SEQ ID NO: 375562 - protein, 322 aa, unidentified
MDTFQLGIDVAKAKLDCALRLPNSKIRHKVVGNNPAGFRDLRAWLDKQGAHSFHACMEATGTYWESVAEFLSALDGITVSVINPAQIKAFGASQMVRTKTDRVDAKLIAQFCAERNPSPWQPPAPAEKSLRALVLRLDALQSMHTQESNRLDVARPGIKEGIVSHLEWLDKEIKRLVKAIHDHIDTDPNLHDKQQLLDSIPGLGERTIAILLAFYATPDRFNNARQAAAFAGLDPRQHESGSSVKGKPRMSKVGHAFLRKALYMPAMVTLYRTAWGKQFFQRLSAAGKPPKLIIGAMMRKLLQVAFGVLKSGKCFNSAIHGA

SEQ ID NO: 375563 - protein, 317 aa, unidentified
MKTQVFVGLDVSKQRLDVAVRPQGRHFVTPNHDRGIKQLVKRLAALKPQLIVLEASGGYEFLVTAALAEAQLPVALVNPLAVRKFAGATGKLAKTDKIDAQVLAHFAEALRPEPRPLADQDQQLLKAALQRRLQVVKMIGQEKNRLEKTFIPALKQDIQAHLAWLQQRLEQLDRDLNDQIRQSPLWQYRDRLLRGIPGIGPVVSRAVIAQLPEAGLLPGKKAVALVGVAPYNRDSGRFRGKRMIRGGRSYLRRLLYMAAVVASRFNPVIRAFYQRLLAAGKPKKLALTACMRKLVLIINAMVKNNQPWNQFHPGTLT

SEQ ID NO: 375564 - protein, 388 aa, unidentified
MNVGTDKSEPLTAIHTDLGAIFVSLELSRSSWLITSLSPGGGEKMSKHSVRGGDFAGLMERFAQLQEKARLRTGQSFRIIVVQEAGLDGFWIHRALQNEGIESHVVDAASIATSRRRRRAKTDKIDGETLVRALLAYKRGEPRVCAMVKVPTPGDEDRRHLCRERKALTAERVRHVNRIKGFLFSQGVSGYQPLRRDRRQRLEELQTGDGRAFPQHLKALVNRELDRLELLLKQIKTVEAARDALLAMEQTAKPAPAAMLLDIRGIGPEFAAILWSEGLFRHFENRRQIAAYAGLAPTPWQSGAVDREQGVSKAGNPRLRTTLIQLAWLWLRNQPRSALSIWFHERVSRNGGRLRKTTIVALARKLLVALWKYVTAGVVIEGVTMKVA

SEQ ID NO: 375565 - protein, 452 aa, unidentified
MPKQSHRRCEQLPVMHPDAAGIDVGASELFVAVGADRDSQPVRRFPTFTRDLHALADWLEQCGVRSVAMESTSVYWIPIYQILEARGLEVCLVNAQHVKNVPGRKTDVSDCQWLQYLHSVGLLRASFRPPGMICAVRALWRHRGSLVQMAAEHIMHIQKALDQMNLQVHRVLTEITGLSGLRILDAILAGERDPLTLARLCHSRVKSSESTVAKSLEGDYRPKHIFALRQSLAAYRYYQQLVLETDQEIQRQMAELEAADIALAKIPKRTKRLPYQRQGHEPRVFDLRRELYRIFGVDLTNVPGISSMTAQTILCEVGTDVSHFRNASAFASWLGLCPEKKISGGKVLFTKSRPVRSRVAIALRLAARSLHHAKDYMGEFFRRICRKLGKPQAITATAHKLARIVFHLLSTGESYDESVFHKCEEEVLKRAEMRLRKQAAHLGFRIIPVEAD

SEQ ID NO: 375566 - protein, 351 aa, unidentified
MIIVGCDFHTRFQQVAMLNPGTGEVVERRLEHETGEARSFYASLPAPARVGIEATVNAQWFEKVLRENHHELWVGDAAEIRAMRVRKQKTDSRDALHILNLLVTNRFPRIWIPSAGERDVRQLVRHRHKLVRIRTSVMNQLHALAIGQGLCRKQKLWSKAGRMELEALVLDPWAQRRRHDLLELLDQLNPWIAELDRAVTEEVQSRPEAVHLMREPGVGPVTALAFVLTIGPVGRFQRSKEVVSYLGLNPSEESSGGRQRLGSISKQGNAMVRHLLVEAAQAASKFDPELRRDYERLRFRRGNSGVAKVAIARKLAVRLYWKLREAAQSNTVARMQGSPANPVVDASLSPK

SEQ ID NO: 375567 - protein, 342 aa, unidentified
MREIIRIGMDTSKHIFVLHGVDAAEQPVLRKKLSRKQVLEFFAKLPPTVIGMEACGAAHYWGRELGKLGHEVKLIAPQLVKPYVLRNKNDGRDADGVCEAMGRPRMRFVPVKSAEQQAALMLAGVRDGLIGRRTQLSNAIRGYAAEFGLIAPKGLDKIEPLLARITQDESVPAMARELFAMQGRDYAQLQGELKAVEARLLAWHQANATSRRLAQIPSVGPIIATSLVMKTPDPHAFRSGRLFAAWLGLTPKDHSTAGKTRLGKITRAGDETLRRLLVAGATAVIRQARLGRGHPSRWLVALLRRKPPKLAAVALANKVARIAWKLMATGESYDAARMNAVT

SEQ ID NO: 375568 - protein, 420 aa, unidentified
MEPQRNKVCGVDVHKKFLVATILSRDGTKDTKRFIMVIEELLRFRDWVMENNCEQVALESTGIYWYPIHAVLEGKIDLIVANAYKIKHTPGRKTDASDSEWIAELCLNGMIEPSRIFPREDRELRRLTRARESYVKEVTQEKNKIHHALDSSCIKLASVLSDIFGKSGRYILSCLMDGMSVEDIIESLPSKRIKKKADLIREAIMSSLEVSQIIQIRGSLKVIDAIQERIDELDREIQSRVIRRKNDLRIAMSIPGVGFISAAAILAEIGNYADFKNAEQLAAWCGLVPSLYQSADKSVSGRITKHGSKHIRRMLVQVAYAISRVKDSKLKRFFFRIQKKKGSKIAAVALARKVLCILFHLLTNQEIYQEDTSKRNRSIKIGNAQPSVEISLKEMIDCIVRAGYVVEKKMTKGADTVSKG

SEQ ID NO: 375569 - protein, 361 aa, unidentified
MFCERTSVGLDVHARSVVAAAIDGRSGEVFRARLTPAYAEVIEWVGKLPGPCAVVYEAGPTGFGLARALSAAGLRCEVAASSKLLRPAGDRVKTDRRDALILARLLRLDEVVPVRIPNESEESARDLVRAREGARVDLMRVRHRLSKLLLRHGIVYDDGKAWTERHDRWLHHQRFDAAPTQSAFEDAYEAVVLATARRARLDEKIITLAAESEFGPMTRRLACLRGISTLTGFALAVEIGDWERFSGGSIGAYLGLVPSEYSSGTSRVQGAITKTGNTHVRRLLVEAAWHHRSTYRPGVALRRRWDQAPAAARARAHAGNQRLHDRWVGLNLRRKRAVVANVAVARELAGWCWSLAILPPD

SEQ ID NO: 375570 - protein, 373 aa, unidentified
MNLIQYIGLDVHNDSIAVSIASSDSTEVRRWGIIGGTHDDVQRFLKKIQAAHPEATLKLCYEAGPRGYPLCRFLRGLGHECILVCPSRVPRRPGDRVKTDRRDADQLARLFRAGELSGIHVPEPEDEAMRDLLRSRDQVRRAQHRARQQLKMFLLRHNFRYAGTTSWTPAHLRYLARIKMPFPAQQFALQELMHAISEAGERLERYDTELARQVAGWRWEPAVKALMSLRGMGLLNAATLIAELGDLSRFTRPQELMSYLGLVPSERTTGQDRQQGGITKMGNGHARRALVEAAHHYRVPARLTPHLQKRQEGLPKGVTDAAWEAQRRLHHRYKQMSGPGRKKAPVIITALARELSGFVWAIARQVKPRETKR

SEQ ID NO: 375571 - protein, 347 aa, unidentified
MDHIGIDVHKKESQMCILAEGGELIEQRIRTEPERFATVLGERPRARIVIEASTDSEWVARCLEGLGHEVIVADPNFAPMYATRTRKVKTDRRDAHALAEACLLGAYRPAHRLSDPQRHVRGRLTVRDAIVRTRTRYISLIRALLRQQGYRVPSGSAEGFLRRVRAMTLPGRLVSTIAPLLAVMRHLNAQLAYSDETIARVTAHDERVQRLRTVPSVGPVTAAAFVATLDDAQRFRHAHQVEAYLGLVPRELSSGETQHRGHITKAGHSRMRWLLVQVAVSILRRRPPQAEALHAWALHIAARRGKHIAVVALARRVAGILYALLRDGTTFDPRRAPRPAGAATLPA

SEQ ID NO: 375572 - protein, 362 aa, unidentified
MGTITIGIDLAKLVFSACELDGSGRVLQRRDLRRDALSAWLAQLPPGTVVAMEACSGAHHWGRHCLTHGLVPKLIPAQFVTPFRKSRAAKNDRNDAEAIATAARQGNMRFVPLKSVNQQARLTLHRLREGYKADALSTSNRLRGLLAEFGVVVAQQDRALRHAMADAAVRDRLPSSLLGPLDALVQHWNVLGDRIADCDDAIATNASNDARCVRIRRIVGIGPLTADAMVATVGNAREFKNGRQLSAWLGLAPSQHSSGGKARLGAISRRGDGYLRTLLIQGARSSLQRAKAVSLEKATPEQRWIRELAARLPFGKVLAAIANKHARQLWAMLARDEDYDEHAWLKHPMVQRPRSTRSLQTA

SEQ ID NO: 375573 - protein, 325 aa, unidentified
MNKFKHYYGIDISKDVFDVVNQDGKHSQYENNCKGYKQFVSSIEEEACVVMEATGVYHVQLADFLHGKSIFVSVVNPLVIKRFIQMNLRRIKTDKADAQMICKYAMSQELREYKPCPEFIKESRIIVENIDLLIKSRTMLKNRVHALKHKSSKNRSIIIKPILDSIKSLNKQISKLEMELENLVKNNFPELYSLLKGIPGIGKATALFFIVLTEGFEKFESAKQFTSYVGLSPSEKSSGSSVRGSSAISKQGNPKIRNLLFMCSFNACKSNKACRELFARIVAKGKSKKLALIAVANKLIKQAFAIAKTRIPYDPNFRSMKPSII

SEQ ID NO: 375574 - protein, 403 aa, unidentified
MNMNAVGIDVSKGKSMVAILRSYGEIISKPFEVKHTVSGIRSLIEQIQFIDGESRIVMEHTGRYYEPLVRELSKADLFVSAINPKLIKDFGDNSLRKVKSDKADAVKIARYTLDSWTELRQYSLMDEIRNQLKTMNRQFDFYMKHKTAMKNNLISILDQTYPGANTYFDSPAREDGSQKWVDFSATYWHVDCVRKLSLNAFIDHYQKWCKRRKYNFSRSKAVEIYEASKELVSILPKDDLTKLIIKQAVEQLNTASQTVEQLRTMMNEAASKLPEYPVVMAMKGVGKSLGPQLMAEIGDVSRFTHKGAITAFAGVDPGVNESGSYEQKSVPASKRGSSTLRKTLFQVMDVLIKTKPQDDPVYLFMDKKRAQGKPYYVYMTAGANKFLRIYYGRVKEYLSSLPE

SEQ ID NO: 375575 - protein, 361 aa, unidentified
MFSERTSVGLDVHARSVAAAAIDGVTGELRQARLTPGHDDVRSWVQGLPGPVAVTYEAGPTGFGLARSLSEHGIRCVVAAPSKLQRPAGDRVKTDAKDAIHLARLLRLDEVTAVSVPSRSQEAARDLVRAREDARGDLMRARHRASKLLLRHGVVYSGGAAWTGTHDAWLRSQRFDQPATALAFESDYDTIRLTLARRDRLDTAIEAMAAESEFTPVVRRLGCLRGVSALTGFALAVEIGDWERFSGASIGSFIGLVPSEYSSGSSRVQGSITKTGNRHLRRLLVEAAWHHRRRYRPSRTLAKRWALAPAAAVARGEAANQRLHHRWARFDAREKKPVLANVAIARELAGWCWSLAVMADQ

SEQ ID NO: 375576 - protein, 343 aa, unidentified
MTEVSTIGLDLAKNVFQVHGVDVAGETVIRRQLRRRQVLPFFRKQPPCLVGIEACATSHYWAREIGALGHEVRIMPAAYVKPYVKRNKNDAADAEAICEAVTRPTMRFVAVKTAEQQSVLMVHRTRELVVRQRTMLVNAIRAHMAEFGVVARVGLPQVKELLTVIADPGDDRIPPLARTCLEGLARQLLSLEREISAAEQRIHAWHRANQASQRLATIPGIGPITASALAASISDPSVFRSGRELAAWIGLVPRQTSTGGKQRLGRISKAGDHYLRWLLVTGAMTVIRHGRRTNFAKRPWLGDLVARKPTKLAAVALANKNARTAWALLANGGTYRQPEITVA

SEQ ID NO: 375577 - protein, 344 aa, unidentified
MTGNDYIGLDIHKKTISFCAKAQDGTILDQGTIAARRDTLLAWAKARPRPWIGAMEATLFTGWIYDLLKPLAQELKVAHPAMLKAIAASKKKNDQVDARTIADRLRCNLLPECYMAPCAIRDLRRVLRYRNLVVRQATRMKNRIAGLLMETGTPYNKERLHGRAYFSELLGSLREVPRSVVELLQLSRGQLEFFATIQRRLLKGLGQDPDLSERVARLQTIPGVGEIMALSWALEVGEVKRLPSIAQAASYCGLTSAQHNSAGKEQRGPISKQRNKHLQTILIEAAKLAPRYNPQLAVVHERELRRGDRNQATLAVARKLVAYLMAVDKSGKPFAMRASGAEAT

SEQ ID NO: 375578 - protein, 375 aa, unidentified
MSDHSEAFIGFDTSKLRNAVAIADGGRDSEVRFVGEIDNTETATAKLVRKLAAKYDRLTFCYEAGPTGYGLHRQITSLGHACVVAAPSLIPKRPGDRVKTNRRDAVSLAKLLRANELTPVWVPDRGHEAMRDLTRARETAVVDLRVKRQQVSAFLLRLGRHYPAGKKTWTKAHLSWLASQTFAYPQQRLVFEELMLAMRQAQERQLRFEEAIRAAVPEWSLAELVTALMAMRGMDLISATTFLAEIGDLSRFATPHELMAYLGLVPSEASTGDTIKRGPITKAGNRRARRMLVECSWSYQYPPRVGADKQHKVDAAPPAVREIAWKAQCRLHRRYRALIRNGKLKTVAITAVAREFAGFIWAVSREITTAQGVAR

SEQ ID NO: 375579 - protein, 392 aa, unidentified
MYIVGIDIGKNHHEASIVSPEGKQIGRSLRFATTHKGADSLMSFIFKNIGNSPCVFGMEATGHYWYPIYSFLKAKGYTIYVINPIQSDSLRKMYIRQTKNDSIDSFLIAEVIRFGQFGTTSMADENILAMRQLCRYRDSVISSRTEIKLRIGTIMEQIFPEYEKQFSSLWVSTSMGILEKYLTPENIENAPIDELFEIIKDKSHNRLTKAKAISIKEAAADTFGIKIAQDAFSFQLKQLIDRMNFLDKQIEALDCQILEYYEKFDCYLHTIPGIGMIAAATILAEIGDINRFKSSSALVAFAGIDPTVRQSGEFSSTHNHMSKRGSPYLRHAIFLAATTCSFHNSPLNAYYKKKRDQGKHHLTATGAVARKLTSVIYAVLRDSKPYEPKSFC

SEQ ID NO: 375580 - protein, 339 aa, unidentified
MELYAAFDLHGNNNFLAVIDSNGKRIFGKRLLNDRERILEVLRPYQKDLIGIVVESTYNWYWMVDALMEKGYPVHLANPSAIQQYGGLKHTDDEYDSFWLAELLRLGILPEGYIYPQEERPIRDLLRKRGHLVKLRTSLIISLQNIISRNCGIKLNVNEVKALKEDRVHPLLQDNEDLALAGGVSKEAIDFLTRQIRKIERVVEGRIELKGSYGYLLTLPGVGKILALTIMLETGPVSRFAKVGNYVSYCRKVSSRWSSNGKAKGSGNKKNGNRYLAWAFSEAAELARRYYPEPRAYYQRKMQKTNFMVAHSALAHKLARAAYYVMRDQVPFRPEKLFS

SEQ ID NO: 375581 - protein, 318 aa, unidentified
MAILKQVAGIDVAQKELVVSLGRMDHELTLEIFDYKVFTNNQKGFKELTRWAEKQVKNDVKIRYVMEATGVYHESLAYYLTGNGSEASIVLPNKISNFFRTLDVNTITDKTASEAIARFGLERKLEVWQKPKKIFRDLKQLTRERDQLIADRTVLKNQLHAEKAEAFPNQSSISRVNKRIKLIDQQDLEIKAEIAAIVKQDPELVTKINTITTIPGVGKLTAVIVLAETNGFELIKNKRQLVSYSGLDVKLKDSGTSVKGRPRISKKGNRHLRKAMYMPALSAMKHNEQHKVLFVRLVSKHSVKMKAAVAVQRKILEL

SEQ ID NO: 375582 - protein, 408 aa, unidentified
MELKPIYKRVIALDVHQAKITACAIADHGDGRVEVIRQEFGAFKSDRRALAQWAQAFVPEVLVMESTGVYWKSPFAALEKVGIIAWVVNARHVKAVPGRKTDICDAQWLATLARAGLLRASFIPRLEFRQLRLVSRQRQKLVGMLASEKNRLHKVLVDAGVRLGVLVSDVHGDAARAMIKVLIRGGAMEEVLNKKGRLRASREELFEAISPEELSDVHRFVLDEIMQHIEHIEQRIARMDAYLLHALTPWQAQLNLLQTIPGIDRMGAAMLLVEIDDDMKRFGSAERLASWVGICPGNNESAGKRKTGRIRKGNAWVRRLLCEFAQAAARTRCALKAKFESMNIRKGHKKSVIALAHKMLRIIFAILNTGQHYEDKSVDYEALSVARNAPRWIKMLHKHGYMSAPAAA

SEQ ID NO: 375583 - protein, 436 aa, unidentified
MDVNYANRLRWFRQFKEHVNASTSILIVGIDIGKDTHHAFLGTAAGRTIHRRLIFENSIYGFDRLLFLIKRQMSDKQLTEVVIGVEPTSVYHKPLSEYLITMGYDVVYVTNTAIKKNRVILDGRWDKNDTKDAANVADLVSRGRCHFYDLPDINLRDIRNLLSLRKRLKKQEHRVMTRIRNNLVAQYFPELDGAWYSCQQENLAIVRFCLSPQKVAELSFDDFCRMVTRRRRGIRQYQRLRHIHEVAEQSIGCQLGSSVIFEAQLLVENLERSREQIRQVEEQLSLICESYKEYELLQTIPGFGPYVSAVVLAAIGYAQRFENTRQLLRLAGLDLNASRSGKKSHTAVPVISKAGKADLRYALYQAAKVATSLTAEFKAYFKRILKGREKERGIKTKMRVKVSAKMLVIAWTLMKTQQPYKAGLLLIDEPVQPRGR

SEQ ID NO: 375584 - protein, 384 aa, unidentified
MKKNNIAKKSVKRPNHAKSVKRTDGAGTASELRLTIGLDLGDRRSRYCVLDQNGEMIQEEAVATSREGLKSIPGAAAGSRIVIEVGSHSPWVSRWLKELGFEVIVANARKVAMISQSTRKNDRLDAQMLARLGRIDAKLLAPIQHRSAQAQGDLAVIRMRAQLVDQRTELINCARGTVKAMGGRLPSCEGKDMGVEKLAGWKLGQVLEQLLKPLFTVLDHLNEQIAVYEKEIAVMKERYPQIKLLTPVYGVGELIAMTYVLTLEDPAKFRRSRDVGPYLGLTSKQRDSGQSQPQMHITKEGDRYLRKLLVQAAQCMLKPGAQESDLRRWALGHFRPGDKKGKKKAVVGLARRIAVLLHMLWVNGEGYEPNYQQHQQQKAVRAAA

SEQ ID NO: 375585 - protein, 336 aa, unidentified
MQKDYQIFIGIDVSKDKLDYCIVNSNFQNPQQFGVVANQAKAISKFIQTIRKNFQRESKILFCLENTGIYSMPVCYWLQAAGFDYWVVSALEIKRSKGISRGKTDRTDAKDIAYYAITHLHQIKLSHLPTNDFIELRLLLAEREKIVKSIGAFNTTKENKNFLPKENLKTILKHNQVTLSFLQKQLKEIEKLIDKLVQNNETFKQQNELLQSIPGIGKPTSVTFIAYTQAFTLFKNHRQFACFAGVAPFEYSSGSSIRGRTKVSHLANKKIKTILNLAALSAKKYDPQLKHYFDKKLAEGKNKMLVLNAIRCKIISRAFAVIKRNSKFVNTFKAVA

SEQ ID NO: 375586 - protein, 413 aa, unidentified
METYKIAGIDVHKSMLAVVITDAHKEGEFQFQRRKFTTLASGLEQLAGWLRQEEVQEAVMESTAQYWKPVWQELEGQCKLALAQAQSNRAPKGRKGDYKDAERLLRRHVAGELILSFVPSPEQRLWRTMTRSKHQLTRDRVRMQSQIESLLEDAHIKLATQVSDLLGVSSRRMLQALADGEGDPARLAAMADPALRATPEQLQDALRGAPTMGTLHRQILGLFLARLDLVESHMQILERSIGQGLQSHQDAVQRLAEVPGFGVDSATQVIAEVGPTAGTFNSAPELCSWVGVCPGREESAEVSKSNRSPKGNRMMRRVLTQVANAAVKSKGSVFEATYRKLVVRLGHKKTIWAIAHRLCRLTWKILHQGVRYIEYGMRLNQKAVQKRARRLLRDLQSLGYRVQITPTPAPANA

SEQ ID NO: 375587 - protein, 319 aa, unidentified
MVYIHFIGIDVSKEWFDAVEYAKEVAKAAKPERFQNSSAGFAAFARRFAVALPRALIVLEATGGYESALVEALLDRGWAVHRADPRAASHFIRSLGKRAKTDGLDARALARYGAERHGELRLACPQDAAQAELEVLHARRADLVAMRTAEKNRLKHPRYSALREDVRTLILTLQSHIDALEARIEALIGRSRRLAARRNVLTAVTGAGTHTANSLLACMPQLGTLTRRQAASLAGCAPHPRDSGKTTGYRRTSGGKQAVRSALFMAAMAARNFHPELKIFYQRLLQNGKKPIVALTALMRKLITILNAKLRDAECQTTW

SEQ ID NO: 375588 - protein, 457 aa, unidentified
MQQYYLGSDVSKGYSDFVILDSQKRRVEENFQLDDTIVGHSFLYDRLLIFFEEHPDAELCAAVESTGGYENNWYNTLRKFQSSLNIKTARLNPAGVCKNTEAGLKRVITDKISAQGVAEYLIAHPEKVMYQQQDYWASLRKQWSFIKMLTKQSTQLLNQLESLLYSTNPEILKYCQDGMPAWVFKLLKQYPTAAKLSKARATSVARIPYISISRAKELVASAKTSVASTTDTITGQLISATVGQIQHLQKTIRAQTKIMAAECTLQEVELLKTFTGIGDYSAIGLMLEIQAVERFTTTKKLASFFGLHPVYKISGDGAGGFRMSKKGRKEPRRILFMVAMSAINSNSLIRDLYQKHVENGMKKMTAIGLCMHKILRIIYGMLKNNTPFNPEIDLKNRERTSEQPQKEKKDKSRRYQDFDATAPISGRQRKKRAERKLSQNAVSVECGICASAPQLSS

SEQ ID NO: 375589 - protein, 421 aa, unidentified
MKKKAYKTVDVKKVNVDALSKKVEGQPIVLSIDVAKTDFVASIMTSNKEVLLTLKWKHPSESQLLIELILKNLRWHSLEVAMEPSGTYGDSLRAQFLGHGIDVYRVSPKRSHDAAEVYDGVPSMHDAKASAIIGYLHLEGYSEPWPMPDEDQRTLTAAIRTMEMYDDAYYRNINRLEALTMRYWPELSSILSLQSATLLELLIGYGCPDHVEQCRDEAETLMKKVGGVQLKDDKIQAVLASAAASLGVKSIEAERLQVQELCQEIRRLQKQRRHAQQQVEGLTQDVDGVKAMSPVVGKVTAAVIYLAVGGMHAHSGAGSVVKALGLNLKERSSGKHKGQLRITKRGSGSARMYLYMAVLRLIRCDKIIKAWYSKKVSRDGGMKMKAIVAIMRKLAGALWHVGKGVAFDASKLLDTRRLALN

SEQ ID NO: 375590 - protein, 365 aa, unidentified
MGILAEQVDHVIGVDTHRDSHSAAILEALTGVLVIDRTVSADAFGHKRLLRFAELHATGRRVWAIESSGSYGSGLATFLLAHGEWVVEVERPVRPARRNGAKSDELDAIRAAREALTRDHLAQPRRRGDREAVRVLLVTRRGAMRARTKAINHLKALIVTSREELRHQLRRHDTDELVARCARLRTLPSHPAEHRATVIALRHTARRILALEAEANDLESEIEQLIKANVPWLLDEIGVGPISAAQLFCSWSHPGRIRHDGAFAMLGGAAPIPASSGQTIRYRLNRGGDRQLNCALHTIVLTRLKHDPATRAYAAKRAAEGKTPREIKRCLKRYLARRLFHLLEANGPSSPLPRAPRSRTIGICH

SEQ ID NO: 375591 - protein, 339 aa, unidentified
MEPVAPIELHIDLAIELRASTWLVAVRMPASDKVGLHRLEAGDTAALFSLFEKLQARVRAKRACEAVTATSCFEAGRDGFWLHRLLVAHGVENYVMEATSILVSRRARRAKTDRLDAQGLLRDLAAYRRGDRQICGMVRVPTPEQEDAKRQHREREHLVQERVRIENRMEALLATQGIKKRPSLRSWGRDLEALRTGDGRPVPPHLRAELGRLHRHLVTTLEMIREVETELEHELEHEAEDPAIKMIQALCRIRGIGENVAAMLTREVLYRPFSNRRQIASYVGLAPMPFQSGEIDRDRKISRAGNPRARTMVIQFACCGCAISRPALCHSGSTSVSAH

SEQ ID NO: 375592 - protein, 344 aa, unidentified
MKRYLGIDLHTNSFTCCYLHADGSETIRTWPLQGGGLEQFVHGLHAEDDVAIEATGNAAYFCKTVEPFVARVVVIAPWQFEVIRRSVKKTDKHDARAIALFLSKDMLPEARIKSEEHVQLSSLITTRDQLVKLRVSLLGKVHGMFVRHGLKIRREVLTSKAGFTRDVAGHDWSPLERVELAVIDDQMQSLHRNIKRLEKEIAAFAKTLPGYDNLISIKGIGPLSVAVLLTHIGAIEDFHNTGKLAAYFGIVPRVSQSNDTRNNGPITKRGNKLARTTLGQCTLIAIRYSSYLRGFYESLKTRRGTGKAIIATARKLLNTIFHTLKNKWVFEDFPNFKLLTCNQS

SEQ ID NO: 375593 - protein, 335 aa, unidentified
MEFTFFIGTDVSKNELDFAVRQGKHLLFHQEVENSVKSVNAFLKELLAQPGFDLGKAVFCMEHTGIYCNHLLLCLHKRKANICLEAATQIKNSLGNLRGKNDKIDSVRIAEYAYKNRDGLRLWAPKREAVVQLAQLASTRSRLMRARKMLATPIKESRGFVNKKMANQNGRLCNKTLQALEQDLRKTNKAIDGLVNADPELKRLFGLITSVCGVGRVTAAQVVISTNEFRDINEGKKFACYAGVAPFTKESGMLKGKARVSHMANKKAKTLLHLAALSAIQHDQGIKAYWERMVNEEKKNKMSVINAVRNKLVLRIFSCVNQNRKYEKIYPKLVA

SEQ ID NO: 375594 - protein, 355 aa, unidentified
MKQGTQLDFIGQTIFAGIDVHKKSWKVCIRSEHMELKTFSQEPSAKTLSNHLKNNYPSATYKVVYEAGFCGFGYQREFSDEGINCIIVHPADVPTTDKEKQRKSDKVDCRKLGKTLSEGSLEGIFVPDVEQQDDRGVIRVYQQMVKDQTRFKNRIKGWLSFQGIVIPGDDDYKYWSNNFTKWLKGLSLTSSARINLDILIQGYEQSRTMVLAATRQVRALSKQERYKKKIELIRTIPGIGEIAALLFTTEIGDMNRFKELDQLCDYVGLVPKIHGSGDKETVLGLTHRGHHELRETLIEASWTAIRLDPAMTMAFNEYCKRMKKNRAIIKIGKKMLNRIRYVMKNQKDYVTAVVK

SEQ ID NO: 375595 - protein, 442 aa, unidentified
MLWPSVDIEGPLISQAIGVRSWQGGNLLRVITQKKGDPTMFYLGIDVSKKSCRYLLLNEEGQKVKSFSLDNTHEAFQNLLKRIEDLSIPKEDLLIGLEASGGFWENLYAHLKDNGFRVILLNPYHTNKFREALAKKAKTDDIDALVIAQLLRTGEYVQSQVAEELIQSLRELTKLRYELLTERKNYQRQAFSLLSIIFPELEKTALKNPFSVASMAILQRFPTAKDLAQAKPKQIEKIVRSIQGNNFNIKEIDKLIQTAQTSIYSGRAKEARATSLRILLRHVETLSSSIEELEAQIKQILAPQEPQDSFPGENLLTIPGVGDKTLAAVLSYLGTDGSNFSSSTKAVGYVGYFPKIYQSGQTHKENTICKRGPKLLRWALYMAAVASLKHNPEMRSLYHRKLSQGKTEKQALICVGKKLFQIMLAMLKSGEPYNPAKVFVSC

SEQ ID NO: 375596 - protein, 365 aa, unidentified
MEERKKAVPRYVGIDLGKRTYAMAIVGKGGKVENSNGRTCVAGRQKLIKKLRPGDKVALEAGNMAFIMAKEIEAAVGCRVYVLNPSHLPLIYGSMKKTDKEDSLKLAHILEDFQEERLPVVPVPSDKEMCRRKILAGYRRAQQSRSRDINKLHALFLAQGITTKVRADLSTSAQRKESIKELAGLEREEAEYLVACLDLHEQRIEIMSLKIKKESAGDEVIERLQSVPGVGPMVAFAFAAHVGAERFEDAGQVSNYLGLVPRVYISGEAVRYGRITKRGNGYLRALLVQAAWALIRTKKHGKLKERYEYMTTEKSKSKKQAIVAIARRIAELLYTLMRDGTKYESRPFIREKKAIEELAKLALSA

SEQ ID NO: 375597 - protein, 431 aa, unidentified
MLGVGIDWAERFHLVALGSPDTGVSEVFRVEHTAPAVAALITRLAGVEPNPAEVRVVIETSHGMLVEALLDAGYTVLPVNPDLVARRRGPARKKDDATDARIACVLALDRFTTLRPLIPHGPLAAELRAIARDDERANRDERRLLNRLRADLIATFPAALVIAGDDLGAPTFLRLLTAWPTMIELSAAGRAEVEALARAGRHGWPHRFADRVEQALSSADVFTARDYLVRAKADTIRLAATQLLAIGAQRRVWEKRMGTLLLDAPRRGRACQPGPGPTGEDQRPNGFPGGEIYLSFAGLGDRLAARVAGEIGDHIEFFTSPNALQCYAGKAPVTRRSGKSEFVVAHRLACNRHLRDAVQQWAFCSLNTSVWAREFYDSHRARGKTHHATLRALGNRWLEVLWHCLTKGVLYDETVHIANRNRALTPKPAAA

SEQ ID NO: 375598 - protein, 424 aa, unidentified
MHNRKVNHMKNWKDLTHYAGFDWAKDHHTVVIVDTEGRTVADFEFAHSLEGWKSFAEKTSAWPNLAVAIETSQGAAVDQLLQRELTVFPVHPVAAQSYRERKAPSGTKTDHLDGWGLADALRVDGLGWKPLQPLDPMTQQLRLLCRDEVSLIEQRTALVNQLQQALAEYYPAALEAFEDWTDGFTWEFVMAFPTPQALVNAGKRRWEKFLHTHKLWRPETVEKRLKLFAQADQFKASEPIVRAKSQLAVSLCKLLCTLGQQLKLYRKQIEALFQVHPDHDLFGSLPGAKNVLAPRLLGAVGNDPDRYGDHEVLQAIAGTAPVSYQSGRINRVRIRWSCDKFMRHTVHLWADCFRKASAWGQTYYQKKRDEGMSHACALRCLGQRLLKILFRMLKTKTPYDAELHGRNQQKHGSWVLKLVNAPAA

SEQ ID NO: 375599 - protein, 405 aa, unidentified
MLCGIDWASERHAVCVLDDAGTTVSAFEIAHTADGFDQLVARLRRNGDPAGLPVAIERPDGRLVDRLLEAGHPVVPVQAGAIKAWRDAEVVSGAKSDPGDAAVIAEYLRLRRHRLRTLQPFSAETRALRAVVRTRDDLVAQRVAATNQLAACLDAFWPGAKQVFADLASPIALDFLTRYPTPESAARLGEARMRAFCTKHGYCGRRPAGTLLARLRTAPPGLVDTLEVEARRDAVLALVGVLRALNAAIKDLDRSVVAHLGEHPDGEIFTSLPRSGRISAAQVLAEWGDCRDAYDGPEAVAALAGIVPVTKASGKHHAVSFRWACNKRFRAAITLWADNSRHASPWAAKVYADAVARGCDHPHAVRVLARAWVRVLWRCWVDRTPYDPAKHGAARKLTETAASAT

SEQ ID NO: 375600 - protein, 339 aa, unidentified
MAILYVGIDLAKNVFAIHGVDEHGKAMLVRPSVQRARLHQLVAALPPCTIGMEACSGAHHWARLFAQHGHAVRLMAPKFVAPYRMSGRRGKNDAADAKAICEAVQRPNMRFVPVKSQDEQARLCIHRVRQGLVEQRTATINRIRGLLSEFGIVLAQKAATVRREAAAHLEDLPGWANTAVGDSLSELHRLDERIAEYDRHVVHMAREDDRSRALMQLAGIGSTTASALVSTIGNARDFKNGRQLAAWLSLVPGQYSSGGKTRLGSITKAGDGYLRTLLVLGAKAVLAAAKNKDDRLSRWAMALEVRRGYWKTVVAIAAKNARMAWAVLAKGENFKPLEA

SEQ ID NO: 375601 - protein, 335 aa, unidentified
MQVYGIDLSKEKFDVNFIDAKGKEKNRVVKNAVVSISRFLSSVSEDSILCAEHTGVYGDILVYLCNQMNISIALVPGYTIKHSLGLLKGKSDPLDSKRIREYGERFSDKLEYAEYAEENIAEIKQLYTLRNQLVKQRRALRTVDTGRGHLPMQSISVHNHIHAVFSSLDNEITAVEDEIEALIKANQDLNENYELAKSVFGIGPVIATDLLIKTGNFKTIDTHRKAASYAGVCPFPNTSGKMVGKSKTSPHADKKLKSLLYMGAKAVVKNNKEFRLYYQKKQLEGKPHYVIMNNVSNKLLRIVFSVVRNKTPYTSDHVCLDPREKNNNSSTKKVA

SEQ ID NO: 375602 - protein, 339 aa, unidentified
MKTYAGIDLHSSNNYIVVIDENDKRLFEKRLPNTLEAIAPALEQFKKTLTGVVVESTYNWYWLVDGLQDIGYNMHLANPAAIQQYSGLKHADDKWDSFWLAHIFRLGILPEGYIYPKEFRAVRDLLRRRLLYVKQRTTHILSLQSMITRNLGLRMSGNAIKKLKAEDAEELFTDSHLVFTAQQNIKTIEFLKNIIKDIEKKVLKVAKLAPEFIKLKTFPGIGKILGLIIMLEVGDIKRFSKVGDYSSYCRCVKSERISNGKKKGENNKKNGNKYLSWAYVEAANFAIRFSPEAQRFYQRKKAKRNGIVAIKALSNKIARASYYVMRDQVDYDAEYLFRK

SEQ ID NO: 375603 - protein, 360 aa, unidentified
MKLGQEVVARSVVGGVDTHKDLHVAAVVDEQDRVVGSQCFAATRHGYKQMLAWMRSFGQLRRIGVEATGTYGAGLLRYMQSAGVEVLEVTTPDKHDRRKRGKNDDLDAQNAAHAAFTGRRAVTPKSRDGMIESLRVLKACRKTAVAARRVALQMIQNTVVSAPDELRETLRKMTRMQLVRTLAAWRPDLSDYRNLVSAYRITLKSLGRRYLELHDEIADLDTMIIGIIDELAPALVARNSIGHGCAGQLLLTAGDNSERLRSEASFAALCGVSPVPASSGKIIRHRLNRGGDRAANSALHIIAIGRLRTDPRTQAYMAKRIAEGHSKLEVIRCLKRYIAREVFALISHRRREINQIRLSA

SEQ ID NO: 375604 - protein, 358 aa, unidentified
MNRKSGMSAGQVIGTVDGRQVVGLDIAKSVFQLHTVDMSSGEIVNQQLKRAKVLTYFSNRAPCVIGIEACGGAHHWARQLSAQGHSVRLIHAKAVRPFVGGNKTDAADARAIWLAIQQPGTKFVGMKTLEQQATLVLHRQRELLMKMKAMQSNALRGLLYEFGATFARGKNALFAEVEAALESLVGYIPQYVADSLREQVQRIKDLVKDIKAIETRLAQRLRDDEDMQRVAQIPGVGLLTATAAIATMGQASAFTSGREFCAWLGLVPRQSGTGGKVKLLEISKRGDTYLRTLLIHGARSVLTHAKEPGPWLEQLKARRPANVVIVAQAAKMARAIWAVTAKQEDYQRGYRSIKPQVA

SEQ ID NO: 375605 - protein, 400 aa, unidentified
MAELWAGIDAGKRTHHCVLIDGAGVVVLSTKVSNEEGDLLDLIASVLRIADGREVSWATDLTDGGAALLIALLEAHGQQLLYIPGRIVHHAAATYRGDGKTDAKDARIIADQARMRTDLLPVCAPDEVAVGLRLLTSHRLDVIHDRVRAINRLRATLMEYFPALERSFDFSKNKAALTLLSGYSTPQGLRSMGATRLTAWLKARGCRNSAGVALKAIEAAKAQDTVLPCQSVASILAVRLAETIRAIDDDVACIDARIHEQLSLHHDAENLISMPGFGPCLAATFLAQIGGSLREFDSADKLASFAGLAPVPRDSGRISGNLHRPRRFNRRLLRTCYLAALSSLKNSPSSRTFYDRKRAEGKSHKQALIALARRRMNVIWAMLRDHTPYIEPVPAVPIAG

SEQ ID NO: 375606 - protein, 353 aa, unidentified
MKGKTETTTASLAVVGVDIGKEVFHLVGLGTDGTIAFRRKIRRSNLKDVFEQLPPCVVGMEAWLSAHFVSRTLRTLGHEPRIIPAIYTKPFMKGQKNDYNDAEAAAEAALRPNLRVVQEKSQNQLDLQACHRVRSRLVSRRTATSNQIRAFLTEQGIAVRAGARALRKSLFAILENRKDEISPRMAKLIHGLYEDWCCLDEGIETVTREIEELSRVEPKCQRLMSVPGIGPLVSTALVAAIGTGETFDRGRDLGARLGLVPRQYSTGGRSILGRISKRGSRYLRMLLAQAARVLLMRPHTWSRFSFGAWLSTASERLHRHKLAIALANKLARIAWSVLRHDKAFDTHLEIAAI

SEQ ID NO: 375607 - protein, 344 aa, unidentified
MGEVNTIGLDIAKSVFQVHGVDADGAVVIRKRISRAKVLEFFAALPSCVVGIEACPSAHHWSRKLQALGHTVRLMPPSYVKAYLKRSKNDANDAAAICEAVTRPSMRFVPTKSEQQQSGLMLHRGRQLLVRQRTMLSNSIRGHLAELGIISAKDRNGTAELLEVIANADDNRIPAVARLSLDALARQYASTTAEIRAFEKHIHAWHRSCEESRRLEEIPGVGPIVATALVAEVGDWKAFSSGRNLAAWIGLVPKQHSTGGKERLGGISKQGNRYLRWLLVAGAMAVIRYARQHGTKRLWLTRIMERRPIKVAAVALANKIARMAWAMMVRGERFKEPTLLSAAA

SEQ ID NO: 375608 - protein, 346 aa, unidentified
MLIIGCDYHPSWQQICWLETTTGETGEQQLEHGSGEAERFYRQITGHALIGMESTGNCQWFVELLARLGHELWVGDAAKIRASDPRQQKHDRRDAELILKLLLEGRFPRIWIPSGEEKDLRQLLLHRYKLVRIRAQVKNELQHLAMNQGVTKKRKLWSKAGERVLRELPLRPWGSRRREDLFRIREMLDAQIAPLDQAVAEAAEKNARARLLMTQPGVGPITSVAFVLTMGDVSRFQRGKQVASYLGLIPREYSSGGKQRFGSISKQGNRFLRMLLVEAAQVAVRCDPQMRNEYLHRCHRKAKGVAKVAAARKLAIRLYWMLRTNKGYPEVVRVESSSRVPLVSAS

SEQ ID NO: 375609 - protein, 350 aa, unidentified
MTLYVALDVSLEKTAVCVMDAEGTPLVERAVPSDAVALAELLVTLPERPERIGLEAGPLSEWLVRGLANAGFAAVLMETRQVRAALSSMTVKTDRNDARGMAHLLRMGWFRPVHVKSMDAREQRVLLSARASLVRRLRDTENSVRGLLRGFGFRFPRALRVRWAQSVREALAGNPVLLAVIDPLLAAGAALRDQLAVLEKRVRDAARQDPVCHRLMTMPGVGAVVALTFRAAVDRPERFSSSKAIGPCFGLTPRRYQSGETDRTGTISRAGDAAVRVALFEAAHVLMTRVAKWSKLKAWAVAVAKRRGAKRAKVALARKIGVVLHRMWIDGTDFRFTDRNDKVDRTTVTV

SEQ ID NO: 375610 - protein, 331 aa, unidentified
MFPVDIDVSINTLDLCMLYDGIKGSIKTRNIQNNRHSVENILRWLRLQHCGPEDVHVVMEATGVYHERLATELHDAGFRISLANPHRSREFARGMGIMTKTDKVDAYMLACYAFLKKPHRWEPPAPEIRYLGALLRRRDVLLGDALREENRLEKYLSTDTPADIISSCRRMAQLLREEVSNIERQIKAHIKASPALRRDNTLLTSIKSVGPQLGMHMLVVLRSHNFVSAEQAAAFLGVVPIEKRSGTSVRSRPRMSKIGPPQLRAKLYMSALCGKIYNKRMRNIYDEMCLRGKPKMVAIGALMRKLVHWCYGVLKTGTVFNDECLKQVLST

SEQ ID NO: 375611 - protein, 342 aa, unidentified
MYYAGLDVSLNDTFVSIIDEDGKIVAEENVVTNVDALSAYLKKINVPFKRIGIESGQLSISLCKGLSKKELPIICVDARHMATALSSRINKNDRNDARGIAQMVRAGLYKEVHIKSDEICEIKLILGSRRQLVQTKIKLMGTIRGLLKIYGLKVGTQAKFCDKVRSLIQPLSSVVSSPIEALLSCLEKQEESFNELHQMLLDIGKKDEDCMHLMTIPGVGIITAMTYKVTIDHPERFKHSESVGAYLGLTPKQYASGDVNRHGSISKRGSSECRRLLYEAAQSLLVHVKASSKLKAWGLKLIKKKGRKKAIVAVARKLAILMHRMLMNKKDFCDKAYHTSNN

SEQ ID NO: 375612 - protein, 348 aa, unidentified
MLAAIDIHKSVFQAAVLDPKEGELAEQRFAASREKLREWINQWGAELETVAIEATTGWRWVARELQDRAIDVRLVDPGKASALQGRRAQAKTDRLDARWLVTLLVNDMLPEAWIPPEDIQRLRDRTRLRKALANDHTRWAQRLHAILVHEGSGSSRGQLLTSSGRQRLAEAELEPVARMQVDAMLSVMGTLAAQIELIDVELRVIAAADERCLALAGIFGIGPILATTILAEIGAASRFRRSRQVVRLAGLDPIVRDSAEKQRRGRLSKQGAPCLRWALVEAAQHACRKSSPDHELYVRTHGRAGANPATLTVARKLAKRAFHVLRGLEAAAEPQPSAARTPALAVAT

SEQ ID NO: 375613 - protein, 341 aa, unidentified
MEKVSTVGLDIAKHVFQIHGIDALGVAVLRRKLRRDDVAGFFKVLPPCLIGIEACATAHHWARVLMALGHEVRLMPASYVKPYVKRQKNDATDAEAICEAVTRPTMRFVPVKSQEQQSVLMLHRVRELLIRQRTMLVNALRGHLAEFGIVTRQGIAGVGTLIALVESEDSDLLPPLAQAALRPIVGQLREVHEKVSEMDRQIHTWHRSNELSRRLETIPGIGPITASAIAATVADATLFKSGRQLAAWIGLVPRQNSSGGKDRLGRISKQGDPYLRRLLVVGAHAVLRFSAKSKVASTRWATELLAKKPYNVVAVALANKMARTVWALMATGQRFEAPGIA

SEQ ID NO: 375614 - protein, 347 aa, unidentified
MDASYDGRQIVGIDLHRQRSVIVRMTEDGRKLETVRITNSPAALRREIAKAGAHPRVVAGATYGWYWAADVLEAAGAEVHLAHPLGVKAFTYRRVKNDELDARDLADLLRMGRLPEAWIAPPEIRELRELTRYRHKLVGLRTSCRDQVHAVLAKLGVPVTHSDIFGVHGQAWLDGLRLPQPYAGKVASLRQLNGELSGEIALLEQVIGDLLAGHEGYRAIQALPGIGPVLGAVIVAEIGDIRRFPGPGQLCSWAGLTPRHRESDTKVSRGHVTKQGSRMLRWAVCEAIQRQPAGTRPWQVKDAIIARRGIQARNTAKVAAARELLTLIFYAMRDGHIRRASRPEQAA

SEQ ID NO: 375615 - protein, 427 aa, unidentified
MATTPTVELRVSVDVGARQHHVAIGLSSGAVLEEFAIAHQPEGFAHFFARVETHQQHYPGPVAVAMEGYNGYARPLDRLVQARGYRLYNINNLKLARFKEIFPGAAKTDRLDARKGLELFQLREHLPLAKAVLQEVGVVPAANARLKRLTRRRRRLVNERVRVLNTLQADLQAVCPGLIDITREVGNQWFLHLLVSAATLPQLTRLRKATILNIPCVGRTYARVIQDWQPRAQWSPEVEWVGAMIQEDAQRVLALDAQITALATAMHHVAQESTIATTVASIPGFGPICTAELAGEIGTVTRFQQESSLALYLGMATLDNSSGTRHGSKPPKQVNVRAKAAMMTAVDRHRKSVPESQQYYEKKRQAGKSHNQAIRALGRHMCRIIYTMLKDERPYEIRAGEGDTTGQAASRSSLVGQLRRAKTLAPA

SEQ ID NO: 375616 - protein, 337 aa, unidentified
MKYSGIDLHSNNAVVAVIDDQDHVLYRKRLANDLQQIIAALAPHRDVLQGVVVESTFNWYWLVDGLIAAGFDVRLANTAAIKQYEGLKYVGDEHDAVFLAHVLRLGLLPEGYIYPPEERTLRDLARKRLQLVRQRTVNILSIESLLARHLNLRMNSEEVQRLDDNAARAFALPAHVQRALQASLAVIETLSREIHALELIIHREVRLRPEFAILKTTPGIGEILAATIMLETGTITRFPGPGQFSSYCRCVESRRVSNGRKKGEGDAKNGNRYLAWAFVEAAAAALRCCPQARRFYERKKAHRLPVVAMKALAHKLARAAWYMMRDRKPFDVGRCFV

SEQ ID NO: 375617 - protein, 346 aa, unidentified
MMIIGCDYHPSWQQICWVDTATGETGEKKLEHASGEAEKFYRGLPAPALIGMESTGNCQWFVEMATTAGHDVWVGDAARIRASDSRQQKHDRRDAALILKLLLEGRFPRIWTPSGEEKDLRQLLIHRYKLVRIRAQVKNELQHLAMNQGITKKRKLWSKAGEKVLRELPLKPWASRRREDLFRVREMLSAQIGLLDQAVVEAAEKNEKARLLMTQPGVGPITSMAFVLTMGDVNRFQRGKQVASYLGLIPREYSSGGHQRFGSISKQGNRFMRMLLVEAAQVAVRCDPGMRSEYLHRCHSKAKGVAKVAAARKLAIRLYWMLRTNTGYPGVVRVESSSRVALVGAS

SEQ ID NO: 375618 - protein, 343 aa, unidentified
MDHFAGLDVSVKETSICIVDDTGRIVREVKAASEPQALLKVLGNPTYRFKRIGLEAGPLSQWLFSGLAEAGLPVVCVETRHMQAVLKAQINKTDRNDARGIAQMMRAGLYRPVHVKTLRSQKLRMLLTHRKLLQSKAIAIENDLRGTLRNFGLKVGMVGKMRFEARIKELVESLPDLAELVEPLLIVRRTLRAQIVILHRRLLAIVRDDEVCQRLMTTPGVGPVVALTYRATVDVPARFRKSKAVGAVFGLTCARYQSGEIDWSGRISRCGDEMMRVMLYEAAQSMMRSKKWSWLKAWAMQIARRRGMKKAIVALARRLAVIMHRIWVDGTEFRWTREHAAAA

SEQ ID NO: 375619 - protein, 343 aa, unidentified
MEAYAGKQYVGIDLHRRRSVIVRTTESGEVLEAVRIVNDVQRLASVMARAGQCPEVVLEATYGWYWAVDALQAGGANVHLAHPLGVKAFQYRRVKNDFRDAQDLADLLRMGRLPEAWISPPAVRELRELVRHRAKLVRLRSGCKAEVHAVLAKCGVHVLMSDLFGVWGTELLDGLDLPAPYAARIASLRRVMDGLDFEIDLFAGLARGRMAHEPGYTAVQKIPGIGPTLAAVFVAEIGDISRFASASQLTCWAGLTPKHHESDTHVRRGRITKQGSRLVRWAAIESVKTVPKGSVVGLLRERVADHRGRNIGSVAAARRQLELVFYALRDGHVRALEQPPEAA

SEQ ID NO: 375620 - protein, 350 aa, unidentified
MTNPTRWVGIDLHRRRSQIAVIDQDGELTVSKRVPTARETITELLGDPAGTHVALEATYGWEWLAELLEDAGYDVHLAHPLRTRAIAAARVKTDAIDAKTLAHLLRTGMLPEAYIAPPELRDLRELLRHRVVLVRLRTSVKNRVHALLARQGILPEHSDLFGTAGRAYLAGLELPDGPRERLDSLLSLIDDLNREITTTTRTINARARVDQRVTVLTQIPGIGPYIAMLIIAEVGEIDRFPTARHLCAWAGLAPTVRSSDGKARLGHISHQGSHILRWALTEAAQRIPRSGGPLRAQYERIAKRRGNRIAKVAVARQILTLCYYGLRDGEIRCLDRAANDNLDEGMADAA

SEQ ID NO: 375621 - protein, 422 aa, unidentified
MNEQEVIGYSVYVGIDWADSKHDVCICPRDSQTREFDVIRHRAESIDAWVKDMHQRYGGRIAIAVELSKGPIVSALQKYDFIDIFPVNPASLAKYREAFQPSRAKDDPTDAELAVDMLLRHPEHFKVLKPQSVEMRALATMVEQRRRLVNDQGRITNRLRSALKQYYPQVLEWFEHIDTPLFCAFVKRWPTLTQARRARANTLKQFFHEHHMYREEVVERRRRAIKAASPLTLDKAVIMPYRMQVLVLVEQLELMFKAIGQFDDEIEKLASQHPDYVLFEPLPGAGPSLTPRLMVAFGEQRERFSSAGDVQKLSGIAPVTERSGQKHWVHWRLQCPTFMRQTFVEWAAQTINKSYWAGIYYRQQRDKGATYQAAIRSLAFKWIRILYRCWQTGVAYDESRYLKALERRGSPLVTRQKMTESA

SEQ ID NO: 375622 - protein, 453 aa, unidentified
MKKDRKKIAKLPVIETNAAGIDIGATQIYVAVPPDRDTEVVRCFGTFTADLEKLADWLEACQIRTAAMESTGVYWIPLFQILEKRKIEPVLVNAQHLSNVPGRKKTDVEDCQWIQHLHAVGLLRGSFRPNDEICRLRSLWRHRDNLIQLATVHLQHMQKALDQMNLQIHHVISDLSGLTGLAIMDAILAGERDPGKLAKLRDWRIRASEETIRKALVGDYREEHLFVLRQSLQSYRHFQRLIQEVDMEVKRLMQQLPMKVDPQEHPLGKEKNPRKTPWRNEPPALREDLYRAFGVDLTQVPGLNTLTVQMLLTEIGADFSRFPTSGDFCSWLRLCPDPRITGGKVVSSKTRPSKNRAAAALRMGAQGLHRSQSFLGSYFRRMKARLGTPKALTAAAHKLARIVYHMVTTRQEFDATVFESLEHSAQHRKQVRLRAQARELGFELVKVNADAAL

SEQ ID NO: 375623 - protein, 346 aa, unidentified
MEKNSVIAVDIAKSVFDLAGSDEPGRVTFRRRLSRGAFLTYLAQSPASTVVMEACGSAHYWAREIQELGHAVVLLPPHQVRPYVTRNKTDRTDAKGILEAYRNADIRPVPVKSIPQQVLCSLHRFRSGWIAARTAQVNTLRGLLRELGLVIPLGQEEKVVPGVRALIEDADSSIPDALRPTLAAACEEIEALSENIKLTERQLEALAEQTPAVERLRSIPGIGLMIATALVAFVGDIQRFPSGRHFASYLGLTPREYSSGLRRRLGRISKRGDAYIRMLLVHGARSVLCHAKKAEQHDRLRTWALALQKRAGHNKAAVALANKLARIAWAVWKHDTDYVSKLEQAA

SEQ ID NO: 375624 - protein, 419 aa, unidentified
MSFKILKNNCCGLDVHKTWIFACIGITDSHRRTEYKQARFSSFTKGLQELCDWLAKYNCTDVCMESTGKYWIPVFNVLEKNNIWVTLSHPKYTKPQKGNKTDRKDAKWICDLYMCGMVKPSFIPPADIRQLRDLVRYRFKLTCMITSEKNRAHNCLTISNFKLDEVFSDIFGKSSRSITEQILQHPGETFDVAQFVDGRCKTPIEEIQAAVDGAISTEQAVKLRQCLNHIDELEKHQAEIEREIFRLSDKYEEVLNLIRTVPGFDKNPMTAIQVLSEIGGDMSVFPTAKNLVSWAGCCPRNDQSNQKIKSTRISRAGSYFKPVLVQVANALIKSKKHSEFTNRYKRIKARRGHKKAIIAICRMILTAIWHILSDLKPYTPEGFLESRPVKEEKVLSTSQALNLLKQRGYIIKDKPLAVF

SEQ ID NO: 375625 - protein, 431 aa, unidentified
METVSDRETIFARCAFLDVHKKTVEATVRLLQGQQVQAETRRWGTMTGQIQALAEWLETQGVTHVGMESTGVFWKPIYNILETRFTVVLTNPGHMKQVPGRKSDVRDSQWGAYLLQYGLLRGSFIPARWQRELRDFTRYRAQLEAERTRVANRLHKHLEDANIKLGSVATDILGMSGRAMIKALMEGEQDAAQLADMAQGKLRTKLPELQLALEGKVTPHHRLMLRLLWKELEAVEELMAEVDRQVQEVTRPYTPQIEQMDPVPGVDRRVAEVVLAEVGPNVDPFPSDQHLSSWAGMCPGNEESAGKRRTGRTTKGNRWLRAALVQAAWAASHTKRSYLGAQYRRLAGRRGKKRALVAVGHSILVILYHLLKDGRPYSDLGRDFFDRMNHDRLIRYYSRRLAELGQKVTVEPLPEVTPGEGMVNVPSPCQS

SEQ ID NO: 375626 - protein, 397 aa, unidentified
MYIVGIDIAKRKHEAAVIDGEGTVIIKPFSFTNNCSGYNRLLAMLAKAKLPLDEVSFAMEATGHYWLALFTRLQKEGFRVQVINPVQTNSIRSFYIRQAKTDPRDALLIAEVIRFGHFSESTLHPENIYELRELCRGRHAIVSMQADVKRKVVALLDQVFPEYETAFTNMFSDTSMAILQTCPTPKELSEMPFEELCHLIEVSSRKRFRMAKAQELQALARGSFGFAMAGDVFSTMIRLYAKHLDFLKQQVREMDRKIAEIMETLDTPITTITGIGPTLGAYILSEIGDISRFSSAAKLAAYAGIDPTMRQSGEYNGVRNRMSKRGSPYLRHAIWLAASSAVLHDPALKLYFQKKRDEGKPYMASVGHACRKMVSIIYAVMRDNKAYTPYIPNEISA

SEQ ID NO: 375627 - protein, 458 aa, unidentified
MEIMHECCCGLDVHKQLVVGCVVNVTPSGERQKETRSFTTMTAGILALADWLTAAGCTQVARESTGVYWKPIWNLLAGRFEVLLVNAQHIKAAPGRKTDVRDAEWIADLLQHGLVRPSFVPPRPQRELRELTRSRTTLLAERARVINRLQKVLEDTNLKLSAVATTIVGLCARAMLAAVLEGETNPQALVSRGKLRAKRAQLEQALVGQVGAQQRFVLNSQWAHIDFVDEQVAQCDAQIERLIIEESAGDAPSSASPTSDGVTRHDDAHPSSTASTALEQVKGAPPLSLPLSFQQAVWLLDTLPGVNGRIAQIIVAEVGVEMQRFPSAGHRASWVGICPGNHQSAGKQVTGRTRKGDRWLRQALIEAAHGAMRTKDTYLRAQGQRLTRRRGKKRAVVAVAHSLLIMAYHLLQRREPYQDRGSNYFDERERGAIARQSVRRLERLGFQVTLHTAEADLA

SEQ ID NO: 375628 - protein, 349 aa, unidentified
MHYVRVSKQYYCGVDLHADVMYVCVMTKAGRTVFHHELPTDFPRLLQHLKPYLSSIAVCAESTFNWYWLADGCAKHNIPFFLGHALYMKLIHGGKTKNDRIDAKVMADLLRTGFFPPAYPYPEKMRATRDLLRRRSHFSQQHAETLRHIKTLLYQQGYTDLPTVHNFDAERISETFSGYKLPDDAAYSLQADLDMIRYLDTVTAKLEWRIEKNARGHDNHALALLKSVKGLGTILSLTLLYEIHTIKRFKSAQCFSSYARVVKVERSSHGKKLGSKNSKIGNPYLRWAFGQLAVSAQRFYPGVKEYTQKLIRKYGNAKAYTLLAHKFAVAVYYMLKNKTAFDVTRFVAA

SEQ ID NO: 375629 - protein, 331 aa, unidentified
MQITTVGLDLAKSVFQAHGVDETGATVLVKRLHRKQMLPFFSKLPPCLIGMEACGTAHHWARTLAAMGHEVRLIPPSYVKPYVKRGKSDALDAEAICEAVQRPTMRFVPVKTVAQQSILMTHRARSLLVRQRTMVANALRAHLAELGLVANPGIANLAKLAQQALSGESSLPSYARTTLDILIRQILVFADEIAALDQQLLAWHADSEASRRLSAIPGLGIVTATAVAATVTDPEQFRSGRQFAAWLGLTPQQCSTGGKTQLGGISKQGDRYLRRLLVVGATAVIRHTKDKATPLANWIRKLLEKKPFRLVSVALANKLARIAWVVLTRKE

SEQ ID NO: 375630 - protein, 364 aa, unidentified
MDVHLRSTTVCALDAETGEAVTRRFRGNPWGEVAEWMSGFPGPSLAAYESGYLGFAPQRELSGLGVDCVVAAVSKVPRSAADLSSKNDRNDAARMAKAILSHDISPVWVPSPEIEGLRDLAGAHDAATARLAAAKQRLLAFLARRGYAYGGTTPAGNPRRYWTYDFLRRLDKVRPADDGGIRALAALRNEVEAAAETRDDLLAEYRAAVAAGPLSAEVEALQSIKGCGFALAAAFASEVGDFSRFRSGRQVTSYFGLAPKQRSSADSVRLGGISGAGNALVRRLAVEGSWSYVQASHQPKLMPKGSGVPLEVRMHGRKGSERLLRRREEMLARGMPQAKANAATAAELVRWLWALGAMCREATE

SEQ ID NO: 375631 - protein, 408 aa, unidentified
MEVIYPRCAGLDVHKQTVVACARIAGPGPLVQEVRTFATATAGLLKLADWLESFGVEYVAMEATGVYWKPVWHVLEGHFELVLANASHVKNVPRRKTDVNDSMWLADLLAHGLIRASFVPPVAVQELRTLTRTRKQFVRERASHVQRIEKVLEDANIKITSVLSDILGKSGRAVLQALIDGQSDPQRLTSYVVGNRLKASRAELTEALSGRVRAHHRFMLKLHLDHIDALDKAIADIEKEVGLGLEPFRQAAKLLSTMPGLSQVSANVVVAEIGIDMSRFATAGHLLSWACLCPRNDESAGKRRSTRLRRGGIWLKTTLVQAAWAAVKVKGSYLQAQFHRIRARRGAKKAIVAVAASMLTAAWHMLRDGTEWQDLGAAHFDRADTTKTANRLIRRLQQIGYTVQVAPA

SEQ ID NO: 375632 - protein, 350 aa, unidentified
MLIIGCDYHPGFQQIAFLDTETGECGERRLTHREEAEQFYQDLKQRSAAVRVGMEASGHARWFERLLRDLQFELWIGDAAEIRAKRVRKQKTDRQDAQLLVRLMREDRFPRIWVPDAANRDLRQLLWHRHRLVQMRTRVVNQLHVVALNEGLRRKKALWRPAGRNQLESLKLAPWASRRRQDLLDLLDQLTPKIQDLTRQLEQEVERRPVTRRLMTHPGVGPLTALAYELVIGVPQRFHCGKQIASYIGLVPEENSSGDRRRMGHISKQGNVLLRFLLVEAAQVTVRSHPEWRSTFFHLAMRRGRKIAKVAMARKLAVHLYWMWRQGLDYGQRNKLGSHAGEPGHRHGVQ

SEQ ID NO: 375633 - protein, 338 aa, unidentified
MKLYGGIDLHSNNSVVALLAEDERLVYRKRLGNDAPSILEALAPYREAIVGLVVESTYNWYWLVDALMEAGYTVHLANTAALVQYSGLKYSDDDSDARWLAQLLRQGLLVEGYIYPKADRAVRDLLRRRSRLVQQHTANLLAIQNLFARDRGHSLNANEVKRLTPETVTRLLPDPNQALAVQCTLLAMRGQEAATDLLEREALAQVRPRPAYRHLLSVSGIGQVLGLTILLETGPIERFATAGHYASYCRCVGSERLSNGKRKGRGNTKNGNKYLAWAYLEAANFAVRYNAAINRYYQRKRAKSNGVIAIKTVAHKLARACYHILREGTDFDVAKAFA

SEQ ID NO: 375634 - protein, 344 aa, unidentified
MALADLRKLAPGESPACSWRTETIMAKQVEERTIGVDVAKCWLDIYVSEIGELERIENTEGAIEEWLRGLPGSARIAIEATNRYHELFIERAHAQGHCIYVIDAFRLSRYRDAVGHRAKTDRHDAELLARYLQQEHEHLRRWQPRDPRHARLWRLLKRRATLVQTNVRLRQSLADIGALDDAAKELIRHCQQLVRQVDRELLAPARRLGWQQDLQRSRGIPGLGPTTSLALVATFHRHNFRNADAFVAFIGLDVRVRDSGKFRGRRKLTKKGDPEIRRLLYNAAMSGCKDSHWQPYYQSLRDRGFSGTAALMALARKLVRVCYALLNNQLSFDPEKRKLPCNAT

SEQ ID NO: 375635 - protein, 369 aa, unidentified
MKKDSTLHVGLDVHKDSIVVGYASSDGGDPVHLGAIGTRQCDIDALVRKLQSKGARLVFVYEAGPCGYWLYRYLTGKGLACLVVAPSLIPRKPGDRVKTDKRDALTLARLARSGDLTPVYVPQVPDEAIRDLARAREDALGDLNDARFRLKALLLRHDVRYTGRANWGDEHRRWLARFVFPTPAQQIVFQEYVRTVTERTELLGRLEAALLEQAKTWRMYPVVEALQALRGVQFTVAIITVAELGDLTRFERPPELMKYLGLTPSEYTSANRRRLGGITKAGNGHARRALVEAAKAYRHRAKVSEQIQARQQHLPKAICDIAWRAQVRLCGRYRKMLARGKHPNTIAAAVARELIGFMWAIAKEQPLAA

SEQ ID NO: 375636 - protein, 361 aa, unidentified
MAQAKTWVAFDVHTSGVVAAVLQRESGELRVQRLPAGSEAVTAFALGLPGPVRATYEAGPTGFVLARRLEAAGIECLVCAPGLIPRGATDRVKTDRRDAERLVRLLVAGELHRVVVPSVEEEALRDLVRAREDLRGDLMRARHRLAKLLLRHEVRFDGPQANWTQAHLGWLAGVRLDQPASQRALEDYRGAVAALMSRREQLEAEIARALPLSPWAQTARRLMCLRGIDTLTAAGLCAEIGHFDRYRHPAQVMSYLGVTPSERSSGERRRQGPITKSGSQHARRLLVEAAWHYRRPPRVAGSLARRQRDGEPEVIAISWKAQRRLHHVWSRMEQRNKRRTIIAVAAARELAGFCWAVATTD

SEQ ID NO: 375637 - protein, 325 aa, unidentified
MTASHSTDNSFIGIDVGGSGLDVAWHRGDSAHYANRPDAIAALVERLKSTPVTRIVLEPTGGYEKALTKALRRARLPLEIVHTSRFKAYRQLLGVKAKSDTSDARLLAAYAAAPDEVRGCKADRVEVPEDEVREALSELASRRDQLKHMIHAETCRLGTVRLADIRKAIITHLEALKVADKEIYKRMLELVRQRADLKRDQRLLTTIKGIGPKSAFTLLASVPELGRIDNKAAAALIGVAPFVRESGTMVAPARIHGGRAAVRSILYMAAVTASRHNPVLRPFYERLIAKGKKTKVALIAVLRRLVVFANAVLKSGQPWKGAAAA

SEQ ID NO: 375638 - protein, 433 aa, unidentified
MQDVEDEPLFADRVAGLDIAKAGTEATIRVPSDTTAGRRQQETRTYGTTRAELESLGDWLRSWGVTKIGMEATGDYWKPVFFLLESRGFDCQLYNAAQVKALPGRPKTDRADSVWLARITERGSVRSSFVPPEPIRRLRTHTRYRRHLTQARTAEKQRVEKLLEDGHLKLSSVISDIHGVSGRDMLNALVAGQRDPKALAQLARGTMRGKIRRLEQALDCSFFTADHAAVLAMMLTTIDHYTAQIEALTARIEALTGPYLRQVEQLDAVHGIGPVCAQDIIAEIGTTMTAFPTAAHLVSWARWSPQVKQSAGRRTGSNATGRGNPYLSAALGEAAAGAGRTHSFLGARYRRMVRRMPKKKALVATGNSMLTIIHALLADPTARYTDLGAGYHEQRMHTRRQARNHLRNLERLGYIVTIHAINPDPSEFPAPAA

SEQ ID NO: 375639 - protein, 413 aa, unidentified
MSRQVKRNPRSVKRGPGPSSTLLTPDRAGNVVGVDPHKRTLTATVVDPRGGIVASEHFRVSGDGHRALEAWARQFGPIVRWGIEGASAWGRHTAVFLVRCGYDVRDVCPNRTGRQDRARQRGKSDLLDSERVARETLAHPLLPRAFKRAGDDAGPDEQAELLAVWWQARCSLVKRRQQLLSETEALLRDLPLELVERLPDVKPVRPRLAALARATRRRAFDQPTALRLRLLSEYRDQIANLDAEEKTITRELRALVEASGSTLEQLCGLSTISVAELLVEVGDPRRFTEGGFARFNASAPLVASTGEGPGEPVRHRYNPGGNRPVNAILHRMAVTQLRCDPRAKRIYATARTDGHHTKKEARRILKRHLSDVVYRRMIRDLAAHPAQPLLAAQPRAAAAQSRVARQGRAPRAA

SEQ ID NO: 375640 - protein, 335 aa, unidentified
MTESSDYESVQVFIGVDVGKDTHHAVAINRSGKRLFDKALPNDENKLRSLISDLKQHGQILLVVDQPATIGALPVAVARSEGVLVGYLPGLAMRRIADLHAGEAKTDARDAAIIAEAARTLPHALRTLKLADEQIAELSMLCGFDDDLAAQTTQASNRIRGLLTQIHPALERVLGSRLDHPAVLDLLQRYPSPEKLASLGEKKLAARLCKLAPRLGKRLAADIAQALAEQTVVVPGTNAAAVVLPRLALQLITLRKQRDEVALEVEQRVLAHPLYPVLTSMPGVGVRTAARLLTEVACRAFASAAHLAAYAGFAPVTRRSGSSIRGEHPSRRGTG

SEQ ID NO: 375641 - protein, 373 aa, unidentified
MNHIIYCGVDFHARQQTVCCLKTETGELVTQELKHDNKDELRKFYSQFNGPVIVGLEASGYSPWFEQLVEELGQEVWLGDATEIRRRARRRQKNDRRDAELILDLLIHDEFPRIHRPRPESREILRMLRYRHKLVKLRTIIKNSLQALAIQSGLSRQAKLFTRQGEKQLLASLMSPVMSRQRQQWLELLKDLNQRITETEWWLKQEALKDPRISLLRTHPGLGLLSSLGLLHTLIPVSRFPNQRKVAAYGGFDPMEHSSADRKRYLGISKAGSRLLRFLLIEATQTAVKADPDLKRFYRRLVQRRGKPKAKVAVARKLLIRGYIMLRDEINYAEFQQRAVAARLARDYARTNLPGHLIGQPASPANGSEERAD

SEQ ID NO: 375642 - protein, 334 aa, unidentified
MKKRYFMGIDVAKATFDFCLLSSTESCLWRGQFSNDAHGIARFLAQLPAPRRKPAQIHFALEATGVYGKALVAALHQAGLAVSVLNPAQVKYFAFSVLRRTKNDTVDAEIIARFCRERKPLATRPLRPIEEQLKVLVHERESRVGEQTRERNRAKKDPFQIALPTLISRQRQQRLKQLDKEIAQLDAAIDSLIASDESLSNQSQLLCSIPGIAAVTAAKLLSELAGKEFQSARQLAAYAGLTPAEFRSGYFLYGKTHLSKIGNAFLRKALYLPAAVARRWCKPLKPWIAILESRKLHHLAIRGAIMRKLLHIAFGVLKHQKPFNPLLVFIPKTL

SEQ ID NO: 375643 - protein, 344 aa, unidentified
MQHHVGLDVSVKETSVCIVDKAGKVIREVKVATKPAEILAVLTEEALAIERIGLEAGPLSQWLYGALAEAGLPVICVETRHMKAALSAQINKSDRNDARGIAQMMRVGLYRPVHVKTLASQKRRMLLTSRQLLQAKALDIENDLRGTLRNFGLKVGMVGTVEFEARIRELVADHPDLAAIVEPLLIARRVLREQLGVLHRQLLEIVRQDEVCRRLMTTPGVGPVVALTFRATVDVPSRFKNSKAVGAALGLTPRRQQSGEIDRMGGISKSGDAMTREMLFEAALVLMTHSRKWSWLKAWGMKIARHRGMKRAIVAVARRLAVIMHRMWVDGTEFRWSRKEAAAA

SEQ ID NO: 375644 - protein, 358 aa, unidentified
MTTAATYNEPGNTTEATLFVAFELSEKTWKLGFTTGHGQKPRERTVTARHQERVLDEIAQAKRRLGLAETAPVVGCYEAGREGFWLHRFLQAHGISNHVVDSSAIEVNRRRRRAKSDGLDVRKLLSMLMRYHHGERHVWQVVKVPAVEAEDQRHLHRDLETLKQERASTTTRIQGLLSSQGLRVTSLTKLPEQLEALRLWDGSPVPPGLRRRVLRVYAHHTFLSEQIAAVEAERRAQLQASTDARIDKVRQLMLLKGIGINGAWLLVMEFFGWRAFKNRREVGGLAGFTPTPYQSGERAREQGMTKSGNRHVRWMTTELAWSWLRFQPDSALSVWFRERFGSGGKRLRRIGIVAVARK

SEQ ID NO: 375645 - protein, 346 aa, unidentified
MNKLATHPPAPAGVDVSQETLDVAARDHRGTERTAQFANTATGHRQLIRWLTKGGQSARVVLEATGVYSLDVALALHAAPRLEVMVVNPRAARQFAQACLQRSSTDATMAVALREYAARMEFVPWGPPPESVRHLRAIARRIVTLTEERAREQSRAHAAAASAATPAVVGNDIAVNVRHLQRRLAELQRHALALIQTDPALRQAYHHLISVRGIAATSAIQLLGELLVLPGDMTVRQWVAHSGLDVRHVTSGTSVHKRPRISKQGNAHVRRALYMPALVAVRHEPHVRIFYEQLLAAGKKPLQALVAVMRKLLHAIYGMLKTNTDFDGSKFRRLPDTAAAAHGGLT

SEQ ID NO: 375646 - protein, 347 aa, unidentified
MDHYAGIDVSLEDSSVCVVDADGNIVREAKVLSEPAALVGWLKGLGLSLKLVGLEAGPLSQWLYAAMKKEGLAVELLETRRVRDAFKSMPVKTDRKDARGIAQLVRLSWFRSVHCKSAAAQEVRALLTARKLVQSKLFDIEMSLRGILRGFGLKVGKTNPNRFALRVEELVAGHPTLEIVGKALLAAHEVLLREFKGFERRMRQQARADERVRLLMSAPGVGVIIGLTFVAAIDDPARFKSSKQVGPHFGLTPKKYQSGQTDYTGRISKIGDASVRTALYEAANAILTKPLKGASHLKSWGMKLAKRAGMAKAKVALARKLGAILHRMWVDGTPFADKASAPKLAAA

SEQ ID NO: 375647 - protein, 370 aa, unidentified
MKKNSKEETRRKALQAESRKMKLTVGIDLGDEWSQCCCLGENGEVIEEFRVKTTREALRARLGDLKPMVIALEVGTHSRWVSELLQEFGHEAIVANARELRAITGSDRKSDRVDAEKLARYARVDRRILRPIRHRGKEAQADLLVIRGRAILVKTRTQLVNAVRGMVKSFGYRLPGCSAEHFGRLKEKIPAGLQEALNPLMEALEQVQQQIDSYNQQIEKLATEKYPESELLRQPWGVGAITSVSYLLTIEDKNRFEKSRDVGCYLGLRPRRSQSSQRDPELGITKAGDGFLRSLLVECAHRILSEKAPDSALKRFGERLQARGKKNAHKRAVVAVARKLAILLHKLWVTGEVYEPFPGGADPRRAQAAA

SEQ ID NO: 375648 - protein, 347 aa, unidentified
MRFYTRQHQYYCGIDLHARSIYVCILNQEGEVLVHRNLKAKPHAFLAVIAPYREDLVVAVECMFTWYWIADLCAQEGLTFVLGHALYMMAIHGGKAKNDRIDSYKIAHLLRGGNVPFSYVYPQPMRATRDLLRRRNFLMRKRAELLAHIQNTNAQYNLPEFEGNLRYPANREDLAERFADDSVKKSMETDLALIEVYDKHLKEVELYLARHARIDDPNSYHLLKTVPGVGQILGLVLLYEIHDIARFPRVPDFVSYCLLIRSSKESAGKKLGTGGKKIGNAHLKWAFSEATCLFLRKNGAAQKYLQKLEARHGKGKALGILSRKLATAVYYMLKRQEAFDMKKFFET

SEQ ID NO: 375649 - protein, 415 aa, unidentified
MALKIVYKICCGIDVHKTFVVACIASTNDKGVTSYESHRFSTYTSGLKTLLQWLLDRNCKDVCMESTGKYWIPVYNILEKDCSIVLAHPKYVKAIRGKKTDKKDAKWIADLFKHDLVAGSFMPPADIRQLRDLMRYRFKLTCFKSSEKNRLQNCLTVSNIQLGNVVSDTFGKSAQAILDKILEDPADTSFDLEPLVFKSLKKKLPELRDAIDGYITPEQAGKLKVIKAHYENLEARKAELEELILALATPYQQELAILQTAPGISSDFTAIGIISEIGTNMEAFPSAKHLCSWAGLTPTNNESAGKKKSVRVSKAGCYIKPLLVQCANAVVKSNKHPEIRNRYLRIKKRRGHKKAIIAIARMLLTALYHMLKNGENYNAELYRKSDQPPVDREITIEQAILIARNQGYKIKSATA

SEQ ID NO: 375650 - protein, 337 aa, unidentified
MNIIGCDFHSRFQQIAMLDTETGEIVERRLEHENGEARKFYGALSSPARIGIEATGYARWFERMLQEQKHELWVGDAAQIRAAMVRKQKTDSRDALHILELLLSNRFPKIYISKLEDRDVWQLLRHRCKLVRWQTSIRNQLHALAMGEGVCRKKKLWSRGGRKELDSLSLDAWASRRRSDLLELLDRLAPCIQELDQAVEEAAKDCPTAVLLQRQAGVGPVTSLAFALMVGPVERFGNSRRLVSYVGLNPREESSGGKQRMGAISKQGNSMVRWLLLQAAQTASRYDEDLRRDYRRLVSRRGRAVAKMAIARKLAVRLYWMLRQASEQLNAADSHAG

SEQ ID NO: 375651 - protein, 312 aa, unidentified
MNKIICGVDVSKDWLDAHIWPSEIFQRFGNDATGIAALAELCRAHGVTLVAMEASGGYERTAFLLLWEAGIACALANPRTVRHFAGVLGVLEKTDRIDAGLIAHYAAVMSVAPTPPPQAAQMRLSALVARLSQVTGDLIIQKQRRHAARNEESCASIEEVIALLLRQSRKLEGEIASLIDDDPLWACLDTAFRAVKGVASRTVARLMAELPEIGLVSNKAIAKLAGLAPIANDSGKRSGHRPVRGGRSGPRGILFLVAQIAARYDPHLSSFQQRLQATGKPKMVIRIALARKLLVILNAKARDARKEFINAT

SEQ ID NO: 375652 - protein, 344 aa, unidentified
MSKFNLISIDLAKNVFQVGKFFHQKLQSNKAVSRKELLTILTTSPRCKVVMESCGGAHYWARKARSAGHEVVILDPRFVKAFRVGQKTDANDVIAIAAASFSPNVRPCKSLTQAQQSLQSIERMRALAEKQKRQLANQIRGLLLEFGIVIKQSECAFRQAIPEILEDSDNGLTAGLRQCIAQCYELFKAQSTLKETLNELLTGLVKQDEQCERLLALEGVGPITAVGLLISLSDTTHFTSGRNAAANVGVTPRQHSSGGKVRIGHIAKYRGEITLRSHLFLGARAVISQLKHREPKTKKEQWLKALVERRGVKCAAIALANKTVRTAYAMLKKGTSYEPSLLAN

SEQ ID NO: 375653 - protein, 291 aa, unidentified
MRTESTPGARGPVFCGVDTHADSHWLYVLDWRGRKVLSRQFPADAAGYEALAGAIAAAGEPACVAMEGTSSYGAGLTRHLASLGMPVREALSPARTQRRRPGQGKCDEADAERAARAAMSGSKLGTPKSQDGWVDGVRCMLAARSGAVKARTSAINTARSLLTTAPEGLRSRFRGVAGPRLMEVLPSVRAEGALGAALGALADLWAAARDAALDMERAIEASLEENCPALLAMYGCGPVSAAKLAVAAGDNPGRLRSEASFAAICGACPIPASSGKTVRHRLNRGGDRQAC

SEQ ID NO: 375654 - protein, 370 aa, unidentified
MLDTTTFVGLDVHARSIKAVSLDVMTGEVRCATFGYDAGAVAEWVRSVDPKARCVYESGVTGFDLQKRLSGLGVDCVVGAVSKMIKPSADRRRKNDRNDAEFLARMLSVGNVVEVWVPDDECEAARDLTRALEDARDDLSRSKQRLSKFLLRHGLAFDERTPTGRRKGNWTRAHWSWIESIRFAEGADNDVLAYYVDAVRRAAEEKARLEGLVEAEARKPRWRRRVDSLRCLKGVDTASAADLVFEAGEFSRFRNARSFAAWVGLTPSEHSSGESDRRGAITKAGNKHLRKALVEAAWHYLTCSGRPKDLAKGQAPDRGARRHAAKGVRRLVERREALLARGVHGNKANVATARELACWVWAVGLMAEEA

SEQ ID NO: 375655 - protein, 418 aa, unidentified
MQTELSQYTAVIGIDWADKKHDVCVQDMATGKRCASQVRHRAEDLDEWARSLHRRFGGPIAVAVELSKGPIITVLQKYDFFVIFPVEPAGLASYRRTFTLSGAKDDPTDAEFALKLLLSHAEHFKPLQPQSVEMRTLMTLVEHRRQLMNDRVRITNRLRNTLKQYYPQALEWFDRIDTPLFCDFIRRWPSLAQARRARGATLETFFREHNMNRKPLLERRIKAIKSAMPLTTDDAVIVPHRLRALTLVAQLEVTLECVKQYDAEIASLAPQHPDYALFAPLPGAGPVFTPRLMVAFGEQRERFNNAAEVQKYGGVAPVTQRSGQSTWIHWRWQCPTFLRQTFVEWAAQTVNKSYWAGLYYQQQRTKGCSHQAAVRALAFKWIRILYRCWKTKTPYEETRYLRALQERGSPLLKTAEAA

SEQ ID NO: 375656 - protein, 320 aa, unidentified
METEKVYVGIDVSKDTLDVAVHASEQRWRFANTDRGITEALSCLEELCPTLVVLEATGGMEYPLAAALAVAGRPVVVVNPRQVRDFARATGRLAKTDAIDARVLAHFAAAMHPPTRPLLDTQGQELKAILARRRQLIEMLTAERNRLHSARSKAVKANIQAHIAWLEKEMTHIDHDLGQSIRQSPVWQEKDDLLKSVPGVGPVLSTTILADLPELGLLDRRQIAALVGVAPFNRDSGHIRGQRAVWGGRAVVRSALYMATLVATRYNPIIRDFYRHLLSAGKPKKLALTACMRKLLTILNAMLKHKTPWHHPISGTLQTP

SEQ ID NO: 375657 - protein, 412 aa, unidentified
MEVMFERVAGLDVGKAAVTVCVRTPSTRAGRRRSETRTFPTMSRSLGVMRDWLVAEGVRIAAIESTSTYWKAPLYCLEEVMDVWLLNAQHMKAVPGRKTDVRDAEWIAQLLEHGLLRPSFVPPPPIRRLRLLTRYRDQLLADRTREMIRLELMLEDASIKLSAVVSSLKTVSARAMLAAMIDGEDDSRVLADLAKSKLRRKIPQLTEALIGHFDDNHARLARSILHRLDLVEAALTELDEVIEQACAPWAHQIELLCTIPGVGVKVAQVFIAETGGDMSRFPTAAHLAAWAGLAPAIYESAGKRTPAGARHGNKWLNHMLVESAGSVGRMHGKNYLAVQHARLTKRRGMGRAQVAVAHSILVAAYWMLKRDEPYHDLGPDWHVRRDTEAHTRRLVAQLERLGHTVALDTPAA

SEQ ID NO: 375658 - protein, 438 aa, unidentified
MSNKVIFNLDELFISVGIDVGADFSWMSIALPNQQFVGKPYKILHNSIDSLTTAVSKIKEAEELYSLESRIFLESTGIYHYPLFCYLRDKGFNCSVINPIITKNSTNINIRKVHNDRFDSKKAALVGLKPDLKVSLMPSDLALNCRNLCREYYDLIDNRSAYVNKLQGELRMAFPQYLGIFSKVTINTSLTLLETYTSPSAFLKADKQEIIDIIKSTARFGLTYAQNKYNAIIQAATDANQFGYIIDSNIKRIRLYISFIRKYDEEINSILESLHELVDANEDSDFVKQIHLIETFKGAGFLSAVSIMGEIGDFSAFSKPKQLFAYFGLDPSVKQSGKFEGTKVQMSKRGSAIARRVIHTLTLQSISISRNGEAKNPVLREYYLKKCDSKPKLVAMGAVSHKVCNMIFAILRDNKPFKIIAPQEHIKQYNSAKCDIAA

SEQ ID NO: 375659 - protein, 443 aa, unidentified
MMGPEEIETEEQEERLQRVAAIDVAKASGMVCARVPHATTTGRRMTKVWEVSSTTGAVMELAEELAGLAIERVVVESTSDYWRPFVYLLQARGLVVWLVNAHDVKQVPGRPKTDKLDAVWLAKLNERGMLRASFVPPAEVRQLRDYTRLRADLVEDRTRYKQRIEKLLEDSLIKLSTVATDLFGKSGRAMLDALIAGERDPEVLAGLALGKMRSKRPALKEALRGRFDEHHAELIAMLLDEVDATTAKIDRLTARIEQLLTAIPAAAPPPSTPGGDDGTSPVNVVDRLDEIPGVGMMTAQAIIAEVGLDMNQFPTAGHLVSWARLAPRTIQSGPRSRSGKTGKGNPYLKRALGEAAASAARTDTFLGERYRRLVKRRGKLKALVAVARSILVIAWHLLADPTTRFHDLGAGFYLHAVTTERKTRNLVHQLEVLGHRVTLTPAA

SEQ ID NO: 375660 - protein, 363 aa, unidentified
MSNSNAEFVVGMDLSDKKISVCVLDAAGEVVRRQTVPNDQDGVTGALASFAERERVTVVLETGSHSRWVSQLAQALGFRVLVGDARKLRAIWAADNKQDVRDAEMLARLARFDAKLLSPITPRGEAAHLDLAVVKARDLVVEIRTKLVNFVRGTLKCVGVALPSCSTEAFVKVVQEKNTEALLWPALTPVLTVIATLTAQIREYDRELERLAAEKYPQTERLRQVTGVGPVTSLAYVLTLDRPERFVKSRDVGPYLGLVPRRDQSGEADKPLGITKAGNSLLRRLLVNAAAYILGPFGPDCDLRRHGERVASRGGKVAKRKARVAVARKLAVLLHHLWQTGEEYVPLRHAPRNVTPETTPHND

SEQ ID NO: 375661 - protein, 454 aa, unidentified
MDILQRICAGLDVHKDTVVACVRWLDDRDRVHTEVRTFGTTTPDLLQLLDWLLARQVPIVAMESTGVYWKPLFNLLEGRMKVLLVNPEHIKKVPGRKTDVKDCAWIAQLLQHGLLKASFVPERPIRDLRDLTRQRTQLTGEKASVANRIQKVLEDANIKLGSVASDVLGLSGRDMLRALIAGQTDGAALANLARGRLRDKLPQLRKALTGCVTDHHRFLLRLHLDHLTHLESLLGQLDQRIGQEMAKDCPPEPPSGEGPAATVAVGPRGVPELAAADQPAQPSSGGTRVPLWSALWLLTTIPGISRRTAEVVLAEIGSDMGRFATSGQLASWSGLCPGNHESAGQRRSGRTVHGDRWLRSALVQAAWAASRARKTYLAAQYRRLARRRGRKKALLAVAHTLLVMCYQLLKKGQPYQELGPDYFDQLEPERRTRQLVRQLESLGHKVTLEPQAVA

SEQ ID NO: 375662 - protein, 402 aa, unidentified
MNAVGIDVSKGKSMVAIMRPFGEIVSAPFEIKHTASDIHSLVELINSVEGESRIVMEHTGRYYEVLAHQLSKANLFVSAINPKLIKDFDNDSLRKVKSDKADAVKIARYALDKWQNLKQYNVMDELRNQLKTMNRQFGFYMKHKTAMKNNLIGILDQTYPGVNTYFDSPARSDGSQKWVDFASTYWHVDCVRKMSLNAFIDHYQNWCKRKKYNFSQSKAEEIYGKAKELVPVLPKDAITKLIIKQAVDQLNSASTTVESLRTLMNETASKLPEYPVIMAMKGVGTSLGPQLMAEIGDVSRFTHKSAITAFAGVDPGVNESGTYEQKSVPTSKRGSADLRKTLFQVMDVLIKTHPQDDPVYQFLDKKRAQGKPYYVYMTAGANKFLRIYYGRVKEYLSSLPES

SEQ ID NO: 375663 - protein, 428 aa, unidentified
MEEITEEPVQVVARVCAIDIGKAALVACVRVPHASRSDRRVQEVREYATVTPALLALADWLRVERVELVAMEATSDYWKPVFYLLEAEGFACWLLNARHVKNVPGRPKTDRLDAVWLAKVVERGMCRPSLVHPRPIRQLRDVTRYRRSLVREQTREKQRLEKTLEDAQIKLDSVISDLHGVSGRQMLQAMIDGQRDPMILAELAHGSMRRKIPQLREALTGHFGDHHAFICATMLRRIDTLAADIADLDARIEQMIAPFARAVQQLDEITGVGVRSAQEFIAELGVDMTVFPTPAHLVSWAKFSPIDARSAGRKKGNSTGKGNPWLAGALGEIVAGLARTNTFLGERYRRLARRRGKKRAIVAVGNSVLTIVWHLLSDPNIRYQDLGPGYYETRINKQRRQRDLIRQLEHLTGQKVNLQPQPELPAAA

SEQ ID NO: 375664 - protein, 336 aa, unidentified
MTITTIGLDLAKYVFQVHGIDVEGNVIEKRRLRRSHVIAYFASIPRCLVGMEACATAHFWGRELARLGHEVRLMPPQYVKAYLKRGKNDAADAAAICEAVGRPSMRFVSIKTETQQAVLVMHRARDLFVRQRTQLINAFRGHAAEFGIIGAQGRWNVARLLVTIREDGAVPEPARTIIEMLASQLDAINARIDEIDAQIIAWHKANPVSQRLAAIPGIGPLIATAIAATVADPAAFRSAREFAAWVGLTPRQKSTGGKQRLGRISRQGDQYIRRLLIIGAQTTLLRSKAARANPWIQSLLARCPRLKVAVALANKTARIAWALMAKGENYRPMASA

SEQ ID NO: 375665 - protein, 454 aa, unidentified
MAHRKKKIPAQLVEDEEYQLRHERVAGIDVAKAKADVCTRLPPVRAGGRRVSKIEEVAATVPAVAALAGRLLAEGVELVCMESTSDYWRIWFYVLEAAGVRVQLVNSAQAKQLAGRPKTDRLDAQWLARLTEMGLLRPSFVPPAEIRALRDYARTRLGLVRDRTREYQRLEKLLEGALVKLSAQVSLTTDSAKAMISAMIGGQRDPRVLADLAIGRMRAKKDQLVQALDGMMFGDHHGELARLHLDHITFLDRKITALDDAIEACLDQIPASWGIDAGGARAPDPGPGAAALPAVARLAEIPGVSPDLARAIIAETGLDMTRFPDAAHLVSWAGLAPVARQSGPRNRKAKKGQGNSYLRGLCTQAANGTARTDTFLGERLRRIARGRGGARARVAVGRSILIIIWHLLADPEARFADLGADWHARKTDKDKKTRNLIRQLNALGLDVTVTPRAA

SEQ ID NO: 375666 - protein, 339 aa, unidentified
MMELKRISIDTSKAVFTLHGVDAQERPVLRRTLRRAQLEAWFAKQASTEVVLEACGGSHHWGRVLGAMGHHVRLIPPQYVKPFVKRGKNDRNDAEAISEAASRPSMRYVPVKTAEQQARAMVLSVRELLVKQQTQLVNALRGHAAEFGVIAAKGIDKLATLVALIAADAAVPAEVQEAIGVLAGQIEQIAEQLRALDRKLLTLHKATPMSRLLREIPGVGPIGALSLVLTVDPGQFKSGRHFAAWLGLVPKERSTGGKQRLGSISREGNERLRQLLVLGATAVVRYAKPGSKSASKWLLELLERRPRKVAAVALANKMARIAWAMMTSGEGYRRQPIAA

SEQ ID NO: 375667 - protein, 351 aa, unidentified
MTTMTSADRFVTGGVDTHRDFHVAAALDQLGGVLGTAQFPTTPAGYRSLLAWLSGFGQVVEVGVEGTGSYGAGLARHLAEADIAVIEVGRPNRQVRRRHGKTDVVDAIAAARVVQSGDATAVPKSHDGPVEALRALKMVQRSGRKARTQAINQLHALVLTAPEELRGKLRGLKTRQLITTCAAFRVRTDDETLAAVLRLSMRELAQRVLLLDDQNRTVTTRMRRITTDLAPVLVATHGIGPDTAATLLITAGDNPERLGHEKSFAALTGTSPIPVNSGQIQDRVRLNRGGDREANSALWRIAIVRLATDPDTRDYLQHRQKEGKTKSEAIRCLKRYIAREVYNALPNQAPA

SEQ ID NO: 375668 - protein, 388 aa, unidentified
MYYVGIDIAKYKHDCYICTSEGVTVLESFSFDNSNTGFKELQSALDHLDHSQQIKIGLEATGIYGKNLKLFLSSIGYDFHEFNPLLVKRFHDSLSNRKTKTDKIDARIIALYLSTGASRTYLYSSYHIEALKQLSRARNKLIRSRSDQYVIITNILDVEFPEFKAFFHNKLSDTALFLLNKYKTVDRMKRLTHQDCVLLHNKSRRIPTSSFEELRDLAKHTIGHHFNYNDLILSSALQIVNTLERQIESIEKEILAIMEELRSPIDTIPGISTLSAATILGEFGDFSKFSNPKQLCAFCGVEPAIYQSGTSFHNGRMVKHGSSELRYVLFNAVPYLVIHNITFREFFYKKLHEGKNYRVAQSHVVKKLLRMIYHLELTGESFDPTLLY

SEQ ID NO: 375669 - protein, 423 aa, unidentified
MSTDNRFAAIVGLDWADKKHDVCVQSVPDGAREFAVIEQRREALDEWASALRVRFGNRPVAVCVELRKGPVIDALSKYEHLVLFMVSPGLVAKIRRALRPSGAKDDPSDAALILDILEKHPEQVRRIDPDDPRTRQLTVLVEARRDLVDQRVRLTNALTSNLKGYFPQALHCFDELGSTLACDFLRNWPSLGEAKRARETTLRTFFHRHGVRGEARIDERIGLLQRALALTSDAGVLLPALMATKILVEQLRVVLAGIARFERAIEKAFKAHPDAAILASLPGAGPTFAPRLLAVFGSNRERWPDAASLQQYLGVAPVTERSGNRRWVHWRWACPKFLRQSVVEWAGMSVRYSVWAAAYYQDQRNRGKSHHIAVRALAFKWLRILHRCWMDRKPYDEATYLKALQKSGSPLLALIAAPTAPAR

SEQ ID NO: 375670 - protein, 295 aa, unidentified
MKKHTTIAMDIAKSVYEVAVSEEPGRVKERRRLSRSQMLRFFANREPARVVIEACGSAHALARTLEGYGHEMVLLPPGQVRRYVLRDKTDRTDTKGLLEADRNEEIVPVPVKTVGQQVLVSVHRMRSGWMATRTARLNAIRGLLRELGSRCRWVLRRFCRPWPKRRLPASCRSTRRATAGDGGGDPGSQSSDGGGGTDIEEDGRGPGSGQEAQTVPGIGLLTATALIGSVGEPSRFPSGRHMSSFLGLVPRENSSGDRRRLGSITKRETTMFGCSSPTVPVRFSTPHPGGSRTTG

SEQ ID NO: 375671 - protein, 428 aa, unidentified
MLQAEQTTTGRRTWMLFIGDDWAEDHHDVELVNDSGRKLAAARLPEGIEGITKLHELIAAHHLRASDPSNLAPASEVVIGIETDRGPWVAALMAAGYLVYAINPMSAARYRERHSTSRAKSDAGDAHLLAEIVRLDRDHHRPIAGDTAAVDAIKLLARAHQNAVRERARQTLRLRSTLLDFFPAAVQAFPDLTARDALALLERAPDPALAARLTTTRIVAEFKLAQRKNKEAKAVELQELFRAQALRQPTTLQGAYAQLVVSLVRLIRAVNEQIAHLAAAMDAAFSAHSASDIYLSQPGLGPVLGARTLGEFGDDPNRFVNAQARKNYSGQSPITRASGKKTVIMARRSGNRRLNDALHAQAFSALTSSPGARGYYDRLKARNIGHHAALRQLANKLVGILHACLKTGSPYDEDLAWQVHSAPGQLAT

SEQ ID NO: 375672 - protein, 342 aa, unidentified
MESAVTMGLDLGKSVFQVHGVDAGGAVVVQRRLTRGKLLHFFGKQAPCLVGMEACAAAHHWGRELRKLGHRVRLIPPRYVKPYVKRQKNDAADAEAICEAVTRPNMRFVEIKTCEQQGTLVLHRVRLMLMRQRVQLSNAIRGHMAEYGLVAPVGRNGLQRLIAILGNPDDERVPAVARASLAQLVCQFGLLNDQVLENDRRVRASARATELGCRLMEVPGVGPVLASAMVATVPDPAAFKSGRNLAAWIGLVPRQNSSGGKEKLGGITKQGDRYLRQLLVAGALAVIQYAQRHGTKRPWLVHLLARRTPKIAAVALANKMARMIWAMMMTGERYREPTVAAA

SEQ ID NO: 375673 - protein, 375 aa, unidentified
MRFYTKQHKAYCGIDLHARTMYVCILNHGGEILVHRNMKANPESFLQVIAPYRDDLVVAVECMFTWCWLADLCAREGLAFVLGHALYMKAIHGGKAQHDKIDAHKIAVLLRGGMLPQAYVYPAAMRATRDLLRRRMHLMRKRAELLAHIQNTNSQYNLPEIGKKLAYKANRNGVAERFVDPAVQKSIEVDLALIDHYDCLLRDMELSILKTAKQHDANTLYLLRTVPGIGEILSLVLLYEIHDIQRFPRVQDFVSYCRLVKCAKESAGKRYGTSGTKMGNAYLKWAFSEAAVLFLRANPAGQKYLARLEGKGEQRVSLPPNWPLVGVALDHALEWPDRATASTNAQEHVGAYPRSLCFDWTPAAAPGHAAIVQHG

SEQ ID NO: 375674 - protein, 316 aa, unidentified
MTIIGIDISKGWFDCFCTTRTIGKQFPNNPVGWEKFLTWTNGSAHIVMEASGPYYLGLATWLYEQKVTVSVVNPLVIRRYSQMKLSRTKTDAKDAGLIACYGVEQQPKSWKPPSKVRQALKQLMSLRDGFLRQQAVLNGQQEAFGQHSVEPLVEELIAEQREQIALQLVRIERRMEALATEHYDQQLQVLLRVPGIGNKTAIHLLTITDGFRRFDSPRKLASYVGICPRIWESGSSVKGRGSISKIGCPQMRKLLYMCSWTAKTCNPGCRQMYERLKARGKPEKVIKVAIAHKLLRQAFAVGKKCEPFKAKKAMAA

SEQ ID NO: 375675 - protein, 345 aa, unidentified
MHVGLDLSRKQVEVCLISDHGELIDRLEAIPDRDGLHGLACRVAVYGEPVRAVVESMNGARFVHDELVAHGWEVLVADAQKVKGLAPLACKTDKIDSRVLAELSFRDLVPAIWLPTLELRREREISRWRLHLVKHRSTLKNRVHSTLITFGHQRHMSDLFGVAGRRLLTELDIPEPWRSHVDASLVLIDDLEARIAAIAKDLRRSGADHRYVPILMTAPGFGWITSYTVACELGDISRFSTPMKLVGYTGLCPRVKQSGQMDQRGPLSKHGPKYLRWGVMEAAIAASTHPLYRERYQRTKRRLGKQRGPKVAQIDLARQLTEAIWYMLTRDQPFAPAGAIIRLAA

SEQ ID NO: 375676 - protein, 408 aa, unidentified
MQVLYTRCAGLDVHKDTIVACVRCVSPPMHQEVRSFGTTTTQLLELADWLGEHGCTHVAMEATGVYWKPVWHVLEDEFELVLANAAHIRNVPGRKTDVNDAMWIADLLAHGLIRSSFVPPHAIQQLRDLTRTRKQLVREVSQHSLRIQKVLEDANLKLGSVLSDVLGKSGRAMLDAIVAGETDPARLAALAQGTARNKTAELREALRGRITEHHRTMLRLHLQVIDALHRTLGELDTAVGKALAPIQQRTRLLTSMPGVSDLTASVMVAEIGVDMSRFPNAGHLISWAGLCPRSDESAGKRRSTRVRKSGTWIKTTLITAAWAAVRVKTSYLRAQFLRIKARRGAKKAILAVAASMLTAAFHMLRDGTEYNDLGSEHLDRQDRSKTIRRLLKRLQDLGCEVPQMAHET

SEQ ID NO: 375677 - protein, 354 aa, unidentified
MLIIGCDYHPGFQQIAYVDTETGELQERRLGHRQEGEQFYRALKEQGVRVRVGMEASGQARWFERLPAELQLELWIGDAAKIRTKRVRKQKTDRQDAQLLLGLMLENGFPRIWVASWENRDLRQLLWHRHRMVQMRTRLMNQLQAVALNEGIRRKKGLWREAGRKQLESVVLAPWARQRRHDLLELLDRLSPRIAELSERVEEEAGKCPVAQRLMTHPGVGPLTALAFVLILGQAERFRCGNQVASYLGLVPEEDSSGEHRRLGHISKQGNTLLRFLLVEAAQVTVRSDPEWRGKYFHLALRRGRKIAKVAMARRLAVRLYWMWRKGWDYEQWKKFGPHAGQPGTGVGVQSNTE

SEQ ID NO: 375678 - protein, 416 aa, unidentified
MSSRTQSRPRIKADILVVGIDVAKRTHVAAIRKPDGTKEKPFPFGNDRSGFERLRARSERTRERLGLNGVVFALEATGHYGHALRQYLGLQGYAVLGINPAHTKKAKELEDNSPEKSDQKDARLISDLAAEGRGRLVRPVKGVFAELRRLGKLRERYVVERVRLSNRYSCLVDLVFPELVQEVRKLTIRSIRRLLAEYPTAREIAGLEFEELEDRLGRWSRRRLRPDKIARIHRLARESIGIVEGLETARMEMRQLLESLELVEQRLQEVEAAQHAALEKVPYAELLLTVPQLGSVTVATILGETGDLRNYKNAEMVIKMAGYNLYTISSGMFRGKTRITKRGRPMLRRYLFLAACRLSKKGAPLREFHERLTARKAKPQVLVGSCRKLLRLLVAMVRDGKPYEPGRLAVPLGEAA

SEQ ID NO: 375679 - protein, 420 aa, unidentified
MTRKNHNKIISVVHPICCGIAVHKKMVSASIIITEPDGEQTFVVKEFSTFTDDLFRLKSWLSSHACPVVAMESTSVYWRPVHNVLEDAFKVILVNAKHVKNVPGRKTDISDSMWLASLLRIGVLKASFIPEKRIRQIRELVTLRKSYIRSLADYKRRVHKLFETANIKIGSVVSDLFGQTGRNLIDILSDIETELKMEHVEQCAQGSLKRKVAELFRAIQGFFEAHHRFQLKMMMRTIGHLENEIESITQRLDRLLAPNQALIDKLDQVHGIDKKTAQSIVGHVGDTLTAFRSEKALASWAGLCPGNNESAGKRKSGKSPVRKHPFKELMIEVAWAAVRTKGSYYKDKYHRLKSRRGAKRAAVAIAHRITKAIYHIIKHGRSFVDLGEKYLLSKSKEKSVKILKMKAKHLGFNLVPVEAN

SEQ ID NO: 375680 - protein, 344 aa, unidentified
MKYFSGLDVSLDETAICVVDEDGIVVTEGKAASEPDVLVRWLVATGLTITRVGLEAGPLSPWLHTELRAAGLPAICIETRRMKGATAAMAVKTDRNDARAIAHAMRVGWFTVVHVKTAESQELRLLLNNRRTLLEKRVAIDNEIRGTLKAFGLKLGPVTVASFEARVLELLASRSRLLGMVKPMLSARTALRQQCDVLHRMVLKTVRANAVCRRLLSVPGVGPIVALTYATGVDDPARFAHARDLGPHFGLTPRKYASGEIDRNGCITKAGDGAVREALVQAALTLLTRVQRWSVLKAWGMAIAKRRGLRRAIVAVARKLAIVMHRIWVDGTTFTWSRETAASA

SEQ ID NO: 375681 - protein, 449 aa, unidentified
MAKTKRRLKGMPVIHHGAAGIDIGSRFHVAAVPPDVSEPSVRTFQAFTSDIHAMADWLIQSGVTTVAMESTGVYWVPVYEILEDRGLEVILANARDARGVPGRKTDVNDAQWLQKLHACGLLKASFHPDRQISALRSYLRQRERHLDYCAAHIQHIQKALTFMNLQIHHVISDITGVTGMKIIRAIVKGQRNPQQLATLRDGRCKATEETICAALAGNYQPEHLFALEQAVLLYDFYQLRVHDCDEQIAIALDVLNQSTSVPEAPLPKPRHKTRQPNALNFDVRVPLFQLAGTDLTQIHGIGPYLALRLISECGTDLSRWPSAKHFTSWLTLSPGSKVSGGKVLSSHSRKTNNRITAHLRLAATTVGRTNTALGAFYRRLSARIGKAKAVTATARKIAVLFYNAMRYGMNYQDPGSDHYEQQYRKRVVKGLHRRAAEFGFTLHEIECVS

SEQ ID NO: 375682 - protein, 409 aa, unidentified
MRLYVGIDVSSLDMKVCIMNQEGDTLASLTVKNNLEGARYLRDQILALADKHHSQHIQIGLESTSVYSWHPAMFLTDDEQLRKRQAKVFTINPKLIRKFKEAYVDLDKTDQIDAFIIADRLRFGRLPLTVIMQEQYVALQRLIRMRYHLIHNLTREKQYFLQHLFFKCSAFTSEVESTVFGNALTELLLEKFSVEEISAMELETLANYLKEKGKNRFPHPEKTAKCIQKAMRSSYRLSKCVEDTIDLLLGTSIESIRSIKAQIKQLDKAIEKVLQGIPNTLQTIPGIGPVYCAGILAEIGDIQRFKDQASLAKYAGLTWRKHQSGTFTADESKMIRSGNRYLRYYLVEAANSVKRYEPEFRDYYQKKYREVPKHQHKRALVLTARKLVRLIDALLRNDQIYTPGRKVNR

SEQ ID NO: 375683 - protein, 422 aa, unidentified
MLEETNDTEEIIKRVAALDIGKAELVCCIRVPGAGKRGKRLQEVRTYQTMTRSLLVLADRLGELGVTRVVMEATSDYWRAPFYLLEAQGFEVWLVNARDVKHLPGRPKTDRLDAVWLCKVAERQMLRPSFVPPPEIRRLRDLTRYRADLVGVRTAEKQRVEKLLEDAQIKLSVVASDIFGVSGRAMLAALLAGERDPKVLAQLARTRLRAKLGQLEEAFTGHFTDHHGFLLATMLDRVDAVSADIATLEAKIDQEIAPFAAAADRLDEITGVGRGAAQVIIAEIGTDMGRFPTPGHLASWAKFAPGVKESAGKTKGKATTGHGNPYLARVLGEAAVAAGKTNTFLGERYRRIARRRGTKKAIVAVGRSILVIVWHLLADPTARFHDLGAGFYDTRINPERSKRNHVRQLEALGYKVILEPAA

SEQ ID NO: 375684 - protein, 442 aa, unidentified
MQQVIIEVDPHKLSATIEVVDDHERRLGEGRFTTDRAGYAAMRTYVKAWPQRVWAVEGANGTGRPVAQRLLESGEDVLDVPAKLAARVRLFDTGHNRKTDAHDAHSIAMVAVRTQGLRVLHVDGELQALRMLVDRREALSRRRVQTVDRLQALLAELLPGQAKKDITTGQAKTMLATVRPRDLAGKTRRRIAAEELAELVAVEAKQKKATAELKAMVTAGGSHLMDLYGVGPVVAARVLADVGDVARFADRNRFASWNGTAPLDASSGENNRHRLSRAGNRRVNHMIHIAAVTQLRLPTDGRVYYRHKRAEGKKPMEAMRCLKRRISDAIYRQLVADAMATTPRVNAGPGGHCGASLVSSAAGFNPHTGTSDQPLPGPAIPTLPANTVLANPPAGAGSPAQAPTCRSRQGGAPHRTNDLDGDKRRRTLQRADPGPLTTEGRR

SEQ ID NO: 375685 - protein, 357 aa, unidentified
MERYIGLDPHGTSCTFGVLGPSGRKLRHDVVETNGAALVRYLRNIPGNKHLCLEEGTQSAWLYEILSPHVAELVVAGIRESRGQKSDVLDAFRRAEELRTGTIKTPVFKAPRLYSRLRELARVHSMLVRDVVRVQARLKVMYRARGIATPGRSVYSPKERDRWLARLPVSSRWATAKLHEEYDQLLVLKQEAEKELVAESRTHRISRVLATAPGLGPIRVAQLLPIVVTPHRFRTRSQFWAYCGLGIVMRSSSDWVQTRGGGWARAEIQRTRGLNRNHNSTLKRIFKGAATTIVTRLDTDPLYEHYLRLTSAGTKPNLAKLTVARRVAAIVLRMWKDEKEYDPDQLKLQASLASAVR

SEQ ID NO: 375686 - protein, 354 aa, unidentified
MSNIKYIGIDVHQATSVFAVMNQRGKLESEAIIETQSEPIIDFLKGQRGTLWVTFEEGTYANWLYDVIQPQVAKVVVCDPRKNKLDANKTDKIDARRLAELLRLNALKAVYHGQHSTRTLKELARSYVSLQQDAVRIMSRLKAIFRGRAIRCHGTSIYRPKNRAQWLEKLDDNGARHRAERLLKQLDSLLPLCLEAQKELVRESRKHQSCKILMGIPGLGPIRVALILAFVVTPHRFHNKRQFWTYTGFAVVHRGSAEYEITEGELKRAKKKPLPKGLNKNCNRVLKNVFKGAAITAAYRGQFKKLFEHQVANGTEPNHALLTLARKIASITLALWKKGERFDIERHRLSEQTT

SEQ ID NO: 375687 - protein, 412 aa, unidentified
MSLALPEALFFTGIDWAAETHAVCVMDAAGKIVARFTIEHSADGIAALARRLATYGKPGDMPVAIERPNGRLVDLLLEAGHPVVPVKPNAIKAWRDGEVLSGAKSDAGDAAVIAEYLRLRQHKLKVGVPYSDETRALRTVVRARGDLVEMRVAATSQLSALLDAHWPGARAIFADVESPISLDFLTRYPTPAAAAHLGEKRMAAFCAKHGYSGRRIAAQLLARLHHAPAGAAGEALAEALRDAVLAAVGVLTALNASVKNLDRAAAAHLGEHPDGAIFTSLPRSGQVNAAQVLAEWGDCRQAYERPDPVAALAGCTPVTKESGKHRAVHFRWACNKRFRVAITTFADNSRHASPWAAKIYNDARASGKDHPHAVRILARAWIRVIWRCWLDGVPYDPAQHTAAAALIEPKAA

SEQ ID NO: 375688 - protein, 345 aa, unidentified
MTITTLGLDLAKNVFQVHGIDEAGEVVVGKALRRRQMMPFFSKLDPCLVGMEACATSHYWARQLSQLGHQVKLMPPIYVKPYVKRGKTDAGDAEAISEAVTRPTMRFVAIKSLDQQSMLALHRTRDLLIRQRTQLVNMIRGQLAEFGIVLAKGIQHVHKFTGQLLGGEVLDIPPLAVSVIVTLAEQLRDLQARIGGLDKDIRTWSRGNEVVKRLLTIPGIGIITASALVATVTDPHQFTSGRQFAAWLGLTPKANSSGGKERMGRISKMGDQYLRRLLVNGMTSLSQSVRRNPDAHPWAASLMRRKPDKLVAVAMANKTARIVWVVMTRNEIYRLPQTSTMKEPA

SEQ ID NO: 375689 - protein, 318 aa, unidentified
MSVTEKVHVGIDVCKARLDVALLPRGEALSLTNDEEGIEALTEKLVEASATLVVLEATGGYERPLVAALAASQIAVAVLNPRQARDFAKATGRLAKTDKIDALVLARFAEAIRPTPKAPPEAEALEFQAILARRRQIIGMMVAEKNRLGASTSKKVRSRLEAHIRWLEKELARIDRDLEEVINQSPTFKENEALLRSVPGVGPVLSRTLLAELPELGSLSPRELSALVGVAPLNRDSGIFRGRRSVWGGRAKVREALYMGALIASRHNPHIKTFYERLVASGKPKKVALVACMRKLLTILNAVMRDRTPWRSPHALNS

SEQ ID NO: 375690 - protein, 313 aa, unidentified
MKKTICGVDVSKTKLDVCIEPGHRFASFNNDTTGIAELAAFCREHAVTLVVMEASGGYERRAFVELSEEGISCALTNPRNVRRYAEAMGILEKTDRIDSSVIARFAHAKNLAPTPLPSKAQQRLKALVTRLRQVTDDLTVQKQRRAGLLDNPQMLASLDEVITLLKRQSRSLEGEIASMIDDDPLWAKLAETWREVKGVAGRTVARLHAELPEIGTLSNKAIAKLAGLAPIANDSGKRKGKRSTRGGRAGVRSILFLVAATAARYDKSLADFRARLVAAGKEKMVIRIALARKLLVRLNAKARDARAAYANAT

SEQ ID NO: 375691 - protein, 366 aa, unidentified
MKKISTVQAFSNEIFKGQKLTIGLDLGDRWSYYCVLDEAGKIILEQKVPTTPEEMKQTLGKLPRSLIALETGTHSPWINRLLTELGHKVIVAHAQKVQLITKSNRKDDRHDARTLARLARIDPELLGPVRHRSAQAQIHLTVIRVRAELVSARTALVNAARGLVKSYGERLPKCGTQQVSRELAAGLSTELREVLEPLLREIESLNERIQEYDERMEKIAQEVYPEVSLLKQVKGVGTQIALTYVLTIEDPYRFAKSREVGCFLGLKPGRRNSGESEPQKHISKEGDRYLRTMMVQGAHYILGPFGEDSDLRRWGRKLAERGGKNAKKRAVVAVARKLAVLLHRLWVSGEVYEPLRNSQEAMRAVA

SEQ ID NO: 375692 - protein, 408 aa, unidentified
METIHPICCGLDVHQASVSACLRRVDAQGAVSVESREFGTTVKDLVALADWLVAEGCPIAAMESTGVYWKPVWNILASLLDVWVINARDVKQRRGKKSDRADAKWIAELVAHDLVQPSFVPPARIGVLRDLVRMRTVLVQGRTQVKNRVLAVLEDTNVKLASVVSDPFGVSGRKMMEALVKGERDCKVLSEMAMGVLRRKIPQLEVALQGGFTEHHAFLIRLGLESLDQSNRQIAELDAQIERLMQPLQEEASRLTSIPGVGQNAARVVLSEIGTAMTRFGSAERLASWAGLCPGNHESAGKRYSGKTRKGNRYLRRVIAECAWAASKTNTFLGRTFRRFQVRIGGKKAAVAVGHKILVIIFHLLNEGQLYDDGRYDSISQREQIRQRNRALTTLQRLGYQVALTPAS

SEQ ID NO: 375693 - protein, 399 aa, unidentified
MLAVGIDISKSKSVAAILNQDGSMHTSPFEFHHTQPEPNAFIKYILNSNQSATILMENTGHYHYPVLKAFREAGLPVCMVNAYQIKKFGDMDLRKAKTDKKDAVRIARYALEKSYSLVPYTSMEQKYEDLKFLARQYNQRMLTLKTNKVFLLNLLDETMPGITNILPLTTRTPETSLSVLFINRFKSYDRIKKMGKSRFLDAFEKIARKSRNRQTKTHGLAIYEAALRNITTRGENEYTLAAQDQCLELVCESQKAADSIIPKMQTLAETLPEYAVLRYMAGVGDRLDPLILAEIGDIRRFHSGKALNAYAGNDAPPYQSGTFESHNRHISKRGNAALRKYCFEVMQALKLTRPQNDPVYLFLLKKEQEGKPYNVAKMAGVNKFLRIYYARAMETLKQQ

SEQ ID NO: 375694 - protein, 494 aa, unidentified
MSGQSIPPEARLRHLESHYADRVAAFRRQLTALGPDRVLIVLLDIGKNVHWAGAWTAADEELVAPYRLPTSHDGLTRFCQMLDDLIVRHAPRLVLLGHEPTGVYHEPWARALMARYQPHLEGAAFPPFVYRFFNPYQVKLARQQTHLRHRKTDPRDLAAMRDLMLRGLGQPAFLPSGHESLIRQEIGFIRAQGRLLDFLERILRQLLDLLWPGAVVAVNRVRAAHPDLEPPSPIVQTRPLQRERLRILLAHCPNPYDLLAMSDEEILDLYRSHGGRAGPALLSTLRRWGEQAVLLPPEKAAPLADQLQRFFRQYITAESLIEEGRGKLATLIQETSARHIAAIPGLGPLDAAAYLAGLGAAHRFQRAAEVWAFAGFDPIADGSGDHPHRVGHLSKRGDPAFRNALYQMGYRAALHYPPIGLTFLNAFDRGKSEVEATIHAAHRVNRICFHLVQADEPFRDQTTPQMEAEAARRWAAFRQAKKRRGGRRKRGRRR

SEQ ID NO: 375695 - protein, 451 aa, unidentified
MKKEIEKKVLIKLGKGLPVFNFHAAGIDIGDTLHYTAINDENGGHEVKVTSAFTCDLEEIVSYLLQHKITTAAMESTGIYWLSLYLMLEEAGIDVYLVNAKSVKNVSGRKKDDTDAIWIQKLHTCGLLQKSFQPDNEIRLLRTYTRQRKNIILLAADSVRRMQKALELMNIKIHTVISDILGKSGMKIVKAILHGERNPDFLATLCDPRIKASKEEIIKSLQGIWKEEYLFMLEQALENYEFHQGQIKKCDEKIEQQLIKQVAIVNDGDITGLKELVTKKTKGIKNQFSFQVAPFLKQITGTDLCKIPGISDVTALEFIAEIGTDMTKWKSAKHFAAWLNLTPNTKITGGKIISSKMEKKKNKAGQYLRQACSCLSTNKTAIGDYYRRKKSSLGGKGAVVATAHKLARIIYTLLLNKIDYSPEMLANNDLKYKENKIKYLEKQLEKLRKAA

SEQ ID NO: 375696 - protein, 315 aa, unidentified
MNTPSGPSVVLGIDVSKEWIDAFLLPQETTWRVSNEAKELQSWVDQLPDGITLAVLEATGGLEMQPAVALAQAGIPTAIVNPKQVKGFGQALGLRAKSDPIDAALIAQFGVKIQPSAKTLPDEDQAALKELMTRRGQLMANRVAEQNRLGSMRSKEAQKSIKAHIQWLTKQIERIDQQLDDTIKKSPLWRAREQLLTSVPGIGPHTARTMLAILPELGQMNRREIASLGGLAPYTRESGKWKGKRFIGGGRSEIRAALYMAALSSTRRHSTFSQFYRSLREQGKPHKVAITACMRKMLTVMNAVLRDQKPWTKYA

SEQ ID NO: 375697 - protein, 409 aa, unidentified
MIYCGIDWAEKTHDVAMVDHTGTLVAKRHITDDAAGYKVLLDLLAEHGDTEDNPIPIAIETSRGLLVAVLRTGRRKVYAINPMAAARYRDRHSVSRKKSDPGDALVLANILRTDMHAHRPLPDDTDLARAIAVLARAQQDATWNRQTIANQLRSLLREYYPAALAAVEPRKNGLCRPEAHALLKAAPTPNRAARLTRTQLQATLKRAGRQRGIEAEADRLQEVLRAEWAHQPALVEDALGEQMLALLIQLEAACTAADRLAKAVEEVFPRHPDADIYLSFPGLGAQLGARVLAEIGDDRTRFTDARGLKAYAGSSPITRASGKKSSITRRWVKNDRLNAAGYLWAFSAPNASPGAKAHYRHRRDDCGGWHAGAQRHLFNRMIGQLYHCLQHTELFDEHTAFPAEPAEAA

SEQ ID NO: 375698 - protein, 339 aa, unidentified
MQVTTIGIDLAKNVFQVHGITKDEEVLFNRPLRRAQLLPFFSKLEPCLIGMEACSGAHHWARELTELGHDVRLIPPMYVKPYVKRGKSDAIDAEAICEAVTRPKMRFVAVKTVEQQALLSLHRARDLLVRQRTQLINGLRGMAAEFGVYIAKGVAQITGFAEGFLAGEVLDLPKVANEVIHNLCEHLMALHARIRWYEERLKLVAKEDARVRLLRTIPGVGVVTASAIIASIGDGHQFRNGREFAAWLGLTPANKSSGGKERLGRITKMGDQYLRSLLVVGMTSLVRQTKSHPERASKWLTSLLERKPARVATVAMANKTARIVWAVLTRNEPYSSHTA

SEQ ID NO: 375699 - protein, 367 aa, unidentified
MSSVASPAGLIHLGMDTSKNAIVVATLLPGQDSPVTDRIANEEAAVRRLVGRFADRSVLRAWYEAGPGGYELCRLLASMGVACQVVAPSLIPKGSSDKVKTDKRDSRRLARLGRAGELTPVRVPSEGEEAVRDLVRARDAMLADRKRAQQRLTAVLMRHGRVWRGATYWTAAHRSWIAAQRYGEPALAAAVGHYRATLAVREAELAAVEAELLPWAGREPLAGPVARLGCYRGIAELGALTLAAEVVDWRRFPAARAFMSYTGLVPAEYSSGERTRRGHITKAGSEPVRTALIEAAWAYRFAPAIGAGLRRRQAGATPDTLARSWKAQRRLHDRYVHLTRDGGKAAPEAAVAVARELAGFIWAEMTA

SEQ ID NO: 375700 - protein, 344 aa, unidentified
MQITTIGLDLAKHWFQVHGVDAAGAVVVKRRLRRSEVIGFFKGLEPCLVGMEACATAHHWARELIALGHEVKLMPPAYVKAYLKRNKNDAADAAAICEAVTRPSMRFVPIKNVEQQAVLMLHRGRALLIRQRTMLVNALRAHMAEFGIIAPRGLRNVEQLVATVSDERTPLPELARSILQLIIGQLNDTEVRIRMLEARLAKWHRANGVSRLLASVPGVGIMGASAIAATVIDPSLFRSGREFAAWLGMTPRQNSSGGKERLGGISKRGDKYIRSLLIAGAVAILRHARNRATKDAEWVRGMLARKPAKVVAVALANRTARIVWAVMRRGTPYRATAILGQAAA

SEQ ID NO: 375701 - protein, 416 aa, unidentified
MNAVGIDVSSRKSTVAVLRPLGEVVCLPFDVTHDIAGLASLVEKLKAIDGETRVVMEHTGRYYEAVAKALHEAGFFVCAVNPLLIKEYGANSLRRVKTDKADAIKIARYALDNWADLRDFTPMDAIRYDLKTLNRQFQLASKQRTASANNLIALLEQSFPGIRKCFDSPVRSDGTQKWVDFAHSFWHVDCVRKQPFAAFCERYRKWCKRHAYLFKLSNAEEVYALAKRAVVLTPKSKVVKVLVQEAANQLISISRSVEVYRAEMDRLAAMLPEYPVVMAMYGVGKSYGPQLMAEIGDVRRFERKQALVAFAGIDPMPNQSGDKNVRSNKSSKRGSPYLRKTLFNVIRTYLQCAPQDEPVFQFLNRKRAEGKPFYVYMLAAANKFLRRYYAKLRDYFASLDTLQPVAPIPTILKAAL

SEQ ID NO: 375702 - protein, 338 aa, unidentified
MKITTIGLDIAKSVFHLYAVNEMGRYVKRKQLKRKQVLAYMANLAPCLIAMEACGGANYWAREFITLGHQVKLIAPQYVKPYVKGNKNDYNDAEAIAEAVQRPNMRFVPIKSVEQQDIQNFHRQRERIKKERTALVNQVRGLLAEYGVVINKGVAAVRKRLPEILEDAENGLTTLSREIFAELLEELRTLDQRFEQCGQRIESLNQGNDVCQRLDEILGIGPIIASATYAAAGDGEDFVNGRHFSAWLGLVPGQHSTGGKAVLLGISKRGNAYLRTMYIHGARAVLRHSANKTDRFSRWAQAVLERRGHNKACVAVANKMARMAWVIMAKGENYRAAT

SEQ ID NO: 375703 - protein, 397 aa, unidentified
MTATRDVQSTTSGPRLHLAFELSWSQWKLAFTIGHGQPPRLRTIAARDLAALLKEIRKAKGRFGLPDAAVVVSCYEAGRDGFWLHRWLTSQGIANVIVDSASIEVNRRKRRAKSDRLDAAKLVSMLLRYHAGETKVWSVVRVPTAADEDRRQLHRELIAVQDERTEHTNRIKAFLAGQGIVLAQVTANFPAVLATLRCWDGSDLGADLRQRLLREFARWQLADQQVKELENERKQRLRRDDTPHVDRLRRLLELAGVGLSGSWLLVFELFGWRRFSNRRQVGAIVGLTPTPYQSGDSSREQGISKAGSKVLRRMMVELAWGWLRWQPNSELSRWYERRFAHHGKRARKVGVVALARKLLIALWRYVEHGEVPAGARLTSWRAKVNAKASGAGKDAAA

SEQ ID NO: 375704 - protein, 392 aa, unidentified
MEGRWGAGKLTLIMKQIIVHRTGAASTGAAGTDRSPSAATIKLGLDIHQACYVVAVQEDHATPKPARRFAPAEFAPWVGTLLGRGHRVFVVYEACGFGFGLCRRLTALGATCYVIAPRKLDEARQGVKTDPLDAGVLCQRLSRYVEGNKNELAVLRVPTEQEEELRHIHRQREALVRARTKLQAQGRCLLLNHGEIAPQRWWRRQGWQALQTRLPGWLRARLEVFRPVLATLDTQIAALTAELEAAAPAGLPSGLGKLTSIVVAREVCDWRRFQNRRQVSSYTGLCPGEYSSGGKRLPGAVTKHGNPRLRAALVELAWRLVRFQPQYPPVRKRLAVLAKGARATGAARKKAIVAVARQLAVDLWRWQTGRCTAGQLGLEPTPLATPHTTAEP

SEQ ID NO: 375705 - protein, 347 aa, unidentified
MLHAGLDLSRKKLDVCLLSDQGEHLDQLAVPPDVDSLRTLARRVGEVHRQPVCAVIESMTGARIVHDTLEQQGWSVEIADAQKVKGLAPLACKTDKIDSKVLAVLSHRDLVPAIWLPDPSVREERELARFRLHLVKHKSALKCRIHSTLINFGKPCPVTDLFGVEGRRLLKRLQVPEPWRGNITASIELIDDLERQIAEINHRLKKGHAEHPYVPLLLTVPGIGWVLAFTIAAEIGEIERFPSPEKLAGYTGLCPRVNQSGEKDRRGPLTKHGPTYLRWALLEATMHALRHPAYAERYQRTERRLGKQRGAKVAQVDIARRLAHAIWHMLSRKEKFAPRGAAFRLAA

SEQ ID NO: 375706 - protein, 341 aa, unidentified
MDTVTLVGIDLGKHSFHLHGQDRKGLPVFRRKLNRKQLIEFFATFHPCTAAMEACAGAHYLARKLIATGHEVKLISPQYVRPFVKGNKNDFIDAEAICEAASRPTMRFVPPKTEAQQTLSMLHRVRESLVHDRTKTANQMHGFLLEFGISLPTGLSVIKRLPTLLAEHELPPQLVAVLERLHAHFKYLDAQITEAEKELGRQVHEDDLGQRLMTLPCIGPITASVLAAEVGDGHQFASSRHFAASLGLVPRQYSTGGKSTLLGISKRGDKNIRRLLVQCARVFMQRLDSDTTALANWVRTLLARRHSNVVACALANKLARMAWALARGHTAYQATPQPVSA

SEQ ID NO: 375707 - protein, 354 aa, unidentified
MADQIAVVGGVDTHTDFHQAAAIDNIGRHLATASFPTTPDGYRRLLEWMRLHGDVLAVGVEGTGAYGSALARFLRANEVIVVDVDRPDRKARRASGKSDPVDAYAAATAVLSGRAQGRPKTRDGIVEAIRSLRVVRRSAIKSRTQTINQIRTLIVSAPAEVRERLRGLPTYQLIAQLARSRPGADLADPTCAVRTALRRLARRYQHLTQEIAEADAELDPLVAQAAPGLVDLIGVGTETAAQLLITAGDNPDRLKSEASFAHLCGAAPISASSGRTNRHRLNRGGDRQANHALHTIALVRMRYDPRTRLYVARRTAEGMSKKDIFRCLKRFIAREVYKHLTSMNIPQPRLLQAA

SEQ ID NO: 375708 - protein, 442 aa, unidentified
MEVTHTHCAGLDVHKKVVVACSLIQTAPRKLERTIRSFGTTTTELLALNDWLSTQGVTQVAMESTGEYWKPIYNILEFNFEVMVVNAQHLKSVPGRKTDVKDAEWIADLLRHGLLRGSFIPPLVQRDLRDLTRQRITLVRERARVVNRLQKVLEWANIKLASVVTDITGVSARRMLQAIVDGQTDVQDLAKLAKGRLVSKLPQLEEALLGKVRDHHRFLIQQHLNHLEFLEAQIIQFNQHIEQSIDAQDNSDHHNKSESKSNSSVSDSADATESASTLSWTQAVSLADTIPGVAQNTAELLVAEIGTDMSRFPSAAHLAKWARLCPGNHESAGKRLSGQTGRSNPWLRTSLVQAANAAVRCRNSYLGIVYRRLAGRRGRKKALIAVAHRILIALYHMFSKREPYRDLGVNYLSSQSQQQHSVQRLHSQARQLGYQLELTPIS

SEQ ID NO: 375709 - protein, 469 aa, unidentified
MNHRRLVGIDLGIATAHTVRVLDGDGAVVAKRKAWPTRESLAEVEAAALAGCPEGTRLEVVIEPTGPAWLPAAVFFSARGHRVFRVSSQKAADLRRFLSRHAKSNGIDADTLARLPLFDPAGLQPLVLPGAAQAALDRRVRATDRLTRQAADHKRRIKDLARQLLPLSPLTGELGAADLAVLERYADPRALSRAGQTELTTLIATASHGHQGAGRARQWLDAAQASLELYDGHPAVDLAGLAAEVATEVRLLRAAQAELSAHATEREARYRQADPAGLARTLPGLAEVGGPALTACMGDPARFSCGKQFRSYTGLAPKASETGETDRKGQPMSKAGSSLLRTTMVRAADNARRQDPQLARVYYQQMTQRGKDHLGALCVTAACLAERAWTVMRRGTPYIICDTDGQPVTAEAAKAIIAERWTVPPEVRARRRGKKTGKAPQKVLAGHARGDLPRGTTPPRREQPVKPSP

SEQ ID NO: 375710 - protein, 445 aa, unidentified
MASGKKRQGFELTHPNAAGIDIGGSSHFVAVPADRDDEPVREFQAFTADLREMADWLRTCGVDTVAMESTGVYWIPVYEYLESRGFTVYLVNARHVKNVSGRKSDVLDCQWLQQLMRFGLLTGAFRAQDEFCALRSVARQRWNLLRYQASHVQHIQKALTQMNLQLTQVISDVVGETGQRIVRAIIGGERDGATLAKLRHGRIRASEEEIAKALEGNWREEHLFALRQSVALYDAYAVQILECDRQLEVMLGRLAHYEGDPGPSKRRTKSKNAPHFDMRTQLFRICGVDLTRIEGIDVTTAFKVLSEVGTDFSKFKSAKHFASWLGLCPGTKISGGKVLSGKSKRTANRAAQALRMAAMNLRKSESALGAYYRRLTGRLDKGKAITACAHKLARLIYALMTKGEEYVDQGQAAYEERYKERVIHNLKKRAESLGFELTPSTASAC

SEQ ID NO: 375711 - protein, 338 aa, unidentified
MTSFVGVDLHRNNFTYCIRENGEEKKIGKCEISDLKGFASLLGKNTVMAVEATGNTFMFCRFLKAHVGRLVVVNPSQFKVISMSTKKTDRHDAKVLAEFLEKDMLPEVRMKDDLQAKISSLTQTREKLVQLRTVLKNKVNNLLAANFIVLKREELSTETGLRKALSFHFDPITDTEMFVVVEQIRSLNQSIEKLDKAIEDHGSKMDGFKNLKSIKGIGSKGAATLLSTIGNIHDFRSSKQLAAYIGIVPRVSNSNDTVCHGRITKNGSKIARTTLVQCALIAKRYSPYLHAFHESVKSRRGGAKANIALARKFLDIVYRTLKNNWMFEDFTQFKLVKN

SEQ ID NO: 375712 - protein, 350 aa, unidentified
MIIIGCDYHPAFQQIAFVDTETGEIQERRLQHREEAEKFYRDLAAQEMKVRVGMEASGHARWFERLLAELQFELWIGDAAEIHTKRVRKQKTDRQDAQLILKLMLKDDFPRIWVPSWENRDLRQLLWHRHRMVQARTRIMNQLQAVALNEGLRSKKRLWRERGRKQLESFRLARWASRRRRDLLELLDRLNPTIAELSQAVKQEAEKCPEAQRLMTHPGVGPLTALAFVLIIGRAERFQCGKQIASYLGLVPLEDSSGNRRRLGHITKQGNSLLRFLLVEAAQVTVRSLPQWRSKYFHLAMRRGRKIAKIAMARRLAVRMYWMMRKGWDYEQVNKFGSHAGQSGNRHGVK

SEQ ID NO: 375713 - protein, 411 aa, unidentified
MDVLYKTCCGIDVHKMKLVACLCKGHKQEIKEFSAKTKDIKAMANWLEENQCEMVAMESTSVYWKPLVNIFEMRGLNYMIVNAKDFKAVPGRKTDVLDSAWLADLLRHGLLKSSFIPSREQRELREATRYRKAITEERARALNRLQKLLEGANIKIGSVLSTITGKTTMNLLDYVLNNDEMMDEKTAETLIISRISASVKEVTEAMEGIMTPFQKMMMKQVLTHLHELSERIEEMDIIIDTYMAEYWGAIKKLEQIPGVGKKSAEIILAEIGLDMNQFPTAGHLASWAGVAPGNNESAGKRKSGRTRKGNKILKSTLAQAAKSAAKNKNSFFHAQYQRIAIRRGKNRATLAVAHSILIAIYHMLKDDQEFIDLGSDYYYQFNTEKKINSYLKKLAALGYRVDEHSTISPVG

SEQ ID NO: 375714 - protein, 391 aa, unidentified
MILVGVDVAKDKHDCYIMTSEGEVLFKSFTIANNMEGFNQLYEKILSVIDNFDNVKIGLEATGHYSYNILGYLLDKGLTPYVINPLHSNLYRKSLSLRKTKTDKVDSRIIASMLMSDVSLKPYSNTLYHNEELKSLTRYRFTKVQERAKLKISISRLVTILFPELEKLVPTLQMNSIYALLYEFHSAHAISKAHLTRLTNLLNTTSKGHYTKDKAVLIREAAKNSIGSNMPAKSLELKHTIKLIKELTSEINEIEEEIKIIMNKINSPILTIPGIGLSTGAQILAEIGDFKNFSSPDKLLAFAGLSPSTYQSGNMYSSNAKMEKRGSKYLRFALFNAAIYVSYWEPTFSQYLKKKRVEGKHYYVAISHVVKKLVRLIFHLEKTNERYSTVV

SEQ ID NO: 375715 - protein, 415 aa, unidentified
MEGLDPSYLVGIDWASDKHDICVLDPAGTIVEAFTIAHTADGLRELIRRLRRFASAKHFPIGIERPSGLLVDTLVDAGFPVVPIHPNALKATRPRYAAAPGKSDPGDAYILADILRTDGHRFRPLRVPSDRAKALRAAVRTRDDLVTTRVQLANQLRSLLDSFWAGAATIFADVDSPIALDFLDSYPTPQSAARLGPKRLERFLKRTGYSGRRPVDQLLERLRSAPAGQAAELESETKGQLVRSLVAVLRPLGAQIRELDRLIAAHLAQHPDGEILQSFPRTGTINAAQILAELGDDRLRFATEDQLAAEGGVAPVTKTSGKHRAVLCRFACNKRLRKALTTWADNSRHAHPWAQHVYREARRRGCDHPHAVRILARAWVRVLWRCWQNETTYDPARHGRAIPFLTSDEPSSRAA

SEQ ID NO: 375716 - protein, 359 aa, unidentified
MTKVKELDFKGTTIFCGLDVHKASWRVNIRDTELELKDFTQPADPNLLHKHLIKNYPGAKYKVGYEAGFCGFGIQRELSALGIECVLLNAADIPKGDKDRRQKNDKRDARSISQELSTKKDLRSLYVPSPAWEHARTLVRNRQQQIIDSIRCKCRIWHCLYFSSLPIPDKIETGQYWSRKFIKKLEDIDCGSAELKAALQLKIQDHLQKRELVLQSTRAIRKMYRQDAYWPLMQLILSIPGIGEINAAIILFELQDILRFKTFDNLCSYVGLVPDTEDSGDTKRNKGVTHRRNTYLREALVESSWMLVKKDPAMLMKYKDYCKRMHKNKAIIKIARHLLARINFVLRKQTPYVSGLVAG

SEQ ID NO: 375717 - protein, 373 aa, unidentified
MKVMIHIGLDVHNDSIAISLAPSDSTEVRRYGIIGGTHEHVQKFLKQVQAAHPEVTLRFCYEAGPRGFPLARFLRGLGHECLVVCPSRVPRAPGDRVKTDRRDADQLARLLRAGELTGIHVPEPEDEAVRDFLRSREQVRSAQHRARQQLKMFLLRHNMRYAGKSSWTPAHLRYLARIKMPFAAQQFALQELLHTIRELGARLERFETQLEREVAGWRWEPVVRALMSLRGVALLNAATLIAELGDLNRSTRPQELMSYLGLCPSEHTSGTDRQQGGITKMGNGHARRALVEAAHHYRAPARLTPHLQKRQEGLPKAVTDAAWEAQRRLHHRYKQLSGPGRKKAPVVITALARELSGFVWAIARRMKPHPKKG

SEQ ID NO: 375718 - protein, 368 aa, unidentified
MSDGTATMSVTAKESSTGTILAIDLGKFKSVGCLYDPATNQHTFQTIATTPATVHDLLVATSPALLVMEACNVCGWISDLAESLSIRVCVANTNGEAWKWKRVKRKTDREDALKLAKLCATDQLPLVHVPKLAVRQHRSLIKHRHALIDRRTGIKNTIRSLLDAQGLSLPGRSRGWTIESISELKKLSRDLSECEANNLWRGQLDLELKLLEAVQQLIKEADKKLDALAAKDERVVRLKTIPQVGTRLAELVVATLDDAKRFKNARQVSAYAGLVPKQYQSGQMNRLGRITGQGPGLLRRVLVQVAWGLQRREGTRGRAVFERLCHGQRTRRKQSAVALARKILIWCWAILRDGSVWDESRGFAPTVT

SEQ ID NO: 375719 - protein, 338 aa, unidentified
MIVIGVDVHKQSVTAVAIDQVGQMLDEKTVPVGSDELVGWASAHGGERRWAVEDCRQLTRWLERQLLGRGEDVVRVPPKLMAPERRAGRARGKSDPIDALAVARAALRESELSRPRPDEAVFRDLKLLVDHRDDLVDERRRTQQRLRWHLHQLDPTFAVPLRMLGRASHLERVGRWLARQEQELQVRLARELVTRIRSLTRAITELDRELEQRTAQTAPALLELPGCGAVTAAKLLAEIGPIDRFKSDAQLARHSGVAPLEASSGRIQRHRLDRGGNRQLNSALYRIAITQARYHPGARAYLERKQAEGKSRREAIRCLKRLLVRVVFNTLKTSPALT

SEQ ID NO: 375720 - protein, 346 aa, unidentified
MRKIAYLAMDLHARHFTLGQMDAEGEFLGTQEFTTSEKHIIHSLKSVNAKHKYLTIEEGTLTYWAAQIAHPYVDQVIPCDARKNALIYSNPYKRDKVDTRNLCRLLRMGELKQVYHPKNDDRAIFKAAAQHYMDLRDQVTRFKQKIKAMYRHWGIIDVFTDVVYSSSGRAKYLQQVKHLSIRQQLLRLYHLMDQSESMRKSALKSMERLGRKFSEIREFQKIPGIAQINAHIFDAFIQTPHRFDKRSRLWKYCRLSITDRSSDGKQLGFKRIEPSGIGELKAVSYRAFMSAMRGDNEVRRYYRASLNRTHDHKHARLNTQRKILSAMYTIWKKGVPYQPELFSESA

SEQ ID NO: 375721 - protein, 343 aa, unidentified
MEKLVIGIDFSKETLNFCCLQDASNRIVKEAVVSNNQSGCKEMIRMLRELCPKAHVSDFLFCGENTGCYSMEVSDYLFSKKYVMWLENPLQIKLSSGIRREKTDKVDARMIAEYAFRHQDKIKPYNPQTESIQELRFWLKTHDALKESRKSLINLSRSMKHVPRTLQKSIDELTEQLKQTDKKIKELLKEDDELASNAKLAMSVPGISYVTTAAILVDTRNFTRFTDARKYANHTGCVPHKYSSGTSVYRRPHVSKASNRYINSLLTEGSVSLMTHNKEMHEYADKKRREGKSNGCIINNIRNKTLHRLFAVIRNNRIFEKNYRCELKKEHHDVLIQHNALFE

SEQ ID NO: 375722 - protein, 326 aa, unidentified
MQSILGIDVSKDKLDLILMANGKKYHRVISNDLKGFLVLDKWLKFYHVEDLHACLEATGQYGEPVAEWLYKQGHQVSVVNPARIKRYGESKLHRNKTDKADADLIAEFCLKEKPDLWKPLDPEIKRLRALIRRLQALKDNLQQEKNRKDSGELDAWVSNDLDTHINFLQERIKATNKEIKELMDQNPGLKSQQKLLTSIPGIGDLTANILLAEIGDFSAFENAPQLAAYAGLNPKAHRSGSSVYKKTRISKQGRSELRCCLYMPAVVSLSCNSVIQSLSERMTKTNHQSMEIIVAAMRKLLHLAYGVLKNQLPFDPDYGAQFNFSS

SEQ ID NO: 375723 - protein, 350 aa, unidentified
MDHVGMDVHKKESQLYILTDGGEIIERRIRTDPERFAAVLGARARARILLEASTDSEWVARCLEGLGHEVIVADPNFAPMYATRSRKVKTDRRDARALAEACVLGAYRPAHRLSDAQRHVRGRLGVRDALVRTRTRYISLIRALLRQHGYRVPSGSAEAFLQRVRDLPLPGRLLSVVAPLLAVMRHLNQQLAYSDTTIEHLAAQDPRVPRLRSVPGVGPVTAAAFLAAVDDAQRFHHAHQLEAYLGLVPREYSSGETQRRGAITKAGSSRTRWLLIQAAVSLLRRHPPQAEELRTWALRIAARRGRQVAVVALARRFAGILYALLRDGSVFDSHRVRPPRPMPADALVNR

SEQ ID NO: 375724 - protein, 418 aa, unidentified
MELIYERVAAIDVGKKEIAVTVRVPGESLGAARVSVTRKYKTFFPVLRQMVAWLVGQQVTQVAMESTGVFWRPVFHALSEADQFEILLVNARHVKNVPGRKSDVKDSEWLAQLLEVGLLRGSFVPPAQIAAIRETTRYRKKLIQYRVSELQRLAKVCEDAGIKIDSVASSLTTKSARAMIDALIGGERDPRVLADLALGVMRKKIPDLSMALAGRFQAHHAVLARTHLDQLDHLDAMITRLDLQIDEMLAPFQAQVAALCTIPGISDRLAQVIISEIGVDMSRFSTAAHLASWAGLCPGNNESAGKHGNTRTRKGNREIRTALVEAGWATSRTNTYLGARFRRLHHRFGKKNGSKAAVALAHNILIIIWHVLHDGVIFQDLGPDYFHRPDTPAAHRRKTQLIRELQTLGYTVQVTPAA

SEQ ID NO: 375725 - protein, 522 aa, unidentified
MTGFPMVLACPYRSLVPRLSADALVKFRGLWQARGTILFKRLQFFMPLLGRNHNHTNMKSKTPKSKKGKRKVSVDQGWEAINPRAAGIDIGAKEHFACVPAATTPKNVRSFGTFTADLGALADWFKECGVTSVAMEATGVYWIPVFQILEARGFAVILVNARQTKNVAGRKSDVQDCQWIQRLHTYGLLQGSFRPEDSYCVLRTYLRYRDELVSARSTQCQHMQKALQQMNVQLTQVLSDVTGVSGMAIIQAILAGERDPVKLAALVDRRVRARPIQIQKALAGDYRQEHLFVLQQAVSLYGTYEEKINDCDEQIVRETAALPDKVDPQRKPLPPRKEGRPASKDQMQDQDMREMLYRKFGADLTAIEGIGVTTALVVLTEVGPNVAGFRTEKHFCSWLGLCPDNRISGGKVLSSHTRRVINRFSDALRMAAVTLERSQSALGGFYRRMKGRLGAAEAITATAHKLARIIYRLIKHGEAYVRQGMEDYERKFRERKLHALRKTAMSMGFNLIERQEVTSPVS

SEQ ID NO: 375726 - protein, 285 aa, unidentified
MMSLPNPTCNARITVGVDVSKATLEVALSQGAKPLVLSNDEAGYAALLSELRQRDVGLVLFEATGGFELACATALQLAGLAVAVINPRQARDFARAMGYLAKTDRIDACVLADMARTLLARGDLSKLVEPLPDEQQLQLQGLVTRRRQLMAMRQAEEHRMQMPGVRQRRSLNTIIKALEREIARVDNDLQAFIGANHGEMAALLDSVKGVGKAAISTLLAEVPELGKLSGRQVSALVGVAPIDRDSGTMRGKRSICGGRADVRRVLFMVALAASRHYPVIKAFYQ

SEQ ID NO: 375727 - protein, 406 aa, unidentified
MFTIGIDWADEHHDVCVVNESGEKADSFRINHDPEGLSSLRDRIRRLGVSKDQVLFAIETHKNLVVDFLLDEGYSVYSINPKSVERYRERYRVSGAKDDTFDAMVLANIIRTDRHQYQPIMPSSPLARELKILTQDEQRLIHHKTKLVNQIESCLKDYYPAALKLFSEIAQPITLAFLGLYPTPRKLSFKELRRFLHKNHYPGVESKAEEMFTLLSNQIFVEEFASRAKARMLTALVEQLKVLLLSLAEYRKEIDKLFEEHDDADIFKGLPGSGEKIAPRMLSEIGDNRERFTDKDILQCYAGPAPVTRQSGKTSVVHMRFSCNKRLRNILYQFAFTSLSQSPWSRNFYDSQRAKGNSHAKALRALSDKWVKIIYHLWKNKEHYSEDKHLADMMRFRFKNIRPCGN

SEQ ID NO: 375728 - protein, 443 aa, unidentified
MKELPVLDSRAAFCDVGSEHMHVSIAGGLPKVFGTFTSQLHELRDWLLGEGVHSIAMEATGVYWLSLYGVLEAAGLEVVMVNGQQTRNLPGRKTDMKDCQWGATLHAHGLLKAGFVPPSNIRKLQDYQRLRTDHIASAASQVQHMQKALERMNVKLHNVISSLMGVSGLAIVHAILDGERDPAKLLELCHSMIRNKKAKAVIEALRDTWEPEHLFALRQALQSWEHYQRQIAECDQQIELLLQRTTYNDTQGDGIGEKPKAKGGKHPSANAPQISGLHSMLIDLCQGKDLSILPGHTDYSVLQIISEVGTDLSKWPTEKHFTAWLGLAPGTSQSGKRKSNVKHRRNRVGRYFCMMARSLARSKDMALGGFYRRLAARRGGLIANIALARKLAVLFWRVMVKGTEFVEEGLAAYEAKFLEGKKRSLSRLARELGQTVSPIPVTV

SEQ ID NO: 375729 - protein, 343 aa, unidentified
MITIGIDPHKRSLTAAALDPHSRLLAELRLPATSQAGRQLLAWAEQWPQRRWAVEGAGGLGRGVAQLLVAADEPVLDVPAKLAARARLLGTDSARKTDLADACSVATAAIHHRRLRPVALEDQAVVFRLLSDRRDDLVAERTRTLSRLHVLLADLHPGGAKRELTAARAAALLRQVRPITVADVERKRIARQLLADVRRLDRQVKTASQAIRQAVGEHGTTLTEVFGVGPVLAAKLLGHAGDVTRFPDRDHFASYTGTAPVEASSGDVRRHRLNRGGNRQLNTALHLIAVCQIRDPSPGQVYYQRKLAQAKTPEEARRSLKRHLANVVYSHLVTDHRHRTRSC

SEQ ID NO: 375730 - protein, 361 aa, unidentified
MVVIGVDAHKRSHTLVAVDELGRKLGERTVGTTSDGHLQAVQWAAQWPQVRFALEDCRHLTRRLEGDLLRAGHQVVRVPTRLMAAARRSSRQAGKSDPIDALAVAHAALREPDLPVAQLDGPARQVKLLSDHRRDLVAERTKLVNRLRWHLHELDPGLQIPSRGLRRYCVIDELTDRLSDAEGTVARIARDLLVRCRELTMQINGLERELRDLVRVLAPSLLAVPGCGVLGAAMILGETAGAARFRSKHAYARFNGTAPIPVWSGNTVRVRLNRGGNRVVNTALHMIAVTQARGVGPGKDYVDKQLAVGNTRTEALRLLRRRLSDRVFTALNADERGTSQPTRTVTTLPPTRVRTAMTAAA

SEQ ID NO: 375731 - protein, 461 aa, unidentified
MRCLLYHYLRKHTAFNLSNLPIGCKNRYLSNSLSLRGCRIEVKHTKDVQMQYYVGIDIAKSFHVACVVNQDDKVIKKSLKFNNDESGFDKLLLLLNSIDEVSTFTIGMEATGIFFENLYLYLSEKGFNVILLNPYQTNRFREMDSMKKVKNDNIDALMIAALIKSGRYSKAYVSQDTYQSIKSLYRHKNSLLEEMKKHKRQISTLLAVVFPEMEQVIKDPFNVTGLALLEKYPTAKHYEYASVDRILKTFRGIKGNNFNEQKAQKLLELAKSSIYQGNGVDERAYVIKSHIRVIKLLQEELKELENEMLKLFNQVPQLDNNEEQEVMDIIDNLRTIPGVSDKTIFALIGECGDLSRFKNNSHFIGYLGLYPTLEQSGNKLVHGPIAKRGAKLAKKALYQASIAAIRHNEELNKLFRDKVSQGRAKKEAVVIVARKLAHIILAIYKNNVAYNPKRVFMASAS

SEQ ID NO: 375732 - protein, 403 aa, unidentified
MKTIKNNNIANNSLTLQNKTSKRTGTVHPSPGAITPRCSKNVPVPSPKSEQLPEPPSRESSNTQGRIYFTPSLQNKQCIIGIDVSKSSLHIASFPKVFSPFEIPYDSSEHWETLISTLHKFNPLLIVLEASGGYEKPVCKKLKEAGFKVEVVNPERVRYFAKSLGYLAKTDKIDARVIAHYGAVLVENGIVYGKEDKELEKLKELKRRRDQIVEMIVKEKNRLKQTEKGVLGEEIRRSIEKVLEVLEKEKRRLEEEIEKRLNEAKEIKRRVKLLETIPGVSTVTAVSVVVEMPELGKIERRKVVALSGLAPFARESGNLKGKRMIKGGRKRVRQALYMAVLAGIIWNKKIRGYYERLVEEKKKAKKVALTACMRKLLLIMHQMLKNGVCWQENYDGKNLVAAS

SEQ ID NO: 375733 - protein, 422 aa, unidentified
MTDAIPELIVSLDRSDKTAAVALLQAQTGTVDQYTISLQPEDLDAWWTKLQAEHPHARLLVAFEQPEPNLLAFFAARGPAAIYALNPSATWAYRQSLVVSHARTDRSDAYHQALYLLHHRAELTPWSPVPEHVEQLDRLCQGRRKLVDTRTGLTNRLQAVLKRYYPQALTLMHEDIWRSMNLAFLRRWSSPQALKKARLSTLKSFFHQHGSRSEARWETRQTIVQNLVPLTPQEPLSDLLEVSALVEQLEALNSSLLRYDQTIAERFATCPDTAVIQALPGAGPNFGPRLYVAFARYAEHCPLAEDFACAVGVAPVTDQSGKMRKVYRRLRCDKHTRQTFVEWAKETIKHSAWARAYFEQRKAAGHGFQATLRSLAYKWIRILWRCWKDHVLYDETQYLAKLRTKTSPLLKYLPAVPSPKAA

SEQ ID NO: 375734 - protein, 343 aa, unidentified
MQIRSVGIDLGKTTFHLVALGDNGKVLLKKKFTQKQLITFTANLQTSLIGMEACSGAHFLGRVLREQGHDVKLIPAQFVKPFVKSNKNDFLDAEAIAEAVDRHNMRFVPIKTDDQLDLQALHRVRDRLMARRTSVINQIRAFLLERGIVFAKSPIRLREAIPEVLENANENLTPRMRNLVAMLWSEWKELELQIVEMNDEVERIASSDAACLRLRQIPGIGPLVATAIVASIGNGAAFRKGREFAAWMGLVPKQHSTGGKAKLYGISKRGNRYLRKILIHGARAAVLRCKRDRIAMGAWMTSLEMRAPRNVLIVATANKLARIAWAVLSTGQDYRALQDPVSA

SEQ ID NO: 375735 - protein, 320 aa, unidentified
MNYQSFIGIDIGKNEFVAAVFGNRETKSYANDLSGFSKLFKDYYHILKTSLVVLETTGGYENNLTLFLIEKNITVHRADTRKVKSFIRSYGQKAKTDKIDALALATYAHERQATLKPFMASNSQQNTLKFLEERRQDLKQMLVQEKNRAKSPLYVTLNKSIIKVIKFLEKELIIINDEIDSIIRSNNIFLEKKKILLEIPGIGETTANSLLALIPELGHLDRKAIASLCGLAPYPKQSGTKTWYSRTNGGRINLKPVLFMAAMGARRTKTSLSEFYEKLIQNGKKKMVALTALMRKIIVIANARLRDYLSAKCENLALES

SEQ ID NO: 375736 - protein, 344 aa, unidentified
MAETIMIGLDLAKNVFQAHGVDGAGQVVIRRQIRRAQLEKFFAGLQPAVIGMEACGGSHYWARLAQSHGHEVRLMPPSYVKPYVKRNKTDGRDAEASCEAMQRPTMRFVTVKSEQQQAMLVLHRTRTLLVRQRTMLANALRGHLAEFGIVAAQGVKGLRGLIERMQTPAAAGVPELARDALLVLAGQWEAVDAQVRALELKIVRCVRECAAARRLMAVPCVGPIIASAMVASVGDARAFRSARGFAAWLGLTPRQRGTGGKQRSGSISRQGDRTLRTLLIVGASAKLRQELARGLRDPWLRDLLARRPRKVATVALAARTARIIWAVLAKGEDYRDRASIPATA

SEQ ID NO: 375737 - protein, 399 aa, unidentified
MAKTIETAVAVIGIDIGKNSFHAVGLDRRGAIVLRQKWSRGQVEARIANMPPCLIGMEACVGAHHLSRRLKALGHDARLMPAKYVRPYSKGQKNDFRDAEAIAEAVQRPTMRFVATKTVEQLDLQALHRVRERLVSQRTGIINQIRAFLLERGIAVRQGRLSLRLALPQILAAPPDVVSPRMLHIIEDLSGDWRRLDERIQALSDEIEAIARQDIGCERLMSVPGIGPIISSAIVAAIGTGDAFSKGRDFAAWLGLVPRQISTGDRTILGKISKRGNRYLRMLFVQAAWVVLVKRKSRERSASIAGSRPPRSGCTITCWPSRSPTNWLALPGAFLHTAEPSRPGTSLKLPSRPPNPGATTAEIAQQSAEVCERFRRDGGPVFPARASTGDPNGPLRPIR

SEQ ID NO: 375738 - protein, 361 aa, unidentified
MSGSIALVGLDVHHAQSVAAVLDPVSGELRVEKLRGEPGDVVPVFLEGLGRPVRAVYEAGPTGFALARAATARGLDLRVIAPGSIPKAPGDRVKTDRRDAKRLVRLFAAGELSFSFVPSVQEECFRDLVRCIDDARKDLMRSRHRLSKFLLRRGLRFGGRAWTQPHQRWLGTLHFDDTLSQAVFVDYGCAIDALVHRRRELIAALQDAVPASSHAETVARLRCFRGINTLTAAGLCAEVGNFERFAKPGLLSGFLGIVPSEYTSSEKRVQGHITKAGPTHARRLLVEAAHHYRRRPRVGLELAARQAGQDPRVVQIAWRAQKRLHSRWGHLTGERGKPTGTVAVACARELATFCWEATTLN

SEQ ID NO: 375739 - protein, 445 aa, unidentified
MHYKRLLTWIDGSSSYLSVGLDVGADFTWMSIALPNGAFIGKPFKIVHSDPRSRDLAVTKIKEAQETYSLKSRCFLESTGIYHIPLLCFLRDKGFDCSVINPIITKNSTNINIRKLHNDKFDSKKAALVGLNVSLKASIIPEDSVVDLRNLVRDYYYFKDLQSAVALKLTAELKVSFPAYAKVFSKVTTQSSLKLLSSYPLAGDMLEASKDDIVETIRSTARFGEAYALRKYDAVIAAAQDASVFGRALPSNAVRIRLYIDTYQEYQKHLDALLKALHETVERLQDTLIYDQICLLQSLRGIGFLSAVVLIAEMGDFKLFPSPKKLSAYFGLDPAVKQSGKLNGDKVHMSKRGSSLARRVLHMVALNNVKVDKGSGTPVNPVIYDYYTRKCSGKKKPVAMGAVMHKICNIIFAMLRDNKPFEIITPEEHCQRFAAEYPDKIRKAA

SEQ ID NO: 375740 - protein, 430 aa, unidentified
MTKRSPTPANAVLVAIDMSKHRQEVLIERPEGGRRRRMTVMATKADYDRLAADLGEIGRPIVVGFEATGNYHRTLAHRLLAAGFELRLISSVALARTREALHNGWDKNDSKDAQVILHMLRIGATQRYVDPLAAGINDLQEMSKTHEAISKAKTQTWHRILTHYLPLYFPEIERFAGNSRSDWFLALLERFPTPVSMTSLGLEAFTREAWSLVGRKVSKARLINDIYETACASVALPVDEDAVAIAMFRMVIAQARRLIRQRDEIERTANAVLSENRDYQLLRMIPGIGPINALTILAEAGDLRRFNHHRQFLKFCGLDLATCQSGTFRGRTKLSKYGNARLRRTFWMATQVAIRQRDNSFRDKLGRYVAGHGNDPDRRRKAMTALTAKMARVAHAVIKTGAEYRPFVERADTRWKDPSLLCREGAAATL

SEQ ID NO: 375741 - protein, 366 aa, unidentified
MQKISTVQTRETKIFKQQLTVGLDLGDRSSSYCVLNEAGEILLERKLPTTPEAMKETFAGIPRSRIAMETGTHSPWISRLLTALGHEVIVAHARNVRLITQSRRKDDRLDARALARLARIDPQLLSPVQHRSAQAQLHLAEIRARAVLVSSRTALVNAARGLVKSYGERLGKCHTRKFHREAASGLSEELRQALQPLLSEIESLNEHIQEYDRQIEQMAKEKYPETALLKQVKGVGDLIATTYVLTIEDAHRFRKSRDAGCFVGLQPGRRNSGDSEPQMHISKEGDEYLRTLLVQGAHYILGPFGEDSDLRRWGRKLAERGGRNAKKRAVVAVARKLAVLLHRLWVSGEVYEPLRNSQKAMSAVAA

SEQ ID NO: 375742 - protein, 406 aa, unidentified
MEVLYPRCAGLDVHAETVVACVRTAAGSTVHREHLTVATTTRGLLTLAEWLTEHQVTHVAMEATGVYWKPVWHVLEGQFTLELANATHIRNIPGRKSDFNDATWIADLLALGLIRGSFVPPAPIQELRDLTRTRTQLVREIRRHTQRLQKILEDANLKLTEVISDILGTSGRAMLQALIAGQTDPEQLAALAHPRIRASRAELAEALQGRVTQHHRFMLRLHLDQITRLEQTVAAVEARIEEYLEPFREAVDLLLTIPGVRATAAAVIVAEIGTDMARFPTAGHLVSWAGLCPRLDESAGKRRSTRTRRGRWLKTLLVQVAWSAARTKDSYFHAQFLRLKSRRGPKKAILAVAASILADIYVMLRDRVCFNDLGAQYFAQRDKTKLTNRLLKRLRDLGVDVEVKAA

SEQ ID NO: 375743 - protein, 370 aa, unidentified
MKKHSTRPQSPRGAAARSKGPITIGLDLGDKTSRYCVVGDNGEVMSEGSVATTRKAMAQKFSGMGRYRIALEVGTHSPWLSRLLSKLGFEVIVANARQVQLISASSRKNDRMDAHMLARLARVDPELLRPIRHRSEQAQADLMTIRIRAALVEARTSLVNAARGFTKAMGERLPACDTDSLGVEKLEALPAALQPRLQPLLEQIEALTAQIKKLEGHIEQIARIEYPETRLLTQVSGVGTLIALTFVLTVEDRERFQKSRDVGCYVGLRPKQSESGQSQPQLRITKEGDRYLRTLLVQGAHLILNRRGPDTDLKRWGLKLAQRGGKNAKKRAIVAVARKLAVLLHRLWVCGEVYEPLRNSRPTPASKHAA

SEQ ID NO: 375744 - protein, 429 aa, unidentified
MNYNTQNAKIASITEKTLIIGIDVGSETHYARAFSWRNYEYSKKPFAFSNDEAGFAAFKEWMDDIAEKHEMEVIIPGMEPTGHYWLNLGAYLQEQGMKPVHVNPHHVKKSKELDDNNPSKNDRKDPKTIASLVNEGRFSYPYIPTGIYAEIRNLSNLRIQTQEEITRIKNRMARWFSIYFPEIKDVYRNPDAVSGLMVIKQAPMPCDIRELGVEGVNKIWRDARLKGAGIKRATTLVTAAEHSIGNTEAPRSARKEIRNLLEDYEGYKKRMDELMEEIEKTLSEIPYIDKLMKINGIGIKTVSCFIAEVGDIGRFDNPKQVQKLAGYAIVADSSGKHNGESRISHRGRKRLRYALYESAISVIGKNKEFKEIHSYYRTREKNPLKKMQSVIAVACKLIRIFYTILTKGVDYDGQKMLNDIVRPEIQPAA

SEQ ID NO: 375745 - protein, 366 aa, unidentified
MREQQNNRQKRTIIGLDLGDRWHRFCVLGESGQVVEEGSVANNRVALSELSSRYPGALVVMEAGCHSPWISRHLEQAGCEVIVSNPRKTRAIYQHERKSDRRDALMLARIARMEPALLYPVRHGSEEAQQDLLRIKLRDSLVRARVGLINSLRFTLKSLGYTIANPSTERFHKVIQSALPESVVQMIAPSVQAIEELSLRIKLLDREIRTLAHTKYPETRWLEQIPGVGPITALYFVLKIGDPARFERVRDVGAFIGLCPRRDQSGENDPQLRISKRGDAYLRRLLVSSAHYILGPFAPPSALRQYGLALAAGATARAKKRAVVAVARKLAVLLLTLWKNKSPYQAFPQQREKMRTHDLERLRCIA

SEQ ID NO: 375746 - protein, 335 aa, unidentified
MKKYFIGIDVSKEKLDICLIQDDQIIAEAIVTNDTVAIKNNLQILLTENDLDKQTVLICAEYTGQYTYPLSCICEELKIDLWLENPVQLKYRSGIQRGKNDKMDARKIAIYAKRYQDDVHLFSLPEKQISAFKQLISERDLYVVDKAKYQGQLTDQKRFMSQEDYERKSKRLNKLIAELEEAINQIEQEVQSIIDKDDTLSNQHKLLCSVDGIGDRTAIKMIVETNAFQDFKNPRKFCCHAGVAPFEYTSGSSVHSRKKVSNRADKSIKALLHMAALSVATRKSGEMSEYYWRKVAEGKNKMSVLNAIRAKLVLRMFAVIRNNKFYEKNYINSLV

SEQ ID NO: 375747 - protein, 412 aa, unidentified
MDVFCGIDWAEDHHDIALVGRDGQLLGRCRISDDAAGLAQLLTLLAGHGDSAGDLIPVAIETPRGLLVACLRATGRKIYPVNPMAVARYRDRHSVAGGKSDHGDAVVLANVLRTDMGMHRPLPADTELAQAIAVLARAQQDAVWDRTTAHNRLRSHLREYFPGFLAAFADARGGIVRPEARAVLAAAPTPADAARLTVTRLRAVLKKAGRSRGIDTEAARLREAFRNPQMRQLPLVEHAMGRQALALLGQLNAACAAASGLEQAATESFNLHPDAGIITSFPGLGPLTGARVLAEIGDDRSRFQDAKGLKAYAGAAPITRASGKTRSVSHRRIKNNRLASVGYTWAFSALTASPGARGHYDRRRDHGDRHTAAQRHLFGRLLGCLHHCLTTGQNYDETTAFPNTAGKLPRAA

SEQ ID NO: 375748 - protein, 429 aa, unidentified
MMPASEFAAFIGLDWEDEAHSVCLFPADGGAVQHSEVKHDPNGIADWVTELRQRFAGRPVAICLEQSRGGLVYALMQYEFLVLYPINPKQLSDYRAALYPSGSKNDPNDAELLARFLRDHPDKLRAWRPDDAVTRGLRLNTEQRRKWVQDRVALSNELQQRLKESYVLALDFCHRHLWDESFLALLDKFPTQRELQRASPKQLEKYLPKKRRAAGDPADEELLRQRTAAVREAKPLTTDRAVLEHARLVVTNLVIMIRALNQAIAEADAKIAELFAAHPDAALFASFPGAGKAMAPRLAAAYGTDRDKFQDAAEMQQLSGIAPVTKASGKTKIVQMRWACPKFLRQTFHEFARASVRFSSWAKAYVAMRTSDGDRYHEIIRGLAFKWQRILTRCWRCREEYDEQRYLERLRAKGSKLIAYLPTEPPATP

SEQ ID NO: 375749 - protein, 342 aa, unidentified
MNLTTLGIDLAKAVFQVHGADDKGRAVIKKQLKRAQVLPYFANLTPCRIGMEASGSAHYWARKLQALGHNVQLIPPQYVKPFVKRNKNDAADAEAICEAMMRPNMPAVPIKNAEQQAILSVHRARQGFIKARTAQANQIRGLLAEYGLIIPQGISHIPKQVPEIIEDGENDLPGSFRVLIARLVDHLKELDRQVGELETEIQRWHRDNAASQKLAKIPGVGPLTATAMVASIGDARHFKNGRQLAAWLGIVPRQHSTGGKATLLGISKRGDTYLRTLLIHGARAVIRVAERKATADSWIKNLLVRRNKNVAAVALANKNARTIWALLAHDRDYETGYVKAAL

SEQ ID NO: 375750 - protein, 420 aa, unidentified
MRFIALDVHRDFCEVAIKDESGLRLAGKVRTAVAELQLFAESLAPDDQVALEASEPALQIARILEPHVGGVAIANTRKLRAIAESKVKTDKLDASTLCELLAAGFLPAVWSPDEFTRALRRRLQRRAKLVRARTRAKNECHAVLARNLKGKPPMSDVFGKKGRRWLAALQLPADESETVACCLREVDFLDSEIALVERELAARALSCQEIRRLMSVPGVSLVSAATFVAVVGDARRFSSPKKLVSYVGLDPRVRQSGEAPARHGRISKQGSPEARHMLCEAAWVAIRTPGPLRAFYERVRARRGTQIALVASARKLSVLFWHLLTREEDYAFERPTLTRRKLRGLELKVKDGRRSWPSGHAVGTKEEREREREFAEQVETAYRRLVADWQPKARRSGAGATRGRASSSHLLDEETAARQG

SEQ ID NO: 375751 - protein, 338 aa, unidentified
MKYYGAADVHSNNTCLGIIDESGQKVLKTKISNYSKLILHELEPFREKLQGIVVESTFNWYWIVDAMMDDGYKVHLANPAAVKQYEGLKNTNDFDDAFHLANLLRLGILPEGYIYPKEPRAVRDLLRKRLMLVRHRTAHTLSFQSLYCRHTGFQLRSSDVQRFKDYQLEELSPFEHVQLAGQANILTMRFLATLINDIEKKVLRLMTPQPQFMKLKTITGIGDILGLTIALETGDITRFPKVGNYASYCRMVSSQHLSNNKKKGQGNRKNGNKYLCWAFIEAANFAPRFCAHAKRFYQRKLAKTKKVIATKALAHKLARAAYFVMRDQVDYDPIKLFG

SEQ ID NO: 375752 - protein, 384 aa, unidentified
MGKSIRFVGLDQHAATIAVAVAESGRDGEVRSLGTIANRPEAIRKLVAKLGPPETLRFCYEAGPCGYGMYWQLVQLGAQCEVIAPTLIPTKAGDRVKTDRLDAEKLARCHRGGDLTAVWVPSAEQEALRDLVRAREAAKEDQLRARNRLSKFLLRQSRRRPDDSAAWGTRHMAWLKTVKFEHRAQEMTFVDYLSEVEHAKERIARLERAIHDAISQAPASMRAVVSALEALRGVKTLTAVTVVAEIGQFSRFAAAPQLMGYSGLVPSEHSTGGPGKARRGSITKTGNAHVRRVLVEAAWAYRHRPNVAGDLAKRQKLASEGARAIAWKAQHRLHARYWKLSAGGKPTPKVVTAIARELLGFMWAIGAEAERAHPQPGKQRQADT

SEQ ID NO: 375753 - protein, 355 aa, unidentified
MLAELVDHVIGVDTHRDSHTAAVLDTNGRVLEELTVPADAFGYRKLLRFGAAHPPARRAWAIEGTGSFGAGLATYLLEQGEWVVEVDRPARPARRNGAKSDELDAARAAKEALSREHLAQPRRRGEREAVRVLLTTRQGAMTSRTRAIAHLKALLVSAPEGLRQQFRNQTTTQQVTRCARLRTSPSQSSEHRCTIMALRSTARRVLALEAEANDLESQMEMLVKGLAPFLLDEPGIGAVSAAQIICSWSHPGRLRSEAAFASLAGAAPIPASSGQTVRHRLNRGGDRQLNRALHTIVLSRLAHHAETKAYAAHRASQGKTPREIKRCLKRHLARRLFKLLERSPGSAVSRVSANE

SEQ ID NO: 375754 - protein, 338 aa, unidentified
MNYVGIDHHRQYSHMTMMDKEGQILRSGRVPNCQSEIEKFLDGGEALEAVIETGRSSYTMVDVLEELGVAVKIAHPNEVKAIARAKIKTDKRDSEVLAHLLRMNMIPEVYRRSAENRQSQRVLRQRAFYVSAMTALKNRVHAFLAQQKEEVRETVARETNIFSEKGQKVLLGLDLAPEEKSLLTALLKTYRHLETRIEESTALVEKLYEGSREAQLIRTIPGFGKYLSVLVAVEIADLNRFSDAAHLHAYAGVIPSIHSSGDKIHHGKIIRAGNRWLRWAAVEAVWPAIRADFDLRCFYERLARGKGANKAKVATAKRLLTIIYKVWKEQRNYIPYRR

SEQ ID NO: 375755 - protein, 409 aa, unidentified
MTTERTPVQLSCRCIGLDVHVASVYVTELYPDMTVRQYEFPNDEKGLQLFRQTLQATDRIAMEATPASWHLHRVLSPRVAQAAVANPTKLAGLRGNKPKSDRHDSHQLAILLAFNSLPEIWMPDAETQAARELVSHRMRLSKEHTRITNRIRALLVKHGLTMPTSDLRTQDARDYLQTVMARLPEGSQKILESLLRHKAFLESEQEKADAQVETFVDRKPEAKLLQSLPLGPVLILTILAVIGSIGRFPSQAALVNYTGLIPRHKSSAGKIWQGGITKAGPQALRWALLQAAQQAIKQAGRFQDLYRRVLRNSKNNKGVAKVAVARELAEVIWQILTSGAPYPVLNEERARRKEQRRLARLNRARETSAADGPTGRVLQSEIATVIGLAGRRDSAVPVPPELKPKRQAA

SEQ ID NO: 375756 - protein, 394 aa, unidentified
MIYVGIDVASEKHDVCIMSEGGEIFGKKFQIKNSKDEYKKLLNKIDDAKKLFKDSKVRIGIESTGVYSSTIVNYFANVESCEVIYINPVLTNMFQHSETVHYAKTDAIDAEGICNFLQQKKKRLFTYTPSSYHNQVAKSLCRELTRLNKQLNQEINRLTSLIHTVFPEFFQIFPKIRGKLCLTLLFNYPTPNDYKGKHISSIHKLGCSASKGRFSKDKAELLLSLANNSIGFYSIADKLIIKQLAQSILLHLNQKCELIKAMTELVKEHCPKLLTIPGIGGNIACCLYGEIGNISNFHNADALVAFSGINPLVYESGNFKAMNTNISKKGSSYLRNALIQASRIIVKFDPTFKTYFNKKKAEGKHYNNCINHVAKKLVRVLHHLLKNDDAYSIQ

SEQ ID NO: 375757 - protein, 341 aa, unidentified
MKNKKKYFIGLDVHKKKTTYVVRDRLGNILLEGEAATLYSELYEQMKPYLKSAVIGLEACTSYYTLYQNFLKNNYNIKVANTIQLRQLITKNDKLDAKRLAEMLRLGTFPCSYIPDEKIQRLRSLLQVRHSLMEEKVRCNNRIQSFLDRNGIVMPDQEAFGKKWRQKLLQYIGSGEVSLELRYEYDHFVYLEKKSEHLGQEISGYTIKYWKNEYKLIQSITGFGPVLACYVIAHILPIKRFISNRKLRRYAGVIPAFHESGGKKSKGHIPKTSSRKPLRWALIQAANTAGKTNTKLGRYYRKKKKQKNNAGIAHVAVASSMIDIIYKVLTTKKPYNPQKNN

SEQ ID NO: 375758 - protein, 416 aa, unidentified
MTFKVVRFICGGMDVHKNLIVATIGTTDRQTLITEYIQQSFSTFYSDLIRLKEWFISHDCYDVCMESTGKYWIPIYNVLETELNICLTHPKYVKAIKGKKTDKRDSKWICDLYKCDLVKHSFIPKKEIREMREIARYRCKLVYMRSSERNRYQNCLTVSNISLASAVSDPFGKTATNIMKELMQSEVIEDDKILKLIHKNCKDKDKILDSLQGYHIESDQRFKMDTVMNHIEYLDKQIQACEAELIKRAYPLRDYFQHITHIKGISALSAILIVSEIGTDMNQFESDKQLVNWAGLSPANNESANKKKSVRISKAGQYLKPLLVQCALSSIKDKNSYFGIKYCRIKKRRGHKKAIIAIARMMLVCIYHMILTGEEFNPCDYESLTNPKPKKEPIMTVESALQFLKDSNFDFSSIQL

SEQ ID NO: 375759 - protein, 355 aa, unidentified
MNQEKYIGMDVHDASISAAVMNAQGKLLMECVLETKAATILEFIQGLRGTRALTFEEGTLAAWLHDLLKPHVSRLVVCDPRKNARMRDGNQNDRADARNLAELLRTNQVKAVYHGKHGTRALRELGRSYLALTKDSTRVMNRIKSVYRSWAIPCAGTSVYSRRRRAEWLAKLVEPGVRIRAEHLYQQLDSLEPVRQAARRELLRESRKHAAVKLLRQIPSIGPIRSALLVALLQTPHRFRTKRQLWAYGGFAVQTYDSGEYRMVRGKLQRNRERITVRGLNHNHNHDLKNLLKGAAISAIERPGPLQDFYAALVEKGMRTSMARLTLARKIAAITLTMWKKGVSFDPKQLQRQAA

SEQ ID NO: 375760 - protein, 408 aa, unidentified
MEVVYRCCCGIDVHKKVIVACLVNGGEQELREFGTTTSEIKTLANWLTESGCEIIAMESTGVFWKPLYNLFELMDLDAIVVNAAHMKALPGRKTDVKDAEWIADLLRHGLLKASYIPSREQRELREITRYRKSLTEERCRETNRLQKILEGANIKLDSVVKDINGKSARKLLEKIIEDDVPTSEEEISKMIHGRMRSKLGQLVTAIEGITTPLQRKLLAQVIDHIDDLNRRIADLDKLVQDYMDEYEAAITALCDIPGIARRSAEVILAEIGLDMSRFPSAAHLCSWAGVCPGNCQSAGRRKHGKTTKGNKPLKTILTQCAKSARSVKGSYFSAQYQRIAARRGKNRATLAVAHSMLIAIYHMLRNNVPFRDLGSDYYDSFNRDRKIHGYLKRLKALGWEPDALPGSA

SEQ ID NO: 375761 - protein, 363 aa, unidentified
MQNTTHDHSTAHNASHGSSIAWLGLDAHAQNCVLAHLEDNGTQRQFWRIPTQPEKLIAQVQAIVASDKRLALEESNLARWLWQLLRPHVSQLVVCDARHNKLISSHPNKKDQRDAFALARLFRLGELKPVWQVPSNERALLKSAAQNYEEAVLRQTQFKQQIKSTFQHWGLFPTGTRLYSEQGRGAWLKKLPHADLQSQVQLLYASMEQAVQTQRDARKLMVRLGKGFPEIRLLSTAPGLGVVGAHIFVAYIADPTRFDSASRLFRYCRLGIRDRTSDDKPLGYEQLDRQGHGVLKAITYRAWLQAMKRRNTSVYRFFAWSKQHTGSAVHARLNTQRKLLRAWWTLWLEGKEWDEDRFFSTRK

SEQ ID NO: 375762 - protein, 420 aa, unidentified
MQSAPPVLSAAPANGLTCGIDWARDDHAVCVVDAAGRAIHRWIVEHTDAGLRGLLARLDRLGVAEVAIERPDGPVVDQLLDAGLVVVVISPNQLKNLRGRYGSAGNKDDRFDAFVLADTLRTDRARLRPLVPDSPGTVALRAACRARKDLVGHRVALANQLRAHLQRVFPGAVGLFTHLDSQISLRFLTRFDCQDRADWLSPKRLASWLASVGYSGRIDPTVLHARLTAAPRGTTGEHGTATAQITRALLAALASIVAQIKVLSEQISEQLDAHADAHIFTSLPRSGTVRAARLLTEIGDCRARYPTPEALACLAGVAPSTRQSGKHRAVTYRWAADKQLRDAVCDFAADSRHANPWAADLYHRAIARGHDHPHAVRILARAWLYVIWHCWQTNTAYQPENHNALQRVLTQQSKINTEAA

SEQ ID NO: 375763 - protein, 405 aa, unidentified
MEVIIERVCGMDVHKDNITACIMTPEGKEIQTFSTKTVFLIQLMDWIKSHGCTHVAMESTGVFWKPIVNLIEAEEMEFLVVNAQHMKAVPGRKTDVKDAEWIAQLLRHGLLKASFIPDRNQRELRELVRYRRSIIEERARQHNRIQKVLEGANIKLGSVVSDIMGVSSKDMLHAIAFGEDDPEKLANLARRSMKKKKDDLILALNGYVNPHQRMMLKSILTHIDFLTEQIENLDQEVAQRVSVYQEDIERLDSIPGIATRMAEQILAEIGTDVEKQFESAARLCSWAALVPGHNESAGKRKSTRGKKGNKYLKSALTEAAHSVGASKNYLGALYRRTAARKGRKRAGIVVAHAMLRISYYLLTRKEMYVDLGEDYFDKQKQASIVRNSVRRLENLGYTVNISEAS

SEQ ID NO: 375764 - protein, 424 aa, unidentified
MDKEIDPLKKNSKSPTKKEQTSRRTRLQRPVQRKTKEVLAELVEKLRGKLELKATPLRLGEAGQRSELRPNLDRLTVGVDLGDQWSQYCILGLEGERLSEGQVGTTQADVAEFFGAIMAARVVIEVGTHSAWVQEIIAGCGHEVLVANPRLMEGSKRRKRKNDRIDAHKLARLGRVDPQSLHPIKHRSREVRQDLMLLRARDALVAVRTELINTTRGLVKSMGTRLPKCSSRSFGHKAGEAIPEPVREALQPLVQLAEGLSACIAGYDRRIEELASKKYGHTKMLRQVKGVGPITALAYVLTLENPERFSKSREVGPYLGLVPRQEDSGESQPQLGISKAGDTMLRKLLVGSAQYILGPFGPDTDLRRYGLRLCERGGKNAKKRAAVAVARKLAVLLHRLWVTGEVYEPLGYRASGTIIQPAAA

SEQ ID NO: 375765 - protein, 416 aa, unidentified
MLPHWAISEEADRHDPTVRSGGVDWAIDAHAVCVVDAEGRAVDELDLGHTAGGLVERCRRVHRAGARRVAIERPDGPVVEALLSIGLEVVVVSSRSVKALRERYGTSGNKSDRSDAYVLADCLRTDGHRGQSLEPDSAATVTLRAPVPARKDLVETRVAVANPLRAHVRVVFPGAVGLFAEIDSPISLRFLARFPSAARAAWLSEKRPASWLRANGYCGRKPAVVLYARLVEAPAGVDGEEGDARGSIDLGHVAVLTAPRGEIDELNARLEELLDAHPDAVTIRSLPLSASVRAATLITEIGDRRARFTDAGSLARLAGVAPSTRTSGRHRSVTFRFSSNKKLRDAICDFAGDSWRGNARAAQRYRELRAAGKSHPHAERILARGWTHIIWRCWQDRTPYDPARHGAHQRLEPVAA

SEQ ID NO: 375766 - protein, 442 aa, unidentified
MTTDKETRLERRSDRRLLVMPRVVTTHTRGRWESVLLVGIDWADKEHVYCLMDDAGTTLATGTVEHTAEGLERFMNAVRARVQTPNDILIALETPHGPLVGALLDQGFTVYAINPKAVERHRERFRVAGAKSDLRDAWVLAALLRTDRALYHPLTPDSDVAQELRALTRDRADLVRTRTMLSNQLTACVKAYFPEFLTLFSDPDRPVALALLQAFPTREHLQAAPRAELETFLRRHRCPHSRKRAAAIHERMQAPGFHIASPIVRAKARLAATLVAQLQTLGEYLDAYEREIQRVLTLHPDGELYLSLPGAADVLAARMVGELGDNRDRYRDPNIAQCEAGTAPVTKKSGSTRTVHFRRACIHPLRETLWQFAFSSLRRCGWAQAYYNQARKRGKKHAEAIRMLGNVWLRIIIAIRRNRRPYDEEVLQKARLRHGTPGLCFA

SEQ ID NO: 375767 - protein, 407 aa, unidentified
MAKVIIGVDPHKLSATIEVVDHHEKLLGSGRFSTDQPGYTAMRAYAKTWPERIWAIEGSNGAGRPLAQRLLEAGEHVVDVPAKLAARVRLFDTGHNRKTDALDAHSIAIVAVRTKTLRVLRPDGELEALRMLCDRREELTRLRVQTVNRLHRLLAELVPGKAKKDLTALQAKAILATVRPRDIAGKTRRSIAAEELADLLTVEAKMKKATAELKVLVKARGSRLMDLNGVGPVVAARTLADVGDIARFADRNRFASWTGTAPLDASSGEQNRHRLSRAGNRRMNHMIHIAAVSQIRLDTDGRAYYRRKQAAGKTKLEALRCLKRRISDALYRQLLADAEQAQLLSAAQPVDTGPGGHCGATQESSAVDLPPHIDTSDQPLPGPATQTLQPARPTGKTSQPKTPQTTG

SEQ ID NO: 375768 - protein, 348 aa, unidentified
MRYYAGLDVSLAETSVCVVDEEGKILREAKVASEPEALATWLGALGLSLTRVGLETGALAGWLCEEMTELGVPNVVCMDARHARAAMVAMTHKTDRNDARGLAQMLRTGWFRQVHVKARRTMELRTLLTSRKTLVLKIGDVENQIRGSLCLFGIKLGTAKRRTFSERVRELTADLPRVAAILDVLLQAHAAMLFSLDRLNRMVLEIAREHAVCRRLMTVPGVGAVVGLTFIAAIEDPARFAKSRSVGAILGLVPRKHQSGEIDRNGRITKTGDTEARAALFEAAHVMLHRVKKWSGLKVWATKVAQRQGNKRATVALARKMAVVMHRMWVDGTTFRFSATEPSAAAAA

SEQ ID NO: 375769 - protein, 441 aa, unidentified
MAMRKRDDEVVFPNAAGIDVGASSHWVAVPRHSTDDPVREFGAMTGDLNAMADWLLGCGVDTVALESTGVYWIPVYEVLEQRGLTVRLVDARQMKYVPGRKSDVQDCQWLQKLMSLGFLRAAWRPDSEVCVVRAVARQRDVLIAEQASWVQRMQKALVQMNIQLTEVLTDVMGMTGQAIIRDIVAGERDPKALARHRNGRVKASVAEITKALTGNWREEHLFVLRQALAMYDDIARHLSECDTKLQALLTELGQAKVDLGKAPREGSKLRQEFDARQILANWAGVDLTRINGLGLGAVMKILSEIGPDLGRFDTVKHFCSWLGLCPGTKISGGKVLSAKTKRTANRVRQALKMAAMSLSHSDSALGAFYRRLCSRMDKPSANTAVAHKLARMVYFMLTRGEAFVDEGQQHYEEQQRQRSVAALKRRAAALGFNINPTSVPA

SEQ ID NO: 375770 - protein, 367 aa, unidentified
MVCVGIDVAKDKHDCCILDSDGTIRADCITIPNNMDGFKQLLQTIRDCTKRSDKIKVGLEATGHYSYNILGFLLDNDLAVYVMNPLHTNLYRKSLSLRKTKTDRVDARTIATMLLSDVDLKSYTDTAYHNEELKSLTRYRFDKVRERAKLKQSVSRLVTILFPELEKLVPSLHIASVYALLSEYPGAKQISEIHLTKLTNLLVTASKGRYGKDKAIRIRDAARTSIGSVMPAKSLELKHTIKLIRELTSEIDEIEVSIQKIMDELNPPILSIPGVGIQSAAMILAEIGDFSNFESPDKVLAYAGCSPSTYQSGKLTNCYAHMEKRGSRYLRYALYNATKYVCYWKALQCCLVPCHKETASATLPLGS

SEQ ID NO: 375771 - protein, 343 aa, unidentified
MGHDTRIGVDVAKAVFEVAISDRPGHVARRERLQRAEFLPFMAQQPAATVIMEACGSSHHWGRKLEGLGHNVVLLPPHHVRPYVRGNKTDRTDAKCILEASRNEDIHPVPVKTVPQQVLTSLHRLRSGWVTERTARINALRGLLRELGVFIPIGARQVVPAVWMLIEDADSDLPDPLRSIVAEACQEIRDIEARIKTVERQLEATAQQLPVVAMLFTIPGIGLLTATALVAFLGDIRRFPSGRHLASYLGLTPREFSSGLKRRLGRISKRGDGYLRTLLIHGARSVLLHARKQQPDRLREWAHTLETTHVHNKAAVAVANKLARIVWAVWTHQTPYGSLRKAA

SEQ ID NO: 375772 - protein, 349 aa, unidentified
MNFYTNTHPYYCGIDLHTRLLYVCIIDNENNILVHEKIDDSPDKLLALLKPYLGNIVVGVECMHCWYWVSDFCEEHNIDFILGHALYMKAIHAGKTKNDKIGTLKIAKLMRGGNFPLAHAYSKEHRSIRDALRRRTHIMRMSAQLKAHVSSTISQYNLPALESRLNLQNSPDREKMHHFFPDEAVQKSMDLNLNIIETMVSELYKIEHYVKTQAQTHRATDLHILKSFPGIGKILALTILYEVGDIKRFPSVQKFASYSRLVKCKAESAGKTHGTQGNKIGNAHLKWAFSEAAVLYLKGNDNAKRYLAKLQKRMSKAKALSALAHKIGRCAYFMLKNQQVFDEERFLNG

SEQ ID NO: 375773 - protein, 364 aa, unidentified
MKKSSRHEIEKVNERDRLYVGIDLGDRWGHYCIQNSEGETVESGKTKMTADALTKHFPGGQPMRIAIETGTQSNWVRSHLAALGHEVIVANARELQAITRSDRKSDPEDARKLAMYVRIDPRILHPIQHRSMEVQQDLAIIKARDGLVRVRTVLINAARGLAKTCGHRLPSCASAYFASRCRTTLPRALEASVGKLLDEIDHLTQQISKLDCEVRTLAAERYPETARLTQVPGVGPITALTYVLTIEDPGRFPKSRTMASFLGLRPRQSQSGQRDPQLGITKAGNRHLRWLLVECAHVLMSRRSPDNRLKRWGLRLCERGGKNAKKKAVAAVARKLSVLLHRLWISGQPYDPFYGSSAAGQSAA

SEQ ID NO: 375774 - protein, 558 aa, unidentified
MISNSTRRRGGRSAAKLQPNRAKRLDCAELAPAVRDNPDTFSKVIHSRVERVSNAERSEAVNNFAAMSFETNLRPEHNGPGRKARGRTRSRYPNPTRIEPRTPVGPGAFIKKSERTTPQEGPRIRTTHDKGQGPRASKSMNETVNWEKITHYAGFDWAKDHHDVVLVNPQGKIVKDLTFEHHAEGWAKWKELVGAYPHLAVAIETNQGAAIEQLLESGVAVYPVNPKSAERYRDRKAPSGTKTDYLDAWSLADALRVDGHGWRALKPLDPLIQELRLVCRDEVELIGKRTELVNQLQAALHEYYPAALQAFEDWTATPSWSFVQQFPTPELLHQAGRRKWEKFLHVHRLYRPELNEKRLEIFAKAHEFCGPPAVTRAKSRLVLALVKLLHALENQLEDYRKEIRRLFNEHPDHDLFGSLPGAGEKLAPRLLSEMGSDRTLFESAQGLQCYVGTAPVSFESGQVRKAYVRFMCNKSFRHAVHLWADLSRKFCSWAQVYYQQLRAKGKSHAAALRCLGQRWLKILWKMWQTKTCYNPDLHMANQLKHGSWVLAVKPAQSK

SEQ ID NO: 375775 - protein, 343 aa, unidentified
METIATIGLDLAKSIFQVHAISASGAVVLRRALRRSNLLNFFRKLPPCLVGMEACASAHFWAREIRACGHEVRMIPPIYVKAYVKRSKTDAADAEAICEAVTRPTMRFVPIKSAEQQAAGLVLKTRDLLVRQRSQTANAFRAHMMEFGIAAAKGMASLEKLAEAIRDPEYHAIPDAARQALLEMVEQIDALSSRIERLDDDIRKCVTEDETARRLTTIPGVGPIIAATVRAVVHDAHGFKTGRNFAAWTGLTPRAHSSGGKERLGSISKRGNEQLRTLLIVGATSIIKLGKRGLKLPAWLAGLISRKPFKVAAVALANKMARIIWALLTKGGVYRKPVPSTAG

SEQ ID NO: 375776 - protein, 347 aa, unidentified
MGYFAGLDVSLEETAICVVDAAGRIVREARVASEPEALVAFFEACGMAMERIGLEACSLSAWLHAGLTQAGLPAICIEARQAKAAMGAMPNKTDRNDARGIAQIMRTGWYRAVHVKSPSCRSWRALLTARRLVLNKRRDVENGVRALLREAGLKLGTPSRKDFSARVRELAGDDPVLAALSESLLSVIEIMTQEVDRLTKRVLDEVKVEPTCRHLMTVPGVGPLTALAFRATIDQPGRFRKSRDVGAHLGLTPRRYQSGETDVQGRISRCGDELARTALYEAAHSLLIRSSKWSALRAWGMNVAKRRGMARARVAVARKLAVILHRMWADGSEFRWGKQATAAAAAA

SEQ ID NO: 375777 - protein, 370 aa, unidentified
MENRSMFVGLDVHKETIDVSIAEGSRDGEVRHYGVIASDLEPLDKVVRALRAPGRCLHFVYEAGPCGFGIHRHLTARGEACVVVSPSMIPKRSGDRVKTDRRDSQMLARLHRAGELRAIYVPDDADEAMRDLVRAREDAVVVGTQAKYRLKAFLLRQGRRYPGREGWTLPYRRWLTDLSFPTAAQHVTLQEYRDTIAETEQRIDRLTEQLRQLTPTWRWAPVVAALQALRGVSFITALALVAELGDLTRFGHPRELMAYLGLVPSEYSSGPNVRRGAITKAGNPHVRRLLAEAAWAYQGIPRIGRQHAYRQEALPKVVCDIAWKAQLRLTARFRRLVARGKAKPKVATAIARELSGFVWAIAREVSPAPR

SEQ ID NO: 375778 - protein, 401 aa, unidentified
METVRDNATRVKRFRELKATLRTDRTRLLVGLDIAQAEHVVHLRHAHTRVVTPALTIPNTTRGFTQLWAALTRAQRATGCREVVCGLEPTGTYHQAVATFLETQGADVVFLSSSVAYWNRRTQDGTWDKHDRKDAANCADLLEQGKVLFYSQPTGPLAELRHLVKCLRRARTELASCKARWRTTLRPALAPMGEPLPQRLWAELPPVLQAWERAAPGRPAVPKGRLPLGLATACADLGTQVTAVQTRIAVLEAACTPVAERLPAYPLLRTIPGVGPTVGAILLAEIGDIGWYTKFSQLRKLAGLDIVRVQSGQYAGQARISKCGRSLLRWALYHTAIGAARTVAGRARLAALKAKRRGDRFAGFKAVVELAAKQLRVIWGVWRSGTPYDPRRAGGLQRQAR

SEQ ID NO: 375779 - protein, 346 aa, unidentified
MMIIGCDFHPGWEQVAWLDTETGETGERKLVHADGDAERFYRQLVTPALVGIEATGNSHWLVDLLAELGHELWVGDAAQIRASYVRQQKTDKRDAEHILKLLVEGRFPRIWMPSSEVRDLRQLLLHRYKLVIIRARVKNELQHLCLNKGVQRKRKLWTKVGQQVLRELPLKAWAGRRRDDLLGLMAMLDQQIEPLDEAVKAEAQRDKMARLLQTQPGVGPITALAYVLTMGDVRRFPRGKQVASYLGLIPREHSSGGRQHLGAITKQGNRMLRMLLVEAAQTAVRLDPQFRKEYLHRCHQKPKAVAKVAAARKLAVRLYWMLRTQQGYPEVVRIESSPRVRLVGEN

SEQ ID NO: 375780 - protein, 316 aa, unidentified
MQTFPDIGVDVAKDAVVVACAAQSFSTHSITNQRTPLLAWLKSLPAGSRIGMESTGGYHELLADLAHAQGHTVFLLNPLDTKHYARAMGNRAKTDRVDAELIARLIAQEHTRLRPYTPPTADQRKLDRMIRRRAKIVRIKSSLKLTMGNLGGFAAELEAVSLKLDALIVKIDSAMTAIAAHSPQHKEAQKRLQTIAGVGPVVGMALTNTLERVPFRNADAFVAFTGFDPRANDSGNKIGRRRLSKRGPAELRRLLFNAAMAAAKSKAWKPIYEHYRTQGWSTTAALVIIARKIARAAWSIHHYRSTFDPERIAKNA

SEQ ID NO: 375781 - protein, 343 aa, unidentified
MEYFVGMDVSMASISICEIDAKGTVIREGKVSSTPEAVATWLEESGRGFARIGLEAGPLAPWLYAGLSSRGLPVICIETRQMKAFASASPVKTDRRDARLISQTMRTGLYRATHVKTARSQELRMVLTHRETLVHQVRQLSNTVRGTLKAFGLKVGMARGRLFAARVRELTADNPHLSAAAEPLLLARQALLEQLDKLDRQVHAAARDDSVCRRLMTVPGVGPVTALAFRTGLDVPERFQKSVMVGAHFGLVPRRYASGEQDRSGPISKCGDAMVRWLLFEAANALLTRTRRWSWLKHWGLAVAKRRGMKRAKVAVARRLAVIMHRMWIDGTDFQYRKEETAI

SEQ ID NO: 375782 - protein, 427 aa, unidentified
MSYRIAAVDVHKKMLAVVVTDIAGEGEYQFERRKFGSAPEELRRLAQWLVQLEVEEVVMESTAQYWRPVWGTLELLWKPARQQREGAHKMSGALHLCQARSNHGPRGRKNDFLDAERMVKRLVAEELVLSFVPDEEQRLLRTVTRRKHQLTRAKVGFKNQLESLLEQGHIKLSSLVSDLLGVSARRILKALAEGESDPGVLAAMADKGLRATPEQLRDALGASAHLSGAFRRLLKLSLEELQLIEAHIEQLGREAMELLKGHEDVVQRVAEVPGFGPDCAVQMIAEVGVQAEKFLAAKNLSSWVGVCPGNEESAGESQSTRSPKGNRQMRRLLNQAAQSAVKVKGSIFEVIFHRLLPRLGYKQAIWALAHRLCRLLWLILHQGVRYEERGPAVSAKSKRTRAARMIRELKKLGYRVEGGPVPAAAGA

SEQ ID NO: 375783 - protein, 370 aa, unidentified
MTSMTVGPTEQVVSRQIIIGVDTHKYAHVAVALDHLGARIAAQHVAANREGYAQLEAWAASLAGNGRVLAYGVEGTGSYGVGLASFLRRAGHRVIEVNRGDRRSRRSNGKSDSLDAEAAARAVLGGQAKAIPKSADGTAEMIRQIKIARDTARKARTSAIVTLKALIVTAPADLREHLAGTSDKVLIDRCASLRPGAVTSPTASAKHALRTLAKRYQALAAEIRDHDTILDDLTRAHAPTLREGLGIGADTAAEVLIVFGDNPERVHSEAAFAKLCGTSPVPASSGMTNRHRLSRAGHREANAALYRAVIVRMRFHQPTIDYVARRTAEGLSKRDVIRCLKRYLAREVYQAVMTDHRARQVDASQRSLDL

SEQ ID NO: 375784 - protein, 355 aa, unidentified
MNQEKYIGMDVHQATISVAVMDGRGKLIMECILETKAGTILEFIGGLQGSLSVTFEEGTSAAWLHDLLKPHVAHLIVCDPRKNALLKDGSKSDRIDARKLADLLRLNKLNPVYHGEHGVRTLKELGRSYLTITQDLTRVMSRIKAVYRSWAIPCSGTTVYAPRHRAEWLGKIVEPGVRRRAERLYQQLDLLQPVRQQARHDLLVESHQHQAVKLLRQIPAIGPIRSALLIALLQTPHRFRTKRQLWAYSGFALETRDSGEYRMVRGKVRRNRERLTVLGLNDNHNHDLKNLFKGAAISASTRPGPLYDFYVGLLQKGMRPTMARLTLARKIATITLTMWKKGVDFDAQQLNRQAA

SEQ ID NO: 375785 - protein, 356 aa, unidentified
MAGYYLGVDIHKRFSQVAVMDRQGVVVEQRRVEHADREGLREYFARYAGSQVAMEATVGWPWMADELEGLGLRLRLAHPAAVPLIARSRLKSDQVDAQVLAHLLRTDFLPEAYLAPPEVRDRRELLRTRLGLVGMQTMVKNRVHGLLIRCGEFFPGSDLFGARGLAWLRAVELPPCKRQVLDLWLGVLEMIRERVQRLTKHLYRWLGEREEVRLLQTIPGVGPITAWTLLAEIGEIERFPSPKKLSAYAGLVPYTRQSAQKLWQDRLCKQGNAFLRAAMVEAAWAALRGDPGLGARFQGLTKRMGPQKAIIVIARTLLEIAFAVLSERRAYRPFALRRGRRLRATVAGPGSASPAL

SEQ ID NO: 375786 - protein, 346 aa, unidentified
MSHPTKGDTTRQVERIGLDIAKQSFQVHGVDAQGKVVIRKQLSRSKVLAYFAHLPPCLVGLEACGGAHYWARELGKLGHEVRLLAVAMIHPYRTGQKNDQNDAEAMCEAVSRPRTHFVPVKSEAQQAVLTVPRARELLVTERTALANQIRGLLLEYGIVIAQGMQRLRRALPDLLTTETLPELVREVGTELRERLGELDRRIADYDHRIEQLAKQNETTCRLMQVEGIGPITATAIVATIGTGAAFQHGRQFAAWLGLVPKQHSTGGKTVLGRITKHGNVYVRTLLMHGARAVLQFSAKRTDRKSRWVEAVRHRRGNNIAAVALAAKHARILWALLAHGQEYQLAA

SEQ ID NO: 375787 - protein, 401 aa, unidentified
MSTAHERIWVGIDAGKGHHWAVAVDSDGETLFSTKVINDEAQIITLIDTARDRAGEVRWAVDISGRASTLLLALLIARGQQVVYVPGRTVNRMSGAYQGEGKTDARDARVIADQARMRPQDFQHLDTPPELVTTLRILTTYRADLIADRVRLINRFRDLLVGICPALERAFDYSAAKGPVVMLTEYQTPAALRRIGVKRLTARLERRKVRGAAAVAAKAVEAAQSQMTALPGEKRAAKLVCDLAHQLLALDERIKDNDREIRETFRTDDRAEIIESIPGMGPILGAELVAIVGDLGGYKDAGRLASHAGLAPVARDSGRRTGNYHRPKRYNRRLRHIFYLSAQTAMMRPGPSRDYYLKKRSEGLLHTQALLSLARRRVDVLWAMLRDKRLFTPAPPVTQAA

SEQ ID NO: 375788 - protein, 419 aa, unidentified
MNYVGFDWASRAHDVTVLDEAGGVLDRWAFPHSETGWVTTVDRLARHGSAAEVPVIIERTCGLIVDRLLAAGHPVVPVHPTAFYAARPRWGASGAKSDPGDSYKLADYLRTDGHRLRRLTPTDPGLHELQALVRLRDDQVRARTAATNQLTAILDNYWPGPKQLFMSLASQIALAFLTDYPTPTSAAHLGEARMAAFCRRHAYRGGKSPAELLSRLRAAPVAPVGLPPATLAAMVTAQVTVLKTLQTVISDVERLIAVRVVAHPRSNLFENLPGVGMINLAQLLAEVGPILDRVDSAEQAATECGAAPVTRSSGQTRGVYFRWAANTRARKAITSFAHNARMQDDWAAALYADARARGKRNPHATRIVARAWLRVIWACWTSGQPYNPDRHHSSRFLHRCHPAGAQARSRWSPPPEERS

SEQ ID NO: 375789 - protein, 435 aa, unidentified
MANYYHLPVVGIDVAANFSVVTALKPNGDIFIKNVKIIHSLDGFSKLLTLIQKIEKEFNVKSKVFCESTGIYHLTLLHYLINQKIDISVINPLITNSNKNSNIRKVKNDNLDSLSIARLGKFDDIKVSSYTSEEFLHLKFLVREYYKIVDLRANLKKSFSNNLYIHYPGFNKAFTDNTGKSALSFIKTYPTPDDFFNAPKLEVIELLKKSSRKGSKWAATKYNTIFAIATSASKIGLNTALFGTKVKRFIESYTFYSNQIDDLFAEIMDYIDNATFGETFKTNIQLLKSFKGVGDISAITLLTEMSSIDNFSKPSQLVAFFGIDPSVNQSGKFVGDRNKMSKRGTAIGRRALYAIALASIRKTKNKVPMNQLLYDYYHKNLKSKKKKVRLVAIMNKLLRYIFSILKNQKPYVVRNPKFHQRMFLESKTRLDKKTA

SEQ ID NO: 375790 - protein, 384 aa, unidentified
MNNDSIIFIGLDTHKSFIQVAVLQGHRGAQPQHLGRIKSNKSALVKLALQLQSKYPKATLHFVYEAGPCGYWTYRLLTSIGHCCYVVAPSLIPKKPGDRVKTDKRDAAKLAKLFKAEELTPIYVPEAEDEAIRDLSRARETAMKDLKDAKFQLKGFLLRNNVQATVNDNWSKKHLRWLTDLILPHYSQQIVLQEMIITISERMQRLQRLDNELLHQVKNWRYYPVVKAIQAMRGVRLLVALGTIAELGDLRRFDHPRKLMAYLGLVPTESSSGGKTRRGSLTKCGNSRARRLLVEGAHTYKHKANISVELQLRQEGLPKEIVDIAWQAQQRLCRRYQRLLQKGKHRNVVVVAIAREMIAYIWAIAREVIVSDVDPKTRIARLPA

SEQ ID NO: 375791 - protein, 356 aa, unidentified
MSYDVKYIGMDVHKEAIVIAVLNESGKLVMESVIETKASSILQFLHGLRGELHVTWEEGTWAAWLYDLLQPQVQHIVVCNPRRNALLKEGSKSDKVDAGKLANLLRTGMLRPVYHGENGLRTLRELARSYQTIGKDLTRVMNRLKALYRGWGIPCTGTQVYAPRYREEWLNRIPHAGVRRRAELLYQQLDGLQGLRRTLRPELLAESRKHKAAKLLRQIPCIGPIRAARLIALMQTPHRFRSKRQLWTYSGLGIETHDSAQYRYVGGQVQRSKKPQQLRGLNQNHNHEMKEIFKSTATRASCSTGPFHDFYAALLAKGMKPEMARLTLARKIAAITLTLWKKEERFDAEQLKTQAA

SEQ ID NO: 375792 - protein, 343 aa, unidentified
MDIIATIGLDLAKSVFQIHAIDSSGDVIVRRALRRAQLLDFFRKLSPCLVGMEACASAHFWARHIRACGHDVRIIPPIYVKAYVKRSKTDAADAEAICEAVTRPTMRFVPIKTPEQQAAGMVLKTRDLLVRQRSQTANAFRAHMSELGVVAAAGMASLAKLAEAIRDPEYRDIPEVARQALLEMVEQIDTLSVRIERLDRDILTCVKEDETARRLTTIPGVGPIIAATVRAAVHDAHGFRTGRDFAAWTGLAPRAHSSGGKERLGSISKRGNRQLRTLLIVGATSIIKLGKRGVKLPQWLTGLILRKPYKLVAVALANKMARIIWALLTKGGVYKKSPVAIAA

SEQ ID NO: 375793 - protein, 342 aa, unidentified
MDEVTIIGIDLAKNVFQLHGAAADGRPVFRKKLTRLQFQRFMASQPPRTVAMEACPGSHYWAREMAKLGHTVKVISPQYVTPYVKRQKNDAADAEAIAEAATRPHMRFVEPKSAEQQARAVVFRVRQKVIAQRIELVNALRSHLYEFGFIAPVGLQHLPKLIAVLEDESSDLPRPARIACRGILRQIESLGAEIAQLDAQIAELSKESRWARLLQTMPGVGPITAMAIEAFAPPMETFRRGRDFAAWLGLVPRQSSSGGKARLGKVSKAGQHDIRRLLVIGAMAAMVGACRRGIPEDTWLGKLMLRKPRILVAIALANKMARRIWAMLTKGESYRDPALAAA

SEQ ID NO: 375794 - protein, 319 aa, unidentified
MREDITQTAGIDTGKKKLNLGFWPKAERLAVANAPEGFERLAAFLEEHKVKRVGIESTAIYHVAVSEFLRARGFDVIVLQPLQVKAFAKVHLQRAKNDKMDPEMVAGCAAIQTKAHTPHSPEIIRLAEHLTFIEQCDDNAARLKTQLERFTNEQYRKKIKQEIARFERMERHEVKILEKELRLNRCLSERLDLVLSIPCVGLRSALAMLIRMPELGTLSREQAAALLGVAPMDDDSGDHKGKRFIQGGRARPRKTLYMAAFSGAMHHNPQLKAFYLRLIKRGKEHNLAIVACMRKLLIMINAVLQRGTPWIREGMPCPQ

SEQ ID NO: 375795 - protein, 340 aa, unidentified
MKLCGAMDLHSNNNVTVLSNEKDEVVFRKRLPNDLKLILQQLAPYQSEIEGIVVESTYNWYWLVDGLMEQGYRVHLANTAAIQQYNGLKYTDDDSDARWLAHLLRLGVLPEGYIYPREQRPVRDLLRKRGQMVRQRTTNLLSIQNLFTRNTGSSLSGNEIKGLQVEDIDGNVAVSDLALAIKANLAVMQSADEQVQILEQTVRERVKLRAEFKFLKTVPGIGQILALTMMLETGDIRRFPSVGNYASYCRCVGSQKISNGKKKGKGNTKNGNKYLSWAFVEAANFAIRFSPKIKSFYQRKKSKTKGIVALKAVAHKLCRACYYIMRDRVAFNMTKAFGQN

SEQ ID NO: 375796 - protein, 345 aa, unidentified
MDTIGLDLHKRESQLCILTSDGELIERRIATTRARFTEVLGGRPRARILLEASTESEWVARHLESLGHEVIVADPGFAPMYATRSRRVKTDKRDARALCEACKLGAYRAIHRVSDAQRHVRAELAVRDALVRTRTRYVALIKAAVRREGGRLGQGNAERTGAKLAAIALSAATRAELAPLVAFLEPLNAAIADADRRLALLARDSAPARLLQTMPMIGPVTALGFVSALDDVMRFEGPHQAEAYLGLVPSERSSGEQQHRGRITKRGNTRTRWLLVEAAWRIRRSKAPALAPLNAWADRIAARRGKRVAIVALARRLAGILFAMWRTNTPYAAGQARREDVAPAA

SEQ ID NO: 375797 - protein, 351 aa, unidentified
MPRKSSVRTVTTIGIDMGKTTLHMVGLDLCGAIVLREKVSRGRIASRLANLPPCLIGIEAGMATHYVARELAALGHDVKQVPPTYAKPFRQGHKNDFRDALAVAEAVQRPTTRFVPPKSNEQLDLQALHRVRSRLVSQRTAVINQIRGFLLERGVIVRQGLRFLRQLLPDILAKRTDVLSPRMVRIVSDLAGDWRQLDDRIETVTDEIETLAKADDSCRRVMTVPGIGPIISSAMVAAIGNGSAFSRGRDYSAWLGLVPKQMSTGDRTILGRISKRGNSYLRMLFIQAARVILLRPANWPKHGFGAWLVRAIQRLHPNVLAAALANKLARIAWTVLAQERSYEARVTKAEA

SEQ ID NO: 375798 - protein, 344 aa, unidentified
MKYFAGLDVSLRDTAICVVDEDGIIVTEGKAASDPDDLVRWLVATGLTIARVGLEAGPLSPWLHAGLREAGLPAICIETRRMKGATAAMAIKTDRNDARAIAHAMRVGWFTAVHVKTAESQELRLLLSNRRTLLEKRVAIDNEIRGTLKAFGLKLGAVTVAAFEARVLELLAKRSRLLAMARPMLIARDALRQQCEVLHRMVLKAVRASAVCRRLLSVPGVGPIVALTYTTGVDDPARFLRSRDIGPHFGLTPRKYASGEIDRNGSITKAGDGAVREVLVQAALTLLTRVHRWSALKAWGMAVAKRRGLRRAIVAVARKLAIIMHRMWADTTTFNWSRETIALA

SEQ ID NO: 375799 - protein, 305 aa, unidentified
MNQSLYLGVDVAKSHLDFDAPVGRIANTPAAIAAVLRQLPAGTHLVCESTGGYETGLLAGTLAATVPVSVVPPQRVRHHARSMGRLGKTDRIDAALLSDYGRKHRPPVHRALEPERQRLRQLLRARTQLLELQQLETNWQEHATDLPRLRRQAAQRAKLLGRQLEELEQEIRALVATAAVLAPVQRLQQVQGVGEITAWTAWAEMPELGQLEAGQPAALAGLAPHPHDSGQHRGHRQVQQGRPQLRRVLYMAAVSASQHNPVLKPLYHRLIARGKPPKLALVAVARHLIELLNTLIKNPNFILVD

SEQ ID NO: 375800 - protein, 316 aa, unidentified
MIQRVTGFSRVLGCDVGKDEIVVFDTASKRIVRLANRPDRLAAFAASLDANCLAVCEATGGYELALLSALLEAGVPAHRADARKVKAFIRSFGTLGKTDAIDARALARYATERGRELPIWRAREETRLKLQAFVLARRDLVADRLAYQNRRDAPGAEPLRPHYDSLLGEFEARIEALDAQIQALSESCAPISGAVKALTSAVKGFGLKTAVALIALLPELGTTTHKRIASLAGLAPHPVQSGAADRYRFVRGGRPEVKRTLFMAALSARKHNPTLKAFYERLVANGKKPIVAIVAVMRKLVTYANAILKAEFAAAT

SEQ ID NO: 375801 - protein, 408 aa, unidentified
MNPLYVGIDVSSKSNVVYFMLADGSKHSNFSVANSHDGSTQLVKRILSTIESKSLDTVLIGLEATSVYGDNLVYFLREDASLASFNRKIYVLNPKQVKKFKDAYNDLPKNDYVDSYVIADCLRFGRINKEVYIGDYRYKALQNLTRARYFAVCNLTKEKQRFMNVLFKKYSTMTQEKVFSNTFSTTALAVYDEFESAEALAYMDLQELTAFIIEKGKNRFPDPDAVAKAIQKAARSSYRLPKTVNDSVNQVLSISITSIKALEAQIKEFDKAISAQMELLPNVLISIPGIGPVYSAGIMAEVGDINRFDNQAQLAKYAGLAWTQYQSGDFEAQNTRLIKSGNRFLKYYLCEAAFSLVRCDKEYKAFYHQKYKEVNRYQHKRALALTARKFVRLVFRLLKDNRLYRPAE

SEQ ID NO: 375802 - protein, 342 aa, unidentified
MDHFAGMDVSVKETSVCIVDEAGKIVREVKVASEPEALLAALKNPVYHFKRVGLEAGPLSQWLFSALAEAGLPVICVETRHMRAVLKAQINKTDRNDARGTAQMMRVGLYRPVHVKTVRSQKVRMLLTHRQLLLSKAIALENDLRGTLRNFGLKVGMVGKAKFEARIRQLVENFPDLAVLVEPMLIVRRVLREQIVILHRRLLAIVRDDEVCQRLMTTPGVGPVVSLTYRATVDIPARFRKSKSVGAVFGLTCAKYQSGEADRDGRISRCGDEMMRTMLYEAAQAMMRSKKWSWLKAWAMQIARRRGMRKAIVALARRLAVIMHRIWVDGTEFQWTREQIAA

SEQ ID NO: 375803 - protein, 350 aa, unidentified
MEQISRIGMDTSKHLFQLHGVGAAEKPVLRRTLRRRDMITFFERLAPTRVAIEACGASHHWARLLRGFGHEVQLIAPQLVKPYVKRGKNDAADAEALCEAMSRPTMRFVPVKTAEQQAALMLVKLRDRLIRNRTQLVNAIRGYAAEFGIAGAKGIAHVTTLLARLQADVTLPALARELFVMQAGEYAQVQAKIAVVEAKLLAWHRADPCSQRLAGVPGIGPIGATMLTMKTPAPEAFRSGRQFAAWIGLTPKDHSTAGKARPGVITRAGDEGLRSVLVVGATALIRRVREGRCRDGDRFAAWVGKLLERKPPKLVAVALANKLARVAWKLMITGEAYAVKPASMGAASAL

SEQ ID NO: 375804 - protein, 410 aa, unidentified
MEIVREDSAGLDVHKKTVVVAVRTPRVREVRTFPTTTGALLEMVDYLEAHGVRHLAMESTGVYWKPVFNLLEGTDMEVLLVNARHMKQVPGRKTDVKDAEWIAELLQYGPLEGSFVPKREHRELRDLLRYRREVIQQRGHEVQRVEKTLQTANIKLSSVASDILGVSGRAMLEALIRGEQDPAALAELARGRMKSKKAALAEALEGSIGAHQRFMLRQHLDLIDTYDRQVQRLDEEVEKRMDPFEVAVTFICEIHGLGRRTAEELIGEIGTDMSQWKSERHLSSWAKVSPGNNESGGRKRSGRTGKGGPVREILIQAALNVSKNPNTYYGAMYRRLCKRGSKERALVAVAHALLVAIYHMLRDGTIHRDLGPNHFDERRRQQSARNALRHLQRLGYNFTLEELEARRVAA

SEQ ID NO: 375805 - protein, 345 aa, unidentified
MSELYSGRQFVGMDLHRRRSVLVRMTESGEHLETVRIVNTGDRLADVMSRAGECPEVVLEATYGWYWAADALAELGASVHLAHPLGVKAFSYRRVKNDERDAADLADLLRMGRLPHAWIAPPETRELRELVRHRAKLVAMRSQCKAHVHAVLAKGGIWVPMTDLFGVEGNLLLDKVTMPAPYKARIASLRRFIEGFDAEIDLFTGLVQRRLTHDAGYTAIQQIPGIGPVLAAVLVAEIGDVHRFAGPAQLTCWAGLTPSHHESDTTVHRGRITKQGSRLVRWAAIESVKILPDTSRIGAIREQVAHRRGNRNIGAVAAARKQLELVFYGLRDHHVRALHRSPHAA

SEQ ID NO: 375806 - protein, 343 aa, unidentified
MHAVTTIGLDIAKSIFQVHGVDAEGNVVVRRKLQRRYIVAFFQKLPPCLVGIEACASSHYWSRELQALGHTVRLMPPAYVRPYVKRHKNDAADAEAICEAVTRTNMRFVATKTPEQQSCLMLHRTRHLFIRQQTAVINATRAHLAEFGIVAPVGRNGVEELLNVVADSTDKRVPEIARACLAALGAQLRMLKTQVLEFDRLIMAWHRSNETSKRLDEIPGVGPALATALVASVGDPRAFRSGRDFSAWIGLVPKQNSSGGKEKLGNISKRGDRYLRSLFTIGALAVIRYAKLHGAKHRPWLTALLARRPTKVAAIALANKIARMAWAMMAKGERYKEPVALAM

SEQ ID NO: 375807 - protein, 354 aa, unidentified
MTTIAHPELSRITVGVDTHGDVHVAGALDQLGRHLATTRVATTPAGYRALLAWARSLGEVEAWGVEGTGCYGAGLVRFLAAQGQLVWEVNRPDRQARRQRGKSDPVDAQAAARAVQAGQATAIPKAGDSIVEMVRCLRVARTTAAKARTQTANALRALVVTAPAELREQLRDLPAAQLAKTAARLRPGPIATTTAATRLALRLLGERYQALDAELARVDAELDRLTTQAAPELRQLCGVGPEIAGALLVAAGDNPLRLRSEAAFSMLCGASPIPASSGKTVRHRLNRGGNRQANTALYRIVVVRLRWHQPTRTYLARRTRQGLSKREIIRCLKRYVAREVFAALQAPTALAATT

SEQ ID NO: 375808 - protein, 380 aa, unidentified
MRNDIRFVGLDVHAETIAAAVVEPDGELRFVGTIPNRVEAIRRLMKRLGPAARLRACYEAGPTGYVLYWQLTELGVHCDVVAPSLVPVKAGDRVKTDRRDAEKLARCYRSGDLTPVWVPDAAHEALRDLLRAREAAKSDQLRARHRLGKFLLRHGRRPDPGIRPWTCKHMEWIKRQVHFEVAAQEATLTDYITEVEHVGLRIERLERAIDEAVSAVPDRMRAVIDALQALRGIRQISAATIVAEVGELSRFARPRQLMGYSGAVPREHSSGERTRRGGITKTGNAHLRRIVGEASWAYRHRPNLSRLLRQRQEGLSEQIKEIAWKAQHRLHQRFRKLTARGKAKQQVVTAVGRELLGFIWAIGTTVERGLTEPADQRRVA

SEQ ID NO: 375809 - protein, 358 aa, unidentified
MEYFAGLDVSIEETAICVVGDDGKVVLETAVETDPAAIANALERYAGRLRRVGPLSPWLHPGLRELGVPAVCLETRHVRAALSAQRNKTDAADALGIAHIMRTGWFREAHIKSETCYRLRLLLVRRRNLKRKFLDLENAIRHSLKVFGIRLGKVSRGGMEKAVREAVADDPMTAGLMDCMLRARAALWAEYLTLHKLVTQIAMRDELCRRFMAIPGIGPIAALSFRSAIDDPTRFRRSRDVAAYFGLTSKRWQSGTSIDVKGRISKAGDADVRRALYEAASAMLTRFKGNDTIKAWGLRLAKTKCHAKARVAVARKLAVVMHAMWRDGTFYIGDPDASEQDIAAWNAAKVQRLSLANS

SEQ ID NO: 375810 - protein, 421 aa, unidentified
MNQLLGEPYTAYIGIDWASSKHDICLQVAGGEEREFERIKHTPEAIEEWAQALYQHLGGPIAVALELSEGPIVSALQKYDFLVLFPIDPKRLAKYREAFVPSGAKDDPTDAEFAMDYLMRHPEKLTALKPESVPMRKLRYLVEARNRIRGDQSRCVNRLIQALKQYYPQAVDWFNDHNTLVFCDFLKQWPTLATVQRARKARLERFFKEHNVRFARLIEDRIQAIKAATPLTRDEAVIEAHQLQVEILLEQLRLTIKAMKCFDAEIAAIAAQFPDYGLLYTALPGAGKVIAPRLLAAFGEDRDRYNCAAQLQKRSGIAPITKRSGNSTWVHWRFQCPKFLRQTFIDFAAQTINKSAWAGAYYRQQRAKGASHHMAVRALAYKWIRVLFRCWQERTPYDESKYLETLRRRGSPLLKQLAEAA

SEQ ID NO: 375811 - protein, 363 aa, unidentified
MEYIAFDAHKHYTLASVARADGRLVREQRLAHERGAFQQFLARCEPGSPVALETVGNWYWIVDEIEGAGCIPKLVHARKAKLMMGQINKTDKLDARGLNTLQRNGTLPTVWIPPGELRDQRELPRTRMALVRQRTQLKNRLHATLAKYALHDVEVTDLFGVRGRQLLRQRCELLPPHTAYATRQLLDQVESLDHQVTGFEHRIKSVFKPTLAIQLLTTVPGIGLTLAVVIALEIGDVTRFPTAEKLASYAGCTCRVHASGDKLRYGRLRPDVNRYLKWAFIEAANAICLMRRRHPHRHASRLYERIARRKGHPKAIGAVARHLAEATYWLLSKQEAYREPQASAVSSTGDKRDFAMSSRKLEF

SEQ ID NO: 375812 - protein, 337 aa, unidentified
MEYFAGLDVSMAETHVCVMNRDGAVVLEVKVPSTPPDIAAALAQAPACERIVFETGRMAPMLYHGLSQLGLPIVCIESRQAYQALKSLATHKTDRNDARGLAHLARTGFFKPVHVKSLPAHALRSLIIARKKLVGQRVTLENQIRGLAVVFGVRLPRALTAAFIRQALRASEGIAGLSAAMRGLVAARAAVLGAIVAIDADIRRMVRASEACRRLMAIPGVGQLTALAFTAAIDDPGRFRRSRDIGAYLGLVPRRYQSGEVDYTGSISKCGDRRVRTLLYEAANVMLTRYKPALKLKDWALAIAKRSTMRKARIALARRLAIIMHAMLRHGTEFKPA

SEQ ID NO: 375813 - protein, 386 aa, unidentified
MGQRPFIPQEYDVFAGLDVDKKSISVTFSNHQQGFVRSLHMPYSVEQLTQHVRKRFADQKVAFVYEAGPTGYGLYDGLVAQGYKCLVVAPSMIPRAPGQRVKTNRLDSRGLSENLRGGQLKSIHVPSPIYRELRHLTQLRDTLVSEVAGMKQRIKSLLLFEGIAFPVAPAGSQWSLKVKAQLRKLQCSKSVRFKLDQLLDSVEFSEKQVVKVTKEIRGFCQNDPELSQCIKYMMSVCGIGWIVASQLLARIGDWRELQNVRQLGGFLGLVPTENSTGDKTDRGSITHTGDGRLRSKLIQASWSAIRQDGELREFFRSVCQRHPRGVGPRVAIVAVARKLSARISAVLMEQRPYVVRQKVHSAPLTQEETSPQGTTRRRGEPGEKNS

SEQ ID NO: 375814 - protein, 371 aa, unidentified
MGKDHRIKFIGLDVHQHSITLAIADNGPEGEVRLYGTIKNTVEALDKIIRKLVSTGAELRFVYEAGPCGFVLYRHLSGNGFSCIVAAPSMIPKKAGVRIKNDNRDAISLARLMRAGELTAIYVPDLEDEAVRDLARARDDARVAERKAKQRLSSFLLRNDFIYAGKKKWIKSHLNWLADLKMKHPIQQIAFQEYLNAVHECSERVLRLKEQIRQVATEWRWAPTVKALQALRGVSLLTAVITVAEIGDFSRFQNPKELMAYLGLVPSEHSSGDKTRRGGITKTGNSHARRICVESAWSYRYQARVTQLLLKRQEHLPQNIRTIAWKAQVRLCARFRRLRARGKPVQVVIVAIARELVAFMWAIARQIPAVA

SEQ ID NO: 375815 - protein, 325 aa, unidentified
MFVGIDVSKNTLDTALVCGAGKPRHKVFANSPAGHAQLLSWLQEQQEQGVAVAHACLEATGTWADAIAVALHEAGHKVSLVNPALVRAFGQSQLKRTKTDKADAQLIARFCQMHQPPAWSPPAPEVRELQALVRRLESLEEMHLMEENRLASGVSCQEVRADLEEHLADLQARIEKTRQQIKEHIDQHPDLKENAQLLESIPGIGATTAALLLAEVGDITHFDNARQVAAFAGLVPRIRESGSSVRSRARLSKVGSARLRKSLYFPAITALRFNPLIKALGLRLSAQGKPKMLIIGAAMRKLLHLAYGVLKSKRPFDPAFCLSTP

SEQ ID NO: 375816 - protein, 356 aa, unidentified
MNIRRVQDFVVKGKEVFVGLEDSKKTWKLAVRCDGLLIHQVSMEAEYGLLKRYLGNKFPECTIHVIYEAGFKGFNLYDRLSEDGIDCVVIPPHLVTREKVNRVKTDKRDARRLAFILEHHDFKEGCHVPDRERREDRQITRTLIAIQKDIVRTRNRIRKFLDFHGIDISFPDKWARREVENLRQLSLSAPLKTSLDVLLTQLEQLWNHQRSLRNALRVLCHKERYHKAFEIARSLPGIGWFTAIRLILELGEDLTHFTSGKKIAGFVGLGVAEHSTGETEQKGHITGMGSGFIRKTLIENSWVAIRKDPALLSKFMRIWRGTGSKKKGIVAVARMLIVRLRACVISETPYTVGIVT

SEQ ID NO: 375817 - protein, 348 aa, unidentified
MDHIIRIGMDTSKHVFQLHGVNAAEEPVLRRKLRRNDMVVFFERLAPTIIAIEAAGASHHWARLLRSFGHEVKLIAPQLVKPYVKRGKNDAADAEALCEAMSRPTMRFVPVKSAERQAALMLLGLRDRLVRNRTQLANAIRGYAAEFGLAAAKGIAHLAPLLARIQSDESLPGLARELFAAHAQEYAQLQAQIDEVEGKLMAWHKTNPGSRRLAQIPGIGPIGAAMLIMKTPAPEMFRSGRQFAAWIGLTPKDHSTAGKVRLGVITRAGDEGLRSALVVGATAVIRHLRNGKGRSMLSAWVEQLLKRKPPKLAAVALANKLARIAWKLMVTGETYTAKPRPIASAGIA

SEQ ID NO: 375818 - protein, 422 aa, unidentified
MSKRRYSATKFNAVNWAGIKEQVAGQRTVFAIDVAKEDFVGAVMSSDRTVLVTVKWTHPQQTRALVEQLEGLARTAMVEAVMEPSGTYGDALRCQLSQAGLVVYGISPKRVHDAAEVYDGVPSLHDAKAAHVIGRLHLEGTSQPWREPSVQRRSLTAQLRLLELYKGRERAGVSRLEAQLSRHWPEVLQVLEPGSVALANLIATYGDAARVAAEPVAAAALLRRAARAALAQEKIAAVLASAEQTVGLPCVQAERQLLQGLAQDLNETREALHRLEREVQGQVMADATLQRMAAVVGKTTSAVLAAAQGLPQDYPNAASYVKSLGLNLKERSSGKHKGQLKITKRGPGVSRHYLHFAAMRQVYYDPIVQQWYQGKVRRDGGLTGKAMVAVMRKLAKALWHVARGEPFDSGKLFNCKQPQVVA

SEQ ID NO: 375819 - protein, 346 aa, unidentified
MDQIIRIGMDTSKHFFQLHGVDATERPVLRRKLRRHEVLEFFAKQPPTIIGMEACGAGHYWARELRKHGHEVKLIAPQHVKAYIKRNKNDGRDAEGLCEAMSRPTMQFVPVKTEEQQAALMLMGVRQQLMDRRTQLSNAIRGYAAEFGLITAKGLVKVEPLLARIAQDESLPALAREMFTLQGRDYARLQVELKAVEARLMAWHRANADSRRLAKIPGIGPIGATTLVMKAPNPRLFPSGRHFAAWIGLTPKDHSTAGKTRLGKITRAGDEMLRSVLVAGATAVIQQAKKGRGRSSPWLVALLARKPPKLAAVALANKTARIAWKLLTTGESYDGARMPVASALAA

SEQ ID NO: 375820 - protein, 336 aa, unidentified
MATIVTVGLDTSKSWFQVHGADAAGGTVLRTKLARSKVLTFFANLQPCLIGMEACGGAHHWARELGKLGHTVRLMPARYVRPYVKTNKHDMADAEACCEAVQRPGMRFVPIKTEEQQSMLMLHRIRDLLIRQRTASVNALRGHLAEYGIVAAKGSARARELMALATSADCVPALAREALSHLVEQIRDTERRIATFDKQIMAIAKSNEPCRRLMTIPGVGPFIASALTASVGDPEYFSSGRHLAAWLGLVPRQYSTGGKASLGGISKRGDGYLRKLLIHGARAVVYRARRKQTPGAWIAGVLMRRPFNVAAVALANKTVRIAWAILVGDETYRAAV

SEQ ID NO: 375821 - protein, 371 aa, unidentified
MDESSKTLYVGLDVHKDSIAVAYAPEDRGAEVVSLGSIGTRQCDVDKLIRKLQSKGATLVFVYEAGPCGYWLYRYLTRKGLSCHVVAPSLIPRKAGDRVKTDRRDAVMLARLMRSGDLTSIYVPGIEDEAIRDLSRGREDAMRDLKATKYRMKAFLLRQDIRYEGRATWNAAHLRWLSEVVCPTRAQQIVFQEYVRAVTEQHERLQRLENELHEEVKGWRLYPVVEAIQALRGVELTGAVILIAELGDLTRFDTPRQLMSYLGLTPSEYSSGERRRQGGITKAGNTHARRALVEGAWAYRYPAKVSRHLQLRLEKLPAEVQAIGWKAQVRLCKRYRQLIARGKHANQVVVAIAREMAAFAWAIARTVPLAP

SEQ ID NO: 375822 - protein, 441 aa, unidentified
MAMRKRDDDLVFPNAAGIDVGGSSHWVAVPRHTCEEPVREFGAMTDDLNAMADWLLACGVDTVALESTGVYWIPVFEVLEQRGLKVFLVDARQMKYVPGRKSDVQDCQWLQRLMSQGYLRAAFRPTDEVCVVRAVARQRDVLLAEQASWVQRMQKALVQMNIQLTEVLSDVMGLTGQAIIRAIVAGERDPKVLARHRHSRVKASEHDIARALTGNWRDEHLFVLRQALAMYDDISRHLGECDAKLQGLLSQLGSAKVDVGKVPRAGSKTRAEFDTRQILANWAGVDLTRINGLGLAAVLKILSEVGPDLSRFANVKHFCSWLGLCPGTKISGGKVLSSKTKRSGNRVRQALKMAAMSLSHSDSALGAFYRPLSGRMDKPRANTATAHKLARMVYFMLTRGEAYVDQGQQHYEEQQRQRSIAALKRRAAALGFAVMPTALPA

SEQ ID NO: 375823 - protein, 332 aa, unidentified
MKITLGVDIAKDKFDCCLLAEQMEKPGQFANTPRGFKQLLRWLAKEGGGPSEILACMEATGIYGEALLAFLHQANIAVSKVNPAQIKHYSRSLLTRNKTDRLDARLIARFARERFAQGRLRLWTPPRPEVARLRALNRLLIARKEQCARERRRAAMVPKSLRPHTLAMLRSFARHIADIQEEIDQLIAACPELARKRRLLCSIPCVGPVTAQTVLAELPEDIASARSAAAYAGLTPQREDSGKKQGPARLSKTGNPHLRRAFYMPAVVGRKHNQRVKAQAQRLKDRGLATGQIIAAGMHLLLRVCYGVIASGQPYDPQWQNTRPKSGASPSA

SEQ ID NO: 375824 - protein, 349 aa, unidentified
MSQTLNAAIAVIGIDIGKNSFHVVGLDARGAIVLRQRWSRSQVEARFANMPPCLIGMEACVGAHHLSRKLHGFGHDARLMPAKYVRPYSKGQKNDFRDAEAIAEAVQRPTMKFVATKTADQLDLQALHRVRERLVSQRTGIINQIRAFLLERGIAVRQGQRFLRAELPRILAAPPNVLSPRMVRVIEDLAGDWRRLDERIEGLTGEIEAVARQEAGCERLMSVPGVGPIISSAMVAAIGSGDAFSKGRDFAAWLGLVPRQMSTGDRTILGRISKRGNRYLRVLFVQAAWVVLIKPKSWERHGLKPWLEAAKKRLHHNVLAIALANKLARIAWSVLARGRVFEASKLQVA

SEQ ID NO: 375825 - protein, 341 aa, unidentified
MDIVVLGIDLGKNSCSLAGLDASGRVILRRRMRRSSVESFVKGLGRCIVAMEACCGAHHLGRVFAAQGHETRLMSPEYVRPYVKAQKNDELDAEAIAEAATRPTMRFVALKSQTQSDIQALHRARERLVSERTALINHLRALLLERGIVVPQGRRKLQEELLVYADEDGIEAVSPRIRLLIEDLRSEWRVLDERIAAFDGEFVRMAREDEAVRRLTTIPGIGTINATALAAAVGDARAFGRGRDMAAWLGLTPRQMTTGGKPRLLGISKRGNRYLRKNLIHGARAVLPYLVERETPLGRWARGLLARAHKNVVVVALANKLARIAWAVLARGCTYEAEAMA

SEQ ID NO: 375826 - protein, 350 aa, unidentified
MQKIYIGVDFHARQQTICYLTTDSGELRFHQLLHQDKAAVRAFYAQFRGSVVVGLEASGYSPWFERLLEELGCEVWLGHASEIRRRARWRHKNDRRDAELILDLMLHDEFPRLYLPPLPSREVLRMLRYRQKLIKMRTLGKNSLQALALQSGLAKGPHLFTKAGLQELRRAPMSAAMQWQREQWLQLLEPLNQRLLETMLWLKQQSQADARISRLRTHPGVGLLTALCLVHSLEPVSRFSNRRKVTAYAGLDPLERSSAERQRFLGISKAGSRVLRFLLVEAAHTAIRKDAQLGQFYQRLAKRHGRPKAKVAVSRKLLIRTYIMLRDEIDYAEFQRRAVAARPVLPAHGL

SEQ ID NO: 375827 - protein, 340 aa, unidentified
MGNITAIGLDLAKKVFQVHAVDEAGSVIMRKQLRRGQVLAFFAGLPSCLVGLEACATAHHWARELTALGHVPRLMPPAYVKAYVRRNKNDVADAEAICEAVRRPSMRFVPIKTTEQQSALMIHRARDLLIRQRTMLVNALRGHLAEFGLIEAQGLHKVAKLIAIVLDEEDRRISDIARQVLTVIVSQIEDTQTRIAGLEKQILAWHKNNPVSQRLATVPGIGPIIATAIAATVADPKTFCSGREFAAWLGLVPRQNSTGGKARLGRISKRGDSYLRRLLVNSAHTVLLCSKQAKADPWLRSLLSRKPRLVVAVALANKTARVAWAIMSRQDTYRNAALAA

SEQ ID NO: 375828 - protein, 340 aa, unidentified
MDITTLGIDVSKNIFHVVGTNRAGKPLFREKFTRQKLAEFIAQHPLCLIGMEACPGAQHLARKFEEYGHQVKLMPAQFVKPDVKSNKNDYNDAAAIAEAVRRPTMRFVTTKTSEQHDLQALHRVRERLVRTRTSIICQLRSFMLENGVAVRTGRAALAKALPDILEDAEQPLSDRMRALIQGLRDHWLFLDEQIKSVSADLERIAKSRDDCRRLLTVPGVGPLVATALVASVANGKQFKRGRELSAWLGLVPREHSTGGKQRLLGISKRGSSYLRKLVIHGARSCYLNMNRSQHRMGAWIDDMANRGTHRNVIVVAIANKLARICWAVMRDGDVYHCARA

SEQ ID NO: 375829 - protein, 357 aa, unidentified
MSERIKQEIERTVGVDVGDRWSQLCVLDEESGEVVEEGRVRTCAEALGRRFRGARMRVVLEVGCQSPWISRLLSGLGHEVLVANARRVALIHGSSNKSDRVDAESLARLGRYDPKLLRAVEHRGEQIQVDRALLRARDVLVRSRARLIGHVRGVAKSLGGRVRRASAECFVARAAEDLPEALRPALGPVLEQIQRLTATIRGYDREIEKLAEERYPQTALLRQVDGVGPITSLAFVLKIEDPRRFRRSRTLGPYLGLVPRRDQSGARDPQLRITKQGDPFVRRLLIQCARYLLGPFGKDCALRRHGLRIAERGGPHAKKRAAVAVARKLAVLLHHLWLTAEVYEPLHNLDEEHHRAA

SEQ ID NO: 375830 - protein, 357 aa, unidentified
MESQEVKYVGVDCGKKSIEVVRINSENSLERRQFSTTESGINNLLQWLTLNDIVGLEAGSQSFRIAKSILNKGVQVIVLNPGNLATIYQSLKKTDKEDSLKIARLIQRHPIEELPTVPIPNDEEEDNRRLCTEQENWTKQLTQSKNRLHSLFTQAGLTQITKKHLRTKANREISVALLPSRYQKEAERILKVLDLVELNLKLIEKEIQEALKKNKAYVQTIMSMPGIGMITSLAIMSYIGDCKRFSSAKQAAYYAGLVPRVDISGDTVRYGRIINRGCHSIRRVIVQAAWSLVRCQHGGKVKEFYQRLYLKKGAKKSIIATSRKMIEVLYAMIRTGKLFDSMPENILNRKLTQYGLM

SEQ ID NO: 375831 - protein, 348 aa, unidentified
MQISTIGIDIAKNVFQVHGVDAAGKPVLKKQLRRGQMLEFFGKLPPCLIGMEACATSHHWARELRKLGHDVRLMPPSYVKAYVKRGKNDAADAEAICEAVTRPSMRFVPIKSAEQQGALMLHRTRDLLIRQRTQLINAMRAHLAELGLVAQTGREGVQQLMRTVAEADNERLPSDARVACQAIIAQLQAVQMQIAGLEKRIHQAHRANPASKRLDAIPGFGVIVSTAVVATMTDPRAFKTGREFAAWIGLVPRQNSTGGKDRLGSISKQGDRYLRRLLVVGALAVIRSARARPDKYPWVMKLLGRRPAKVVAVALANKMARIAWAILAKGEAYRAPARSSSAAIAVSA

SEQ ID NO: 375832 - protein, 339 aa, unidentified
MKLYAAFDLHSSNNYLAVLDEEGRRQMQKKLPNEAGAIVMALSPYRKKIVGIAVESTYNWYWLVDLLMAKGYEVHLANPAAIQKYKGLKHADDRHDANWLAEMLRLNILPEGYIYPKEERSLRDLLRKRGHLVRLRTSLIISLQHIITRNCGIMVNVNDVKRLKEDRISPLLQDNEDVLMAGEVSKETIDYMTRKIKGIEKTVEEKIELSLSYQQLLSIPGVGKILALTIMLETGPISRFQKVGNYVSYCRKVSSTWVSNGKAKGKGNERNGNKYLAWAYSEASELARRFDDRARAYFQRKTQRSNRMIAHQALAHKLARAAYYIMRDNVPFMAEKLFA

SEQ ID NO: 375833 - protein, 420 aa, unidentified
MKAYNINDFAALIGIDWADTKHDICEHPSHTQKYHYCIIKSKPEALHNWAMSLKQRYPNQQIAIACELKKGPLIYALAKYSHLTLFTINPSSVANYRKAFTPSNAKDDPSDALIQVEILTLHMDKLTVIEPESASIRSLTQLVEYRRNLVQDSVNLSNKITATLKNYYPQALEWFKEKDTFIFCDFISKWPSLAHAKRARKKTLLNFFNSHNSHYAHVNDARISSIKSAMPLSEDIGIIEPNQLLVEVLIVQYRVLLKGIETLDKAIKLAYKSQDDKVIFDSLPGAGPQLSPRLFVAFGSNRERYEDASELQKYAGIAPVIERSGKKMWTHWRYSCPTFLRQTFVEWAGFSIRYSFWAKAYYEQQKSKGKPHNSIIRSLAFKWIRIVFRCWKTNTPYDESKYLEALKRRGSPLLKFAINS

SEQ ID NO: 375834 - protein, 356 aa, unidentified
MSEGSWVGLDVHARSVVAGVIDAASGEVRSLRLPPGGEATVAWLRTLPAPVQVVYEAGPTGYRLARACAEAGIDCVVAAPSRVRAAADRVKTDRRDAERLARLLRLREITPVRVPTLAEEAARDLVRAREDARSDLMRSRHRLSKLLLRHGLVYDATAWTRTHDAWLRRQRFHGGPLAIVFDECYGRMLDAKSRRDTLDKAITELAAAPPYLDVVERLVCLRGVSTLTAFALTVELGDWHRFRPESLGPFLGLTPSEYSSGERRRQGGITKTGNSHARRLLVEAAWHQRRPPRRSVTLERRRAGKPLAVQAQAERSARRLHGRWHALETRGKPRTIVVVAVARELAGHCWAIATME

SEQ ID NO: 375835 - protein, 433 aa, unidentified
MNYALPQILPEIPPGGLVAGIDWASAEHVICIIDGGGRVRARFTVAHSARGFGDLIAGLREAGCGEIAIERGEGLLVDALMAAGLTVVVIGPRQIKNLRSRYRSGGGKDDHFDAYVLADTLRTDRVRLHPLMPDLPATMTLRAAVRARRDLVRHRVAACNQLRAHLDASFPGPAGLFASLDSPVSLAFLTRFRCQDDAGQLDEQQLAAWLASLPGRGRPAPAAVLLTRLRSAARGAAGAEGAARAVITSSLTAALITLSAQIRALEAVIAAQLDTHPDGHVFTSLPRVRALRAARLVAEIGDCRARFPGPETLAALAGVSPVTRQSGQHISHTFRRAVSHELRDAVCDFADGSRHDSPWAAGIYAAARDRGKDHPHAVRILARAWIYVIWRCWHDGAAYDPARHAALQRVLDAGGPGSSDGPGSGPATSAEAR

SEQ ID NO: 375836 - protein, 405 aa, unidentified
MDVVHTRCCGLDVHKKSITGCVITPKGKEIRTFSTMTEDLMLLIDWIKQKECTHVAMESTASFWKPIYNLLELEGIAAMVVNAKHMKNVPGRKTDVKDAEWIAGLLRHGLLQASYIPNRDQRELRELVRYRRSLVDERAREVNRIQKVLEGANVKLSSVASDVLGKSGRDMIEAMIQGIEDVDVLTELARGKLKNKKSELKRALNGLMQNHQKTMLAAQLRHIDFLDEEIARLDEEVKKRMLPFEEDLELLDTIPGVGRRAAEQILAEIGTNMDQFGSAARLCSWVGVAPGNNESAGKRKSGKTQKGNEKLRSALVEAARSAARKKDTYLSAQYHRLAARRGANRAAVAVAHSILKIIFCMLSRRQPYKELGPTYYEERKRDIVIKTSIKKLESLGFKVSVEEVA

SEQ ID NO: 375837 - protein, 371 aa, unidentified
MDVSSKKINGCISLIDNNQKVTVKSSIVFNNDLKGFKSFEDWMIKHRRELEIPLVICMEATGIYHENCALYLFERNYRVSIILPNKAKKYLEAIGLKSKNDSIDAKGLSQMGAEQCLEQWEPFGKYFYELRLYTRQNQNLQELKTVISSQLHALKQAMYTNPIVIEQLESTIDLFDLQLKELEKKIKLHLESDAEIKQKVANIIKIKGLGILTIATILAETNGFDLFKNYKQLVSYAGFDVVESQSGARIGKTKISKKGNSRIRRALHMPSLVVITYKEKPFLDLFERTYAKHGVKMKSYVAVQKKLLTMIYYLWKKNEMYNPDYQNNIQEKELEFPSLLAFEKGTKNSLKQVEAIQGKHPVKNRSMFPLC

SEQ ID NO: 375838 - protein, 402 aa, unidentified
MNAVGIDVSKGKSMVAIMRPFGEIVSTPFEIKHTTSDIHSLVELINSVEGESRIVMEHTGRYYEVLAHQLSEANLFVSTINPKLIKDFDNDSLRKVKSDKADAVKIARYALDKWQNLKQYNVMDELRNQLKTMNRQFGFYMKHKTAMKNNLIGILDQTYPGVNTYFDSPARSDGSQKWVDFASTYWHVDCVRKMSLNAFIDHYQNWCKRKKYNFSQSKAEEIYGKAKELVPVLPKDAITKLIIKQAVDQLNSASTTVESLRTLMNETASKLPEYPVVMAMKGVGTSLGPQLMAEIGDVSRFTHKSAITAFAGVDPGVNESGTYEQKSVPTSKRGSADLRKTLFQVMDVLIKTHPQDDPVYQFLDKKRAQGKPYYVYMTAGANKFLRIYYGRVKEYLSSLPES

SEQ ID NO: 375839 - protein, 424 aa, unidentified
MQQNEDTRLKEFRQLKEEIRGSSQHLVVGIDIAKERHYAFFGTPTGKTLLRRLIFENTKEGFEKLLAQAELLKTREHLTRLVFGMEPTSDYHKPLGEYLLTRGHQVVLVGGSAVKKNRELLDGRWDRNDTKDAANIADLITQGKCLFYECASRDLKELRGLVSLKRRLKKSEQAYQTRIRNHLIAQYFPEMDASFGYSEGPALVKWCLNPGEVSNLPFEAFAIRVSSRNVGTEQRKRLLSLHDKAASSIGCAVHPSVGYEAQTLLEGLEHFKSMLRETDRRIHNVCQRFPEYPFLLSIPGFGPDISAKVLGALGNPHRFENERQVLKLAGLDLCADTSGKRNKGTPVISKRGKADLRFGLYQAAVIAASKNRPFMTYFTTKLKGREREKGITTKMRVKLAAKMLVIAWTLMKKREVFHPDCNEA

SEQ ID NO: 375840 - protein, 310 aa, unidentified
MIHPDVIGCDIAKAHLDFFDSGLERHFRIDNTPAAISAWLDGLDGRGVHIVFEATGRYDRQLRIALETRELPYSRVNPARARDFAKAIGLLAKTDAIDARLLARMGQSLPLSTQAPDDPARHVLARLHTRRDQLVAMRQQERTRLHETEGIERDSAESHMAWLDAEVARIEMACRDVLKAEKTLQEQEARLRSIPGIGPVAALTLIAHMPELGNRSAKAIAALAGLAPFNVDSGTSRGKRHIRGGRKRIRDALYMAALTASRMPRAFKSHADQLKEAGKPFKVVIIALARKLLAIANAIIRDKTTFRRTT

SEQ ID NO: 375841 - protein, 314 aa, unidentified
MRTQVFVGIDVSKAQLDVAFRPEGRFAASNDEAGCAQVLERLRAMPPTLVVLEATGGVEIPLTGVLAAAGVPVVVVNPRQVRDFAKATGRLAKTDTLDAQTLAHFAQVMRPELRPLPDEQTQALAAILARRRQLVEMLTAEKNRLGSAPKPVRKSLRTHIAWLERELRHTDSNLAHAIRESPVWREKDALLRSTPGVGPVMTTTLLANLPELGTLTGKQIAALAGVAPLNRDSGTWRGKRTVWGGRAQIRATLYMAALVAARFNPVIRAFYQRLCATGKAKKVALTACMRKLLIILNAMLKHRTPWRTELVQCA

SEQ ID NO: 375842 - protein, 400 aa, unidentified
MFYCGIDIAKFKHEASVIDSEGKALLDSISFTNSQDGCAKVLELFQKLGVTAETVVIGMEATGHYWLSVYEHLTELGYDVKVINPIQSEAFRKMYIRQTKNDSKDSFIIAQIMRFGQYSATALADKNIIALRQLSRYRLALVDSCGDCKRRIIALLDQVFPEYAKQFSDTFGCASTELLLNCPTPEDMLAISTKKLTALLKNSSHGRFGEAKAKELKSVAKNSFGVSFAKDAFSFQIKQLADQLVFIESQINELEREISSLLHQTNQVITTIPGIGETLGAIIVSEIGDIHRFDAPNKLVAFAGLDVKVNQSGEFVGTKNKISKRGSPYLRRAIWLAASRAAFCDPILSEYYQSLKARGKHHLTAVGAVARKMCNIIFVILRDNRPYETAPPKKLNISSK

SEQ ID NO: 375843 - protein, 354 aa, unidentified
MNVTHDGGLVAGVDTHRDIHTAAICDSSGRELAQLQVPADPGGYDAVLAWARQAAAGRELRWAIEGTRHYGLGLARHLAAVGEQVEEIDASKHAGKRRKGKSDAIDAVRAARELLARPHPAQMRADGDREALRLMMCDRDNAVGSAKTARTVLASVIVTAPAGLREQLRHIPRDRRVTVCAALACPDDADRQTRVLYQTLARLGERITSLAKTAADLEKQITGIIEDMAPGLVAAEAGLGALTAAQLMLSFSHAGRIRSEAAFAMLSGTAPVPVSSGNTSRHRLNRLGDRQLNRAFQVIAVARMRSDPRTKAYVRDRIAEGKTQREARRCIKRYLARHFYRVLTHQPGLAPRTT

SEQ ID NO: 375844 - protein, 375 aa, unidentified
MQKPSTIDIDPVIYLAIELSASTWLVVSKIPTSEKTGLHRMEAGDSQALLALIADLRKKVAAKLGVEASVMSCFEAGRDGFWLHRLLSEHGVINHVVEPTSILVNRRARRAKTDRLDAQGLLRILAAHAKGDHDVCSVVRVPTIEEEDAKRQHREREHLVQERVRIENRIAALLTTQGVRKRPSLRSWQKDMEDMRTGDGHPIPPLLRAEVNRLRRRLVMTLEMIREVEAEREQALQTQDDTAGRTIQALRRIRGIGDNFAAVLTREVFYRSFENRRASYLGLTPTPFQSGGMDRDRRISRAGNARARKTLIQLAWLWLRYQPDSNLTCWFRERVGNLQGRTRRIAIVAMARKLLIAIWRYATDGIVPEGAQISI

SEQ ID NO: 375845 - protein, 342 aa, unidentified
MQVTTVGLDLAKHVFQVHGIDQNGQVLIRRQLRRGELIGFFRRLPPCLIGMEACSTAHFWARELAALGHEVRLMPAAYVKPYIKRGKSDALDAAGICEAVTRPTMRYVAIKSPEQQAVLMLHRTRELLVRQRTMLVNALRGHLAEYGIIAPQGLPSVPKLREVAAKARGAALPDLAWRCVRLIIAQLEEAHVQITEAEQEILAWHRTNEVSQRLETIPGVGIITASALAATISDPGSFRSGRHLAAWIGLVPRQSGTGGKVRLGHISKQGDRYLRRLLVLGATTLLRHARGKASAAAGWINALLARRPAGIVKVAIANKLARVAWAVLQGNQGYRAPAAAAA

SEQ ID NO: 375846 - protein, 352 aa, unidentified
MKNLAAPEGDRRFGHKLTRVGFHPDGVNLTPEGITMQTILDLGADVDSRYIWVACAAHSFAPYRIGNTRSAILAWLHTLPRGSRLAMESTGSYHELLAELACKAGLQVFVVNARDLRRYAQGVGQRGKTDRISAELIARYVAREHTELHAYVPPTQEQRALQQLFKRRAKLTVTKGALIQSLRGLRGANREIKQLMSALDHLITHIDRLTERTLRKIPPAREAAEHIQTIAGFGALSSAYLGNSFTRHPFSSSDSVVAFSGLDPRAEDSGKKHGRRRLSKRGPSEARRILFNCARSASRTKLWRPYYQAQRAKGLSATAATVIVARKMLRVAFALYKTKQPFDSARLTFGPA

SEQ ID NO: 375847 - protein, 402 aa, unidentified
MNAVGIDVSKGKSMVAIMRPFGEIVSAPFEIKHTASDINSLVELINSVEGESRIVMEHTGRYYEVLAHQLSEANLFVSAINPKLIKDFDNDSLRKVKSDKADAVKIARYALDKWQNLKQYSVMDELRNQLKTMNRQFGFYMKHKTAMKNNLIGILDQTYPGVNTYFDSPARSDGSQKWVDFASTYWHVDCVRKMSLNAFIDHYQNWCKRKKYNFSQSKAEEIYGKAKELVPVLPKDDITKLIIKQAVNQLNSASTTIESLRTLMNETASQLPEYPVVMAMKGVGTSLGPQLMAEIGDVSRFTHKGAITAFAGVDPGVNESGSYEQKSVPTSKRGSSDLRKTLFQVMDVLIKTHPQDDPVYQFIDKKRAQGKPYYVYMTAGANKFLRIYYGRVKEYLSSLPES

SEQ ID NO: 375848 - protein, 353 aa, unidentified
MDRYMGLDVHSQSCTLAVEDARGKRLNEQVLETNGKVLVRCLEGIAGTRHLCFEEGTQSAWLYELLEPHVDEIVVVQSEKRRGNKSDSLDAWALTEHLRTGAKTGRVYKAPRRFTELRQAVHGYEMATQDLVRAKNRLRAVFRARGMTVTRAAVEKPDQRAAAIKKLPPAPRRLAEQLGERLDSTIEAHEKAESWLREQGDRAPEVLRLATEPGIGSIRAAQIVAVVVAPERFRTRRQFWSYCGLGVVTRTSADWVRDPTTNKWKQKEATATRGLNRNRNPLLKKVFKGAATTVIHCMPNHPLHADYERQLEAGIKPNLARLTLARRIASMALAMWKHKEDYDPTKQRSQTAA

SEQ ID NO: 375849 - protein, 352 aa, unidentified
MTNSFPDVPSLTAGLDMSDRQTSFCVVDGQGEVIEEGKVRTSPEGFARRFSAFEPCRVVLEVGTHSRWASSLLANLGHEVIVANPWKVRLIANSIRKTDRSDAETLARLGRLDPKLLSPVIHRTAEAHADLAIIHARQSLISARRLLINHIRGAVKAWGATIPKCDAHAFHKKAPGALPVQLLPALEPLIKAIAELTNQIRAADAKIEELCRQRYPETKVLQQVQGVGPLISLTYILTLDNPFRFKASRMVGPYLGLVPRQRESGEKAAQLKISKAGDKYLRVLLVNGAHYILGFRGPDTDLRRWGLSHAVGGKAAKKRAVVGVARKLAVLLHRLWVTGEVYIPLGSEEVAA

SEQ ID NO: 375850 - protein, 336 aa, unidentified
MICVGIDVAKDKHDCVILNSEGKILAGVFTIPNNADGFDTLLQKIRSCTSSDDKIKVGLEATGHYSYNILGFLINQGLPTYVINPLHTNLYRKSMSLRKTKTDRVDAKTIATMLMSNVDLKSYTDTAYHNEELKSLTRYRFDKVRERAQLKQSVSRLVTILFPELEKLVPTLHMSSIYALLIEFPGAKQITEAHLTHLKSLLKDASKGRYGRDMATEIRDAAKHSIGSVMPAKSLELRHTIRLIRELDSEIEDIEAAIEAIMEELQSPITTIPGMGFRMGAMILAEIGDFARFDSPDKILAYAGMSPSTYQSGQLSLAGTYSHMEKRGSRYLRYAL

SEQ ID NO: 375851 - protein, 337 aa, unidentified
MRFCGIDLHSNNSFIVIIDEADRVVYSRRHANRLAEILETITPFRNELSGIAVESTFNWYWLVDGLLEEGYSVHLVNTVAVKQYDGMKHRGDESDAKHLAHLLRLGLLPEGYIMPKDKRAMRDLARKRMQLVQQRSAQIITIESAMQRYTGARANSNTIKQLSEADLNQLNLHATEILGLQTNLAVMHALQSQIDRVETVLMRYCRTETGFRLLKSTAGIGDVLATVILLETGEIERFAGAGNYVSYCRCVGSAHVSNGKKKGSGNTKNGNRYLAWAYVEAANFAVRYCEPAKKFYQRKKAKRNGIVAIKAVAHKLARACYHMLRTGEVYSVERCFA

SEQ ID NO: 375852 - protein, 386 aa, unidentified
MRKSNDLSRCLAALEQDSTLIAVIEMGKSSWLVAGVVPGIERRPLKKLAANEGALLALLYRWRDEAKKAGHPIKRICVAYEAGRDGFWLARWQRKRKIEAYVIHSTSVCVSREHRRAKTDRLDTEHLMRAFIGWLRGETDHCRMCAIPTLEEEDGKRPSREHEHLVGERTRIINRLKSCLARLGIRDFNPASCKAPERLAKVRTPEGTPIPPNSLDELKHDMAHLRFISDQIDEVEKARLARLQKAPKKGPHAMVRLLASIHGLGIETADTLVHEVFSKNFRDRRGAPRYAGLTGSPDESGERRREKGLARAGNTRVRRSMIQLAWRFLQFQKESALVQWYYKRTADGRKDTRKTMIVVLARKLMIAVWRFVTTGEIPAGVQLRAA

SEQ ID NO: 375853 - protein, 340 aa, unidentified
MGEITTIGLDLAKQVFQVHGIDADGTTVLRKQLRRSQVLSFFSRLAPCLVGMEACATAHYWARELAALGHEVRLMPAQYVKAYIKRNKNDAADAEAICEAVVRPTMRFVPAKTAEQQAALLLHRGRERLVRQRTGLVNALRGHLAEFGVIAPQGLRNVGKLIAVVRDPSDARLPDLARQVLEVLATQIEQLEGAVAAVEKQLMAWHKSNPVSQRLATIPGIGPIIASAIAASVAEPSGFRSGREFAAWLGLVPRQNSTGGKHRLGGISKRGNQYLRRLLINGASANLLRSKATKADPWVIGLRRRRPSLVVAVALANKTARIAWAVMQRNENYQRMAAAA

SEQ ID NO: 375854 - protein, 395 aa, unidentified
MDGIIALDVSMSKSYVVAYLEKTLIAEKEIEHTKAGFLELQDIVNAFQEAPKIIFEATGVYSKPVERFCELNSLDYHLLNPLEVKMRTSKLRRHKTDKTDAHQMANAYLGVKAKKPPKTEKAYIDLKILARMYFEIDFDMNIKRSYLHIAIQETFPEIENIQTKMTSALSLELVDRFPHPDYVLQLSKIELKNYILHAFPNIGSKKAEEKALILISKAENSYPSCSADSYLVEKVRSYNSKLKNIVLEKEEILKKLIEIASLLPDFHLIVSIPGIGEKTAALMVAEMGNIHRFKTNKQLNAFVGIDIQRYQSGKYLAKEHINKRGNKQLRKVLYYSIENMLRCQKFYHSHIVDYYYYLRRKEGCPKMHKVAVIACINKLLKCIHSMVINGTLYKY

SEQ ID NO: 375855 - protein, 346 aa, unidentified
MMIIGCDFHPSWQQISWLDAETGETGERKLVHASGDAKRFYEQLAAPVLIGMEATGNSQWFIELVEDLGHAIWIGDAAQIRASFVRKQKTDKRDAAHILKLVVEGRFPKLWTPDREQRDLRQLVLHRHKLVEIRSRVKNELQHLSMNKGMQKKRTLWSREGQQMLRELPLKPWASCRREDLLGLLAMLNQQVGALDVAVQKAAEENPQAKLLMTQPGVGPNTALAFVLTIGDVSRFRRGKQIASYLGLIPREESSGGRQKLGAITKQGNRMLRSLLVEAAQCAVRYDPGYRKEYAHRCHQKPKGVAKVAAARKLAVRLYWMLRTNVAYPEIVRIESSPRLPLVGAS

SEQ ID NO: 375856 - protein, 360 aa, unidentified
MAKARSLVGLDVHATKIVAAVLDAETGELEFFRFSGDVSQAAGFCAGLPRPVRAAYEAGPTGYGLARELARRGVDCVVAAPSKIPRAAGDRVKTDRRDAELLVRLLLAGKLHPVRVPGLEEEALRDLVRAREAVRVDLMRARHRLSKLLLRHGVRFDEGSAWTARHRAWLAGVTLPYAAAQATLLDATGAIDALAHRRDGLQREIVAMLPGSPWQVQVERLRCLRGIDTLSAVGLCAEIGDFERFAHAEQLMSYLGLVPCESTTGKQRRLGSITKTGSGHARRLLVEAAWHYRKRPAVGKALAERQDGQRAEAVAIAWSAQRRLHRTWARLEARAKRRTIVAVAAARELSGFCWAITRIE

SEQ ID NO: 375857 - protein, 376 aa, unidentified
MKNVRFIGLDVHAETIAVAVAEPSGEVRSLGVIPNRAESVGRLIRKLGKPEQLRVCYEAGPTGYVLYWQLSELGVKCEVVAPTLVPVKAGDRVKTDRRDAEKLARCYRAGDLTAVWVPDAAHEALRDLVRARLAAKRDQLRARHRLSKFLLRHGRRAAEGVGAWTERYLAWVKTEQFDHAAQQMTLQDYLHEVEHAGERIVRLERSIDAAIETLPVKMRAVIEALQSLRGIAQVSAVSIMAELGELSRFEHPRQLMGYSGAVSREHSSGERISRGPISKSGNAHLRRIAVEAAWAYRHRPAVGKTLATRQRHSSAAVTALAWKAQHRLHQRYTRLMARGKCKQQVITAVGRELLGFIWAIGVHVEREENVPLRRAA

SEQ ID NO: 375858 - protein, 345 aa, unidentified
MLYVGLDLSRKRVDYCLLDGVGSVLERSAAPADADGLVGLARRLGRCGEPVVAAIESMNGARFVHDVLEAEGWEVDVADAARVRGLAPLACKTDRIDAWVLAELARRELVPAIWLPDPEVRGQRERARFRLHLVKHRTALKNRVHQTLVTFGQPCPVSDLFGQRGRQLLERLALPQPWASSLEASLRLIDELAAEISTIEQELRQSADHPYLELLTTAPGIGPVLGYTIAAEIGDIARFPSPRKLAGYTGLCPRVYQSGESDRRGPLSKRGPRYLRWALIEATTHACRHPLYADRYQRTKQRLGAQRGPRVAQVDLARRLTEAIWHMLTRNQPFAPAGASRCLAA

SEQ ID NO: 375859 - protein, 431 aa, unidentified
MAMLAEVVDAVIGGDTHRDTHALEMTTPVGATITTITISNDDAGFVEALAWIAEHAPGPRLVVGLEGTRSYGIGLARAAAAAGLSVVEVERPRRVARRRGKSDPLDAHLAAVQVLALPADRLPTPRADGDREALRILLGARAELSTSRTKQINRRRALLLAGDDTDRDLARGALTDKRLAAIYRRRGSTHASVADAVRRAEIRRLTAAIRAATQQLVTNKRQLTELVTTVAPGLLEKVGVGPVSAAQAIVSWSHRGRCRTEAAFAALAGASPIPASSGRTTRHRSTAAATATSTGHYTTSSKPAGVYAHAPTTTSPAAEQPDETTARSDDPSSATSPANYSEHSTPQHLTTHRSVTNWVPGPARGGEPARPRSEQWKVWSHGLGDSRANADPSTDEFGSQEILARQIRVGSTRCLRSSDLEGVGERRVPFG

SEQ ID NO: 375860 - protein, 349 aa, unidentified
MRTKPKPNATAYGIDIGKKVFHVVSLDADGRPLQRAKFSRETLMSFFEAADSALIGMEACAGSQWLARKLAAFGHDAKIIPAKFVKPYVKSNKSDTIDAEAIAEAVTRPTMRFVQVRSEAQVDLQALHRIRDRLIRNRTGLMNQARAFCIEYGLAMRTGAGGFHADIRRHLADSENDLTGTMRALLSDLLDDLAHIEKRVAELTKEIEAIAHSNETVRRLLTIPGIGALGATALVAAAGDGRQFRKARDMAAWLGLVPAEHSSGGKQTLLGISKRGNGYVRRLIIHGARSCFLHLHRETHALGRWLSGLEERTHRNKAVVALANKLTRIAWAILTRPGENYLRTKGAAA

SEQ ID NO: 375861 - protein, 418 aa, unidentified
MNEDGNTRGSRRYIALDIHKKYSVIGGVDREARVVLHAVRVEHADLEEWLKKNLRCTDHVVFESTTNAWYVYDLLEPLVERVVVANPAKVKQIATARVKTDVRDTFILARLLAANLVPDVWVPPAHVREMRQLLSQRRQLVETHTQIVNRMHSVAHRHHLQHERGKRFNEKTTAWQKDKRLSKIEQFQLELEMENRDYIEKQIQRIGREVTKMCHQKPWADSMTYIMQLPGFGDITGMTVLAAIGEIQRFGSAKHLASYSGLTGGLDQSGTHLVQKGITKEGRKELRWALVEVAQRAVKSDPHWKRKFQEMEKRMHRNQAIVAVARQLLELVWYVLTRRQPYRHFSQERIAYKYLTWAWQMDEAARDGLTRQQFTRYYLMRLGIGQDLTRIALDPKHPRKISSEAELLALRPELDHIE

SEQ ID NO: 375862 - protein, 396 aa, unidentified
MEFVGIDWATRRAAWCAVDAAGRRLGEGAVPADAGGLLRLVADRGLEVTAAVEMMSGAAWIAETLRGVGWTVRVADARRARALAPLAAKTDRIDARVLAELARRELVPEVWVPAVADRALLEQLLRRMHLIRLRTSAKNRIFGLLTQWGVRAGVTYLRKPGAVDALAERGVPDVWRASIAEAIAVIDVLDARIAPIDADLVRLARGDQRAALLRTIPGVGWLLGLTFAAEIGDISRFPSAGKLVGYSGLVPRVRQSGESSRTGKLAKAGSPLLRWAAVEAAQHAWRPQNPWHRLYVDVRKRHGHANAAKVRRRAQGPDRRLARLVAPAAVHSRRVVRGLDRPGKLRPAPGRLTARLRIEKPGQLPPDTMRRPSAERELSPTSASPETKERPLATTT

SEQ ID NO: 375863 - protein, 433 aa, unidentified
MPAPHPYDVVIGLDRSDRKADLHQIDTHSGQALRQTINTSPEALHDWLADLRQQYPRARVAICLEQPAASLILFLETYAWITLYAINPITLQKFREAFVTSRAKDDGKDARYLAELLFTHHDKLKAWQPDDAQTRLLQQLVSHRRAVVDERTGLTNRLQALLKQYFPQALDLGGEDLWRPLATAFLLKWPTLQSLQKAQPATVQRFYYLHGSRSQTLIARRLELIADAVALTDEMAVLHSHTLRVHLICRQLQDIQRTLGQFEQRLAQEFRDHPDHHIFASLPGAGPVLAPRLLASMGSERERYTSSANLSNFSGIAPVTKQSGGKCHVHRRYRCPVFLKQTFHEYAKESILHCRWAAAHYWQQRKKGSGHNAAVRSLAYKWQRIIWKCWQTHTPYRDEIYEASLRKSGSPLLPLLDQIPLGKSPWKNSANKN

SEQ ID NO: 375864 - protein, 369 aa, unidentified
MAEAREAFIGIDAAKLRNAVAIADAGREGEVRFLGEVDASPEGMRRLAARLAAKYDRLHFCYEAGPTGDGLHRLLTDLGHHCTVVAPSLIPRKPGDRVKTNRRDALTLARLLRAGELSAVWVPDPAHEAIRGLVRARAAAAKEVGIKKRQVGAFLLRHSRLFPRKKAWGARYRRWLQEQGFEHPADQIVLQGLVDGVRVAEERLARLGRAIEEFLPTWSLAPIVEALQALRGVDLVTAATFVVEVGDVRRFESPRQLMAHLGLVPGERSTGETVRRGSITKMGNARVRHLLVESAWTYRHPPRIGAKKLPKLERVSPRIREIAWKAQSRLTARYRAFVARGKKTTVTGTAIARELAAFMWAVAREVRSA

SEQ ID NO: 375865 - protein, 345 aa, unidentified
MKVSTVGIDLAKNVFQLHGVNELGKTVFKKQLRRDQVAAFFVNLPTCLIGMEACGGAHYWARKLKGFGHTVKLMAPQFVKPYVKTNKNDAADAEAICEAVARPNMRFVPIKDVEQQSVLALHTVRQGFVKARTAQANQIRGLLSEYGLIVPQGIWHIAKRVPDLIEDASNELPGSFRLLIQRLLDHLKDLDTQVDELESQIVKWHRQSSASSKLAQVPGIGPITASALVASLGDAKNFDNGRQVSAWLGLVPRQHSSGGKQNLLGLSKRGNTYLRTLLIHGARSVIYNGKEKTDPTCRWINGIVSRRNSNVAAVALANKNARIVWALLTHDREFRLDYTREPVGV

SEQ ID NO: 375866 - protein, 450 aa, unidentified
MAASNRSVARSALRLTHPNAAGIDIGSASHYVAVPPDRDDEPVREFASFTGDLLRLADWLAACGVDTVATESTGVYRIPLFELLSTRGFTVLLVNARHVKNVSGRKSDVLDCQWLQQLMSYGLLRGAFRPDEQVCVLRALARQRHSLLRTQSRCVQHMQKALVQMNIQLANVIADVAGASGQAILRAIVTGQRDPLMLAALKNTRVRASDEDIARSLHGNWRDEHLFALRKALDAFDFCGQQLQQCDDEIEAQLDKLHITRVEPERGKKRSKARNAPKFDLRTRLFQMCGVDLTRIDGVDVTTALVVVSEAGTDMSKFPSDKHFASWMGLCPGTKITGGKVMSGKTRPTANRAAQALRLAAAALRTSQSALGAYYRRLCARMDKAKAITAAAHKLARLIYNLLSKGQEYTDQGQAYYEERYRQRVLHNLQRKAQRLGMALIPVTPDSATA

SEQ ID NO: 375867 - protein, 411 aa, unidentified
MSESDNPAAPTYAVFCGVDVGKAEHHACALDPSGAKLHNKALPNDEAALTAVLSGLTAHGRVLVVIDQPASIGALTIAVARNLSIDVAYLPGLAMRRIADLHPGEGKTDARDAYIIADAARTMPHALRRVGTDDATLAGLGVLVGYDDDLAAQSTRLSNRLRDALLHVHPALERLLGKHIERGGVIDLLVDAPTPAALRALGEDGIRTVMATRSPRLAKTLPATILAALDAQTVVVPGTTEFGRVIAGVATQLRQVRTERTALAADVEVRLATHPLAEVLTSMPGLGVRTALKILTIVGDGAAFPTAGHLAAYAGLAPVTRRSGSSIRGETRSQRGNHALKSALFLSAFASLADPTSRAYYDRKRAQGKRHNAALICLARRRVDVLFAMLRDAKPYQPPITTSPAPDTLAA

SEQ ID NO: 375868 - protein, 353 aa, unidentified
MKHDKYMGMDVHQAMTVVVVLDADGKVILETMVPTEAAAIIRLVQSLSGPLRVTFEESTQAAWLYEVIRAYVTEVIVCDPRRNKLLEDGSKADKVDARKLAELLRAGLLRSVYHGHEATRNLKELVRAYETLSIDTQRTMARIKAIYRARGIQTPGRGVYQPKQRERWLELLTDAGIRQRATWLYEQLDQLQPLRRKAKQAMLAESRRHRAVSLLRTIPQMGPIRCAFIVATVDTPHRFRTKRQFWSYVGLAVVTHMSSEYEMTAGRVVRRRKPVATRGLNHNCNRRLKEVFISAATGGSLHEPYKPFLERLKQNGMRAEMARLTLARKIAVVALIVWKKGVAFDSTKLNWTT

SEQ ID NO: 375869 - protein, 419 aa, unidentified
MTKLNPTPVGAVLVGIDIAKIRNEVLIEVAGHARRRRLSVPNTRVEHDRFIALLSAYGKPVICAFEATGHYHRPLAWRLAQAGFEVRLVSSMALARTREALHNGWDKNDPRDAQVILHMLRIGASQRFHDPFAIGINDVQELSKTHEAIAKAKTEIQHRILTHYLPLYFPEIERFRGNSRSDWFFAMLDAFPTPGHVTALSKDAFIEAAWDVVGRKVSKREVLGDIYETAKSSIGLPIPLESPAIIMFRMVIAEARSLIRQRNQIETMADALLQDSRDYQLLRKIPGVGPITALTILAEAGDLRRFGHHRQFLKFCGLDLSTQQSGQYRGQTRLSKFGNARLRRSLWIAGQVAIRQRENGFRHKYERYIAKDRDNPDLRRKALTAITAKMARVVHAVVKTGADYRPFVEGRVPGGRTSL

SEQ ID NO: 375870 - protein, 436 aa, unidentified
MNTEIHPKAKYIYVGVDSHKLTHTATIINCFNEKLGVITFKNNYEGFSSLIELANKVGNKMPVIYGLEDTKQYGYLFKNYLLKKGLVVKHINASETAAERRKYPIAIKNDELDSACIAKVTVDNLDKLQNATDDEIYWTLKQLTIMRETLVKSAARFKYKLHSQLMFNYPNYYDLFSDIACKGALSFWEKYPSPDLLKDVTDEELFNFFKEASYSMWTSRINKVIENVRKIDLNNFIYQSNRNIIITMIIKQIKENHAMREEIEEEMISIYDAIGKKLHTFPCIDKVSASYILAEIGNIDRFENSSKLAKYAGIAPIEYSSGNSSKKYGNKFGNRKLNMRIYMVAYTGLSRGSRTFPMNPIFSEYYLKKISQGKTKHQALICVMRRSISIIFNMLKNNTEYNPPINLEEECKASFLKRQQDEEDTAEKIMKKMNNK

SEQ ID NO: 375871 - protein, 372 aa, unidentified
MTSIIYVGMDVHTTNYTLCCYSMEDDRFFAEVQVEPDAKNILKNLARIEKQQSRDCRIVCGYEAGCLGYSLYHQLHAHGIDCVILAPTTMMTKPGKRIKTDRRDARLISKCLAFHTYSPVYIPTEVDDAVKEYIHMRDDANSALTRVKQQIIAFCIRHGKIHDGKSYWTNKHLEWLSSLDLGNKILSEVLQEYLIRYYQLREQVDVYDMRINELAQAEPYRQKVEKLGCFRGIAAHTALSFCVEVGDFRRFATAQQFASYLGLVPGECSSGDKQQYTGITKAGNSHLRKLLVETAQVFGRSATKSGKSVALKERQAKCDSLTVAYADKANARLKKKYFKIAMRSKVNIAKTAVAREMACFIWGMMTDNISCA

SEQ ID NO: 375872 - protein, 384 aa, unidentified
MSSAAKSTTAAARSIIYIGMDVHKESITIAVLPEGAKSPTRLDRLPNDLPKLKKWLERVSRDGEIRACYEASGAGYVIHRAMKEWGYECEVIAPSLIPRRPGVQRKHDKRDAADLARFYRAGELTTVRIPSESDERVRDVVRCRETFQKEILKSRHYILKFLARRGFVFREGTNWCSPHLKWLLHLTTENSPLEQHDRLIFREYHALLLYKLERRDELDRQIEQLALLPNIAPMVERLQCFRGISLHSAMVLATEIVDWRRFERPSQLACYLGLVSREDSSGDRTRLGSITKAGNSHCRHVLVQAAWSYRHRPQTGVELKRRQQGQPAAVIVHAWKAQQRLHQRFNHLSYRKRPQIAAVAVARELVGCLWAVMQDVAPIEQQAA

SEQ ID NO: 375873 - protein, 463 aa, unidentified
MAKKLAKKRKSPPGVDHPVLERINLNAAGIDIGADFHWVALPPDRAETPVRKFGAFTSDLHRLADWLIEHGIDTVIMESTGVYWIALFQILERRGLEVKLVNARHVKNLPGRKSDISDCQWLQQLHTFGLLNGSFRPKDEVCVLRSFLRLRDRLVKDCSSHILRMQKALTEMNLQIHRVLSDLTGYSGMAIIRAILAGERDPVTLAQKKHPQVKAPTERIAQALEGDYRPEHLFALQTAVELYDAYQLKIRQCETQIEEQLQHFKARADFEQLLAQSGASEARSAQGRLEHRRQAQLTSVCGVDLTRLPGLSTLAVQAIIAETGLDMSCWKTEKHFCSWLGLCPDQRISGGKTLASKPRKTNNRAAAMFRLAAQGALQSKTAVGAFIRRLKARLGAPTAINAGAHKLARLFYRMLKFGEAYVEQGQTYYEQRYKERVLHNLNKRAKAFGLQLTPLEPLTPAVS

SEQ ID NO: 375874 - protein, 341 aa, unidentified
MREFIRIGVDLAKNVFQLHGIEREDGSPFQRKLTRTKFREFFSRVTPCRVGMEACGSAHYWARVLRAMGHEVVLIAPVYVKPYVKRGKNDAADAAAICEAMSRPEMRFVPVKSADQQAVLMLHKTRDLLVKQRTMTVNALRGHLQEFGLIAAKGVQRVRELVVLAEADQELPEEAKQAVALLAWQSEQLAMKIDELEKTIAAAGAKRPESRLLQDIPAIGPLIASALTASLPDPSAFKSGRDFAASLGLTPSQHSSGGKERLGAITKKGNRYLRKMLVVGCTSVLRVAHKRKGALAEWIVALKVKKPERVAAVALANKLARICWAVLSTGETFREELYARA

SEQ ID NO: 375875 - protein, 340 aa, unidentified
MQTPRHIGIDLHRNQFTCCVRLENGRNYLTEWKLEDLPRFVKKLRPADQIAVEVTGNTRLFYEAVAPSVARVVAVDPNQFQVISHSVKKTDPNDARNLALYLEKDLLPEVRMKDKTQAQLASLTQTRDTLVKLRTALKNKVNNILSAHGINLEREALSSEKKLNEVLAMRFDPMVKIELEVIVEEIRSLNQRVAKLEKTIAEEGSKLEGHKNLTSIKGIGPLTGSILLSVIGDIHDFADEGKLAAYFGIVPRVSNSNETERSGRITKRGSKLGRTALVQCALIAQRYSPYLKRHYEQVKARRGTGKAIIALARKLLGIIYRTLKNKWVFQDFPNFVLAEV

SEQ ID NO: 375876 - protein, 424 aa, unidentified
MRRCIGLDVHREFAQVAVWEDGRVRHVGQIGTTPEALRVFADSLAPSDEVAIEATCNTHAIARLLGARVARVVVSNPQKTRAIAEAKVKTDKVDAEVLAQLLAADYLPAVWLPDDETHALRRQVARRAHIVRQRTRLKNQVQSILHRNLVPRCPAADLFGRKGRAWLGGQELPADERRAVEALLRQLDFHGEELRLIDAELGRVALASDEVKRLMTIPGVDATVALSIVAAVGDFARFSSPQKLVSYLGLNPRVRQSGGQPASHGRITKQGRAHARGMLVEAAWVAVKIPGPLRAFFKRVGARRGMQIAVVAAARKLAVLCWHLVTRGEDYAFQRPSLTEKKLRALELRAGMPSRRGQKGKASAYSLKEVRRRERELAEQAEQTYRQLVADWQAKAPAARKGVAAANGARLSRPSTGQAARQGS

SEQ ID NO: 375877 - protein, 412 aa, unidentified
MKDLLEISCGLDIHKEKIVACILTGPLGKPTHSEIREFTTLIPDMLALRDWIISENCHHIAMESTGIYWIPIYEILEDAFSGDITLLVVNARHMKNVPGKKTDMRDSEWISTLLRAGLLNASFIPEKRIREFRDLNRYRKSIIRDITSQKNRVEKFLQSSGFRLSSFISDIFGASGRNIILHLMEHGRIDKISLDSYLKTKTRKRIDEILMSVNGTLSEHQKSFLKILMCHYDSMKEHLIEIETHLQEDMLPFALQIEQLNTIYGISTTAPCAIIAEIGTDMKPFKTAEHICSWAGLCPGNNESAGKRKSTSITKGNPYIKSMLCEIAWVIAGKRNTYLSAWYWRIKQKKGARKAIVALARKLLVIIYTMLKQGTNFDENCFEVRRKNCEQKQLSRYIRELEKHGYTVEAQV

SEQ ID NO: 375878 - protein, 370 aa, unidentified
MLDTTTFVGLDVHARSIKAVSLDVMTGEVRAATFGYDAGAVAEWVRSVDPGARCVYESGVTGFDLQKRLTGLGVGCAVGAVSKMIKPSADRRRKNDRNDAEFLARMLSVGNVVEVWVPDDECEAARDLARALEDARDDLSRSKQRLSKFLLRHGLVFDERTPTGRRKGNWTRAHWSWIESIRFAEGADNDVLAYYVDAVRRAAEEKARLEGLVEAEARKPRWRRRVDSLRCLKGVDTATAADLVFEAGEFSRFGNARSFAAWVGLTPSEHSSGESDRRGAITKAGNKHLRKALVEAAWHYLTCSGRPKEPARGQAPDRVARRHAAKGVRRLVERRKALLARGVHNNKANVATARELACWVWAVGLMAEEA

SEQ ID NO: 375879 - protein, 340 aa, unidentified
MRTTYVGMDIHKNFIQAAAMDDQGTILKEQKFKTTDTEIKRFIQSLNTQKIHAAIESTCTWYHVYQALDALGVQTTLVNVRRTKVIAESKIKTDALDAKSIAQCLRTGFIATAYIPSKQIMEQRSLLRHRQSLRKELTRYKNKIHAILLMNGIHHPFTDVFGVGGMHFLKTVKLPDSARYTLNSHLHIVETLTHEKTQITKKIETLSKHNQQAMLLTSIPGVSYYSAMTILTEIGDITRFPSPKKLCNYAGLVPRTIQSANHLYHGPILKECNHHLKWILNQDVHTHIRHCPNSPITRLYHRIAQKKGASKATIAASRKLLTCIWHMLMKNETFKYSNDD

SEQ ID NO: 375880 - protein, 411 aa, unidentified
MSFKILKFNCCGLDVHKTWIYACIGITDSNNRTEYKQARFSSFTKGLNELCDWLAKYNCTDVCMESTGKYWIPVFNILEQHNLWVTLSHPKYTKPMKGNKTDRKDAKWICDLYMCGMVKPSFIPPADIRELRDLVRYRYKLTCMIAGEKNRAQNCLTVSNLKLDDVFSDVFGKSSRSITEQILQHPGEKFDVAPFVYGHCKTPIEEIQAAVDGAISKEQAVKLRQCLDHIDELNKHISEVEQEILCLSDKYEAALNLIRTVPGFNKNPMTAIQVLSEIGCDMSVFPTDKHLVSWAGCCPRNDKSDRKIKSTRISRAGSYFKPVLVQVANALIKSKKHPEFTNRYKRIKARRGHKKAIIAICRMILTAIWHIPVSYTHLTLPTKRIVYISGVAVSYKKKKREVRCVERGVYK

SEQ ID NO: 375881 - protein, 444 aa, unidentified
MAVRKREDEVFPNAAGIDVGASSHWVAVPRHLAEQAGCEPVREVGAMTDDLKDLADWLIRCGVDTVALESAGVYWIPVYEVLEQRGLKVWLVDARQMKYVPGRKSDVQDCQWLQKLMSLGLLRAAWRPASDVCIVRAIARQREILVTEQASWVQRMQKALVQMNIQLTEVITDVMGQTGQAIIRDIVAGQRDPRVLARHRHRRVKASEDDIVKALTGNWRDEHLFVLGQALAMYDDIARHLQTCNAKLDELLAERGAANVDIGKAPKAGSKARMEFDVRQALANWAGVDLTRINGLGVTTVMKLITEVGPDVSRFATVKHFCSWLGLCPGTKISGGKVLSSGTKRSANRARQALKMAAMNLSHSDSALGAFYRRLCTRMDKPRANTATAHKLARMVYFMLTRGEAYVDQGQQHYDELQRQRSIAALQRRAAALGFQINPVMAAA

SEQ ID NO: 375882 - protein, 476 aa, unidentified
MKSNRGAATPQGGTTKPRAWTPLLKRIQPDAAGIDCGATSHFAAVPADRDPQPVREFSTFTSGLHQLAEWLVQCGIKTVAMESTGVYWIPLYEVLEERGLEVVLVNPCHLHNVRGRKTDIQDCQWLQELHSVGLLHASFRPADEIVVLRSYMRHRQTLVEASATCINRMQKALIQMHLKLHDVLSDITGITGLAIVRDILAGVRDPNKLAAQRHGNCKASEQQIIAALTGHYRAEHLFALRQNFEGFEFYLRQIADCDHAIEAQLANLAQIRQPPTQTLPPAKPRPKPSKHEPRVELRAPLHRITGGADLSQIDGIGPYGALQLIAEIGTDMSRWPTDKHFSAWLTLAPNNKISGKRLLSSKTQPSANRAAAVLRRAAMSLTRSSTALGAYYRRLAYRLGPPKAITATARKLAVLVYRVLRGDLTYHDCGAAAYLELHRTRVINGLRRRAKELGLSLINLETGEVLDHALVPQPVS

SEQ ID NO: 375883 - protein, 342 aa, unidentified
MTCYVGLDVSMKETAICVVDETGNRIWDGKSRTDPDAIVAVLARRAAGAVKIGIETGPMTVWLWHALTERDLPVVCLHARHAAAALKLQMNKTDRNDAFGLARLVRPGWFRPVAVRSMETHRLRALLITRDQLVSMSTALINKIRGLAKTFGILVGPGKGGTFERQVRATLPDDPVVAALFESLLAMLGTLRERQHAIAKQLGRVARQSGACRLMMTMPGVGPLTAVSFMTTIEDPHRFRRSQDVGAYLGLTPRRYQSGEVDINGRISKCGDRLTRKLLFEAANVMLSRTSQALALKDWGAAVGRRSGFWKARVALARKLAVILHRMWIDGRGFEPRVTAMD

SEQ ID NO: 375884 - protein, 423 aa, unidentified
MAGVMIGIDPHKGSHTAFVIDGREKQLGQLRVRASCKQAEALLGWAGRWRQRTWAIEGARGLGQLLAQQLLAAGERVLDVPPKLTARVRLLESGQINKTDENDARAVAIAALRARQLPQLTVEDQTIVMRVWARRYHDLGRLRTQAVCRLHTVLCELVPGGVRKQLRTSQAIAVVDSITAESPVAQAKLELAHDLVADLQRLDAQRREVKRRVSRAVAAAPTSITEVYGVGPIVAACVLGYVRDIRRFPSRDRFASYNGTAPIEVSSGDRKIYRLSRRGNRQLNHAIHIAAVSQISHRGSEGHAYYQRKRAKGMTGKCALRALKRKISDTLYERMLHDIRPRKDPGGHSGNDAVSSAAGSHPDGPALRTSHSRATANSKTATTNQRPLTSPPAPDKRRTSRSGTGVKLQPRPRPRRGRGQERA

SEQ ID NO: 375885 - protein, 361 aa, unidentified
MRIIGCDLHARQQTVAVLDTTTGEVVEKTLMHEASKVREFYSTLSGPVRVGIEATGSMQWFLNLMEELGIECQVGHPAKIRATEPRKQKHDRRDADLILKLLVENRFPSIWRPSKDLLDLRALLLHRHQWVRMRTRIQNALQAIALANGLRRGPSLWSQAGQDTIASLPLAPHTAHRRSELQAMYVKFEAEIEKLNQRVEEQACERPGARLLMTHPGVGPVTALATDVFLGDPARFADGKALASYVGIIPSEHSSGGRQRLGGLSKQGNPLLRFLWCEAAAHAVRRDPELQRFYRRKLIQKGLGKARVAVARKLGIRLWILLRDQIDYNEFCRRGQMRQKNGDACAGMPETRYGAEPSPAD

SEQ ID NO: 375886 - protein, 325 aa, unidentified
MSQVVLGIDVSKDKLDVALLDGDKVRFHQVSNNSAGYARLHKWLAPAQGRRLHACLEATGQYGEGIATYLFEQGCVVSVVNPARIKAYAASKLRRFKSDKGDAELIAVYCQKEAPALWSPPEESVRELQYLVRHLNDIKNMRQQVRNRLQSGVSSRRVCDDLAAHLAFLDEQIARLTRDIQEHIDQHPDLKEQRDLLKSIPGIGELTAAVLLGEIRDIRSFENARQLAAYAGLVPEQRNSGTSVHHKPRLSKTGNAHLRKALYMPAIVARTHNPLTAALSERMLQTGHCMMAIIGAIMRKLLHLAYGVIKTGKPFDPLHAQSVSA

SEQ ID NO: 375887 - protein, 414 aa, unidentified
MKQQEVAAWIGLDWADKKHSIHLQVREGKREHRKLEQKPDVIHEWVAELRQRFQGQRVVIAIEQRKGAVVHALMMYDFIVLYPINPKALARYREAFRTSGAKDDPSDSERLLDLVSKHGDKLRAWVPDTVEARKLQLLCEQRRKIVNHRVALTNRITSLLKQYFPQALDWVGDVASIQACDFLANWPTLSAVQHARKETLRKFYRQHNCRKTSVIDERLLQISNAVPLTNDPAIIEPLSLSVQTYAVQLRSLIRAVQQFDKYIAETFAQHPDHDVFDSFPGAGQVCAPRLAAAFGTDRSRWQSAVEMQSHSGIAPVTERSGDSKWIHHRLACPKFMKQTFHEFSDQSIRFSKWARAQYDELRTRGKDHHAALRALAYKWIRILFRCWKDCKPYSEEKYLAAIRRRGSPLAEKIA

SEQ ID NO: 375888 - protein, 338 aa, unidentified
MHATTIAVDLAKSVFQVSLANQANRVIDRKRLTRSQFERFISQHPATTVVMEACATANYWSQYAETHGHTTKLLHAFYVRPYVRRNKTDSADADALLRANRDPELLPIPTKQPEQQALQSLHRCRQQLIETRTARVNFARGVLAEFGIALPRGISGIGNKLSARVEELPEVVIPTLKDIIAEISELKARIRRIDKQLETIAKQSGVTMHLLTIPGIGVTTATAMVGCVPDIHLFKKARQFSAWLGITPREHSSGSKRKLGAISKQGNNYLRTLLIHGARSAMLQAHRLAAKDPESLSELQLWVLALETRRPRNVATVALANKMARIIWVTWTQGRDYQ

SEQ ID NO: 375889 - protein, 371 aa, unidentified
MSESKGITYVGMDVHKSGINVAVILPGSKQVDEEWQLTNDVRSRTRMVRKLKQMGGDQVRVCYEAGPCGYDLQRELNDAGLDCVVIAPSLIPSKPGERVKTDRRDGRKLAELFKAGLLTEVHPPTPEEEAVRDLTRAREDGKRDLLSARHRLTKMLLRNGYVYRQGCNWTQRHRAWVKAIHFELRDQQEVLNNYILSVEQIEERVKHMRERLEEVAQSEAYADRVGWLSCLRGVDTVTAMTILAELHDVSRFKKPRELMSYLGLTPSEHSSGGHTRRGSITKAGNGHVRRVLVEAAWNYRHRPAVSAHMARRRKGQPAEIIAIADRAQQRLHKRYYRMKEVHRKHHNVVTVAVARELTGFIWSILQYEKAA

SEQ ID NO: 375890 - protein, 557 aa, unidentified
MEGTSLVIHARMIYGLLSTAGGGKYPNSPVVLCSQSPTFSMGPGAATKTLVTPSSEGDPVLGDCTLLATRTNRLPSKGNYMQEDKYTKKRSKNNVKASASVDSSPVLHPDAAGVDIHPTAIFIAVPPGRDATPVRKFSTFTCDLLKAVDWLKQCRIRTVAMESTGVYWIPLYQLLDDHGFQVCLVNARHVKNVPGRKTDVSDAQWLQYLHSVGLLRGSFRPPKEICALRSISRHRENLLQMGAVHIQHMQKALDQMNLHLHHVIDDIVGVTGLAIIEAVLAGERDAKRLAGFRHYRIQSSESTIMKALEGDYRPEHLFVLRQSLNSWKHLQRQIAECDAELESLTRQLEAKSNHAPVALAPCPRKKVSKNQPKGEWQQLLAQAFGVDLTGIPGVKTATAQAFLMELGPDWNCFPTSGDFSSWLNLCPDVGLSNGRLVHRQRRRIQKRLRCALRMAALSLHHNRGPLGSEFRRRQSQLGPAGAITAMAHKLGRIMWHLVTYKTPYDESIFLAAEQKHQQRHQRNLIKRIEAMGYHVVAAQQPDPGAAPELVQQPAQVP

SEQ ID NO: 375891 - protein, 336 aa, unidentified
MTEITRIAIDTSKSVFTLHGTDADGRAVLRRNLRRQDMVPFFARRPPMEVVLEACGGSHHWGRVLAGLGHTVRLIPPQYVKPFVKRGKNDRNDAEAISEAAARPEMREVAVKSADQQANAMLLSVRELLVRQRTQLVNALRGHAAEFGHVGRLGRQGVAKLLADVAEDADLPTPAKDALALLGAEIGRLDARLAEVDARLVAQHKQTPTSKMLAEVPGIGPIGALSLVLRVDFSQFKSGRYFASWLGLTPREHSTGGKTRLGGISRAGDERLRQLLVLGATAVIRQAKPGKASAWLIALLARRPRKLAAVALANKMARIVWAMMTSGEAYRQPATA

SEQ ID NO: 375892 - protein, 412 aa, unidentified
MEGETVIAGVDTHKDVHVLCLLDGLGRKIWSGSFGADPEGYDRLAEAIGDPGSCMVVGVEGTASYGAGLTRRLVELGYNVVEVLRPKRDKVRPGEGKSDPLDAERAARKAASGRGCSVPKSQDGWVEAVRQLYVARRLAVATSTSCVACAKSMLTTAPSALRERFRGRERPKDLMPLLARGRKAGDALEESVLASLRSVAAVWKEARSQVESLDERIRALLEANAPALLGVEGCGTTTAAALVVAAGDNPGRLKGEAAFSMMCGASPIPASSGKTDRHRLNRGGNRQANWALYEIAIKRMAYDERTRRYVAMRTSEGKSRREAVRCLKRYIAREVYHVLMDPNPDGAAPEGPELAKMRKAMRVTQKKAAAELGLSAATLGHLERGKRRSTKLERRYYELLCELERTLPQTAS

SEQ ID NO: 375893 - protein, 317 aa, unidentified
MTRIICGVDVASKKLDARIGPEGPFETFDNDAEGVSALAAFCRKHGALLVVMEATGGYERQAFAQLWGLGLKAAIVNPRNVRDFAKAMGWLEKTDKIDAGAIAWYGEVRRVKPTPLASPTQQRLTALVMRLGQLTNLRTAQNQQRRGVTDASVLSTISPILAVIARQIRALETEIAQEIAADPLWKTLDAAFRSLKGVADRTVARLMARLPEIGLISGKAITKLVGLAPIARDSGNSHGKRAIRGGREDVRAVLFVVADIVRKFDPDFTRFRDRLLAAGKPKMVVRIALAHKLLVRLNAKAREARHEFARRTAAPTA

SEQ ID NO: 375894 - protein, 426 aa, unidentified
MRVMYDRVAAIDVHKDMVKVAIRVPGVKRGTRKTDVLEFRTFYGVLQAMARELRGRGVTHVVMEASGVYTDPVYYALRELDFTEVMVINPAHAKALKGHKTDAKDAIRLLDLYECGLLSGSYIPDPDLREVRDLARYRMKTVQARTSEIQRLQKALETAGIKLSSVVSDVTGGSATAMIEALISGERRGSVMAGLAQTRLRTAGKMADLSMALTGRFTDHHALMCRLHRDRIKVFDDAVQDLDAKIAPLVARYAREAELLKTLPGFGDVIVAGWLGAIGPAPHQHFATASRLAAWATLCPGNYMSARKSKGGRTGDGGAYIKPLLIQAAWAAVRVPGRLQARFRRLVRKFGGPRNKGAQKRAITAIAHTLLKIAYSVLKTGTPYADLGADFYTRRESPDARQDYLIRQLHKLNPGCVITITPAETA

SEQ ID NO: 375895 - protein, 427 aa, unidentified
MPYKIAGIDVHKRMLHVVVSDVQVDGEYDFTRCIFGSLPEALRSLAAWLVEQQVEEVVMESTAQYWKPVWGALERYWKPISQTREGALATSGTLHLAQALSNRGRRGRKKDFRDAERLVKRLVAHELTLSFVPDVEQRLWRTVVRTKYQLTRNRVQLQNRLEALLEEAHIKLSSLVSDLLGASARRMLEAIAGGETNRETLAALADRGLRATQDQLQDALGVCQELNPVYRRLIKMVLDEVASIDKRIDQLNQEMASLLRPHEDQVKRLAEVPGLGVDSAQQIIAEVGATAATFPSEKHLSSWVGACPGDEESAEVNYSRRSPQGNRHMRRILNQAANAAAKHKGSIFQILYGRYVPRLGHNQTIGIIAHKLCRLVWKILHRGIRYEERGPEVSKASKQKRTRKMIRQLRRLGYRIEPSPSQSAITA

SEQ ID NO: 375896 - protein, 435 aa, unidentified
MQTDWFQNLYISVGIDVGADFSWMSIALPNQTFHGRPFKIIHSDLDSLTLAVSKIKEAEELHSLEIRIFLESTGIYHYPLFCYLRDKGFNVSVVNPIITKNSTNINIRKVHNDPADSKKAALIGLKPDLKTSLIPSDLVLDLRNLCREYYDLMNSRSAYVNKLHGELRMVFPQYLGIFSKITTDTSLTLLEAYGSPLAFLDAPKEKIIKSIQRTSRFGPAYAQSKCQAIHKAAGDALVFGHSVPSNFKRMRRFIHAIRQYDQQIAAVLSDLHELVDAHEGTKPVEQIRLIESYPGAGFLSAVSLIAEIGDFSAFQSPKQLFAYLGLDPAVKKSGKWEGTKTSMSKRGSSIARRVIHTMAIQGIRRSRDGSASNPVLRDYYEQKCLSKPKKVALGAVMHKVCNIVFAILRDETPYRVITPEEHRQNYLKAKCGIAA

SEQ ID NO: 375897 - protein, 406 aa, unidentified
MDVVYSHVCGLDVHKKNIVACTITPEGKEIRTFGTMTDDLILLVDWLKAKECTHVAMESTGAYWKPIYNLLELEEIETLVVNAQHIKNVPGRKTDVKDAEWIAGLLRHGLLKGSFIPNREQRELRELIRYRRSLIEERAREVSRIQKVLEGANIKLSSVASNVLGKSGRAMIEAMIAGETNPEALSDLAKRKLKSKKADLKRALNGLMGPHQKLMLGAQLRHVDYLDEEIGRLDEEIKKRMLPFDEDLELLDTIPGVARRTAETILAEIGSNMNQYPSAAHLCSWAGLCPGQNESAGKRLSGKTRKGNKKLRSTLVEAAKAAARTKETYLSSQYHRISARRGANRATVAVAHSILSMVYYILKRKQPYIELGPTYYEERKRDVIIKHSIKKLESLGVSITVNTAAS

SEQ ID NO: 375898 - protein, 321 aa, unidentified
MITRIYVGVDISKNWFDVCTSLDENASVERYSNNPDGHAKFIKAVTPLCGKIHVCMEYTGGYETPLALACRAANLVVSMIDGGKFSTYRKSFGRAKSKTDKQDAKLLARYASERKPAEWFPVPDEYRTLRELTRHRKSLIEAKTAWGCRASHTVESELVTAQRQTLREVLALQIKELDKAIALHIKVSPSLAEALNLLVSIPGIAEVAAAGILAETGPISNYKTPKEYALAAGLNPINIHSGKNTPPGKLPVYGNADLRSALYFPAVCSRSHKIGVWKFMERVAGNGDKVKMTVITAGMRKLAHIIWGVLSTKTKYDKDKM

SEQ ID NO: 375899 - protein, 417 aa, unidentified
METTETQYKVAGIDVHKSMLAVVVADAGREGEFQFDRRKFGTTESELRQLSTWLDEERVREAVMESTAQYWKPVWQQLEGQCELYLAQAHSNRAPRGRKRDFADAERLLRRHVAGELILSFVPNPEQRLWRTLTRTKHQLTRDRVRLHNQLEALLEDARIKLSACVSDLLGLSSRRMLQALAKGETDAAQLAAMADPNLRATPERLRDALHAAATLSALHRQILRLFLKRLELMEEQIEVLDKSIGEALHNYHAAVLRLAEVPGFGIDSAQQVIAEIGPTAATFPSAEQLSSWVGTCPGREESAEVSKNNRSPKGNKMMRRVLNQVANAAVKTNGSIFQSVYRRLVARLGHNKAIWAIAHRLCRLAWKILHQGVRYIEYGNQRNPKAVKTRMKKLIRELQSLGYQVQVEPLKNSPTP

SEQ ID NO: 375900 - protein, 410 aa, unidentified
MGLFCGIDWATEHHDVAVIDDDGRVVARGRVSNDAAGFAALLTLLAEAGDSAAHPIPVGIETDRGLWVAALRETGRVIYPINPLAASRYRARHAVSGAKSDATDAVLLANIVRTDAAAHRPLPADTELAQAIRVLARAQQDAVWARQQIGNQIRDLLKDFYPAAIAAFAGLPEGGLARADARTILAAAPTPTQAATLTPARLRRLLTKAGRRRHLDRDIERLRAVFTDTYLHQPPAVENAMGIQLAALLRQLEAACTAADELAEAAIAHFEQHPDAKIITSFPGLGMLAGARVLAEIGDDRTRFADARGLKAFAGSAPITRASGKKTVVLHRHIKNRRLAAVGPIWALGSLRASPGARRHYDARRAAGDWNHQAQRHLFNKFLGQLHHCLQTGRLYNEHLAFPPPLSLAA

SEQ ID NO: 375901 - protein, 397 aa, unidentified
MYIVGIDIAKRKHEAAVIDGDGAVIIKPFSFTNNCSGYNRLLAMLAKAKLPLDEVSFAMEATGHYWLALFIRLQKEGFRVQVINPVQTNSIRSFYIRQAKTDPRDALLIAEVIRFGHFSESTLHPENIYELRELCRGRHAIVSMQADVKRKVVALLDQVFPEYETAFTNLFGDTSMAILRTCPTPKELSEMPLEELCHLIEVSSHKRFRMAKAQELQVLARNSFGFAMAGDVFSTMIRLYAKHLVFLKQQVREMDRKIAEIMDTLDTPITTITGIGPTLGAYILSEIGDVSRFSSAAKLAAYAGIDPTMRQSGEYNGIRNRMSKRGSPYLRHAIWLAASSAVLHDPALKLYFQKKRDEGKPYMASVGHACRKMVSIIYAVMRDNKAYTPYIPNEISA

SEQ ID NO: 375902 - protein, 415 aa, unidentified
MNTVYDDSIPNPLFVRSSKEQVTACVRTPAAGGDRREQHVAEFKTTVQGLLGLRDWLAALGVTHVVMEASGVYWKPPWAILEDEFQCMLVNARHVKQVPGRKTDVKDAEWLCQLLEAGLLNASFVPPKPIRTLRNLTRYRKAQIAERQREANRLHKILEDTGIKLDCVASNILGVSGRAMLDALVQGTTDPEVLADLAQGKLRAKIPALQEALEGRFDDEHALVVGAILAHIDFLDEQITLLSDAIGEKIAPFESAVELLCTIPGVQRRTAEVMIAEIGTDMSVFPTAGHLASWAGLCPGNDQSAGKRRSGRTRKGSKWLSIALTEAAQANTRSRDTYLSAQYRRLKPRRGHRKAIGAVRHSIITAAWHMLSTGEVYNDLGSDYFTRLDPEKHVRRLLTQLERLGHTVTLQEAAA

SEQ ID NO: 375903 - protein, 366 aa, unidentified
MIVIGADTHKQSHTCAAAKAGTGELAGERTAAARKPGFRALLDWGRSLDEQRIWALEDCRHVSGSFERFLVAEGEQVVRVPPKLMGESRKGERARGKSDPIDALAIARAALREGPETLPAAHLDERALELKLLLDHREDLVRSRAEDQQRLRWHLHDLWPELRLPAGCLDRIVWLAKLARKLSRAERSARVRIARELVGAIRDRTRRALELEREITALVGAQAPELLELPGCGALTAAKLVAETAGVERFSSDSKLARLAGVAPIPASSGNRNRHRLDRGGNRQLNCALHRIAVTQGRVHPPAREFLARKQAEGKSRMEALRALKRHLARAVWHALRAARDRESINSLSLIDEVPKLRPAEALALT

SEQ ID NO: 375904 - protein, 375 aa, unidentified
MYRGRAMSGYGDAFIGLDTSKAKNAVAIAEDGRGGEVRYLGEFENTAPATRKLVSRLTEKYDHLHFCYEAGPTGYGLYRQLQDLGQDCAVVAPSLIPKRSGERIKTNRRDAVSLARLHRAGELTAVWVPDTLHEAVRDLSRARETAMEDLRRKRQQVTSFLLRQGRSYAGRTTWSGRHRRWLAEQTFDHPEHQLVLQEAVDTAKEAEARLDRLGAALAEIVPTWSMAPVVAAYQAMRGVNFLAATTLVAEVGDLRRFDNPAQLMSFLVPSEHSTGDTTRRGAITKTGNRRARRVLVEGAWSDRFGARVGRQLLERMTDLPKEVRDIAWKAQVRLCKRYRVLTARGKRVVATAVAREMAAFLWAIAQVVAPKEAAS

SEQ ID NO: 375905 - protein, 370 aa, unidentified
MSQSSTLFIGMDVHKETIAVAYVAQDHGAEVVYLGTIGTRQCDIDQLIRKMQSKAKHLIFVYEAGPCGYWLYRYLTKKGYDCWVVAPSLIPKKPGDRVKTNRRDAVQLARLARSGDLTAVYVPKVEDEAIRDLTRAREDTLSDCKDAKFRLKAFLLRHDIRYTGRANWGPAHLRWLSEVVCPTPAQQIVFQEYIRAVTEHTERLQRLDQELHEHVQAWRLHAVVEALQALRGVQFTVAVTMVAELGDLTRFDTPRELMKFLGLIPSEYSSGERRHQGAITKAGNTHARRALVEGAWAYRYPAKVSRHLQLRLEKQPKIIQDISWKAQVRLCKRYRHLVARGKHANIVTVAIARELAGFMWAIAKQLPVAV

SEQ ID NO: 375906 - protein, 418 aa, unidentified
MQGETRYLLFVGDDWSEEYHDVEIQDEAGRKLAARRLPEGAAGIARLHELIAAHLGADGDPGQVVVGIETDRGLWVQALAAAGYQVYGLNPKQVARFKERYNVSGAKSDAADAHALADMVRAERHQLRAVAADTAGAQAIKVAARAHQTLIWERTRHTLRLRSALREFFPAALAAYADLGLTGADTLELLTRAPDPAAAAKLTAAQLSAALRRARRRDVPAKAEAIKDALRVPQLAQPAAITAAYAAAVQASAAVLITLNDQIKRLEAQVEAHFLQHPDAEIYLSQPGIGPVNGARVLAEFGDAPGRYASAKARKNYAGSSPITRASGRSKVVLARFIRNDRLADALQSQAFSALTASPAARAYYDKQRARGLGHNPALRQLSNRLVGILHGCLKTRTRYDEATAWPNAVAHTEPLAA

SEQ ID NO: 375907 - protein, 416 aa, unidentified
MNAVGIDVSSRKSTVAVLRPLGEVVCLPFDVSHDADGLASLAEKLKALDGETRVVMEHTGRYYEAVAKALHEAGFFVCAVNPLLIKEYGANSLRRVKTDKADAIKIARYALDNWADLRDFTPMDAIRYDLKTLNRQFQLASKQRTASANNLIALLEQSFPGIRKCFDSPVRSDGTQKWVDFAHSFWHVDCVRKQPFPAFCERYRKWCKRHAYLFKLSNAEEVYALAKRAVVLTPKSKVVKVLVQEAANQLISISRSVEVYRAEMDRLAAMLPEYPVVMAMYGVGKSYGPQLMAEIGDVRRFERKQALVAFAGIDPMPNQSGDKNVRSNKSSKRGSPYLRKTLFNVIRTYLQCAPQDEPVFQFLNRKRAEGKPFYVYMLAAANKFLRRYYAKLRDYFASLDTLQSVDPIPATLKASL

SEQ ID NO: 375908 - protein, 343 aa, unidentified
MQNSTVVAVDVAKTIFEVAVSERPGHVCRRDRATRAQFLAFFLAYPGATVVMEACGSAHYWGRELQKRGHRVVLLPPHQVRPYVRGNKTDRSDTKAILEAYRNAEIRPVPVKSIAQQSLTTLHRLRSGWMAERTARLNAVRGLLREMGVFIPVGAREVVPAAWAQIEDADSEIPSVLRPVFAEACQEIRDIEARIKMVERELEALAAQLPAVAHLMTIPGIGLLIATAFVAFIGDIRRFPSGRHLASYLGLTPREFSSGLKRRLGRISKRGDGYLRTMLIHGARSVLIHARKQQPDRLRSWANALGQTHVHNKAAVAVANKLARIIWAVWTRDMPYQLMPKAA

SEQ ID NO: 375909 - protein, 411 aa, unidentified
MRLLVGDDWAQDHHDIEVMDEAGNVLVRRRVPEGVAGIGQLHELIGRFLPEQGTDVEVQVGIETDRGPWVAALIAAGYTVFPVNPLQASRYRSRHSVSGAKSDAGDAHMLADVVRTDAHQLRPAASDSAAAEAVKVLARTHKTLIWERAAVTQRLRAQLLEYFPAAVAAFDDLDAPDALELLARAPDPARAKKLTRAQVSAVLKHAGRYKIAARTDAILAALRSPQLGQPPALTAAYTATVRSLIAVIATLNEQVTVLQGQVEAHFGQHPDAEIYRSQPGLGAITGARVLGEFGDDPHRYACAKARRNYAGTSPITRASGKKKIVAARFVHNDRLIDALMIQAFAALRVSPGARTFYDDLRARGIEHNDALRRLASRLVGILHGCLKTRTCYDEATAWGHRETTGQSPVAA

SEQ ID NO: 375910 - protein, 371 aa, unidentified
MTSILYVGMDVHKENYTLCCYSYEKDALEYKQTIAPDYKMVLRYLERIRKRLGNNTEFVCGYEAGCLGYSLYHQLTDHGIKCVILAPSTMGITNTNSIKTDKRDAGNIARCLAFNTYSAVYVPTEEDEAVKEYIRMRDSQKKALKAVKQQILALVLRQGYFFDLGKSYWTGKHVRWLRTLDLGGVLQETLEEYLITYDYLTSKIERLDMRIEELASTEHYQAKVKKLSCLIGVKTHTALSVLVEIGDFARFSKADKLAGYLGLVPGEDSSGAKQMRTGITKAGNSHVRRLLVEAAQSYTRGAIGHKSKALHKRQHGNTPEVIAYADKANERLRRKFYRMVLKNNSKRNVAATAIARELACFMWGMMTDNAA

SEQ ID NO: 375911 - protein, 341 aa, unidentified
MDHYAGIDVSLEYSSICVVDANGKIIREGKVESTPAALISWFAALGHGLVRIGLEAGPLSQWLYAAMKEAGLAVELLETRHVRNAFKAMPVKSDRNDARGIAQLMRLGWFRSVHCKSISAQETRAVLTARKLLQSKLGDVERSLRGILRGFGLKVGRTTERSFAARIRTLVAGQAELERIAAALLEAHAVLLREFQRLERRVIEVARLDVRARLLMSVPGVGPIIAVSFAAAIDDPARFKSSKNVGAHFGLTPKKYQSGEIDRDGRISKIGDKPVRTSLYQAAHCILTKPLKGCPQLKSWAMKIARRAGMNKAKVALARKLAVIMHRMLVDGTPFNAAAAA

SEQ ID NO: 375912 - protein, 368 aa, unidentified
MKQQTSAATETKIKGRNIIDFTGKTIYVGIDVHEKDYQVAKVFDGICLGNHRKAANHQMLIDHLNSRYPGATFKCVYESCAWGFTLQRALNSAGIECIVVHAADVSSSDKENKRKTDKVDALKLARNLASGDLTGIHIPDEDLQKERNLIRFRKKLVGDLNRSKNRLKSLLKYQGIKIPEHLGKKNNWSYNFMNWVEQEANKDVLLKDTLLLMLEEIKFLRQLLLKTERALRKLMKERHNEKATLLMTAPGIGRTIAMQFVLEVGDIKRFHSFDALNDLIGFCPDTDSSGDMQRDRGITSRRHKQLRSALIEAAWTAIRIDPALMDAYQKLTKRMQGKYAIIRIARKLLRRMRTMLLTGQPYQIGVAA

SEQ ID NO: 375913 - protein, 344 aa, unidentified
MEQIIGIDLAKRVFQLHIASPLGKMIKNTVVSRDKLTAFIAQQPPSKIVMEACGSANYWSRQFKRLGHEVKQISPQYVAPFRMGSKNDKNDAIAIVEADSRPGMRYVPEKTIEQQDIQCLHRVRQRLMKNRIALINQIRGLGLEYGIAIPESAHKVEQCLPDHLENAENELTVLSRQLFQELLFELNDLQQRLNELDKRLNHLNTQHEDIRRLLTLPGVGPLGASVLMITLGDGKDFKNGRHFASYLGLVPKEHSSGGKVRQLGISKRGNSYLRGILIHGARSVVYRLNKRPDEQCNELQRWLKGLIERSGVNKAVVALANKNARIAWALVNQQSVYLPQGGIM

SEQ ID NO: 375914 - protein, 338 aa, unidentified
MHTVGIDVGAKELVVVMSRKGVLGKTKTFENTASGHKALIKYINPQKHSPRVCMEATGIYHFDLAVTLSKESEVELMVINPKVANRFSQALSMKDKTDAADAVVLARYAERMDFVSWECPSESKLTVRSYSRHLIKLTHHKAQLKNQKHALESTIKTPKLIMESQKKLIKMYEDEVKQIENEALNFIRADKEINAFFELLISVKGIAETSAIQLLGELLILPKGLTHKQWVAYAGLNPRKCESGTSVKKKSRISKAGNRYLRSALYMPALSATRSDRHVKMYYEHLQRDNGLLKMQALSAVMRKLLHAIWGMFETNTVFDSTRFYNERTNKTTLQQSI

SEQ ID NO: 375915 - protein, 351 aa, unidentified
MRHFGLDVHTKWTVLAWVDPQTGEIAEPYKLDNCELPAHLDQFARGGRIALETGSRSIFLARQLKSLGLEVLVVDAARLQPYLAARRTAKTDKNDALSLAQLLAAGELEALAVYVPDEYTEELRNLTRTRLHFSRQATADNNTLRSLVRSQGQDFPGTLATKKTQRWLEGWELTLSANNRLAVQELRAAWADHQVRLKRLDQELKAIARRDARVQLLKTLPGAGDLIAVTLVAEIGEIDRFPAAKNLRSYAKLVPQVRQSGERAHTGRLVQRGNRHLSRVMVLLAQHFSWWQGLYGTTLKRRYRRCRDKHGANPAKVALARDLCDLIYAMLRAGTEFDASRLPLTRPRPPA

SEQ ID NO: 375916 - protein, 391 aa, unidentified
MIYVGIDVAKDKHDCFITNSDGEVLFKAFSIANNRNGFNDLYQKIESVMEDVTKVKVGLEATGHYSYNLLGYLIDKGLPTYVINPLHTNLYRKSLSLRQTKTDKVDARTIASILMSDVNLKSYSDISYHNEELKSLTRYRFDKVKERAKLKTSVSRLICILFPELEKLVPTLHIASVYALLSEFPDAKQVANAHLTRLTNLLSESSKGRYGKETAIAFRNAARTSIGSNMPAKSLELKHTIKLIQELTSEIDEIENEIKLIMDEINSPILSIPGINYRMGAMIIAEIGDFNRFDSPDKILAYAGFSPSTYQSGQLDGAYSHMEKRGSRYLRYALYNAAKYVCHWDPTFAEYLAKKRAEGKHYNVAISHAVKKLIRVIYHLEKTNQQYIKAV

SEQ ID NO: 375917 - protein, 339 aa, unidentified
MKYIPVGVDIAKHLIQVHFINEHTGEVVDKQLRSKDFLTFFSNREPCLIGMEACGGSQHWARELEKLGHKVRLMQGRFVKAFVMGNKNDVMDARAIWMAVQQPGKEIAVKTEEQQSVLVLHRSRRQLVKFRTAQINALHGTLLEFGETIHKGRAAMDRELPAALERMRVKLPPYLIALLEDHYNRLSELDSLIDGIEKQLISVARQNETCKRLMEIPGVGPLIATAAAATMGEASAFKSGREFAAYVGLVPKQTGSGGKVRLLGISKRGDTYLRTLFIHGARAAALLAKEPSPWITELKKRRPTSVAIVAMANKLARTVWAIAAHDRKYDKNHVSIRPY

SEQ ID NO: 375918 - protein, 356 aa, unidentified
MSEKLNSKIAVIGIDIGKNSFHIVGQDRRGALVLRQKWSRGQGEARLANLPPCLIGMEACTGAHHLSRKLQALGHDARLMPAKYVRPYCKGDKNDYRDAEAIAEAVQRPTMKFVATKTADQLDLQALHRVRERLVSQRTGIINQIRAFLLERGIAVRQGLRFLRAELPDILAKRTDVLSPRILRIVEDLSGDWRRLDERIEGLSSEIEALARQDQGCARLMSVPGIGPIISSAMVAAIGTGDPFSKGRDFGAWLGLVPKQMSTGDRTILGNISRRGNRYLRTLFVQAAWVVLVKVGPKQWERYGLKSWIEAAKKRLHHNVLAIALANKLARIAWAVLHNGRAFECVKTNATASRSA

SEQ ID NO: 375919 - protein, 355 aa, unidentified
MKSKNPEDVGEVVVIGVDIGKDTFHLVGFDDAGQRVLRKKIKRLALLSTFEKFPRCVVGMEACMSAHFVSRMLRKLGFEPRIIPAIYVKPFNKGQKNDYNDAETIAEAAMRPNLPTVTEKSQDQLDLQAMHRVRSRLVARRTATINQIRAFLIEQGITVRSGRHRLQSSFEAILENRRDEISPRMRGTLLGLYGDWLWVDERIKAISAEIEEISKSEESSTNIMTIPGIGPAISTAIVAAIGKGEVFDRGRDFAAWLGLVPRQFSTGGRTILGRISKRGNSYLRMLLVQAANVILMRPHRWDALGLGPWLRGVKARMPHNKAAVALANKLARTAWSILRHGTTYTVQGDEALGGI

SEQ ID NO: 375920 - protein, 430 aa, unidentified
MKSNTQNAKIEAITEKTLVLGIDVGSETHYARAFDYRGIEYSKKPFKFSNTEAGFVTFKEWILDLKERHEKDKVIPGMEPTGHYWFNLGKFLQDNEMKPVLVNPHHVKKSKELDDNHPTKNDRKDPKVIAGLVREGRYMIPYLPDGVYADLRTASNIRFQLQAELTRIQNRISRWFNIYFPEYKTVYGKPDAKSGILILKAAPLPEDIVTLGIDGVNQIWRDAKLRAVGKARAKTLIEAAEHSVGSKEGEVAARMEIRMLLEDYEFRNTRLQEVMVLIEELVKGIPMAEKLLEIKGVGIRTVSGFLAEIGDISRFNNPKELQKLAGLALVENSSGKHKGETTISRRGRKRLRYLLFEAAMSLVAKNPEFRELHNYYTTRRLNPLKKMQSLMAIAAKLIRVFYAMLTKGVDYDPKKMVSDIKRPAVYLQAA

SEQ ID NO: 375921 - protein, 391 aa, unidentified
MIYIGIDVAKDKHDCFITNSDGEVLFKAFTIANNLDGFNELYQKIESVMEDVTKVKVGLEATGHYSYNLLGYLIDKGLPAYVINPLHTNLYRKSLSLRQTKTDKVDARTIASMLMSDVNLKSYSDTSYHNEELKSLTRYRFDKVKERAKLKTSVSRLVCILFPELEKLVPTLHMASVYALLSEFPGAKQVANAHLTRLTNLLSEASKGRYGKDTAITFREAARASIGSNMPAKSLELKHTIKLIQELDSEIDEIENEIKIIMDEINSPILSIPGINYRMGAMIIAEIGDFSRFDSPDKILAYAGLSPSTYQSGQLDGACSHMEKRGSRYLRYALFNAAKYVCHWDPTFAAYLAKKRAEGKHYNVAISHAVKKLVRVIYHLEKSNQQYIKAA

SEQ ID NO: 375922 - protein, 430 aa, unidentified
MKVFIGVDPHKLSATIEVVDERERVLAVGQFATDNAGYAAMRNHVAAWPERVWAVEGSNGAGRPLAQRLLADREHVLDVPAKLSARARLLDTGHNRKTDAHDAHAVATVAVRTKGLRVLAYDVELEALRMLADRREELTRARVQTVNRLHRILSELIPGKAKKDLTALQARRIHAGVRPRDLAGKTRRRLAAEQLTELIAIEKKIKALTKELKAMVLSSGSTLMDLPGVGPVVAARVLADVGDVARFADRNRFASWTGTAPLDASSGEQIRHRLSRAGNRRMNHMIHIAATTQVRLDTAGRRYYRRKLAEGKTRMEAMRCLKRRISDALFRQLVADAVASGAGPGGHCGASLTSSAVDLPPHIDTSDQPLPGPAPTTLPASAARANPRPGSAPQRSRRRAGAVKVQRPTGRTTLTATSDGAPSKEPIPAP

SEQ ID NO: 375923 - protein, 408 aa, unidentified
MCHLAIQNPRNLFAMRYAHRALRILAVAEKRPSAAFSLIIFKRHLLKHTECGSGMLRKDSAKSYPRRCRMTLYSGMDLHSNNTYCGITNESGKRLVGHRLPNEPQVILGFLEPYRSDLEGIVIESTYNWYWLVDVLQENGYRVHLAHPCGNEQYRGLKHTDDRHDAFWLADLLRLGCLREGYIYPKQLRPLRDLLRKRAHLVRLRTSLLLSAQNSIQRNRSLHVRNEDLKKLTVDLLSVHLEADEALLLAAKASKELIDAFTHRILRIEAWILKHLRSQVGFGYLLSLPGVGEILGMTILFETGPIQRFPDVGHYVSYSRLVASQRISNDKVKGKGNPNNGNPYLAWAFSEAAEHARRHYPRCRAFYNRKLQQKNATVAHCALAHKLARAAYYILRDQVVFDETKLFS

SEQ ID NO: 375924 - protein, 402 aa, unidentified
MNAVGIDVSKGKSMVAIMRPFGEVVATPFEIKHTTSDINSLVKFINSVEGESRIVMEHTGRYYEVLAHQLSQANIFVSAINPKLIKDFDNDSLRKVKSDRVDAIKIARYALDKWQNLKQYSVMNELRNQLKTMNRQFGFYMKHKTAMKNNLIGILDQTYPGVNTYFDSPARSDGSQKWVDFASTYWHVDCVRKMSRNAFINHYQNWCKRKKYNFSQSKAEEIYGKAKELVPVLPKDEITKLIIKQAVDQLNSASTTVESLRTLMNETAFKLPEYPIVMAMKGVGPSLVPQLMAKIGDVSRFTHKGALTAFAGVDPGVNESGTYEQKSVPTSKRGSSDLRKTLFQVMDALIKTKPQDDPVYQFLDKKRAQGKPYYVYMTAGANKFLRIYYGRVKEYLSSLSES

SEQ ID NO: 375925 - protein, 465 aa, unidentified
MDYAKAQHTALICNGRGDLLKPSFAVENTLQGATQLLAEVRACAKQKKIRPEHVFFGGEDYPSYAENFLRNLRQEKFLVVRVNAWEAKQQRDNFQASSDGLDLLGIARCCLNRRGESVRDLPEAYPNLRIATRDRDKLVRMRTAVSNRIHSYVDRLFPGFLSVSKSGLDPFSKASLELMEDRFSPAQLSRRPRQALAEWLGRRGVVQPQDKATQLKQLAKDVLEPAPEQTVMLQQTLAQLVGLYRGLEQSVAKLDREVAHWLARTPGAWLTSVPGFGITLAAGWTAELGPPRQWRSVRQLCSYSGVVPKSKQTGGPQKGPVVGAVQQRCNKRLKNVVLQAVEKVIRFGPEELRRTAQELEARGAHTEFAIAKRLVRLGKYLAVTGTVYRPKAMLDPDTPKTTLAAHYQTVWEKLLPKWREKADLGDVFAPEQPLGQWRKMVQELYALELRLPQQKAAQKSSAVAP

SEQ ID NO: 375926 - protein, 401 aa, unidentified
MKRACGLDVHKDTIFCATFDGKKHGPVTEYTTLTSSIRAMGKELQSEGVDAIAMESTGMYWIPVWNILEDMDFHLILVNPFLIKQMPGRKSDVKDAQWIATLLHKGLLRSSLVPCKEIRELRTYSRRYVKLQQRQTSVLQDMERTMEMCSIRITSFVSNISGKSVLNVIEQIVQGETTPDVLVGSIHGRIVNKHTKQNIKESLTGFITDHHKFILELALQEYELLISQSNKCVLKMEELCNEHYKQEMKLLITIPGISHISAMIVLAETGADMKAFENSGKFSGWTGLRPRNDESAGKYKSTATTKGNRFLRSVLVQIAWAASRSKGCYFKEKFNQLAMRKSRKKALIAIARKVGVLIWNVLYYKQAYNPEKLIVYDPGKLQAKLSYHQKEYDRLQKLIKQ

SEQ ID NO: 375927 - protein, 337 aa, unidentified
MKLYAGMDLHSSNCYTGIIDERSKKQFSRKLANDKRRILSALAPYKEDIEGIAVESTYNWYWLVDSLMEEGYKVHLANPSAMKQYEGIKHLDDRHDAFWLANMLRLGILPEGYIYPRETRGIRDLLRQRSRFVVQKTSLKHTLQQIYCNHTGMLLSNNSLNNLEEEEIISALGEEVLSYSGISILSTIRFIEGQIEAIEAQVLKKVKGEASYSLLQSVPGIGVVLGLTIVLESGHIDRFVSAGHYASYCRCVPTAYWSNSKQKGGGNKKNGNKYLSWAFAEAASFAIRYCKEAKVFYQRKCAKTNQPSAYRAVANKLSKACYYIMRDQVAFDVGRLF

SEQ ID NO: 375928 - protein, 444 aa, unidentified
MEGLEKFEKRVFSEGATPTIVFEPTGLAWIPMAAYLRARHPDCQLVKARLQKVAALRKYLRSRAKSDRVDGVTLAKMPFIDAEQLDEAYLPPAQYHALQRLTRQRERLMKSTTIRKNRIGSIINGYLPGLRKVFTDEWSDWARLFYRQLLNPFTVIRNGKDALETLFVSAKAKGAVTESHRVYQACQKLAEFYEKSRAAGMIDEDFFDDLQDEIACELRLMEAEEAEVARVSDRIEELYQRLHPSDHLRTIPGIGVRTAQVFLAVIGDPNRFRNQSAFANWTGVVPGARQSADSEGKGLRMTKAGPSMMKRALYQAGDIARRYDPQLAALYYREMVQHGKTHLQAMGAVMSHLAARTLAVLQEDRPYELRDNQDRPISRTEAIRLIQQSKVPEETRQARRRRKPNEGRLTGRRTREAAKAPQSELLIPPPKIVYCAAELQSTAN

SEQ ID NO: 375929 - protein, 354 aa, unidentified
MLAELVEHVIGVDPDRDWITAAVVDARTTGVLATQKFSADSAGYDEAISWAEEFTTAGERAWAVEGTASYGRGLTAALARSGEWVIEFDRPREKGSKDGAKSDELDAVRAAREALGRDRIHQPRAHDGRREALRVHTVTRAGVVRARTAAINELKALVLTAPDDLRQELRHLTTRSLVKRCASFRDALSRPVAERCARNTMRLIARRIICFNDEVAVHDLAMKQLIDEAAPQLVAEPGIGHVTAAMFYIAWSHPGRCRNEAAFARLGGAAPLPATSGQSQDRHRLNRSGDRQLNTALFTVALSRSRIHQPTRDYRDRRRSEGKTDREIRRCVKRYIARRVWRLLEHPPGLEITT

SEQ ID NO: 375930 - protein, 414 aa, unidentified
MSNKLYVGVDVHSEDNTACFLNEEGSMLSKTFSFPNSLPGAKLLEERIVQTGEENKLNEIKIATEATSFLDLHLVDFLATSKVLAKYSLGVYQLNPKITHGFKKVYPDKDKTDPDDAFVAADRLRFGHLPQPYQEHEPYMVLQRLTRYRFHLVETITQEKNRFLTHLFLKFSRFEVIKPFSNSFSATSKELISQFYDVDELACAPMEELVSFILKYGKSRFPNPEEVVDKLKQVARESYRIRPALARSINLILALSLQTIRALEKNLREIDKAISEEFKGFPNTLISIRGIGPVYAAGIFAETGNINRFHNQAELAKFAGITWRKTKSANFEAQNTRMTKTGNQYLRYYLIQAANSLRVHNEEYKLFYQRKHDEATKHHHKRAVVLTARKLVRLVFSLLKNNCLYQERVEKGSV

SEQ ID NO: 375931 - protein, 373 aa, unidentified
MTASMDEEAPAMESMRWVGVDVHAKESVAAVLDQATGEVSTHRIAGRPDVVLDWLTTVAQPFRAVYEAGPTGYGLVRRASERGLDVVVCAPGHILKNATDHIKVDKRDAVRLARLLSAGELRLVRIPEPDQEQLRDLVRSREDVRVDLTRIRNRIGKFLLRRELYPPQHAESWGVLHRKWLQQLRFEDRASELVFQDAIQAHDILVARREQLERALAEIAASSPWSRTVARLRCLRGIDTLSALGLVAEVGDFRRFVHPRFLSSYLGLVPSEHWSGDKRRQGGITKAGSKHARRLLVEAAWQYRHVPRTSHHISQRQQGQDPRVIDIAWRAQRRLYKRWQRLHEERRKRSTVVAVAVGRELAAYCWEIATLTG

SEQ ID NO: 375932 - protein, 429 aa, unidentified
MPYRIAGIDVHKKMLAVVVSNVEVDGDFHFERRVFGSNPEQLRSLAAWLLEQEVEEAVMESTAQYWRPVWGALERYWKPICEKREGARRRSGTLHLAQAQSNRGRRGRKRDFADAERLVKRLVARELILSFVPDAEQRLWRTVTRKKYQLTCDRVRLQNQLESLLEEVHIKLSSLVTDLLGASARRMLKALAEGETNPATLAALADQRLRATPEQLCDALGACTDLKPVYRRLLKMVLEQLQFLEQQISQLDQETASLLSQHQDAVERLAAVPGLGVDSAHQIIAEVGPTAATFPSEKCLSSWVGACPGDEESAGVNYSRRSPKGNRHMRRLLNQTANAAVRTKGSIFEIVYRRSVPRLGHNQAIGAIAHRQCRLIWLILHQGVRYEERGPAVTKQSKQKRTARMIRQLRSLGYRIESPNPQPGQAQPQ

SEQ ID NO: 375933 - protein, 340 aa, unidentified
MRQLYTGIDLHSNNSHIGIIDQEDKRIFHKCLPNQEDVVLAELEPYRKEMVSITIESTFNWYWIVDCLLDVGYTVHLANPAAMQQYKGLKFLDDKHDAFWLAHMDRLGILPQGYIYPKEVRPLRDLLRKRGHLVKLRTSLINSLQGIVSRNCGCSLSGQKMKQKNKNNVTPLLAENEDLALSGEVSKQSIDYLSSQIIKIEKTCQDRLKLNPQYTGLLTMPGIGKILALTIMLETGPIERFKKVGEYSSYCRKVPTTWRSNNKQKGRGNSKNGNKYLSWAFAEAAEYARRYDDKAKAFFNRKSAKTKPTVAYAALSHKLARAAFYIMRDNVEFDSNKLFA

SEQ ID NO: 375934 - protein, 375 aa, unidentified
MTRCAGLDVHAETIVACVMIGEQDDELFIETETFPTLTKDLFRLLKWLENHGITHIAMESTGVYWKPVYNILEDYFDITLANAQRIKNVPGRKTDVSDAEWIAKLLRYGLIEKSFVPPEDIRNLRDLTRLRKKWIGHLTSEKNRILKVLECSNVKLNSVISDVFGVSGRKLLSKLIQNGYVDSIDVENSIHGRMKHKKQMITDSLFGTLNDHQIFLIKQSWQHIVYLESLISQIEERIDEILKNYKEEVELLLTIPGIKKDSAAIIIAEIGVNMEQFPTSQHLASWAGVAPGNHESAGKRKSTKTTKGNPHIKTVLCEVAWAISRSRNRWLAAKYWSIAARRGKKKALVAISHRMLRIIYSMLINKEPYKEPLIN

SEQ ID NO: 375935 - protein, 352 aa, unidentified
MVIVIGADVHKATHTFVAVDEVGRKLAERTVKATTAGHEAVLRWARAEFDDRLRWGVEDCRHLSARLERDLLAGGQEVVRVPPKLMAQTRSSARERGKSDPIDALAVARAVLREPDLPAAEHDESTRELKLLVDRREGLVGERTRQINRLRWHLHELDPEFDVPVKGFAIAKQRRRVAAWLAGRDSLVAELARDILADIDTVSGKIDTLERRITARVDADYPHLTAAPGCGPLSAAKIAGETANVSRFRSEACFAMNAGVAPLPVWSGSTRGRVRMSRTGNRQLNAALHRIAVTQIRLDGLGRAYYRKRLEQGDSTVEALRCLKRRLARVVFHALHADQQVTRPTTALPLAA

SEQ ID NO: 375936 - protein, 441 aa, unidentified
MMAMRKRTDTVFPNAAGIDVGASSHWVAVPPDAAEESVREFGVMTDDLRALADGLLACKVEIVALESTGVYWIPLFEILEQRGLQVWLVDARQMKYVPGRKSDVQDCQWLQRLMSYGLLRAAWRPAGEVCELRAIARLRETLLAEQASWVQRMQKALVQMNIQLTEVLTDVMGMSGQAIIRDIVAGERNPEVLARHRHRRVKASTEEVIRALTGNWRQEHLFVLGQALSMYDDIARHLRECDAQMQVLLGQRAQCAINVGAVPRAGSKARAAFDVRQMLANWAGVDLTRINGLEVSSVMKILTEIGPDLSRFANVKHFCSWLGLCPGTKVSGGKVLSAGTKRSANRVRQALKMAAMTLSHSNSALGAFYRRLCSRMDKPKANTATAHKLARMVYFMLTRGEAFVDQGQQRYEELQRERSIAALKRRATALGFQINPIGAAA

SEQ ID NO: 375937 - protein, 348 aa, unidentified
MRFYTKQHKYSCGIDLHARSMYICILGDEEKPLLHRNCKATPEAFLRAIAPYREDIVVAVECMFVWYWLADLCAKEKIPFVLGHALYMKAIHGGKSKNDRIDSHKIALLLRGGTFPVAYVYPRKMRSTRDLLRRRNYLVRKRSELLAHIQNTNSQYNLPELGKKIAVKANRDGVAEHFPDPSVRKSIEVDLQLLDFYDRLLNELERYIEKSAKGHNIHSWYLLRSIPGVGKILSLVLLYEIHDIRRFPRVQDFVSYCRLVKCPRESAGKRFGTKNSKIGNVHLKWAFSEAACFFIRVNEQAQHYHSRLVSKHGKGKALSILAHKIGRAVYFMLKRKEPFSMETFFAQA

SEQ ID NO: 375938 - protein, 397 aa, unidentified
MKGFCISLDVSKGSSFYQGFKGLDEPITKPKKIEHNLEGFKELLKLKEIIRKEYDSDCNVIFESTGVYHKALQTYLDEHDFKYTIISPLLSAKVRKSDIRGTKTDAKDCSSIAKVFYLKESRIYSKMDEIYGDLKEKCRYYDFLVDEMKRWKIEFRRLLDIIYPGFDKIFDDVYTDYVQALLLEYPHPEIIRKKRLDTIAKFIEKHTCHKESFSLKQAQVLKEYAENCASGCSYKSYLVSQFDTVIHTLNSQIKHLEIELDEIVELAKNLPNYEIIKSIPGIAENLASRILAEIGDIDRFDNSSQLVAYAGIDPQIYQSGQITGLHLKISKKGNKKLRSLLYLAVTCMIKTNRDTKIVEFYKRKKADGLAARSALVASMNKLLRIIHSLCKNGCLFK

SEQ ID NO: 375939 - protein, 312 aa, unidentified
MAMRYAGIDVAKKTLDVCVLPDSTERQFANDRRGWTSCSRWLGDPQDTLVVLEATGGYEAQAADALRAAGFAVAVVNPRRTRDFARACGRLAKTDRLDAQGIARYAQMLQPSPREALDASHRRLRALVARRDQLLAMRTAETNRLEHATDRAIRTSLRQIVRALERQMARIEAQIRQTIDEEPSLRQAKETLTSVPGVGETTASMLVSDVPELGRLNRRQIAALVGVAPWNRDSGMFRGKRMTGGGRVRVRTRLYMPTLVAIRHNPVIHAFYERLVQNGKAKMTAVVACMRKLLTILNTLVAKNEKWKPRIA

SEQ ID NO: 375940 - protein, 309 aa, unidentified
MEIVVGIDVSKERLDVAILPQEEVFAVGNDHAGIDELAERLKGIGVDAIALEATGGFETLAVAGLSSAGLTVLVVNPAQVRAYAHAIGRRAKTDPIDAAVIAAFVLATKPEIRPLRDAETQALSELVARRRQIVQMVVAEENRLRMALAKQAQKSIKRLLTALRRELESLDADLDSHIRKSPVWRVREALLTSVPGVGPTTARTLLAELPELGSLDRRQIASLAGLAPWTRQSGKWKGKSFIGGGRGKVRAVLFMAALVASRYNPDLKAFRDRLVAAGKPKIVATVATMRKLLTILNAIIRDGRPWQNA

SEQ ID NO: 375941 - protein, 371 aa, unidentified
MKSILYVGMDVHKENYTLCCYSFDKDELEYKQTIAPDYRMILKYLEQIRKRYPEEVEFVCGYEAGCLGYTLYHQLTDHGIKCVILAPTTMGITNNNRIKTDKRDAGNIARCLAFRTYSEVYVPTAEDNSVKEYIRMRDDQKKALKIIKQQILALVLRHGCRFEEGRNYWTVKHVTWLKSLDLGGILQESLAEYLVTYEYLTDKIEWLDKRIEELAGGERYQEKVKKLSCLIGVKTHTALAAVVEIGDFNRFAGAEKLAAFLGLVPGEDSSGDKQRRGSITKAGNCHVRRLLVESAQGYTRGAIGHKSKDLKRRQNGNTPEVIAYADKANERLRRKFYRLTLKNNTNRNVAATAIARELACFMWGLMTDNIA

SEQ ID NO: 375942 - protein, 310 aa, unidentified
MEKVTVGIDVSKKQLDIALRPCGETFVVERNAAGLDALAERLTARAPHVIALEATGGFETVVAAALAVAGLPVVIVNPAQIRSFAKALGQRAKTDPIDAAVIAHFAEATAPEPRPLPDEATQLLADLVARRRQIIAMIGAERQRQMRVTAKRLKNSIARLLKALEKELNSVDSDIDDAVRGSPAWREKEDLLASVPGVGPVIARTLIAELPELGRLDRKQIAALAGLAPWTRQSGQWRGKSFIGGGRAGVRCALFLGAMVACRHNPTLKTFFDRLVAAGKPKMVAIIAVARKLLTILNAILRDQKPWQTA

SEQ ID NO: 375943 - protein, 316 aa, unidentified
MSVTTVEIFVGIDVSKNTLDVRIDSDSTILHVAYDAAGIKTVGKRLTEAAPTLIVMEATGGLETRLATELVAKGLPVAVINPRQARDFAKATGELSKTDRIDAAILCAFARAIRPSVRPLKDVDTRDLNDLVTRRRQLIDMRVQETLRMGCTASKAMQKNLKLHLVWLDKQIGRLDDDLKQRLRTSDAWKTKDDLLRGIPGVGAVTTLTMTAKCPELGQLNRQEIAKLVGVAPLADDSGKHRGRRFVWGGRAEVRSVLYMAAVSAIRCNPVIKAFANRLAKAGKPAKVVITACMRKLLIIMNAMIKNHSSWNPKIA

SEQ ID NO: 375944 - protein, 376 aa, unidentified
MITCFIGIDAHTTNYTLSTAIDAEDKPFNTCKYAPKLTYILKYANALCKKYNLKKEDILLGYEAGCLGFKLQRDLNENGFNCVVMAPSPIPGPAINRRKKTKNDIRDAEAIAKALRNDDYSSVATPDEEDEAIREFIRAREDVRMELKRCKQHIMAFCNRHGQHYEETGWTQKHMKWLNNLAFSQPVLKETLNSLLLEYEYLTEKLEEKDRRIEEFAQMDKYRESVHKLTCFKGIKTLTALAVIVEIGDFARFMKAKNFVAYLGLSVGEQSSGNDHNQTGITKQGNRFIRKLLTEAAQCFSRATSKKSKELKKRQEGNVEEVIAYADKANERLRKRYHHLVIHNMKSPNKAKCAITRELACFIWGMMTDNIHTVLV

SEQ ID NO: 375945 - protein, 359 aa, unidentified
MSSIAQQPIPRKVAIGVDTHKHIHVAVALDELGGRLGALTVATDRGGADQLERWAVSHGQILAFGIEGTASYGAGVTSYLRRQGHRVIEVNRPDRRERRLNGKSDALDAENAARAVLSGRATATPRVADGQVEMIRQIKIAKDTAVKSRSQAMITLKTLVITAPPDLREELDGLPRMALIERCAGLRPGPMTTPLAAAKHALRGLARRWQQLQVEIKEHERHLTTLTEAVAPAMVAAFGIGPDTAAEMLIVAGDNVDRVRSEPAWAKLCGVCPVPASSGKTSRYRLNRGGHRQANSALYRTVIVRLRFHQPTIDYVARRTAEGKTKAEIIRCLKRYVAREVWAYLHPERHDAPAPELAA

SEQ ID NO: 375946 - protein, 345 aa, unidentified
MEDGGVAYQVYVGIDVAAETFVAAWLAPGGKPGTPVTGEQTPTGFAALAHRLRATGVPSAATLVVLEATGNYRVALAVALHEAGYRVAVVNPRQAHHFAKAQLRRAKTDALDARDLAQLAAALRPAPWTPPPAVYHEVRQRLVARDGLLTMRTQARNQRHALLQWPVVVATVHQHLDELIADLDRRVAALEAAIAVVLQEGAWAESLACLTSAPGIGLVTASWLLVSTLNFALCAGPESLTAYVGLAPVPRESGRTIRGRRAIGHDGNGRLRTALSMATRSAARYNPAIKAFYQRLRAAGKPKKVARCAAARKLLHQAWALGSKLQRFDPGYQQQHHEVLPALAA

SEQ ID NO: 375947 - protein, 312 aa, unidentified
MTELTIGIDISKALLDVATYPEEQFQQFTNDAKGHKALVKWLGALNVKLIVFEATGAYHRELEQFLDQRGYPFAKVNPRQARRFAEATGRLAKTDRVDSLMLARFGELLQPSQGESKSQTLVELAELLVARRALVKDRTAAKNRQHNLVSPLLKRQANRRLKQIDADIKFIDEACITLVRADQQLNHRYNILLSIPGLGSLTAIIILAEMPELGSMDKRQTASLAGLAPVTRQSGKWKGKSFIRGGRANLRQALYMPALVAIRFNQEMAAKYKTMTEAGKPAKVAITAIMRKLIITANSLLRDNRKWSKISA

SEQ ID NO: 375948 - protein, 426 aa, unidentified
MKNTQNEKISQIKFSTLVVGIDVAKETHYARAFDFRGIELSKLLRFSNTAEGFQRLEEWMQNICQQHNKTEIIVGFEPTGHYWFNLGDYLKDKGHKLAIVNPFHVKRTKELDDNSPTKNDRKDPKTIAMLVKDGRYREVYIPQDVYQELREVVSERDRLVQRMSSISNQVTRWLDIHFPEFNTIFKDWQRKAALQVLRNFPTPDKIVTAGAVKIEETWKLTMKRTAGLKRAQELVKVAGKSIGRKTGLVAAEASLQNLLNEYDLYSQQYQQLEQLMLELLQQVPNAEKLLDIKGVGLITAATFVGEVGDIRRFQDPRQIQKLAGFNLVENSSGKHKGKTKISRRGRRRLRHGLFMAMITILATNPEFRQLHKKNITRENNPLNKMQSIIALCGKLIRVFYALLRTGTNYSADKMLGDIELGMKAAA

SEQ ID NO: 375949 - protein, 350 aa, unidentified
MKKNVKQVVGIDVAQKELVVCLGRMQDDLSNELYARKTFANTSKGFTSLLLWVKKLTDTATTVRFVMEATGVYHESLAYFLDEKGYELSIILPNKISSYFRTLDIKTITAKTASEAIAMFGLERKLQNWNRPKTIFKKMKQLTRERDQIVQERTIVKNQLHAEEVEAAPNKSTVVRIKQRIIFLNNQEKAIKEELAALIKSDKELKTDIELICSISGIGLLTAAIILAETNGFDLIRNKRQLASYAGFDVKEKQSGTSVKGKSRISKHGNKYLRKGMHLPALAAIRHDQRYKAIFVRLVSKHGIKMKAAVAVQRKLLEMTYTIFATKNKYEKNYLNKTEQGCQQEEMAMA

SEQ ID NO: 375950 - protein, 394 aa, unidentified
MDVLHLRCCGLDVHKSSISACILLREAGRVQKHQRRFGAMTQELQGLAEWLRQFGVSQVAMESSGVYWKPVWNILEGQFTVVLANAQHIKNVPGRKTDQKDAEWIAQLLQYGLLRPSYVPCEIIRDLRDLTRMRASLSQEASRISSRIQKVLEDANVKLASVATNVLGKSGRAMLEDIISGEDDPEHLASLALGHLRVKIPQLRFALEGKVRSHHRFLLRRLVDQIQFVEHEIGLLDERLEEIAQQRPELSQAVARWDTIPGIDRVAAWALLAEIGDNMAQFPTAGHLASWAALCPGNHESAGKRLRGTTRQGSPWLCRMACQCAWAAARTKNTYLTSQFRRLAARRGKKRAIIAWRIPSSSLAITCRRTRATMRILAETTSIASTPTVSNGTW

SEQ ID NO: 375951 - protein, 372 aa, unidentified
MKYVGMDVSSKSFVVHALDEKRQVLKREEIEPTRAALRKLCAELGEEAKLIAFEAGNQMKWIADTLKKQEGVKIHVVHPNEVKWIAQSGGKKTDQVDAKKLAELARSDMLPRAVHVVEGPTRQMRELVSARTTLMQERVSLINTVRSYLKQEGVQLSEKFFGQENWKEQLGQKKLSATLKVIIEAFRPVIEALEKSESELIDELKKLKDKRTELLETIPGIGVIASRTVVSALDDAKRFDNRKCVANYSALAPTVYQSGSELQMGRINRDGRQEVRRVMLQCAHSLVRAKSPASQPLRDFYHRVEQRRGKKKALVALARKLLTTCYGVLKSGKGFDPSKVEAKKAKAKQQGLQQEKKADGARTRRYVLRTVA

SEQ ID NO: 375952 - protein, 339 aa, unidentified
MTHTIVGVDIAKNVMQVHWVDPETGEIVNRPVKRAAFLEYFANRSPCLIGMESCSGSQHWARRLIEMGHRVKLMPAKFVKAFNIRNKNDAADARAIWMATQMDSKEVAVKTEAQQAVLALHRMRQQLVKFRTMQINSLRGLLTEYGEVMGVGRAALDKSVVGVLERLSGRLPAILIETLREQWKGLDDLDRRIGQIERRLHEWMKDDPSAKAIAMIPGVGLLTATAAVATMGQAKAFKSGREFAAWLGLVPGQTGSGGKIELQGISKRGDTYLRTLLVHGARSIIYRVREPGLWVTQMKQRRPLNVVIVAMANKLARIIWAMLAHQRPYRKDYESVKPA

SEQ ID NO: 375953 - protein, 404 aa, unidentified
MSYRIAGIDVHKKMLAVVVSNVEVESEFQFERRMFGGNPEQLRLLGAWLLEQEAEEVVMESTAQYWKPVWGALERYWKPIREKREGAKRRSGTLHLAQAQSNRGQRGRKKDFVDAERLVKRLVARELTLSFVPDVEQRLWRAVTRKKYQLRRDLVRLNNQLESLLEETHIKLSSLVSDLLGVSARRMLNALAEGETNPAALAALAHQRLRATPEQLCDALGACTELKPVYRRLLKMTLEHLQILEQQIGQLDQELATLLHPHQDAVQRLAEVPGFGVDSAQQIIAEVGPAAATFPSEKCLSSWVGACPGDEESAGVNYSHRSPKGNRHMRRLLNQAANAAVKVKGSIFEVIYCRSVPRLGHNQAIGVIAHRQCRLIWLILHNGAFTKNEGRQSPHCPSISARGE

SEQ ID NO: 375954 - protein, 355 aa, unidentified
MTSTQYIGMDVHKESISIAVRNAAGKVVMECVIETKTSTILQFFDGLRGDVQVTFEEGTWAAWLYDLLKPHVTEVVVCDPRRNALLQEGNQNDRVDARKLAELLHHNQLRSVYHGDHGLRTLKELVRSYLTITQDLSRVMTRVKAIYRSWAIPCTGKQVYAPRHRAEWLGKISEPGVRRRAEFYYQQLDALRTLRLEVRRDLLAESKKHQAWKRLCGIPSIGPIRAAVLLGILQTPHRFRTKRQLWAYGGVGIETSSSADHRVVDGQLERKKKQMEIRGLNRNYNHDLKNLFKGAAIVAATKPGPFAEFYAELLAKGMRPEMARLSLARKIATIVLIVWKRGVSFDAQHLKPQTA

SEQ ID NO: 375955 - protein, 349 aa, unidentified
MEYYAGIDVSLESASLCVVDATGRIVREAKVASEPETLIGWFRDLGLDLGFAVTRIGLEAGPLSQWLYAAMRDAGLAVELLETRHVRNAFKAMPVKTDRNDARGIAQLMRLGWFRPVHCKSLPAQEVRALLTARKLLQTKNHDVEMSLRGVLRGFGLKVGPTTPRNFPGRIRELVAGHTTLSTVAEALLAARSTLFEQWQKLEKQLRSMAREDKRVRLLMTAPGVGTIVALTYASAIDDPGRFRSSKAVGAHFGLTPKKYQSGETDVTGRISKIGDGGVRTALYEAANVILTRPVKGSTLKSWGMRLAARAGMRKAKVALARKLAVVLHRMLADGTSFLADKAAVAVAR

SEQ ID NO: 375956 - protein, 425 aa, unidentified
MNYKQNEKINQVKESTLVVGIDIGSTTQYARAFDWRGIELGKVFPFSNSREGFESFKAWMQHLQDKYKKLDAIVGIEPTGHYWFDLGAYLEDEGILLVMVNPYAVKQTKELDDNSQSKNDRKDPKVIAKLVTEGRYSAPYTPDGVYADLRIMVANRKRLIREMTQIKNRFARWFAIYFPEYTDVFGDYEAQSSMLLLKKVCTPEAIVELGAEKINQIWRDAKLRAVGMKRATTLCETAKRSIGLKKGSSAARYEMKLLLEDYEYKKAQLDAVMEEIEKLCRKIPESEQMLAIKGIGVITVAGFLAEVGDVRRFESPRQIQKLAGLSLRENSSGKHKGQTTISKRGRSKLRAVLFNAAIPLIAKNPEFKSLHEYYTTRANNPLKKKQSVIAISCKLIRVFYAILANGVTYDAQKMLSDIHRQPQVA

SEQ ID NO: 375957 - protein, 445 aa, unidentified
MYSLFFMEPYRKEHIMHNKNYISVGIDVGSAFSFMTILAPDETVILKPFKITHNNKDSLERAVSEIKKAEELYSLESRTFLESTGIYHFPLFCYLVDCGFNASIINPIITHSTKNGNIRKLKNDKIDSKGIAKLGLSKDIPVSQFPAKLVLELRSLTRKYYDLTDERSAHINKLKGDLHTVFPQYLDVFCDVTGKTSTMILRQYGTPDKILRGHKKTMIEKISKASRKGLAKASERYEKLCAAANAAKTFGCQIDSIYFNIFLTLDLVEKLDSALDSILNRIRQLITFNKNEKFIQQIKLLNTIPGVGFLTAVTIMCEIVDFSAFRNPKQLFAYFGLDPEVNESGKFVGTQLHMSKRGSRIARRAIFAVALASIRTKRNGEGINPYLRKYYELKSGQKPKMVAIGAVMHKVCNIVFAVLRDEKAFELRSPEEHCKQYQRPALAAA

SEQ ID NO: 375958 - protein, 349 aa, unidentified
MGEVSTIGIDIAKSVFQVHGVDTDGAVVIRKRIGRTKILKFFTDLPPCLVGMEACATSHHWARELRRLGHDVWLMPPTYVKAYVKRSKNDAADAAAICEAVTRPSMRFVPIKSAEQQSALMLHRTRDLLIRQRTQLINALRAHLAELGLVAAKGREGLHQLVTIVMESCDEKLLSGARFACQAIVMQLHAAQTQINGLDKCIVQAHRVNADSKRLDAIPGFGVILSTAVVATMTDPKAFKTGREFAAWIGLVPRQNSTGGKERLGSISKQGDRYLRRLFVVGAIAIVRTARMRPEKYPWVIKLLARRPAKVVAVALANKMARVAWAVLAKGESYRAPTRSSNAALAAAA

SEQ ID NO: 375959 - protein, 346 aa, unidentified
MAISLVAVDLSKSVFQLSLADAKHHIISRKRLNRAQFHRFLAQSGPVRLIMEACGTAHYWGRTAQLHGQEAKLLHAKYVKAYVRRTKTDAADADALILADRDESLHPIPVKTEELQALQGLHRIREQWKSARTARICEARALLAEFGVCIPKGARGIGRQLTAGAEHAPDLLQATLLDLIREIDELQQRIKSVDHRLAAYADTDCDVQVLLGINGVGVTIATAAVARVPSIHAFKRGRSFASWLGLTCREYSSGSTRRLGGITKQGDRYLRMLIIHGARAALVAARRKAANGKQLTRLETWAVNTQMRIGHNKATVALANKMARIMWAVWTRHERFNGDDALRFAA

SEQ ID NO: 375960 - protein, 430 aa, unidentified
MKSNTQNAKIEAITEKTLVLGIDVGSEMHYARAFDYRGIEYSKKPFKFSNTEAGFVTFKEWILDLKERHEKDKVIPGMEPTGHYWFNLGKFLQDNEMKPVLVNPHHVKKSKELDDNNPTKNDRKDPKVIAGLVREGRYMIPYLPDGVYADLRTASNIRFQLQAELTRIQNRISRWFNIYFPEYKTVYGKPDAKSGMLILKAAPLPEDILTLGIDGVNQIWRDAKLRAVGKARAKTLIEAAEHSVGSKEGAVSARMEIRMLLEDYESRNIRLQEVMGLIEGLVNQIPMAEKLLEIKGVGIKTVSGFLAEVGDIRRFNDPKELQKLAGLALVENSSGKHKGKTTISRRGRKRLRYLLFEVAMSLVAKNPEFRELHNYYTTRRLNPLKKMQSLMAIAAKLLRVFYAILTKGVGYDPKKMVNDIRRPAAYAQAA

SEQ ID NO: 375961 - protein, 340 aa, unidentified
MGDITTIGLDLAKSVFQVHAIDEAGKVMLRKRLRRSQVLAFFARVSPCLVGLEACATAHHWARELIALGHEARLMPPSYVKAYVKRNKHDVADAEAICEAVRRPSMRFVPVKMADQQSALMMHRARDLLIRQRTMLVNALRGHLAEFGLIEGQGLHKVTRLIAIVMDETDGRVPDIARQVLKVIVNQIEDTQTRIAGLETQVIAWHKSNPVSQRLATIPGIGPIIATAIAATVADPNIFRSGREFAAWLGLVPRQNSTGGKARLGGISKRGDSYLRRLLVNSAHMVLLCSKQARNDPWLTSLLSRKPRLVAAVALANKTARVAWAVMSRQDTYRHAAVAA

SEQ ID NO: 375962 - protein, 365 aa, unidentified
MLYLAIDQHSKQLTINLRNENGDVLQRRQVSTEWMKVRKFFGELREQAMSHGGFITIVEICGFGDWLLKLLAEYGCHSTVVVQPEKKDKQKTDRRDANTLGELLWTNRQRLLSGNTLQNMRRVRLPSDEECANRQLTELRKKTADTRTRTINRIHHILHKHNLHQSCPTKGLQTKAARKWLKDMPLPAIDRLELNQLLASWELQDEHLAAQNAEIERRQSRHAVAKVIATIPGASAFSSLALGCRLSDSIDRFDSGASLANFWGLTPGCRNSGDTKQRLGSITKAGSQLARRILGNLVLHVLRKDAWMRSWYQKIKARRGSKIGRVAVMRRLSTIIRRMVKHNEPYCCGGPPQVAKQRTIVSTLG

SEQ ID NO: 375963 - protein, 354 aa, unidentified
MVTIISDVLPRIVVGVDSHKATHQAAVLDITGALLGNESFAASTAGYHELEAWLATLGTIECVGVECTGSYAAGLTRFFLERHIDVFEVNTTHRATRARRGKDDAIDAEMAARKALSGEARARAKDTTGDIESIRLLKLSRESAVKARTVALLQIRDVLITAPAELREWIESAGGTRHRVNRAGALRPDLERLGEPLQAAKFTLRQLSRRIRFLDEEISSLDRQLVALVERCAPHLLACCAIGTQHAAQLLITAGQNLERLTSDGAFARLCGVAPVPVSSGKTNRMRLHRGGDRQANRTLHLIAIARLRLDPKTQFYMARRRADGLSKMDVLRCLKRFIAREVYNALKLDLLQH

SEQ ID NO: 375964 - protein, 411 aa, unidentified
MDKVYDKCCGIDLHKKLIVACFKQGNRQEIRDFGATTRELLEMADWLKEGGCEMVAMESTASYWKPLYNILETCELKAMVVNAQHMKAVPGRKTDVKDAEWIADLLQHGLLTASYIPDKDQRELRELVRYRKSLVGERARELNRLQKMLEGANIKISGTIRDINGKSARNILEHLLSGKQIDSAEYDILYEKKIIAHNLKATKEQIIDDLNGVMSVLQKKMMRIILNHLDELNAHIRELDDDIDNFMKPEEKEAAKVIQDIPGIGNTSAQAIISVIGVDMGRFPTDSHIASWAGLCPGNNKSANKRKSGKTRKGNGLLRDTLIVCAHSAVKNKSSYFHAQFARISAHRGSKRAYVAVAHSMLVAIYHILKDGVVFRDLGAEYYNQFNRERKINAYLKKLKALGWEVPVVAA

SEQ ID NO: 375965 - protein, 371 aa, unidentified
MSFFCGLDLHSINTLIGVLNHQMKRVFMKRTPNKLSVILRHLEPYKKDMVGVVVESTFNWYWLVDGLQEAGYKVHLAHPGAFSEYKGLKHADDKHSAFFLAKMLLLGILPEGHIFPVKDRHIRDLLRKRLRLVSNRTQYILSFKSLVNRNLSINLNSNVIKKFTEADIEEMFEDEHLLLSAKANITAMRYFEPQTKAIEKKILQTASLKPEFEILLTVPGIGKILALTISLETGEITRFKEVGNYASYCRSVSSQRTSNNKKKGENNRKNGNKYLAWAYLEAAHKLRRYCPQAEAFYKRKTLKTNKIVAIKALAHKLSRACYYMMKDNVPFDLSKIFGYPLKVNNRCGGKPERGLESKPFAPIGNTATPPI

SEQ ID NO: 375966 - protein, 343 aa, unidentified
MVHYIGLDVSLKRTSICVVNQVGSVVREGVVESEPEAIAAFVRSNAPGAVRVGLETGPTATWLWTELKRLGLPVICIDARHAKAVLKMQINKSDRNDAAGIARIMQTGWFKEVRVKDLDSHSVRALLASRALLVKIKRDLENQIRGLLKNVGLVIGRAKFNVFTVRAEELIEDRPELMAVVRPLLKARQAIEQQTDDLDRKVLKLARYDAQVRRFMTVPGIGPITALCFKATIDDPTRFKRSRSVGAYVGLTTRRHASGEIDWTGRISKCGDAMLRSYLFEAAGVLLTRVPKWSALKAWGMRLAKRNGLRKATVAVARKLAVILHRMWIDGTEFNWSKKEVAA

SEQ ID NO: 375967 - protein, 327 aa, unidentified
MKHTHVVHIGIDVSKQKLDIDAAELGATSIPNTPAQVRKALAAIARKAKPDNPLHVCFESTGPYTGALAEQCQALELPYSILNPNKVKHFAIAIAHAKTDPLDARLIRRYAQVKKPAPATPPSKAVALLDKFVLARDVLVKNTVALGGVLETLKGTPAAKPVERAIAQLQKQTAQCDMLIQQTIDADTELAGLVTALTAVKGVGTLTAAKVIANMPELGTLGRRNAAALAGLAPRTRESGAFKGRARIGGGRKQVRDALFMPATVAIRHNPELKRLHTRLIDKGKPYKVALTAIMRRLLCHLEVLAKNHRARREETPEIAPTYSKKK

SEQ ID NO: 375968 - protein, 400 aa, unidentified
MIHVGVDIGKSKHAAAAVNDAGACVMRPRFFTQDAGGFASLFGALEGQGGAASVVVGMEATGHYWKVLRHALVARQYRVDVINPLITSREASADVRGRKSDKLDALAIANVLRKGGYSPAPGELAATDTLKVLARHRKALVARGSDAKRRLISALDVAFPEAAKTLGDLFGAASLAVVRAFPSARLGAAADIRTLTSLFAKASGGQLGREAAEAYREAARHSLSLAMDTKGEEFVITQIVDEIRAAADQIDEVERRILAEPQPIIARLLGSIKGAGKIQPMAVAAELGDPSRFAGPDMAKKVLAYAGCDPRVRESGKWKGRAKMSKRGSPTLRNALYLLAGTIRLHTPYFNAVYKRQIARGKHHNVALSHVVRKIVEVMCGMYKTNTPFMPQQPEVTPCS

SEQ ID NO: 375969 - protein, 340 aa, unidentified
MTVIIGVDPHKASHTAVAIDDREGELDRTRVRATRKQTLQLLEWAEPLGTRTWAIESAGGLGYLLAQQLVDAGETVVDVPATLVSRVRVLATGRSDKTDPNDALSVAIAALRAPALREVRAADHAEILRLLAKRNIDIGKQRTRVVCRLHNLSMELAAGGISKELNASDAIRLLERIEPASPVEQTRHDLAAELLADVQRLDTQLKESHRRIRIAVRASGTTLTDIFGIGPVIACYLIGFTGDVRRFASRDQYTAYNGTAPVERSSGGRVVHRLSQRGNRRLNHALHLAAICQIRQTHSQGRAYFDRKVADGKTKKEALRALKRQISNTVYRQLLVDSTR

SEQ ID NO: 375970 - protein, 339 aa, unidentified
MATVTTIGLDIAKQVFQVHGADKAGKAVLRRKLRRGEVAKFFSNLSPCLVGIEASGSAHYWSRVIESFGHTVRLMAPQFVKPYVKSQKNDANDAEAICEAVTRPHMRFVPQKSIEQQDLQCLHRVRSRLVSSRTQLINQIRGLLAEYGVILAQHPVQVRRGLPAELENAENQLTGSGRELFHSLYEELSQLDARISAANDRIQIAFDNTQDCKRIAAVEGVGPLIATAIVAAISNGRAFENGRQFSAWLGLVPRQNSSGGKTRLSGISKRGDTYLRTLLIHGARSVVYRAKCKTDKRSLWINDKQQRLGTSKACVAVANKNARIIWSLVAHEQDYRRAA

SEQ ID NO: 375971 - protein, 456 aa, unidentified
MKIPQSTIRLLTGRLVKILLYREVSIMKSNTQNAKIEAITEKTLVLGIDVGSETHYARAFDYRGIEYSKKPFKFSNTEAGFVTFKEWILDLKERHEKDKVVPGMEPTGHYWFNLGKFLQDNEMKPVLVNPHHVKKSKELDDNNPTKNDRKDPKVIAGLVREGRYMIPYLPDGVYADLRTASNIRFQLQAELTRIQNRISRWFNIYFPEYKTVYGKPDAKSGMLILKAAPLPEDILTLGIDGVNQIWRDAKLRAVGKARAKTLIEAAEHSVGSKEGAVSARMEIRMLLEDYESRNIRLQEVMTLIEGLVKQIPMAEKLLEIKGVGIRTVSGFLAEVGDISRFNNPKELQKLAGLALVENSSGKHKGETTISRRGRKRLRYLLFEVAMSLVAKNPEFRELHNYYTTRRLNPLKKMQSLMAIAAKLIRVFYAMLTKGVDYDPKKMVSDIKRPAVYLQAA

SEQ ID NO: 375972 - protein, 441 aa, unidentified
MKLQNLEMKRHYISDKFIVGIDPAKQKHQVMVLDPKGIPIGNTFSFTNSYNGFHFKLWQKLKNLSFKITPENTAFAVEISINYWQKICYYLSEKGYTVLMIRPVTTKHERPRLNNFSKTDPKDALCIASSARQGYFNFYQKYADEIQGIHRLGITYDKLKKQIVIAKQRLRSEVEMLFPEFPGVLKIDTDTARYLLTKYLTAKDFSEINVFYEAIELVAVSRNHHGAKTLKSLKDEALKSIGLPLDKVSYMSHRMTMNMWIEQIKMLKIQQYNILREMSTLAQKTPFYSILTSIKGISEITAARFIAEIPQLGDDLHFKQVEAFAGLNLRLSDSGQITGYRRISHWGNNRLRAVLYKMTEETKNHIPEIRIRFLKRQMKHATYTKNITACTSNLLKIIIALIRDNRAYKFDPEKIREMKALDEKYQELKQKRQSKSFIKVA

SEQ ID NO: 375973 - protein, 406 aa, unidentified
MTMIQPEAIAGIDTHADTHHVAVIDTTGRKLGDAGFPATLIGYQAIAAYIAAFGLVRQVGVEGTHSYGAGVTLHLTDVGIRVVEVIRPNRQVRRMRGKSDPIDAYEAAATALASNDHPEPKQADGTVEAIRFVHAARRSAVKARVAARVQIKSLLVTAPEGIRARYRNLTDTALFPALAHARPAREENTLGRTVIGSLKSLARRHQQLTVEITSLEAELEQLVVLVNPGLQQTRGIATVTAAQLLITAGENSGRLKSEASFAALCGASPIPASSGKTNRHRLNRGGDRNANSALHQIALARLSCDQRTRDYAARKQHEGKGTKEILRCLKRAIAREVFQLITHPVPAVDHRNLRPLRQEQGIIQAQAAAALGVSPAQISLAENGHIQDAAFLTTYENWLRNSTLTP

SEQ ID NO: 375974 - protein, 355 aa, unidentified
MDSKKYIGMDVHKESISLAVRNGAGKIVMECVIETKASMILQFIDGLRGDLHVTFEEGTSAAWLYDLLKPHVTKLVVCDPRKNVSMREGNQNDKIDARRLAELLRLNHLHPVYHGEHGLRSLKELVRSYLTITKDLGRVMSRVKAIYRSWAIPCSGKQVYAPRHRAEWLGKITEPGVRRRAEFYYQQLDALRTVRKQVRRELLAEGKKHTAWKLLCQIPSIGPIRAAVLLGILQTPHRFRTKRPLWTYSGLGIKTESSADHRKVNGQLQRAKKQVAIRGLNRNCNHDLKNLFKGAAIVAASKPGPFQEFYTALLTKGMRPEMARLTLARKIATIVLIVWKRGACFDAQHLKPQTA

SEQ ID NO: 375975 - protein, 421 aa, unidentified
MIQVSHEAFAAFVGIDWADAKQDGCLQVAGSAKREYFQREHTPEAIDAWGTTLRMRCHGQPVALCLALNKGPLGSALRTYDFLVLCPIHPLTLARYREAFTPSRAKDDPTDAALQLALLLTQRDKLQPLTPQSPTMRALAQLIAPRRRVVGDTVRITNRLPSTLKNYCPHVLHGLQEKDTAIFCDFLSRWPTLKAVPLARRATLATFFRAHHVRYAEVIAQRIQAIKAAPPLPTDAGVMAPHALLVQALVAQLRGTLQALADCDTAIAQRAQSHPDFPLFQALPGAGPVFAPRLLVACGEQRERYACAADLQKYAGSAPVTERSGKKSWVHGRLQCPKFLRHTFVEWAAESLRPSFWAQVSYQQPRDKGKAHQAAVRARAFQWIRILSRCWQERTPYDAAIYRQALHRRGASLSQTLAKAS

SEQ ID NO: 375976 - protein, 350 aa, unidentified
MKATTIGIDLAKNVLQVHGVDARGNAVVRKQLKRDQVLPFFGNLVACRIGMEACGSAHYWARKLEKLGHSVKLMAPQFVKPYVKTNKNDAADAEAICEAVSRPNMRFVPIKNGEQQAVLALHRARQGFVTARTAQANQIRGLLSEYGIVIPQGLSHVSKRLSEILEDGENDLPGVFRQLLQRLGDHLRELHRQVGELELQIQLWHRQHEASCRLAQIPGIGPLTASALVASIGSGTQFNSGRELAAWLGLVPRQHSSGDKVRLGAISKRGDAYLRRLLIHGARTVVRWQRPEARPGTPWIKKLSKTKHANVVATALANKNARIAWAVLTRKQVYAAPHRAGVDATAALRG

SEQ ID NO: 375977 - protein, 387 aa, unidentified
MSQTAAALIPAPVAYGSTLVLAIEVSNKSWVLAAQVPGLPHTKAKRTIHPEAGALLAAIAGYRARAAATGHSIERVIAVYEAGWSGFWLARWLIRHGVEVYVVQPSSVPVDRRMRRAKSDGIDAELLLRTLLAWLRGEPRVCSMVPVPDEADEDARRCVRERTELISERVGLTNRIGAVLATLGVTDYNPLLRSRCRRLAELRTGLGEPLPANAHAKIKRLLARLELVLTQIAELERERDAVVETEASDKASEMIQQLTALRGIGVQSATVLVREAFVRRFANGKALGSYAGLASSPYNSGGINREQGIGKGGNRRVRTVMVELAWLWTRYQPSAAQVCWFRERIRSTGRRVRKIMVVALARKLLIALWRFVIDGVVPEGAVLKPAA

SEQ ID NO: 375978 - protein, 355 aa, unidentified
MNYEKYIGLDVHQATISVAVMDSTGKLIMESILETKASTILEFLGGLRGTLSVTFEEGTWAAWLYDLLKPHVAHVLACNPRKNAALNQGNRNDKIDARELANRLRLNDLKSVYHGENGIRMLRELARSYLTIVKDLTRVMNRLKALYRSWAIPCAGRDVYYTRHRSQWLAKIREAGPRRRAEQLYQQLDMLQHLRQQARRELLRESRKHSIIAKLRQIPALGPIRCALAVALIQTPHRFRSKRQLWKYCGLALETRISGEYVYVQGERRRSKKQLSIRGLNKDHNHDLKGLFKGAATRASVMPGPFQEFYQRSLAKGIKPTMVRLTLARKIAAITLTLWKKGESFDVQKLKSQAA

SEQ ID NO: 375979 - protein, 437 aa, unidentified
MLPCLNPNAAGVDIGATEIYIAVPGDRDPQPVRCFSTFTEDQHAAADWLKGCHIETVAMESTGVYWIPLFQILEARGFTVFLVNAHHVKNVPGRKSDVSDCQWLQYLHAVGLLRGSFRPEQAVCTVRSILRHRDSLVQMASSHVQHMQKALDQMNLQLHHAISDITGVTGVAILEAILAGERNPHMLAALRDRRIKANADTIAKSLVGDYRREHLFTLGQSLEAFRHYQALIAACDREIAQYLEGFESKVDPPPAPPSPAKDRPKPNDSQPRFDLQTHLHRIFGVDLTKVPGINVLTTQTLLAEIGPDFSRFASGPALTSWLGLCPDNRVSGGKVLSVKTREVKNRAATALRMAAQSLYRSQSYLGHYFRRMRAKLGAPKAITATAHKLARIVYHMVTTRQAYDETICAHNEVQNRQRLEARLRKQARELGLQVVAI

SEQ ID NO: 375980 - protein, 496 aa, unidentified
MGCCALEGGDAVSAIPIRNLMNCAAQPFRWRQQEELEMNPKRSKSRHGRKMPMVHPNAAAIDVGATMHMAAVRADRTPEPVRSFGTFTADLHRLVDWFTQCGVETVVMESTSVYWIPVFELLDARGVTVFLVNARDAKHVPGRKTDVSDAQWLQRLHSYGLLRASFRPKGQIAELRSYVRQRERLLEYAASHIQHMQKALTEMNLQLHHVVADITGATGLRIIRAILAGERDPQALAALRHYSCHSSAETIAKALTGSYRAEHLFALEQALALYTAYREKASACDVRIEAVLKELSIHRGRDHGAVPPPRRRHRTDQVNALAFDVRAALFALLGKDITAIDGLGAYLSLKLIAECGDDLSSWPSAKHFTSWLGLAPSNKVSGGKMLSSRTRRSGGRAAALLRLAAVAVGRTDTALGAFYRRLSSRIGKAKAVTATARKVAVLFYNAVRHGMEYVDPGASSYETRYRTRVVNNLHRRAKAFGFVLQPLEPKAGAAVS

SEQ ID NO: 375981 - protein, 391 aa, unidentified
MIFVGIDVSKDKHDCCILSQDGQVLAKPFSVPNSIDGFNVLFSAITSCESNFAKVKVGLEATGHYSFNILGYLLDKDFPCYVFNPLHTNLYRKSLTLRKTKTDKVDSKIIAKMLLSEVDFKPYSKALYHNEQLKSLSRYRFSKIRERANLKQQLARLVNILFPELEKLVSSLHLSTVYSLLEELPGASFVAKAHLTRLTNLLSSNSHGRYKKLKALEIRNSAISSVGCVIPAKSLELKHTIQLIRVLSEEIEEITLQIQEIMAQINSPITSIPGLGINTSAMILSEIGDFTKFDSPDKILAFAGVSPSTYQSGKLDNAYAHMEKRGSRYLRYALYNAATYVCKWDKTFALYLQKKRSEGKHYFVAISHAIKKLVRVIYHLQLTGDTYKVAA

SEQ ID NO: 375982 - protein, 331 aa, unidentified
MFPVGIDVSKNTLDLCMLYDGIKGRIKTRNIQNNRHSVENILRWLRLQHCSPEDVHVVMEATGVYHEQLATELHDAGFRVSLANPHRSREFARGMGIMTKTDKVDAYMLACYAFLKKPHRWEPPAPEIRYLGALLRRRDVLLGDALREENRLEKYLSTDTPADIISSCRRMAQLLREEISNIERQIKAHIKASPALRRDYTLLTSIKSVGPQLGMHMLIVLRSHNFVSAEQAAAFLGVVPIEKRSGTSVRRRPRMSKIGPPQLRAKLYMSALCGKIYNKRMRKIYDEMCLRGKPKMVAIGALMRKLVHWCYGVLKTGTVFNDEDLKPVLST

SEQ ID NO: 375983 - protein, 350 aa, unidentified
MLIIGCDYHPGFQQIAFVDTQTGELGERRLAHREEAEQFYRELKEQSLSVRVGMEASGHARWFERLLSELQFELWIGDAAEIRTKRVRKQKTDRQDAQLLLRLMIEDRFPRIWVADAENRDLRQLLWHRHRLVQMRTRVMNQLHVVALNEGLRRKRALWRPAGRNELESLRLAPWASRRRQDLLDVLDQLTPKIQELTRALEDEVEKRPVTRRLMTHPGVGPLTALAFELVIGTPERFHCGKQIASYVGLVPSEESSGDRRRLGHISKQGNSLLRFLLVEAAQVTVRSSPQWRSKFFHLAMRRGRKIAKVAMARKLAVHLYWMWRQGWDYGQFEKFGSHAGEPGNRHGVQ

SEQ ID NO: 375984 - protein, 331 aa, unidentified
MKYYGMDIHKKYSVFTAMDEKGNILEQGRIPNERETLAKVMSHTTGEAKVVIEATSNWYYLYDLLESMGNDVCLANPLQTKAIASARVKTDKVDATTLAHLLRTNLIPTSYIPSQGIREIRELLRYRASLIKMRTTVKNKIHALLIKNGLQHPFTDLFGRAGRAWLAELEIRPVYGNSLKGYLRILNSLEEEILPISREIKKMAPADPRASLLTTIPGIGNYSALLILSEIGDIERFPSPKKLVSYAGLNPSVHSSGDVTRYGRISKQGSHWLRWILTESASVASRHPGKLQDFHRKIARRHGVKTANIALARKMLTICYYLLKNGEEYRE

SEQ ID NO: 375985 - protein, 521 aa, unidentified
MVEREGPLLGLRARSRVSSFPPGLSRGLTWCLTPDNHKHDDAWHPAILNKGGNTMKSFYMGIDVSKGYADFVIINQRKQPVVKSFQLDDTFDGHSRLHEIVSRFSTDHPQTVICAAVESTGGYENNWYNTLIRLQASLNIKTARLNPLGVLHNSKADLKKNTTDKISAQNIAEYLIAHPEKVVYQQQDKFASLRKQWGFVQMLTKQCTQLLNQLHSLLYTANPELLSYCRDGMPAWVLKLLLKYPTAAKLKKARDKTVAKIPYVSLTRAKQLIADAKHSVASATDPVTAQLITATAEQILQLKKTIAAQTDLMAAQCDVPEVKLLKTFVGIGDMSAIGLILEIQSVARFKTVKNLASFWGLHPVYKISGDGSGAFKMSKQGRVNPRKILYNVALSAIEHNPVIKPIYQYHLQQGKHKMDAIGICMHKILRIIYGMLKNNTAFDPKIDAANRQRSLPDMMGSPKRNKNRRFQSYDSKAPVSRRQRKKRLERERSHSVITDTKCGISAPVPIADIISDMLSNR

SEQ ID NO: 375986 - protein, 389 aa, unidentified
MLGKLRISDDAAGFQDLLRLLAENGDSPDDPVPIAIETSRGLLVACLRASGRRVYAINPMAVARYRDRHVVSRKKSDHQDALVLANILRTDAQQHRPLPEDSDLARAIAVLARAQQDAVWDRTRAHNRLRSHLREYYPAILEAFADKRERLLAREARAILAIAPTPAEAARLTRSRLRAAVTRAGRQRRIEAETDRLLEVLRRPSLRQPALVETAMGRQTLALLAQLDAACRACEDLARDTEELFLQHPDAEIITSFPGLAVLTGARILAEIGDDRTRFDTARDLKAYAGSAPVTRESGKSRRVSHRRIKNSRLAETGRHWAFAALTASPGAHAHYNRRRDTGDRYHAALRRLFNRMLGQLHHCLTTRQKFDEAIAFAPPALLPFAAAA

SEQ ID NO: 375987 - protein, 456 aa, unidentified
MTQKRSKLKIDRTMPMVHPNAAAIDVGATMHTAAVRADWTPEPVRSFGTFTTDLHRLVNWFKECGVETVVMESTSVYWIPIFELLDARGFSVFLVNARDAKHVPGRKTDVSDAQWLQRLHSYGLLRASFRPKGQIAELRAYVRQRERLLEYAASHIQHMQKALTEMNLQLHHVVADITGTTGMRIMRAILAGERDPNVLARLRHYSCHASIETIERALTGSYRAEHLFALEQALALYDAYHEKVSACDMMIEAVLKELSVRRGRQSGSLPSPHRRTDQANGLAFDVRAALFSLLGKDMTQIDGLGSYLSLKLIAECGDDLSAWPTAKHFTSWLCLAPSNKISGGKVLSSRTRRGSRAAALLRLAAVTVGRTDTALGAFYRRLSARIGKAKAVTATARKIAVLFYNAIRHGMEYVDPGSSFYETRYRKRVVDNLRRRAKSFGFVLQPFEPNPSVPVS

SEQ ID NO: 375988 - protein, 310 aa, unidentified
MKNKPIVGVDVSKEWLDLCLAGQTKVERIANEAGSIGTWLDRVRPGLVAFEPTGGYERALTSAARERDIPLLRVHPNKVIAFRNAQGIKAKTDKLDARLIAAFAGERTNRRQPSILGNDRLRALAARRRQLVAMLQAERCRRALAATGDVRESLDLLIATLKQNRELLEGKIEETIAADPQTAHLARLLRTIHGIGPITAATLIADLPELGHLNAKQIASLVGLAPQTRQSGKTSYRAATGHGRPQLRQVLFNAARSAIRCSSPFKTFYDRLVGDNQRPGKVALVAVMRKLLVTANAVARDQQPWKFNAA

SEQ ID NO: 375989 - protein, 413 aa, unidentified
MHVVHERCAGLDVHKKTVVACVLTPEGKEIQTFSTMTSDLLRLAEWLQERGCRAVAMESTGVYWKPIYNLLEAGDFEPMVVNAQHIKAVPGRKSDVRDAEWIADLLRHGLLRPSFIPDRGQRELRELVRYRRALVQERAREVNRLQKVLEGANLKLSSVASDVLGRSGRDMIAALCRGIEEPTSLAALARGRLKQKSEQLQEALRGLVGSHQRFILQEQLSHIEELERRIDRLNGEIEARLAPFAPIVQLLDTIPGVGQRIAEDLLAEIGTGMGRFPTHRHLASWAKICPGNRRSGGKAKHEHIGGGNPWLRSTLVEAARTAARCKDTFLASQYRRLVGRLGDARAIVAVAHAILVIAYHIIQDGKPYQELGRTFHDQRSQKAIVRRLTQRLEDLGFVVNLQLKEDPPTAQAA

SEQ ID NO: 375990 - protein, 323 aa, unidentified
MDPVMTMFLGLDVAKAKVDCALLLNGKVKSKVVPNNQEGFETLKQWLTKQGATHVHACCEATGTYSDAIALYLHDHGHTVSVVNPAQIAAYAQSQLVRAKTDALDAKLIARYCERERPMTWTPPPAAERLLLALLRDLQDLQSMHQAESNRLDTAHPDVRERIERHLEFLGREIEQLRKKIERHIDDNDQLRGRRDLLDSVPGLGEHTIPWLIAYLGDGQRFPGSKCAVAFCGLSPKPHQSGSSVRGKAHISKTGHADLRHALYMPAVVAYSRCKAFASFVQRLKAAGKPPKVIIVALMRKLVAIAQAILKSGKPFDPSLHCT

SEQ ID NO: 375991 - protein, 320 aa, unidentified
MQDVLNVGVDVAKAELVIAVEDHPERSATVSNRAAPIARWLRTLPAGSRIAVESTGEYHQELVSLAQQHGFSTYVLNARDVHFYAKALGQRGKTDRTDAQVISRYLQEHHEHLYRFAPGGSTEQDINRLLRRRAVVVAQRDSLAHSMQGLRCLDKPVRQLLVQFDAVVAAMDQEVQTLIHSQADLAAASTQLQTVPGIGPQGAALLTCLFRRIDFSNADAVVAFSGLDPRPMDSGQKRGRRRLSKRGPALLRRQLYMMAFSASRTHAFKPVYQALRARGMSSTAAFVILGRKLLRIAFALWRTKTDFDIERWEKNACAQL

SEQ ID NO: 375992 - protein, 356 aa, unidentified
MKITTFGLDLAKRVYQLHWVDMETGEICRRQMKRKELLEFFGNRAPAVIVMEACGSAHYWGRKLAALGHEVKLIAAQFVRPFVKTNKTDAADAAAIWEAAQRPEMRFVAVKSEGQQGVLTMHRMREQLVKIRTMQVNQVRGLLYEFGAELPQGRQRGIKEIPNALAQLDGVLPAMVIEALRQQLERLGELDRDIAEIERGLAAWKKEDAASRRLMDIPGVGLLTATAAVATIGDARSFKSGREFAAFLGLVPRQSGTGGRVKLLGISKRGDVYLRTLLIHGARSVITRQKKRGPWLDQLLARRPLNVAVVALANKMARTIWRCWPMSGRTRRVTRPLPRRRSTNHKEAGSPKGCAG

SEQ ID NO: 375993 - protein, 343 aa, unidentified
MPVAEVDTFAGIDVSAHELSVALRRGQGHDKPAMAKFPNHPSGHKALVAYLLRGGGRVRVCLEASGNYSLDLALTLQAHRQVEISVINPRRARRFAESLGERSKTDPVDARVLCEYAARMPWVRWQPPSPVALHLRALTRAIADLGVIHTQQNNRAYAAAASQALPVLVVKEMQRHKKYLEQRMTRLRREAVRLIACDPELDRRFRLMLTTIGIAETSALQILGELAVLPDMLDARQWVAFSGLDPRLFKSGKSVEKRPRISRSGSRHLRRALYMPALVALRRDPYLRVFYQNLLARGKARLQAVVAVMRKLLHALFAMFRSNQPYDGSKLCAVDLAVHAACA

SEQ ID NO: 375994 - protein, 424 aa, unidentified
MTNSLFIGVDVDLKGNQFCVMNFDQHIFFNLKFSNTPEGSHMFVSKLKSIYDKFHFDELIFCLESTGMYSFHIACFLSSDEYLNSFNSTVYKVNPKVIKQYKKSFTDMEKTDPGDAWACADYARVGRCKFMNPFKGAQFIALQRLTRQRFHIAKNLGKEKSYVLNNIFLSYSGLLVLDEKPFSNLFGATSSALIEEFISPDQIAETPLEDLVDFISVKGKNRFKNPIDNIKVLKKAMRASYRLDKTAYDPINTAIASSLNFIRVLEAQKKDIDKAILNAVLGLDSNAYHVLLSIRGIGKVYAAGIIAEIGSIKYFKHNSKLAKYAGLHWKRNQSGKFEQEEKSFSRCSNKYLRYYIVEAAASCVRNEFPFLKDFYDKKYSEVNKHQHKRALVLSARKLVRLIFGLLHKNQYYVPLDSDQFSKTS

SEQ ID NO: 375995 - protein, 342 aa, unidentified
MEQVSIIGLDLAKRAFQAHGARADGSVAFRKKLSREKIRTFFIQLPRCVVAMEACGSAHHWGRAIRDIGHEVRLIPPVYVKPFVKRQKNDAADAEAIAEAASRPTMRFVTVKTEEQQARAMLFRTRDLLVRQRTQLINALRGHLAEHGVVAPQGPANVKVLAQAIEEPATSLPLLVVELARVYLEQIDGLSKKIVELEKATAYEAGRGATTRRLQTMPGVGPITAMAIETFAPPMETFQRGRDFAAWLGLVPVQRSTGGKQVLGKTSKMGQRDIRRLLIIGAIAVVRSACRKGVPEAAWLHRILSRKPRILVAIALANKMARAIWAMLTKGEDYREPVIAAA

SEQ ID NO: 375996 - protein, 364 aa, unidentified
MNNYIGKTIFVGIDVHKKTYSVTAICDGIIVKRDTLKADPSTLIAYLKKRFGEGKIVSAYEAGFSGFYLHRQLIQAGIHNIVVHAADIEKSNDRVKTDKRDSLKLATHLSQKRLKCIYIPTEEREDLREITRVRAAFMKERTRLACQIKSLLHLHGLIPAHDDRRVSEKWIRDLVKLELKPGLKYSLEMYVNMWLQYNQKIKEINEEMKNQAIKDSAVDKVYQSAPGVGATTARVLANEMDNLLQFTNNRQLSSYLGLTPCEYSSGEHIRQGHITKQGKPYLRKILVQAAWTAIRYDKELELIFDRISYKAGAKRAIVAIARKLIGRIRACFRTNTLYKMPTPPPRTTTVQAKNKKAPDLIKAA

SEQ ID NO: 375997 - protein, 440 aa, unidentified
MQILYSRCCGIDVHKNSVTACVLVYASDKEPEVRQKEFPTHFKALGNLRLWLLSQKVTHVALESTGVYWKPVWQALEGHFELILANPFQVKTMPGKKTDAADSHWLAELLAHGLIKPSFVPPRATRELRDLTRYRVKLTEERNRVHNRIHKVLEDACLKLDAVASDILGASGRAIIKAIITGQEDPDWLADHAKGTLRGKRPELRLALRGRITDHHRLMLGELMDDLEFVERKIQRLDREIASRIDVEKLTRLATIPGIDLITAWTLLAELGPEMSAFASPRHAAAWAGLCPGNHESGGKHLSHRTRKGNRWLRRALCQAAWAATRKKKCFLAAFFYRKAGKHGIRKAIVATAHRMLLIAFCILRDGTEYIELGGDYFDRLHPERTCNRMIRRFQRLGLDVIVKPRTDSTTDQSTLQPVLKKRGRPCKCVERAIPCKHRP

SEQ ID NO: 375998 - protein, 400 aa, unidentified
MLSIGIDVSKGKSTVCGMKPGGEIVYTPFEVQHTREGMSELVSLLRGSGEEVRVVLESTGSYHCPVVAALLENGIFVSVVNSLRMKRFCSQSIRRVKTDQIDAMQIALYGLAYWQELQPTRLPENTYRELQLLARQYYQMTSILIKAKVDFNALCDQVLPGMQELMSDHAGRHKLSDFVLRYRHTAHILEMGETRFRKDYCKWAEKKGYRNRERMAALIFATAQNGIPVLPNAPSTQIVITEAIRVLHTVEASRDAILTQMQALAKTLPEYSLVREMPCIGDTLAPRLIAEIGDVRRFHSKRALIAYAGIDAPPYQSGKFCANNRHISKRGNRYLRKTGYEVMQSYVMHKPANDPIFTFIEKKRGEGKSGKLAMVAGLNKFLRVYYGKVTELYRSLPAIK

SEQ ID NO: 375999 - protein, 351 aa, unidentified
MNAVGIDVSKGKSTVAVIQPFGVVIAEPFDVSHTESDLNKLVQLIKSLSGETKVVMEYTGAYYEPIANALHNQGIFVSVVNPLLIDDYGTNRVRKVKTDKKDSLKIASFAIDKWLDLREYIPANDIRKTLKILNRQYVQYNKILVMQKNNLISLLDSCFPNANTLFTSPRRESDGHEKWIDFVLKFPHIHSISKLSLSAFKVKYQSWRRKNNYNYSDKKVADIHSYCKTQISVLPMTDSVIKIITEAAVMLNSTLETLCTFRDEMNRLSSTLPEYNAVMGIYGVGKVLCSQLIAEIGDVRKLNNSKSLVAMAGIDPPPNQSGKVDTKSRSISKRGSPVLRKTLFQIMTIII

SEQ ID NO: 376000 - protein, 406 aa, unidentified
MKHVVAFDVSMGKSTMVIYDRYRQCEYEGEITHNRYSFEKLNETLISLTQKDAQAPDIVFEATGVYSKPLERFLGDQGYMYYRVNPLEANIQMASMRRQKTDKSDAHELAKTHFRVEREQTYQEGEYYKQMRAMTRYYDELSSEMTHLYSRLYAILQLSFPELEKLFSKRSALFLNVVQLYPHPDHVLVCSKTVIRNRLKANTRKNLSLARAEEKGIALIEAAKEAYPAISKDDIRCEQVRDYAKRIADLKEKRDQLVQKMVKLSKDKQEYQILISFPGIGETTAVRLIGELGDIRRFKNHKQLNAYVGIDIMRYQSGNTFYKDKINKRGNNKLRKILFYMIQTMIQLRKNTQNHIVDYYDKLKTQPQRKPHKVASIACVNKFLKSAYHLITHNLKYDYEKATMHQ

SEQ ID NO: 376001 - protein, 353 aa, unidentified
MQTQSKRIDFSGQNFYCGFDTHKKTWTVTIETDEIALKTFTQNADADLLVQHLRKNYPGGNFIAGYEAGYFGYGIQRKLESMGVHCLVINPADIPTTNKDKDQKRDPRDSRKIAKALKNKEVSTIWIPPVALEEDRQLLRTRYALAKDQTRTKNRIKALLQIHGIKYPEIFSQNGSHWSARFVKWLQDIQLTESSGTEALQSFVRHLQFLRTEILVVSRKIRVLTKSSRYEKTYNRLIKIKGIGMITAMTLITEIGDINRFKNPDNFRSFIGLIPSSKSSGEKEYQGRITNRANSHLRYLLVEATWIAIRNDPYYLHHYKEYRKRMKDNNALIRTAGKLANQIFYSMKNTTEK

SEQ ID NO: 376002 - protein, 341 aa, unidentified
MNTIYYTGLDIHKKTIAYCIKKIDGTIVRQGTVASERKALSKWMSELPGPWCGAMEATIFTGWVYDFLKPHAVELKVAHPAMLKAITAAKKKNDRADAEKIADLLRVNLLPECHMMPEDLRELRRVLRYRNMVVNTAVKMKNKMSGLLMEVGAIYDKKKLHGKKYFGALLERVEDVPDSVKGLLKLSRNGFEMFDDIQKKLVAALRKNKMIRERVERLMSIPGVGEIMALTWVLEIGDVTRFSSSRQAISYCGLCSGQHESAGKEQRGPISKKRNKHLQTKLIEAAKLAPHWNEQLGLLHEKESTRGNKNRATLSVARKLVEYMLAVDRRETDFELLREAA

SEQ ID NO: 376003 - protein, 421 aa, unidentified
MEVMHKRVAGLDVHKQTVVACVRVMAGRKPTRECRTFATTTEGLLALLDWLRASRVTHVAMEATGVYWTPVWKILSEGEFELVVANAAHIKQVPGRKTDMNDAMWIADLLACGLIKASFVPEENVQEWRSLTRTRKQLVREQTRHVQRIEKTLEEANIKLGTVLSDLMGVSGRRIIEAMIAGEDNPHRLAALAARNIKASRQALYEALHGRLREHHRFLLKLHLQQWDGLDRAIREVDRQVAWQIERMDAEAADGQPPFRELIHRLSAIPGVSFLSATAILAEIGRDMSRFPTAGHLVAWAGLCPGQNESAGKRKSARLRRGAPWLKTMLVQCAWAAKRAKNSYYSAQFHRLRSRRGPQKAICAVAASLLTAIYHMLKSGLPHRDLGADYFDRRSPEAKAKRLVAQLAKLGFAAQLQPLAA

SEQ ID NO: 376004 - protein, 356 aa, unidentified
MEQFIGCDAHKKFSVFVAVNEKGQAGEALRVMHDRQLYREFLARLPPQSLIAVEATGHYSWIVDEMDHAGHRPKLANALEAKRRMALTKKTDKLDARGLAILLRNGTLPEVWIPPSELRDQRELLRLRIFLVHLLVHLRTRVKNRIHGTLARHNVQVPGADLFGVAARLQLGARLPELPPHSREAIEQELATLDFLETQIESAEQRLETIMAVSVEADLLKTLPCVGKILSMVLMLEIGRVDRFPTAAHLASYAGLVPRVHSSGGHTRMGQVCANVNRNLKWAFVETGNLVVINQRGLAGTHVVRLYHRIKRAKNHQKAVVAVGRHLAEAAWWVLTKQEVYREPQGPRQVLSSTHG

SEQ ID NO: 376005 - protein, 454 aa, unidentified
MLRRSSDTSTLAQLPKVHLDAAGLDIGSTEIWAAVPADRDGESVRQFGTFTPDLQALADWLVACHIQTVALESTGVYWIPIYEILEARGLEVRVVNAQHLKRVPGRKSDFADCQWLQYLHTVGLLNGSFRPEGEMCVLRAYLRQRATLIEHRAAHILHMQKALQQMNVQLTQVLSDITGVTGMAIIRAIVAGERDAVKLAQLRDKRCAHAEDEIAKALTGNYRAEHVFALKQALALYDAYTQQIQDCDAAIEQQMQAMADDNDDDLPPLDDTDKRNSHSKNGPSYDARTLLYRLAGVDLVAVTGLSALTVQTIISEVGLDMSRFPNEKHFCSWLGPAPHNDVSGGRVLRSRTLPTRSRAGQAFRLAAQSASRSHDTEFGAYYRRIRGRLGPKQALVALAHKIARTVYYLLKHRTPFHDVGAMAFERSAKERDIARLEKWAAKLGRQVVEIAAPT

SEQ ID NO: 376006 - protein, 344 aa, unidentified
MKIKLLGIDLAKNVFQLCALNQANKVLFNRTVRRAQLRSTIVKLEPTTIAMEACSSAHYWGRTFETMGHKVLLVPAQHVTPFVRGGKSDARDALAICEAAERPGLHPVPIKSIEQQDIQLLHRLRQRQVQHSTALANQIRSLGREYGVIFPAGIKSLIKRLPEALEDGSNELSPVARYALADQHRCLIEVRQAMKAFLLQIEQLAGQHPAYVNLLPLPGIGPMVASAYIAAIGNGNQFKCGRQVSAWLGLVPRQYGTGGQVQLLGISKSGDRYLRTLMIHGARAAITRGLKNSPELALWVQPIIDRQGFNKAVVAMANKMTRISWVIVTTGEAFDMKQAFKPVA

SEQ ID NO: 376007 - protein, 376 aa, unidentified
MNPLYVGIDVSSKSNVVYFMLPDGSKHCNFSVANSHTGSSQLVKRILSAMTSCSLDTVLIGLEATSVYGDNLVYFLREDAALARFNSKIHVLNPKQVSKFKEAYNDLPKNDLIDSFVIADCLRFGRINKEVYIGDYRYKALQNLTRARYFAVSNLIKEKQRFMNILFKKYSTMTQEKVFSDTFSTTALAVYDEFESAEALADMDLHELTAFIMEKGKNRFPNPNAVAKAIQKAARSSYRLPKTVNDSVNQVLSISITSIKALEAQIKEFDKAIATQMELLPNVLISIPGIGPVFSAGIMAEIGDINRFHNQAQLAKYAGLAWKQHQSGDFEAQTTRLINSGNRFLKYYLCEAAFSLVRCDKEYSCLLYTSPSPRDA

SEQ ID NO: 376008 - protein, 316 aa, unidentified
MSKLMIGMDVAKGWIDIAVAGDVQVKRITNNERAIDAWLLRIGAGSIGLVAFEPTGGYERYLRRCLGRATVSFKQVHPNEVVAYRGRRGIRAKTDRIDARLLADFAAEELARREFAPAPQADEVLRELAARRRQLQALLHAETCRRDVVDSAIVRKSLQAVIVTLERSLAAVDKAIAEHIANSAHAETSRRLQTFCGAGPATAQTLIAELPELGHLSGKKIAALCGLAPHTRDSGKGRGHASTGHGRPDVRKVLFNGARSAIQHNPVMRAFYQRLVDDNHRPGKVALSAVMRKMLVTLNAMIRDGSDWKGAAKSAP

SEQ ID NO: 376009 - protein, 339 aa, unidentified
MEVTTIGLDLGKDVFQVHGITADGTVVFNRTIRRRQLLKFFEAIPRCLVGIEACGSAHHWARELIEIGHDVRLMPAVYVKPYVKRGKTDAVDAEAICEAVTRPTMRFVAVKSKEQQALLTIHRVRQLVVRQKTQMLNVIRGLLREFGHVIGNGPVAAMRFIKTFETGDSPDIPDVAKSMLKTLCDQVASLDERVKFYDKLVEYHAKIDERAKRIRTVPGVGPITASAIVATIGDGKQFKNGREFAAWLGLTPLNRSSGGKERLGRISKKGDRYLRRLLVIGMTSQVQRARGYPERVHPWIMQLLERKPVRLATVAMANKAARIIWAILTKDTYYRQAAV

SEQ ID NO: 376010 - protein, 385 aa, unidentified
MSQLNDLSRSLTSLEQDNAIIAVIEMSQSSWLVAGIVPGIERHPLKKLEPTEGELLRLLMRWRAEATKMGCTITRIAVAYEAGRDGFWLARWLRAHDIETYVIHPTSVAVSREHRRAKTDRLDTRLLKRVFIGWLRGEPDHCHMVTIPTLAEEDAKRPNREREGLVRERTRIVNRMKSCLARFGVRSFKPTLRKAPERLATLVTPEGVPLPANTLLELRRDMARLRIIMDQIKEVEEARGQRLEQAPQEKSHAMVRLLARVIGVGIETADMLVHEILSRSLRDRRAVARYAGLTGAPDESGSRRQEKGLAKAGNARVRRGMIQLAWRFLLFQKDSALAQWYRTRTESAGKKRKTMIVALARKLLIALWRLATIGEVPVGVVLRAA

SEQ ID NO: 376011 - protein, 344 aa, unidentified
MGEVSTIGLDIAKSVFQVHGVDVVGTVVIRKRVSRAKVVEFFAALPPCLVGIEACPTAHHWSRRLQVLGHTVKLMPPSYVKAYLKRGKNDANDAAAICEAVMRPSMRFVPTKSEQQQSILMLHRSRQLLVRQRTMLSNAIRGHLAELGIISAKGRNGTAQLLKLIANEQDDCIPSTARFSLDILARQYVALTTEIGAIEKRIYAWHRSCEESRRLEEIPGVGPIVATALVAEVGDWQAFSSGRSLAAWIGLVPRQHSTGGKERLGRISKQGNRYLRWLLVTGAMAVIRYARQHGTKRLWLVHLMGRRPIKVAAVALANKIARMAWAMMVRGQHFKEPTVLPAMA

SEQ ID NO: 376012 - protein, 387 aa, unidentified
MSTQYFCGADVSKNSFSIAVKNETFILENSFSMDSKGFESMDKILSPYKDKLLIGMESTGIYHSNLFYFLKNKSYNCFVVNPYKMRQFFNFISDKPTKTDKKDAKAISMFVEFNRDKIETLSSQQKYQVRYLVREKETLAHQIAKTKTEIRTILCLVFPEIEKFSIFGSGMLSLLYNFPSAACIRSIPEKEFIKTGEKLINTRGRKLNIAMTSIYQLATTSIACCYPVYEQLLKMKIDTLNILTQQAQIIKQLIEKQAEKYFHREIEILTSIPGIGKESAMYFLSEVVDIKRFNGWRKLIGFCGLDPVIKQSGNYNGKWKLSKRGNKHARRIAFIMAGCVKRSCPYFRQYYIKKRNEGKSYTEAVVATSTKLLRTIYTLLKEDRLFI

SEQ ID NO: 376013 - protein, 364 aa, unidentified
MSGAKVWIGLDLGRDRTHVCVVDDEGVPLEECDCPANAADVESALAAFPLGDIGLIAVEAGAEMRLVRALRARGFPIAVFESRKASRFLAIRRSKTDSGDARGLADLARLGRDTVSQVRLKSEEMQQLRSRIVLRHRLVLIKVAAEGALRSRLALHGRRLKSTRVPGGLRDQVAAHIAEIREAEGIDLSGDLRPLVDVCESLKGHLNQLGQVIERTAKSNPVCSLLMQVPGVGPICAVSFYSAIEDPARFGKSAAVGAYLGLVPRRYQSGQTSRTLGITKTGSKLTRSHLVAAATGFIRFAPDSALKEWAMAARTRLGSRRAKVAVARKLAIVLLCMWKSGSSFRPYPPVAGASHPASALETPR

SEQ ID NO: 376014 - protein, 358 aa, unidentified
MRVQSKELNFKGQNIYVGIDVHKKDWKVSIQSNGLTYRTFSQPPKVISLVEHLHRNFPEATYYSAYESGFSGFWAHRELVREGVNNIVVHAADVPTTQKEKAFKTDKRDCRKIARSLSSNDLEAIHVPTLKTQEDRSLVRLRLTFRKDLTREKTRVKSMLNFYGKEIPERFYASSHWSTAFIKWLKEVKFETGSAEEALKLLIDQVEYLRIGMLEVTKKIRNLAASESYASDMKLMIGIPGIGLITGIAFLTQLETIDRFPNTDSLANYLGLVPNCHSTGDKENTGEMTYRGNKWLRELLVESAWMAARSDPALHLTYLKLCKRMKPNKAIIRIARKLLNRIYYVLKNKCEYKKGIVQ

SEQ ID NO: 376015 - protein, 423 aa, unidentified
MSNRTLSKKLASVKPGTVFVGVDLGLDRNVAVVLTERAKQLSRFGFPNEREGYDYFYGRLEAIQEQRRAPAVWVGMEPTNYFWKLLAADMEQQRRDYSYRLVNPYTVKKNREGDQLDRSKDDNRDAFTIGDLLRTGKYTETRLLHGRYAELRQYVTLYTRLRRDVRRQKTLISNVAGQLFPELHRAFKDLTGMTALAMLRHHAAAAVVRKMSQEAFIAGVRADLPGRRMQVAKLRRAHVLARRSVGLSEGIEALQLALRLHIEALEALRQQLEEVYTSMVDTFLALPESTYLLSVQGLGLITAATILAEIGDPSHYTNARQLVKLAGTQPVPNTSGRKSRSQTPMSHKGRPRLRTALFFAVMRLVRLDEAFAREYQHLQGREKNPLTKMQALGVLMNKLLRILWTLMRNRAFYISGFQTVAEG

SEQ ID NO: 376016 - protein, 344 aa, unidentified
MEHFAGLDVSVKETSVCIVDDTGRIVREVKVASEPEALLPVLTSGAYHFKRIGLEAGPLSQWLFSALAEAGLPAICVETRHMRAVLKAQINKTDRNDARGMAQMMRAGLYRAVHVKTLRSQKLRMLLTHRKLLQSKAIAIDNDLRGTLRNFGLKVGMVGTVKFEARIQELVENLPDLAVLVEPLLIVRRVLREQIGILHRRLLAIVRDDEVCRRLMTVPGVGPVVALTYRATVDVPARFRNSKAVGAVLGLTPSKYQSGEVEWSGRISRCGDEMMRVMLYEAAQVMATRTNKWSWLKAWAMKIAGHRGMKKAIVALARRLAVIMHRIWVDGTEFRWTREEAAAA

SEQ ID NO: 376017 - protein, 358 aa, unidentified
MEMSVKESSLAVKGKVVNIGVDVHRRSWRVTARVEGVIVLSGSSPPSYQAFKTLLRRFDGATVRVAYEAGPAGFALYDRLTQDGVECIVTPPSLIPTESGNRVKTDKIDSYKLARLLEGNLLKRVWVLSAEQRAQRQLVRTRRQISDHRADVMRQLKSLLLFHGIQTPVEGSPQWTHAYLNGLRTIDLGEIYLNLSLRALLDLFDSLSQQKKQLTREVEQLAQSQTYANRVRLLTSIPGVGPLSAMEILVELQDVDRFVRADQLAAYLGLTPSQYSSGERIRMGHITHTGNSRVRTTLIECCWFLIARDPWMLHKYQSIKIRRGAKRAIVAVARLLSLRIRRMLLDGVPYRVAPAAAS

SEQ ID NO: 376018 - protein, 330 aa, unidentified
MKNYQDVVGIDVSKKTLDAYCHQAQVHKVFTTDVMGYKSLLKWVSKATKKSKVFYCFENTGYYSLKLALYLNSQAIVYVEESPLKIKRCSGIIKEKTDRIDAILIARYAWLYREELASSTVKSISHLELGRLLALRDQLVRNNAGLKGTLKELKALLSSPSTDAGCLSLKRSIDYLEKQVKSIETRIKAIISEDATMGKNYELLTSLKGVGLVVACQLIYHTGNFTRFESWRQFSSYCGTAPFKHESGTSLRRRKQCHYLGDRKMKSLLSMASISAIQHDSELRLYYKRKLAEGKDKMIAVNNVRNKLIARAFAVVKRGTPYVVLQQHAA

SEQ ID NO: 376019 - protein, 347 aa, unidentified
MNITTVGVDLAKNVFQVHGVDKRGKPLARKQLKRGQVIGFFANMPPCLIGMEACASAHFWARKLIALGHDVKLMAPQFVKPYVKTNKNDASDAEAICEAVARPNMRFVPVKSVDQQAVLALHRARQGFVAARTAQANQLRGLLGEFGIALPLGISWVPRKIPEILEDAQNGLPVISRELFARLLSHFRELDRQVKEIERQIEAWHRDDAASQRLQAIPGIGPITASALVASIGNASTFKNGRQLAAWLGLVPRQCSSGGKNQLLGISTRGDTYLRTLLIHGTRSVMQHLKPGAGPTQGWLESLIKRRHHNIAAVALANKNARIVWAVLAHGRDYQPGYVSTRVAMSV

SEQ ID NO: 376020 - protein, 362 aa, unidentified
MFRPHTLYIRIRIVRKVSEPAFAMKDQDVTDVIRRKQQTAMRYIGIDVSKATFVVAYSSDKGGEIRTFNNTTTGIKQFIGALPKDGSIHCVMEATGNYSALLLYMLNVAGITVSMENPLKIKNFARAMLSTVKTDKIDARLIALYGEKMNPQPFKIQGEAILRLRQKRTVIRQLTKQITAMSNLRGSLAYLPVPDKGATHTVDETVKFLKKKRDRLQAELTDLVKVEFSRQLALLTTIKGIGITLATALIITTGGFTYFQNAKQVSRYLGICPTYEQSGTSVNIRGHINRNGDAYTRGLLYVAAWTASRFNTKCGETYTRLRQNGKPGKLAMIAVANKLVRQAFAVVTHDKEYVDGFVSNRP

SEQ ID NO: 376021 - protein, 354 aa, unidentified
MKDNRYYVGMDVHKAITVIVVLNALGKQIMRTLVETKSSSILGAIRALTGEVHAAFEEGIHSAWLYDLLKPCVSEVVVCDPRDERLRQRGNKSDDADAAKLAEMLRLGGLKAVYHGQQGMRKLKELTRSYQNLAADCTRAKNRLKAIYRARAISYQGEAVYKADKREHWLAQLVEEGVRARAMHLYQELDCLVGLCEQAHQEMTAEARKHPAFKLLVSIPMLGPIRAALILAAVLTPHRFRTKRQFWAYIGLAVVTRSSADYALVNGAIKKSNKLPATRGLNQNFNHTLKMVFKTAAVGLRSGPLKDYYDGLLAKGASPQMARLTLARKIAAIVLALWKKGEAFDPEKFVNLTA

SEQ ID NO: 376022 - protein, 400 aa, unidentified
MNPELRVAVDVGCTRHRVAVGLSEGKLLEEFDINHDAAGLSEFFERVGRHERQWGRPVAVAMEGYNGYARPLDERVLLHGYRLFNVNNMKLARFKEIFPGPAKSDPVDARKMLEMFSLKDKLPLAREALQEVAPVAEVNLQLKALTRRRKQLVNERMRVSSRLQADLQAVCPGLLDITGEADNLWFLNFLTCRSDLTKLKTVRECSLWALQGVGKAYAGKIRHWQKQATFSETVAWVGPMILEDAKRILELRKNIGALQTQIDALAEHSEIARRIDTIPGFGRVCAPELAGEIGSLQRFRGESSLALYVGMAPLDDKSGTRSGSKPPRHVNVRAKAAMMIAAAQNAASVSESKAFYDKKRAQGKTHNQALRALGRNLVRVMWSMFKHGRNYQLESPSKRA

SEQ ID NO: 376023 - protein, 339 aa, unidentified
MKVTTFGLDIAKRFFQLHWVDMETGEVHRRQLKREQMAEFFATCEPGVVAMEACGSAHYWARKLVSLGHEVRLVAAKFVRPFVKTNKTDAADARAIWEAAQRPEMKFVAVKSEEQQSMLTLHRLREQLVKFRTMQTNQLRGLLYEFGVCLPAGRAKGMPAAIEALGQLEDTLPAMVIDALRQQMARIQALNEDIADIEKKLTRWKKQERLAANLMEIPGVGILSATAAVATMGDAGAFRNGREFAAFIGLVPRQSGTGGKVRMLGISKRGNTYLRTLLIHGARARINLQKERDPWVDRLLARRPFNTVVVALANKMARTIWAMMAHNRAYQKNYATSIA

SEQ ID NO: 376024 - protein, 407 aa, unidentified
MNAVGIDISKGKSTVAALRPMGEVAFLPQEFLHTEVGLEQMAGAIVALGEDTRVIMESTGRYHEPVAAALHEYGIYVCVLNPLLIKQSGGGSIRKVKTDKADALKIAKYGLDNWVDLREYTPMDTIRQQLKLCSRQYNLYMKTVVSLQNNLISLTDKTFPGVNELFSSPERADGHQKWVDFVMTFWHCDCICRASEKAFTERYQKWCKRKGYHFSAEKALDIYAGSCGHFTTLPKNENTKLLIVTAAQQLLAGKTTLATLRAEMTRLASQLPEYETVCAMYGVGKITAAQLMAEIGDVRRFPRRSSIVGFAGVDPGVDEPGKHSAKSVPTTKRGSPHLRKTLYQIICTYLKKSPADEPVYQFLDKKRAEGKPYFVYMTAAQNKFLRIYYARVKECLEAFDTEPAKQS

SEQ ID NO: 376025 - protein, 339 aa, unidentified
MLAVIGLDIAKRIFQLHSVDPETGEITRLKLTRSEMMPFFANRQASVVAMEACGSSHHWARQLRQLGHEVRLIATKFVAPFVKGNKSDAADARAIWEAAQRPEMRFVPVKSEGQQAILALHSMRDGLIKARTAQLHQLRAVFYELGIDLPEGRHWCVKQLPVAFERLEGKIPAMVIEALRSQFELIQLLTARADDIERKLDVYRRSDERCERLLAVPGVGLLTSTAIVAAVGDAREFRSGREFAAWLGVVPRHSGTGGRVRLLNISKRGNSYLRAMLIHCARAVMARQKEHSAWLERLMRERPWNVAVVALANKLARTIWAMLAHERTYLHNGRPVVTA

SEQ ID NO: 376026 - protein, 482 aa, unidentified
MMSEAVGPEVGHHSGASEPELEFDRAVQSTLDCRHGSPFGPGARLLDFMTRTATPTAQLRLEARMEVLHERCAGLDVHKNTVVACIRVLQADKVEREVRTFKTMTRDLLALSDWLEGHGVRHVVMEATGVYWKPVWHILSDGEFELVLANAAHVKNVPGRKSDVSDAQWLADLEAHGLIRPSFVPDTATQELRSLLRTRKQLVRERTSHTLRIQKTLEDANVKLDSTISNIIGLNGRRMIEAMVAGESNPQTLAGLADRRIKASPQELCEALRGRLTKHHRFLLGLHLGHIDAINAAIDRIDGEIEADLQPFRDAVGLLTTIPGVSDLAGQGIVAEIGRDMSRFPTAGHLISWAGLCPRSDESAGKRRSTRVRKGAGWLKTLLVQCAWAASKTKATYLHSQFVSIRARRGEKKAIVAVAASILTAAYHMLSTGTNYHDLGPAHFDRRRKEARVRSLLASLRRLGYVTNIAPLQPDPLPVVSC

SEQ ID NO: 376027 - protein, 426 aa, unidentified
MNVVNSAEEPRFAAFVAIDWGDSKHVWSLQPADADRRERGEIEHNPEAVGAWVTMLGARFGSQPIAVAVEQSRGPLVFMLGKYEQLHIYPIHPRAASQFRAALFPSWAKDDPGDAELLLDLLVHHRQRLRRLNPDTAQTRLVQHLVEGRRKLVNEKTRQSNRLTAQLKLYFPQVLDWFDKIDSPLVADLLKRWPTLEALQKARPATLRSFFTQHNCRSLELIQQRLDLIRQALPAVRDQALIEAATAMTKVLVDLIATLREGIACFDRQIAQAVAVHPDFAIFDSFPGAGPALAPRLLAAFGAQRDRYQSAADLQTFSGIAPVTERSGKSEWVHVRWACPRFLRQTFHEWAAHSIGFCAWAAAYYRLQRERGKDHHAAVRALAFKWIRIAFCCWKDGVPYDDARYVRSLRRRGSPLIALLDKPVVP

SEQ ID NO: 376028 - protein, 398 aa, unidentified
MTESSDYESVQVFIGVDVGKDTHHAVAINRSGKRLFDKALPNDENKLRSLISDLKQHGQILLVVDQPATIGALPVAVARSEGVLVGYLPGLAMRRIADLHAGEAKTDARDAAIIAEAARTLPHALRTLKLADEQIAELSMLCGFDDDLAAQTTQASNRIRGLLTQIHPALERVLGPRLDHPAVLDLLQRYPSPEKLASLSEKKLAAQLCKLAPRLGKRLAADIAQALAEQTVVVPGTNAAAVVLPRLALQLITLRKQRDEVALEVEQRVLAHPLYPVLTSMPGVGVRTAARLLTEVACRAFASAAHLAAYAGLAPVTRRSGSSIRGEHPSRRGNKALKRALFLSAFAALRDPLSRAYYTRKMSQGKRHNQALIALARRRCDVLFAMMRDGTFYTPQAS

SEQ ID NO: 376029 - protein, 358 aa, unidentified
MEIIKVKKYTYFIGVDVSRNKLDMVVLRGREERYHREIGNDADSIMEFITELKQQAGFVMTRAVFGMEQTGIYTNHLLGRLARLKANVVVDGPLQIRNSLGQIRGKTDKLDARRIAEYVYKNREHLRFWVPRRPVIQQLALLASLRNRLVTLEGSLLIPLKEAGDFLKKGPVKESKRLSSRTRVAIKADIEEVEKTIAGMISADERLKRLMEVMTSVTGIGPVIAVQIIICTNEFRDIANPKKFACYAGVAPFMQVSGQSKGKTRVSPFANKRMKALLHLAALQGMRNIPELRAYYERKTLQEGKHKMSVINALRYKMILRIFACVNQDRLYEKVYVRPTAEASQHLPEINEYEPQEI

SEQ ID NO: 376030 - protein, 341 aa, unidentified
MENVALIGIALGKHSFHLHCQDKSGKALQRKKFTRTNLMQFLATCPSTVVVMEACAGAHFMARRISDIGHEAKLISSQFVRPFVKSNKNDFVDAEAICEAASRPSMWFVQPRTEVQQAMRALHRARESLIRDKVKTTNQIKGFLLEFGISLPVGDTVIKRLPLVLVEHEIPEYLSRLLMKLHAHYLYLVEQITELESELNQSIKTDDATQRIMTIPGVGPITASLLSSQLGDGKQFSCSRDFAASTGLFAASTGLVPRQYSTGGKSTLLGISKRGDKNLRRLLVQCARSFMMRLEHQQGRLAEWVREQLSKKHSNVVACALANKLARIAWAITTNHNAYQA

SEQ ID NO: 376031 - protein, 348 aa, unidentified
MNALHYIGFDVHKKTISFCVKTAAGEIVEEGVVAAQRAGLRQWASARPQPWRGAMEATLFSGWIYDTLKPYGEQLEMAHPAKMKAISAGKKKSDMIDARTIADLVRCNLLPACYVAPPRIRELRRLLRYRSLVVSEAVRMKNKMAGLLMETGALYVKEKLHRKKYFANLLEELEEVPESVIDLLRWSRGALEMFESTQKRLVRELLADSELAQRVERLMTIPAVGEITALTWALEVGDPQRFHSCSDAMSYCGLTAALKSSAGKQQRGPISKQRNRWLQTTLIEAAKLAPRWNPQLAALHARELERGHRNRATLAVARKLVAYLLAVDKSRQPFQERAPSEVPTQKPA

SEQ ID NO: 376032 - protein, 416 aa, unidentified
MKIYPRTRAIRRYIALDIHKEYVLAGGMNATQEWVLARRKIEMGRFDEWVVKNLCETDAVVIETTTNVWDIYDLVQPAVGHAVVAHAEAVRQIAEARVKTDKEDVKRLIRLLIADIVPEVWVPPQHVRELRGLISYRQGLVKSGAMIRNNLHSLLHRHNLLLPEEGLADQEWWAQQEKISPLEKMQICQEISMLEQIEKHKEEVDAELGRQSLGEVWGKQAMRLLQLSGFGVIVSMTVLSAIGDVSRFESAKKLVGYSGLGAGVHDSGKEHIEKRITKSGRKELRWALVEAAWRAIRISPYWKEQYEKYLRRMRKPNQAIVVIARKLLVVVWHVLTKQETDEHVSEEDLAYKMLVLAWDLDESVRMGLTYKQFAKYALMKLGVENDITRFVRKEVPRRIAPRAEVLERMAELGIAQ

SEQ ID NO: 376033 - protein, 354 aa, unidentified
MFVAGIDAHTRYVIIVVVNKAGERVLGPTRVTVAEPERLLAVLAPYRPLDAVVETSSSWPWLEDVLTPAGVRFVLAHAKRLRAIAEAHHKADAIDAELLARMHLAGLIPQVYPTPSSQREWATLIRHRTVLVRQRTALVNRIHAQLHTRGLSVARGHLLTQAGRQWLRDVARLRVGPEQWRLIRSHLRLIAALRPLVHALDRRTAQVAATLPEAQLLQTIPGIGPHRALLICAEVLPIARFRTPGHLASYAGLVPCTGQTGLRPVWHGPIPAGANRWLRGALVRAVVSHRQHAPNSWLSAYYRTQMARVGWPVARVATARKLARALHAMLRTTTRWTSAPSRGELHLPHAAPTA

SEQ ID NO: 376034 - protein, 409 aa, unidentified
MEIVYTHCCGMDVHKKSVTACLITPKGKEIKTFSTMTDDLLKMLDWLMKEGCQQVAMESTSSYWKPVYNLLEAADIPTMIVNAKHIKNVPGRKTDVKDAEWIADLLRHGLLKGSFIPSQEQRELRELIRYRHSLIQERAREINRLQKVLEGANIKLSSVVSDILGKSSRAMLEALIQGEEDPEKLSELAQKRLKSKKGELQKALKGLMGPHQKLMIEIMLEHIDSLTAKVKQIDEEVEKRMDPFFEIVDLLETIPGVGRRTAEQIIAEIGTDMGRFPTASHLCSWAGVAPGNNESAGKRKSGKTRKGNKKLRAALVEAARAAARTKGTYLSSKYQRLAARRGAKRAAVAIAHQILKISYYIIKEKQPYIELGPDHYEKTRRERTARSSIKKLESLGYKVSHCFNHISYF

SEQ ID NO: 376035 - protein, 318 aa, unidentified
MSEKIAIGIDVAKATLDVAFGVAGSVTTYPNTPAGHEELLTALAECQVDLVVLEATGSYEVAAGCALQSAGYAVAIVNPRQARDFAKAMGNLAKTDRIDARALAQLAQVLAQRSDRDKIVKILPSPLQQELQALVARRRQIVTLLTSERQRLGISHEAVRGSLTAVIEVLQSQLRAVEAALAKHVKAHHTGLVELLSSVRGIGPATVATLIADVPELGKLTRREVSALIGVAPFNRDAGAFRGKRMIFGGRAAVRRMLYMATLAAVRFNPVIGAFYHRLVATGKPNKVVLVACMRKLLTILNAIAKTGKPWDESIHTA

SEQ ID NO: 376036 - protein, 406 aa, unidentified
MQTVYERCCGIDVHKKLIVACFRNGKKAELRKFDTLTCNIKELANWLLDNDCEMVAMESTGAYWKPIYNILELFGLDVMVVNAHHMRNVPGRKTDAKDAEWIADLLQHGLLKASYIPSKEQREIRDVVRYRKSLIEERSREINRLEKILEGANIKLSSYVSDLTGISSRKLLNQAIEDEVTPDNIGDLVHHSMQDKIPVLLKAMDGVLTPIQKKLVKAILDHIDDMTRRINDLDDIINNEMKHYEDAINKIEEMPGIGKRSAEVIIAEIGVDMSRFPTAAHLASWSGLCPGNNESAGKRKSGKTNKGSKHLKSILIQCAKAAKAKKESFFYAQYQRLVTKRGANRATVAVAHSMLIAIYHMLKDNVPFKDLGSNYYTKFNTDKKANYYLKKLQELGVSVPVSLATA

SEQ ID NO: 376037 - protein, 391 aa, unidentified
MFLLGIDIAKLNHVASCIDSSTNEVIFSNFKFKNDFKGFSALLNKIKSFDAKNLIIGLESTSHYGENLINFLFIHDFKVALINPLQTSHLRKANIRDAKNDNLDSLNIAKSLVFTKLNFVSKKNIECFSLKKLTRFRSNLIKQRSKAKIQLTSLLDLLFPELQYLFKSKIHSKAIYSLLKKYPSAEEMAALKDDEISNLLYASSKGHFKKEKSIELKSLAKTTVGIKDTSISLHLIQLIELIELYTKQIKDIEIKITDIVNNLDTTLLSVPGISVIACAIILGETNNFENFSSSKKLLAFAGLDPKIRQSGNFNASSCRMSKKGSPYLRYALIFTAWNIVRHSEKFDKYYSLKRSQGKSHYNALGHVAHKLVRILFTLIKKNISYQEEKLE

SEQ ID NO: 376038 - protein, 333 aa, unidentified
MNYIGLDIHKKNTQACVKNDMGKVLMNVRFPSDSKDINEFLDKIETLGAASIVMEATGFCMYIYDIIEARGHDIKVAHPFKVKALTAGRAKTDKNDAEMLAELLRLNAIPESYIPPKELRELRELTRFRQSLVRSSACIKNQIHAIIAMRGIKAPPILRCHFSKKHMKWLRSLEIVQLDDFLDIMALIDTKIAKADEDLERICHDDEDVQRLKTIPGVGDVTATSFVAEIGDIQRFASPEKLASYAGLTPIVRQSGEKTWAGPISKRGNATLRYLLIEAAYSHVNSSKESKLTRFFERKSQAKGRKKAIVATSRKMLEVIYYMLKRGEAYHAH

SEQ ID NO: 376039 - protein, 397 aa, unidentified
MYIVGIDIAKRKHEAAVIDGEGTVIIKPFSFTNNCSGYNRLLAMLAKAKLPLDEVSFAMEATGHYWLALFTRLQKEGFRVQVINPVQTNSIRSFYIRQAKTDPRDALLIAEVIRFGHFSESTLHPENIYELRELCRGRHAIVSMQADVKRKVVALLDQVFPEYETAFTNLFGDTSMAILQTCPTPKELSEMPFAELCHLIEVSSHKRFRMAKAQELQELARNSFGFAMAGDVFSTMIRLYAKHLDFLKQQVREMDRKIAEIMDTLDTPITTITGIGPTLGAYILSEIGDINRFSSAAKLAAYAGIDPTMRQSGEYNGVRNRMSKRGSPYLRHAIWLAASSAVLHDPALKLYFQKKRDEGKPYMASVGHACRKMVSIIYAVMRDNKAYTPCIPNEISA

SEQ ID NO: 376040 - protein, 351 aa, unidentified
MKTNTSLNAQTQDRIQQLKLGVDWHVEHFRVVRMGDGQSPQPAQRFSPASFLDFVKKQLPLADQVVVVYEAGPGGFHLHRQLTALGVTAYVVHPQKLDPQHKGVVTDKTDARELTLNLDRYLRGNLRAMSVVRVPTEAEEQRRALSRQREQLRRERQRLAAQGRSLCLTQGLRLRGEWWAQNLTLPDWLKPRLEVWRKLIAAVEEQLEALTKQVEALAPKVRPKGLGPLTLGLLIAELCDWSRFKNRKQIGSYTGLCGGVSSSGQSHCDLAITKAGNARVRWSLIELAWRMVLYQPQSVAVQRWKHVLLNPKAAARQKKRALVALARQLAVDLWRWQTGTITPEQLGWVMV

SEQ ID NO: 376041 - protein, 356 aa, unidentified
MQTQVTKKIDFTGKDLFIGLDVHKKSWSVTIVVGGMEHRTFTQPPDPEALHKYLQRFFPGGNYTSAYEAGYCGYGIHRRLNDLGIKNIVINAADIPTTQKDKLHKRDPVDSRKLARGLEKNSLRGIHVFNRDHEELRSLNRTRFYLMRDLRRSKNRIKSFLLYYDIPLPGEFDNNQWSLKFIAWLKQVRLQTTAGQEAFSHLITSYEHHRQQLLILSRIVRLRISQYDKELFNLLKTIPGIGPLTSSALITEIGDINRFPHIDDLGSYVGLVPRVRDSGETTHTGGITFRCNNFLRVLLVEASWQAIRQDPALMQYYHKHVINSKGHKVIIKIARKLLNRIRYVMRNRQPYVTGVA

SEQ ID NO: 376042 - protein, 474 aa, unidentified
MPKRTDDKSVLAPPSAERTPSKSRRKSVSIIPRVDPDAAGADIGAREIVVCVPADRDDQPVRTFATFTQDLHDLANWLVACRIKTIAMESTGMYWIPLFQILEARGIDVRLVNARHVKHVPGRKSDVSDCQWLQYLHSVGLLRGSFRPPQDICAIRSLARHRESLLAQAADQVRHMHKCLDQMNLQIHHVINDLTGATGMAIIEAIVQGERDARKLAAHRDRRIKASAQTVEKSLRGDWREEHLLVLRLALKCWQHLRAQIDELDTEIARRVRALDEHAAGAQTQPEAPAPTKKRLNFSANAPAESEALRQEFHRVLGTDLTQVPAISVLTVQSFISEVGSSLNRFKSAKHFSSWLGLCPGTKISGGKVLDARSRRGKPRFALQLRQAAQSLHSSRGALGARYRRLRSRQGAPKALTAMAHCLARIIYKLVSEHRAYDDSIFAALEAEHDQRQHQRLQRQASNLGYTLIPATPI

SEQ ID NO: 376043 - protein, 408 aa, unidentified
MKDSRKRYIGLDVHKHYLIAIGVDDELHVVLPARRVELFHLESWMKKTLTKQDDVVLEMTTNTWQLYDELCEHAGSVTVVHPPHVALITRSQVMNDKIAASILARLLAKGLLVGIWIPPQDVRELRGLVAQRKKMTGLATQAKNRLHAVLQRHHLVPPEGNLFHAGQQRWWLALPLGPLEKVNVQSDLETLQFAEKQLLRLTSMLEEIANQNEQVTRLLQLPGFGVVTAVTVWAAIGDIQRFADPQHLVGYAGLGTKVHDSGMTSRSGRITKAGRRDLRVVLIEAAQVAANNHPHWKAELARLQPRLGRNKAIVAIARKLLIAVWYILAQHKTDRFAQPEQVAQKLLKFAYQLGKENRPKGQSAAQFVRLRLDALSIGNELTCIAWGTKKPISLPPSTKKVSDVPNTK

SEQ ID NO: 376044 - protein, 521 aa, unidentified
MPRPRTARPAERRKAFVLQKPNGQLAPRVQAVGPEHFGVVAIDCAKARSRYFLADFYGRTLLEPTTLPHSRGDFQAAIDRIRQAEQQHHLADRVVAIERTGEYHRPVQHAFRQAGFETRLVHPFTSKQYRQPADPDHKTDDTDLAAIWRAATQGFGLLEPTWPDAYVTLQLLRRHRRDLVDKSAILQCQIREVLHAAMPGYAECFCHLWDDSPAPLLFARHTTSAEAVRQAGLAGLQQLAAQAGVHCRRETFHKVLAWAEQAPPDAGHTRDRRRILTALDDDRLAKARQILELERTLAHGIVATPYALLLAIPGINVVTIADLAGELGPIAFYRDATAITGRAGLMPSRYQSDRVDCPHGPLRRRGNRRLRAVLMQTADNLVQCNHYFKARAEQWTRAGKDPRWVRVKVAKIFSRLAFALVAGRQLFPHPCCQPRHYVVGKLLAFHRERGTDLPALRRDLEAAVDRLPAPSCAAEAEPLQQELDALGRRRGPQPLAEIIPLVLARLAGRVVQSESHEGAGP

SEQ ID NO: 376045 - protein, 343 aa, unidentified
MQTITTIGLDIAKSVFQVHGVDATGQVVIRRQLKRRSVLAFFQKLPPCLVGIEACASSHHWSRELQALGHTVRLMPPAYVKPYVKRQKNDMADAEAICEAVSRANMRFVPTKTPEQQSCLMLHRTRHLFIRQQTAVINSIRAHLAEFGIVAPVGRKGVTELLHVVADPSDKRVSEVARACLAALGGQLLSLKQQIVEFDRMILAWHRSNQTSKRLHYIPGVGPMLATALVASVADPSSFRSARNFSAWIGLVPKQYSSGGKERLGSISKQGDRYLRSLFVAGALAVIRYAKIHGTGHRPWLTALLARKPTKVAAIALANKIARMAWAMMAKGERYREPIALAR

SEQ ID NO: 376046 - protein, 403 aa, unidentified
MNNVAGIDVSKGKSMVSVLRPFGEVVAKPFSIGHTGSELKELADYLKSLDGETRVVMEHTGRYYEPVARFLHEEGVFVSAVNPKLIKDYGNNTLRKVKTDKADARKIARYGLDNWAELRQHTPMDTIRMQLKTLNRQQSLYAKTKTMMKNNLIALLDQTYPGVNALFDSPVREDGSQKWVDFATTFWHVDCVRNMSLTAFAERYRKWCKRHGYNFSQSKAVEVHTGAQDLIAMLPKDALTKTMVRQAIDALNAVSASLERLKAEMQALAAQLPEYPVVMAMHGVGDSLGPQLMAELGDVARFTHRNAITAFAGVDPGADQSGTHEAKSTRVSKSGPPELRRALFLVMDCLLKTQPQDDPVYRFMDKKRAEGKPYLVYMTAGANKFLRIYYGRVKEYLASLEEN

SEQ ID NO: 376047 - protein, 405 aa, unidentified
MNAVGIDVSKGKSTVTIRRPGDVVLMPPCDIPHTQTAVNALIEKIKSLDGETKACMEHTGRYYEPVANWLSDAGIFVSAVNPILIRDFGDDSLRAPKTDKADSKKIARYALDRWVKLKQYGSMDKTRNQLKTMNRQFGFYMDQKTAMKNNLIALLDQTYPGANDFFDSRARSDGSQKWVDFVYTYWHVDCVRGKSLQAFTEHYQKWCKRKGYNFSASKAEEIYQSSSDLIAVFPKDDSTKTLIQQAVTMLNTASQTVESLRIKMDQTASALPEYPVVMAMTGVGPSLGPQLMAEIGDVTRFTHREALTAFAGVDPGKNDSGKHSQKSVRTSKKGSPSLRKTLFQIMDGLIKRSPTEDPVYAFMDKKRSEGKPYYVYMTAGANKFLRIYYGRVREYLASLEKSQES

SEQ ID NO: 376048 - protein, 347 aa, unidentified
MTQYKRIAIDTSKAVFTLHGIDETDRPILRINLKRGQLLAFFRKLPRTEVALEACGGSHHWARELSALGHTVRLIPPQYVKPYVKRGKNDRNDAAAICEAAGRPGMHAVPVKSAEQQGQALVLKVRETLVDQRTQLVNTLRGHAAEFGVIAGKGLTNIAPLLKKIAADTAIPSEAKAMMAVLGEEIERLETRVREMEVRLKHAHKANAVSQLLATMPGIGPITALTVAIDVDPAAFESGRHFAAWLGLTPKEHSTGGKQRMGGISRAGNERLRSLFVLGATSVINATARPGNHCTTAWLMNLLRRKPRKLAAVALANKMARIAWTMLSRGEPYRGVARSEKLAAAVS

SEQ ID NO: 376049 - protein, 315 aa, unidentified
MHIQQSFMVGIDVSKAHLDVAVEGKRAVVRFDNDAPGCAALTTAVTGAELVVVEATGGYEMAIVRTLMAAGIAVAVVNPRQVRDFARASGRLAKTDQVDARVTLHFARAMRPAQIPHIDDGRIALAALVTRRRQLIDMAVAEKNRLEHAPEAVAALIGETLAALKAQLARVDAAIALAIEAEPDMAARRNLLLTVPGIGEVSAAVLIAELPELGTIDDKKLAALVGVAPMAHDSGTWRGQRHIAGGRATVRCALYMATLSAIRCNPAIKTFHKRLRDAGKPPKVTIVAAMRKLIIMINTILKRQTPWNQPQQHGC

SEQ ID NO: 376050 - protein, 321 aa, unidentified
MNKNTEFFGIDISKDVFDVYSSKTGHQSFKNDESGFKAFKKGISKDALVIMEATGYYHYRFAQYLYKNKVQVAVVNPLSVKRFIQMKLAKVKTDKSDAKAICEYGQMNKVTLYTALTDVQAECLQLFRLLDNYLKKRTQTKNKLHGEEVLGIPSKYVYQSLKRDLKHLNKEVAGVEARLLELVKQDQQHQLTLLKSIPGMGVKTALFLIVITDGFRKFENASQLCSYVGITPTIRESGSSVRGRSRISKVGNRKLRNLLFLCAFSACKHNKACREIYERIVNKGKSKKLALIAVANKLLKQAFAIAKSGRPYDENFVSKLV

SEQ ID NO: 376051 - protein, 419 aa, unidentified
MDVLVERCAGIDIGKVEVVACVRTPAASGRGRQKQTRTFASFTGSLEAMADWFTAEGVTEIAMEATGSYWKPVWYVLEERAFELKLVNAQHVKILPGRKSDVLDAEWLAELLEHGLLRGSFVPPPAIRELRDLTRYRKRLIQAHTSECQRIQKTLEDAGIKLDSVASDVLGVSGRAMLAALVAGERDPDVLAELAKGILRRKIPALRQALRGRFTDHHALLIGLSLDHTAHLEAAIARLDERIDTVFTTHTSEASVPFARARDRLDTITGVGKRAAETIIAEIGVDMSRFPTAAHLASWAGVAPGNNITGGKRGSGKTTKGDVWLLDILVQCAWAAARTRDTYLSAQFWKLARRIGKKKAAVAVAHSILVICWHLLTHDCDYDDLGGDYFTRRNTDRQRDRLIQQLHGLGYRVTLDKTA

SEQ ID NO: 376052 - protein, 414 aa, unidentified
MNAQSETRAIQRYVALDLHKEYVMVGAMNAAQEWALRPRKVEMSRFRSWAASNLQSGDAVVLETTTNVWDIYDIVAPLVTRVVVAHAGAVRQIAEARVKTDGEDIKRLLRLLIADIVPEVWVPPAHVRELRGLISYRNRLIKTSTMARNRLQSLIHRHNLQLPKGELTNAAWWESQPLNGLEKMQVRQELALLNQVEQSKAELETELAKMSLGKTWGKSAAHLLQLPGLGLIVTMTVLAAIGDIRRFESPKCLVGYAGLGAGIHQSGKEHKDKGITKSGRKELRWALIEAAWRAVRSSPLWEGRFRELAKRRGERKAIVAIARKLLVTIWYVLTREQTDRHATKEDLAYKMLVLAWELNENARLGLTYKQFAKYALMKLGIETDITRFVRKNVPRRVASNAETLARMEELGIVL

SEQ ID NO: 376053 - protein, 345 aa, unidentified
MKQVIRIGMDTSKHIFQLHGVDGAEQPVLRMRLGRKQMVEFFAKLPPTVIGMEACGASQYWGRELSKLGHEVKLMAPQLVKPYVPRNKNDGRDAEGLCEAMSRPSMRFVPVKTAEQQAALMLTGIRDGLIARRTQVSNTIRGYAAEFGLIAPKGLDKIEPLLAQIAQDESLTALARELFALQGREYARLQAELKAIEVKLMAWHRADALGRRLAQIPSIGPIIATMLVMKTPDPRAFRSGRHFAAWLGLTPKDHSTAGRTRLGKITRAGDEDLRRLLVVGATAVIQQARRGRGHPSPWLLALLKRKPPKLAAVALANKVARIAWKLMATGDSYDAARMNAMAFAA

SEQ ID NO: 376054 - protein, 343 aa, unidentified
MDHFAGLDVSVKETSVCIVDDTGRIVREVKVASEPEAVLAVLRNPGYHFKRIGLEAGPLSQWLFSALAEAGLPAICVETRHMRAVLKAQINKTDRNDARGMAQMMRAGLYRPVHVKTLRSQKLRMLLTHRKLLQSKAIAIENDLRGTLRNFGLKVGMVGKLKFEARIRELVENLPDLAVLVEPLLVVRRVLREQTAILHRRLLAIVRDDEVCRRLMTIPGVGPVVALTYRATIDVPARFKNSKVVGAVLGLTPSKYQSGEIDRTGGISRCGDEMMRVMLYEAAQVMLVRSARWSWLKAWAMQIARRRGMKKAIVALARRLAIIMHRIWVDGTEFRWTRDVAVA

SEQ ID NO: 376055 - protein, 341 aa, unidentified
MQHFVGLDVSVKETAICVVDEQGRAVARATVESEPVAVTAWLHGLGLRFGRVGLEAGPMSPWLYAGLVEADLPAICVETRHMHAALSARINKTDRNNAHGIAQMMRVGLFKPVHVKTPASQRRRLLLTSRKLLQRKVQDLENDLRGSLRNFGLKVGIVGAAGFDQRVRELATADPFVASVVGPLLEARAMLRLQLARLHKMLLDLVRDDPVCRRLMTAPGVGPVVALTFRACVDNPGRFDRSKCVGAHYGLTPRLYQSGETARVGRISRCGDAMMRAALFEAGLVLLTSPRVRWCALKAWGMAVAKRRGMQKAVVAVARKLAITLHRMWRDGTDFRWTKAA

SEQ ID NO: 376056 - protein, 348 aa, unidentified
MKIIGCDFHPSYQQIALVDTETGELWEGRLEHQEGEARRFYQALHGQRVRVGMEAVGNSQWFEKMLAEMGHELWIGDAAQIRRLVVRQQKTDRRDAQHILNLLLDGRFPRLWVPSAEVRDLRQLLRHRQKLVELRRQVKNQLQHLALNQGVQRKRRLWSREGRAVLEQLPLEGWTARRRAELLAMLDQLEGQVAELDQAVCTEALRRPEVRLLMTHPGVGPVVGLAYVLTIGPPQRFPRGKQVASYLGLIPREHSSGGRQRLGSISKQGNTMMRTLLVEAAQTAARFDEELRRDYGRLAARQHRALAKVMVARKLAVRMYWMLRENRPYPLRPVARMQGRPSHSVVAG

SEQ ID NO: 376057 - protein, 341 aa, unidentified
MEQYVGLDVSMRETSIAVRQNGKRVWRGKCPSGPRALADVIRQRAPDAARIVLETGSLSTWLYHELKAEALPVVCIDARHAKAALDMAPNKTDANDADGLAQIAEVGFYREVRVKGYAPMLARALVGARGQLLRISIQLSNQIRGVMRTFGLIVPKGAGRVFEAHARALLGRNEAVARVVLPLLEAWRAVRARAAELDRQLIASARTSPACRRLMTIPGVGAVTAASFVAAVEAPENFRTSRAVGAWLGLTTRRHQSGEADYDGHISRRGDGHLRALVYEAAAAVLTRTRTDSALRSWGLKLKEKVGFKRAAVAVARKLAVIMHAMLKTGATFDPAPNTTA

SEQ ID NO: 376058 - protein, 353 aa, unidentified
MWIIGCDFHPSWQQVAWCNSETGETGEQRLEHSNGEAELWYRQLPVGSRIGLEATGNSQWFVELLQRLGHEVWIGDAAQIRASYVRKQKTDKRDAAHILRLLLENRFPRLWRPSPEQRDIRQLLIHRHKLVEIRTRVKNGLQHLAMNRGMQKKRQLWSEAGQRALRELAMPGWAGCRRQDLLETLAYLDRKIAPLDRAAEETAQRDKMALLLKTQPGVGPITALAFAVTIGEASRFPRGKQVASYLGLIPREHSSGGKQRLGGISKQGNRFLRQLLVEAAQSAVRCDESLRRPYLHRCHRKPKGVAKVAAARQLAVRLYWMLRTNIGYPEIVRIESSPRVPLVGPSPRTRPMN

SEQ ID NO: 376059 - protein, 421 aa, unidentified
MAVVMIGVDPHKASHTAVAISAAEEPVGQLRVRASAVQAERLLGWAQAWPERAWAVEGAGGIGHLLAQQLLSAGERVLDVPPKLAARVRLLATGDVNKNDPNDACSVAVAALRSAGVREVRRDDHAAVLKVWSKRHQDLGQARTQVACRLHQVLCELIPGGVPGQITSGQAGQILASITPAGAVEAARWELAAQLTEDLRGIDTRIRQTRKKTAAVVAAAGTSLTGLFGVGPVIAAAVIGDVRHVSRFPDRDHFAAYNGTAPVEVSSGGRKVYRLSRRGNRRLNHAIHMAAVTQIRYRHSPGRAYYDKKLAEGKTGKEALRCLKRQISDAIFACLQADARRAATVAAKSPGGQPGNHSASRAAGSNPGHRRFGQATPGPATHPTAPAAPAAFPLCCHPARAGERVKDRAQPGRAAAPPRRP

SEQ ID NO: 376060 - protein, 349 aa, unidentified
MIWIGVDAHKRVHQAVALSESGICGERTLPNTAAAWAELLGWAGQWPERIWAVEGAWFLGRGLAQYLAEQGERVHEVSGRLTAKRRSRAVRPGKSDRLDAHAVALLLREEAARLPRVLAQDDETAAVQLWSRTQAELTKDMTRLMNRLHELLLLCDPEYGGRLPKLTTKAGITALLQYTAPGGSAIAREREAVIRATAAQLELLDTQDRDLKRKLERASTARFSPLRQIEGIGPLIACGLIAELGRPRPGFGEEQLAALAAVSPLEASSAGAVRHRLNRGGNRRLNMFLHQIVLTQGRMHPPARTYLLRRSAEGKTKREARRALKRLIVRRIYHAWVDCFAKNTERVAA

SEQ ID NO: 376061 - protein, 409 aa, unidentified
MLKFFVGDDWAEAHHDVEVMDPAGRVLGKARLPEGIAGMARLHALLAQQFGDADPDEVEVVVGIETDRGPWVGALVAAGYEVFAVNPLQAKEYRKRHVVSGAKSDAGDAHVLADMVRTDSHQLRPVAGDSAQAEAIKVVTRMHKTLIWERTRTTQRLRHALREYFGAALEAFEDLDAADTLELLAKAPDPASAARLTTAQISAALKRARRRSIAEKVARIQAALRTEQLGQPAVVTAAYAASTRALVAVLVVLNEQVKGLQGQVADHFGRHPAAEIVLSQPGLGPVIGARVLAEFGDDPHRYASAKARKNYAATSPITIASGKKKVALARYVHNDRLIDALMGQAFTALTASPGARAYYDKQRARGAEHNPALRQLANRLVGILHGCLKTSTLYDETTAWSHHTQTLAA

SEQ ID NO: 376062 - protein, 351 aa, unidentified
MYTLGIDIHKKSSVWILIDAERTELWKEDVLCSPTYISTIIKSLPVSPREIQVAIEPIGGWRWVSDLLEASGMNVHIAHPRKMQLIAQSTKKTDTEDARVLANLLLAGYFPEAHKSSEDIYKLRLLLRERTFIIQRRTSVKNQLHGIATTQGLHLIQSGNPLFKKGKADIMAENNFVLQQLHYLIEDLDRRVVPFDEQLLLECMKYPVAQLLMTFPGIGIITALTIISEVDDFSRFSSGKKLASFAGLVPRQRSSGESIRYGSITHAGSASLRTSLVETAMRIRESNAPELYAFVTRLTPVCGAKKARVALARKILVIIWKMVITNTPYQPNHAPSVCTANLSDLDTSSGT

SEQ ID NO: 376063 - protein, 344 aa, unidentified
MQHYVGLDVSLSETAICVVDHDGIVIREGKVASEPEAITAWLIELDISVTRVGLEIGGLARWLYAELRAAGWPAICIDPRRLRGLTKTMPVKTDRNDARAIAQVMRVGWYNIVHIKSGVSQELRMLLTNRKTLLVKQIDIENEIRGTLRVFGLKLAGRITQASFEERALDLVADKPRLAAMLRPMLAARSALSQQYAVLHKMLLEVVRVESTCRRLMTVPGVGALTAVTYLTTIDDPARFQRSRDVGAHLGLTPRKYASGEIDRNGSISKCGDTLLRTTLYQAALALLTRTQRWSTLKAWGMAVAKRRGLRRAVVAVARKLAIVMHRIWTDGSEFRWSREEAMA

SEQ ID NO: 376064 - protein, 321 aa, unidentified
MSKSFVGIDVSKNNLDVHILPEALSFSYHYETKAIKALIKKLKNYTPELIVLEATGGYEISIGIALSDANLNVAIVNPRQVRNYARALGQLAKTDKIDAYVIARFAQDVKPEARAQMTFKELELKSLVVRRQQLMEMRCAEMNRLSRISVTQVKNGIQKVIRVLDAQIEAIDHELKNEIKNNPTWSKKLELITSFKGVGDHTAHTLLFGLPELGNLNRQQIAALVGIAPFNRDSGIFRGKRTISGGRANIRKALHMPALSAATRWNQALKEFYCRLIAKGKKHKVALTACMRKMLITLNAMLKNNQTYNPKLGVNLGVNYG

SEQ ID NO: 376065 - protein, 319 aa, unidentified
METSQVSFKQVVSRGCGLDVHKKVVVATIDGEGIKKQTREYNTVTSSLKELKDWLLENGITHVAMESTGVFWKPVYNVLEPAGLTVWIVNAAHVKYVPGHKTDKKDSAWLCKLLLAGLLKPSYIPAKEQRELRDLTRYRTKLIQSNASNKNRIIRILEDANIKLSSVLSSTNGAVGTKLIDKICDGKEITMQDIDEVYHKKLEASKEEIYEACQGFITEHHVYMLQIIRQEIDSTQRTIENLDQRIKEVLLPYENALELLKKVPGISSKSVEDLVAEIGLDMNVFPTEKHLASWAGMSPGNNESAGKKKAGEPLRAINK

SEQ ID NO: 376066 - protein, 423 aa, unidentified
MMKLKYSICCGLDVHKNVIVATIVTTNKDGISEYLQKSFSTINSDIQRFHNWLIENNCYHVCMESTGKYWIPIFNYLESDIDVCLTHPKYVKAIKGKKTDKKDSKWIADLYKFDLVRCSFIPPKDFRQLRELSRYRFKLVCMKSSEKNRIQNCMTISNVGIASVLSDPFGKTATEIISYLLEHTADSMDEKAVRKLIKKGAKSKSDEIIEAIKGYTIETDQAKKLELARGHLEYLDDMITQTEVELYVRIKPYYEFVEFVSTMPGMTELSSTIVLAETGVDMDIFDDAKHLCSWCGLSPANNESAGKKKSVRIAKAGDYLKPMMVQCALAAIKSKKQPYFAIKYGRIKKRRGHKKAIIAIARMMMVCIYHMVSEKKPFTPTDYEELMDPQNHVESVVLNENNVFAYLESLGYDSSKLVKRNDN

SEQ ID NO: 376067 - protein, 389 aa, unidentified
MFYVGIDISKFKHDCFIVTEAGEVVCDSFSINNDYDGFTELLSVLDSLDPKEDVRIGFESTGHYALNLKLFLEKAHYSFMEFNPVLLSKFNKSQSLRRTKTDAIDSISIARWLMTVDYKPYPIGFYHTYALKSLTRLRDSLVKQRSFYMVKITNVLDHVFPEFKPFFNNRFSKTAIYLLENYGSAKRIAKMNTRSYDALRSISRGKFSMQKFLKLKELAKHTVGCDHELFTCQLNSLLSLYKQLANEIASIEDQIESLIAEIDPKTLSIPGIGPLSAAVIYAEYGDLSKFNSPAQMLSFAGLEPGYYQSGTSEHGGGMVKRGSSHLRYTLMNLCIPLIQYNMTFAEYYHKKRNEGKSHRVASSHLVKKLIRVIFTLEKNGIDFDPTKLR

SEQ ID NO: 376068 - protein, 339 aa, unidentified
MLFLGLDVHKNQSTLCALDVDGKQVFNRAIKGSWIKVVDQIRKVKQGHGGKVAVCFESSCGYGPLHDALVKIVDQVVVAHPGHLRMIFRAKKKNDKIDARKLAMLLFFGQVPSIHVPGEDVRAWREMINFRCKLVEKRTRVKNEIRTFLRGLGVVAPKGLWTRAGTSWLRSLEFSSDMSSFRRDLLVQEHESLKASVSRVERLLAKRARNHPGVALLMTIPGVGIRTAEALVAFIDDPHRFPKTNKIGDYFGLTPAFYESANTRRMGHITKEGPPVVRKFLTEAAWQAIRRSPTAAGKFEQWMRGDPDRKKIAVIAVAHYLARVSLAMLKTGETWREAA

SEQ ID NO: 376069 - protein, 310 aa, unidentified
MEDIVVGIDVSKDRLAVAVRPGAEAFVVERNAAGLELLIARLCELSPYLVALEATGGYETVVAAALAGAALPIVVVNPAQVRDFAKALGKRAKTDPIDAAVIAHFAQATKLEPRPLPDAATQLLADLVARRRQIIEMINAERQREKRVTIAHLRKSIARLVKTLEKELASLDTDIDKTVRGSPAWREKEALLASVPGVGPTIARTLIAELPELGQLGRKPIAALAGLAPFTRQSGQWRGRSFIGGGRTSVRAALFMGAMVAKQHNPVLKAFFARLVAAGKAKMVALIAVARKLLTILNAILRDNQPWQIA

SEQ ID NO: 376070 - protein, 420 aa, unidentified
MRNAGIHADSLLEVRRMYNAVGIDVSKGKSTIAVLQPGGTVIRKPFDVSHTSQSLIELADYLGSLEGSTKIVMECTGRYHEPMLKALYEAGLFVSVVNPHLIKNFGNNSLRRVKSDPADARRIARYTLDNWAELRQYSGMDNTRTQLKTLNSQFSFFMKQKVAAKANLIALLDNTYPGVNKLFDSPPREDGSEKWVDYAYSFWHVDCVRRIGLKTFTERYRAFCRKHHYIFQPDKPEKLFHASKELVAVFPKEKTYKLLIQQSIQQLNLASGHVERLRQEMNALASTLPEYSTVMGIYGVGKTYGPQLIAEIGDVSRFTHREALTAFAGVDPGVDESGQHKSKSNRASKVGSARLRKTLFQIMTTLLQNAPEDDPVYRFLDKKRAQGKPYYVYMTAGANKFLRIYYGKVKECLRNLEQAE

SEQ ID NO: 376071 - protein, 387 aa, unidentified
MPQPNDLSRSLVALDQNSTIIAVVELSQSSWLVGGVLPGIERQPCKKLEPSAERLLGLLHRWRDEVVRAGSNITRIAVAFEAGRDGFWLARWLSARGVEAHVIHPSSVAVSREHRRAKTDRLDTELLKRSFLGWLRGERGHCSMARVPTMLEEDAKRPNRERECLVGERTRIVNRMKGTLARLGIRTFKPTLRKAAERLATLHTPEGSPLPPNVSAELQHDMARLSLLISQIKEIENARQERLEQEPETGPHAMVRLLARIVGVGIETADMLVNEVLSRRMRDRKAVARYAGLTGSPDESGTKRREQGLAKAGNARVRRGMIQLAWRFLLFQKESALALWYRARTADSRLGTRKTMIVALARKLLIALWRLVTTGETLEGVVLRPVG

SEQ ID NO: 376072 - protein, 428 aa, unidentified
MSQKNYNKQVKKRQRIKRTTLVIGIDVGRAFNAVAYMDKEGNILGKYPKVYNSRAGFDFFVKVTEQIKKKHGMKDVLIALEPTGHYWRNIAYFAKEKGYDVQFIRTTSVKHQRELDDSSSAKTDIRDALTIANLTREGKYIDTIIGDGVWRQLRTLVKVREKIRKYNISSKNTLEAALDDYFPELRKIFWAVNTKGIWAILERCPFPEDVLKVDISELREIIGKVSRRRKVAAQKAIKLHEAAKESIGIKEIGQSDRYRVKMCLQEVKRTEGLVKEAEKKIKGLLKQIEYTEYLLSIPGVGPLSAAVVLGELGNPPHFKHARQIIKYAGYDPQENDSGQRIGRKVISKKGRWLLRKCLYFMCLRVVMKTRFFKEFYQRKLEKKNRFGQNLKKKEALCAVIIKLINVIHALLRDKRCFYDTVDCLAKAA

SEQ ID NO: 376073 - protein, 315 aa, unidentified
MDIASSSLAARVGQDGAEATFQNSTEGIAGLAAFCHNHDVELVAMEATGGYEQRAFAQLSESDLAVTIVNPRAVRQFAQSMGRLEKTDSIDAGMIAWYAETKKSQPLCLAPQTQLELRARVTRLRQLTELRTTQLNQQRLVTNRAVQAGFRKMLAFVAKQIQELEKSIAALIDADPLWRELDQAFRTIKGVADRTVARIMAEMPEIGTLSNKTISKLAGVAPLAQDSGKHQGKRAVRGGRAAVREILFIVASVVGRHEPDFVAFQKRLRDAGKPPKVIRIALAHKLLVRLNAKAREVRQRLAILDPTASPLLAAY

SEQ ID NO: 376074 - protein, 315 aa, unidentified
MYVGIDVSKEMLDVAMEPTGESWRVRNTMEDIGELATRLAPREPSLIVFEATGGFEATVAAVLAAAGLPVAVVNPRQVRDFARSLGRLAKTDRLDAQVLARFAEAVRPTPRALPDAAARRLSALCGRRRQLIEMLTAEQNRLPRADAAVRPNVEAHIRWLRQQLRDLDGELGKAVRGSPIWRRKDDLLRSVRGVGPVLSATLLAELPELGTLTRKQIAALVGVAPLNRDSGTFRGKRVTWGGRAPVRRVLYMAALVGTRCNPALRRFYARLLMAGKPKKVALTACMRKLLVTLNAMLRDGTAWAPEPVDLADSCC

SEQ ID NO: 376075 - protein, 356 aa, unidentified
MLKYCLGLDVSSKEVYACLSVIDQLQKMTVKSSSKFLNNPSGFDSLVTWLIKHYKQKDISLVVVMEATGVYYENVALFLHLKGYKVSVVLPNKAKKYLQATGLKSKNDRIDAQGLSRMGAEQSLELWQPKDEYFYQLRSVTRQHQSLQELKTNVNNQLHADQQGMYQNELVISQLRVLIKTIEGQIKDTEAAIAAHLNKDNEVAKLVEGITLIKGVGALTVAIILAETNGFALFKNIPQLISFAGYDVVENQSGNHIGKTRISKKGNGHIRRCLHMPALAVVRCQQSPFIQLFNRTLQRHGIKMKSYVAVQKKLLVLMYVMWKKKEAYQSAGKINHSGEQEQLSSSLLSFEEAGAN

SEQ ID NO: 376076 - protein, 419 aa, unidentified
METQRQWSDRAILRTTPVLLGLFSLITLWADDLARHCAAALRPHATAWYRKTEPTFSDAIAAVRRVLWCPPDFSISRISSETIEIPTTLLNRVETGKMEISRKLRRSELIAFFEKQEACTIIMEACGAAHHWGWVISCLGHEVKLIAPEAVKPFAKKGKKNDAADAAALCAAASRPDMKFVPIKSIEQQSILALHSARSLLVKQQTMLANAMRGLATEFGLTVPKGIAKLEELLEFVETDNAFPEKTRRVFMGLFDQCRALADSIGALNAEIVAHARQDETARRLQTIPGVGPITASLIVATVVDISAFTSARQFAAWLGLVPRQYSTGGKTRLGRITKTGNREIRKLLVLGATSMVHRAPQWNSALGVWTRKVLERRPVRLVTVALANKMARIAWALMTRKEVYRATGRAAIATEAAV

SEQ ID NO: 376077 - protein, 353 aa, unidentified
MTSIKYIGMDVHKESISIAVRNAAGKIVMECVIETKANIILDFIHGLRGELQVTFEEGTWATWLYDLLKPHVTKLVVCDPRKNSRQGNKNDRIDARELADRLYMNKLSSVYHGGAGVRTLRELARSYLTISKDLARVMTRVKAIYRSWGIPCAGKQVYAPRHRAEWLAKITEVGVLRRAEFYYQQLDALRPLRHEVRRELLAESKKHPATKLLCQIPAIGPIRAALLIALIQTPHRFRTKRPFWKYSGFAIEMHSSADYRAVKGQLQKSKKQVSVRGLNRDCNHDLKNLFKSAATIASVKPGPFQEFYAALVAKGMRPEMARLTLARKIATIVLIVWKRGVSFDAQHLKPQTV

SEQ ID NO: 376078 - protein, 358 aa, unidentified
MKISVALAEEGRQGEVRFLGDIDNTPEAIRRLVNKLTGKYQQLLFCYEAGPTGYGLHRQITAFGHECSVIAPSLIPRRPGEHVKTNRRDALTLARLHRAGELTAIWVPDPGHEAIRDLVRAREAAMEDLRAKRQHLQSFLLRHGRIYPGLRSWTLVHARWLSSLTFEHSAQYLVLREYRQAIEDAEARLERLTQQVADVVSTWSMAPVVEAYQAMRGVAFLTAVTFVAEIGDVRRFETPRQLMAYLGLVPSERSTGEQVRRGSITKAGNPRARRVLIEGAWTYRYPARLSRPLQVRQESLPKIVRAIAWKAQVRLCARYRRLVATGKRQSLVTTAIAREMAAFLWAIGHEVEPRRAVA

SEQ ID NO: 376079 - protein, 351 aa, unidentified
MKDLMAGIDLHSNNIMVGIVDREGKRLAQQKLPCELKRIGEFLSPYKDRLEKLAVESTYNWYWLVDGLQGQGYPVVLANPARITQYSGIKHADDKNDAFFLAELLRLGILPTGYVYDAERRPVRDLLRRRMSLVHQRTALMLSFKSLFTRTTGEQMSLSRLKALEVKEAQKLYEHPANQLIAGLQIQHIEQLTASIDRLEKAVLSVARHLPCYPKLKTLPGVGIILGLTITMEIGDIKRFAGPGQFASYCRTVAAQCTSNGKLKGENNRKCGNKYLAWAFVEAANFARRYDEPCRKWYERKAAKTSKVIATKALACKLAKAAWYLAAEETDYEPGRVFPQMATTKNQIMKT

SEQ ID NO: 376080 - protein, 421 aa, unidentified
MHTENQIFKYFVGIDWASDSYQICVTDEQGKVLEEKKVEHSGEGIRQCIDWLLKLAAGDASTVAVAIEVPQGAMVESLIESNLAVFAINPKQMDRFRDRHTVAGAKDDDLDAFVMADSLRTDQRCFHRVELDEPAILRLRELSRMAQDLQTDSNRLANQLWEQLRRYYPQLLKLSPAADEVWLWDLLASAPLPGDAAKLKLAKVKAILRAHRIRRVTAEQVLEQLRQPALRLAPGAAEAASEHVQMLLPRLRLLQQQREATARRIQGMLGELCAPPPEGQGREHRDAEVLLSLPGIGPVIAATMLAEASQPLRERDYQALRNYAGAAPVTRRSGKKKVIVMRHACNEQLRNALYHWSRTSMQKDPRAKQHYAELRHRGHSHGRALRGLADRNLAMLMAMLKSGTLYDAAKRSGHAPLSQVG

SEQ ID NO: 376081 - protein, 363 aa, unidentified
MIKLCSIDVTKYEHVTSIYNPSTGEIILDSLYFDNNDKGFNTLLSNLSKLNKKNEILTDFESTSHYHQTLFNFLTSRKYKCYLINPYMTSKFSSISLRDAKNDNIDSRAVSQFLSFEYRYLNEEEFLMNELKELANQRYFLITNSSKMRIKPKSYLDRVFPELESIVNINTLTIRSILKEYPTAKAIPEARINKLKNIAKTASKGKYSLSKIETVKQVAKISIKIHSISISLKNIIQYIEKLELKEKQIDTIEKEIQKHPTVLNSPLHPLIGINSIEITYIMSAIISITRFSSPEKIVAYAGFDPKVRQSGTWQASKTRMSKRGNKLLRSALIWTAFNMTHKPGPVKDYYDLKNHKASLITML

SEQ ID NO: 376082 - protein, 345 aa, unidentified
MKDKTIAVDLAKNVFEIGVSTQPGQVDKTYRLSRAKFPEFIAKQEPATVVMEACGSAHHWGRKFEKFGHRVILISPQYVTPYVVRNKTDRADVKGILEAYRNSELHPVPIKTIAQQQVTALHRIRPTWIQSRTKRINMLRGLLREFGFVIPMGARNLVPGVMGLIEDAETDIPPVVREMFHQVCGEIRELESHIQSVERELEALASQMPEVERLRTIPGVGLLTATAMVGFVGDIRRFKSCRHFASYLGLTPREYSSGNQRRLGRISKRGDIYLRTLLIHGGRSLLWSAHRKSATPTTPLQRWGLHLHKVRGHNKATVALANKLARRVWAVWRRDCDYQAGYQAA

SEQ ID NO: 376083 - protein, 320 aa, unidentified
MTILDSQVVVGVDVAKDEIVIYRSDLEKTLNIANKRSTLKQWLKTLPAHSAIALEATNIYHLDTTEMAHEMGHDVYVIDGSRLNKYRDGIGMRAKTDTLDAELLARYLSRESDRLRIWNPPPKAYTQMKSLLRRRAQLVRACVALKQSWKNESLLKEHFNQLLAAIAQFEKMIQKTLKEIAEEGGIDDQVKRCQAIEGVGLLTATAAATAFMRGEFANSDEYVAFLGMDPRVRQSGQKDQKRRLSKRGDSEFRRLFHNSAMAASRSPTWKPYYERYLARGLKGTQALVILARKLARVMFALMENQTEYKPNSMFGCSPQT

SEQ ID NO: 376084 - protein, 311 aa, unidentified
MEIYVGIDIAKLTFDLCSGPQKQNQQFENNTKGIRQAARMLAGLRPKLVVMEATGGYEAPLAAELYAVGLPVAIVNPRRIRDFARARGQLAKTDKIDAEVIATFAAKMQPPTQEHVDHTSRLMKALVARRHQLIRTRTAENNRMEHALDKVITASLGRIIKAIDREIENVERLIREQLDRMPELKAKAQILDSTPGIGETTAAMLVTEVPELGRLNRRQIAMLIGVAPINRDSGTFRGKRMTGAGRRDVRSRLYMPTLVAIRHNNVIRRFYQHLLSKGKPKMTAIIACMRKLITILNIMVAKNETWNPNLA

SEQ ID NO: 376085 - protein, 348 aa, unidentified
MLHVGLDLSRRRLDWCLLDGDEERIEAGAVAPDADALAGLVRLIELRHGPRAVRAVIESMNGARFVHDTLERCGWEVQVADAQKVKGLAPLACKTDKIDAWVLAELSRRDLVPAIWLPTFAQRQERERARFRLHLVKHRSSLKQRVHSQLMAFGHACPVSDLFGARGRELLERLEFPEPWRGGVLAAVALIDDLDRQITGIEAQLKQLGAEHRYVPLLLTVPGIGWVLAYTIAAEIGDITRFASPRKLCGYTGLCPRVYQSGESDRRGPLAKHGPKYLRWALMEAATNAAKHPLYRERYQRIKQRVGKQRGAKVAQIDLARRLAEAIWHMLTRNQPFAPAGAAFPLAA

SEQ ID NO: 376086 - protein, 452 aa, unidentified
MEQPQEVEDEEYERVWERVAAIDVAKATGVVCTRVPGDGPPGRRSMHVWTVKATMAAVTELGDHLRCQGIEVVTVESTSDYWRVWYVVLEAAGLKVQLVNARAVKNVPGRAKTDKKDAVWLAKLTERGMLRPSFVPPYDIRRLRDYTRLRADLVHDRSRQWARLEKLLERALIKVSSVASTLDTQSVRAMLEALIAGQRDPRAIADLAIGKMRAKRKELAEALNGKFEDHHAELARMILDQIDALTAQIDQLSARASELIAAIPAAWGVDADGTTGPDSGRGPDAAVLPAVARLDEITGCGIISAQAIIAEIGLDMTVFGTPGRLVSWAKRCPQTRQSGKKSTAGSPGKGDPWLNGPLGEIAASASRTDTFLGERYRRLAKRRGKRKAQAAIARSILVIIFHLLADPAARFHDLGSGYYDERVSAERKIRSHVRQLEALGLTVTITPAEDAA

SEQ ID NO: 376087 - protein, 338 aa, unidentified
MNVTTIGFDIAKGVIQIHGVDAAGLVTLRKRLSRKGALSFFARLKPCLIGMEACGGAHYWARELASFGHQVRMISPLYVKPYVKRSKTDAADAAAICEAVSRPHMRFVPVKSRQDQALAQAYKTRGLLVAQRTALVNALRAHLTEFGIVAPLGPAGAARLIALVRARQERLPDLAYQTLAALADMIESTQARIALFDGRLERLAADDEASQRLRQVPGVGPVAAGTIRALVGDVSRFKTGRDFAAWLGLTPRQNSSGDKVRIGAISKAGNRELRTLLVMGQLAVLRYVRATPARASAWLAGMIKRRPPLVVAVAMAAKTARIIWAMLARGEAYRPHPA

SEQ ID NO: 376088 - protein, 350 aa, unidentified
MTTMPLRVTGGVDTHLDVHVAAALDDRGALLGVESFETTPAGYRRLLGWLGAFGEVELVGVEGTGSYGAGLTRHLHSEGVCVVEVDRPNRQRRRRRGKSDPQDAITAARAAQSGDALGEAKTRDGNVEAMRVLRVARSSARKARTQALNQMRSIIATGPEPIRAELRDLNVYRLLERAARYRPGQRHDVASLTKRTLRMLARRAQALETEVAELDAILKPLVADTAPALVARPGIGAECASALLVAAGDNPQRLRDEATFAHLCGVAPIDASSGKHQRHRLNRGGDRQANAALWRIVITRMVYDPRTRDYIERRTKEGLTKKEAFRCLKRYIAREVYNHLPHPQLSLDGP

SEQ ID NO: 376089 - protein, 356 aa, unidentified
MSQQCNCAIAVIGIDIGKNSFHVVGHDLRGAIVLRQKWSRGQVEARLANQPSCLIGMEACVGAHHLSRKLQLLGHDARLMPAKYVRPYSKGQKNDFRDAEAIAEAVQRPTMKFVATKTVDLLDLQALHRVRERLVSQRTSIINQIRAFLLERGVAVRQGPRFLRAELPGILATRTDVLSPGMLRVIEALAGDWRHLDARIEGLSGEIETLAHQDQHCERLMTVPGIGPIISSAMVAAIGTGEVFSKGRDFGAWLGLVPKQISTGDRTILGSISKHGNRYLRALFVQAAWVVLVKLGPKQWERYGLKSWIEAAKKRLHYNVLVIALANKLARVAWAVLNKGRAFTCVKTDAMASRPA

SEQ ID NO: 376090 - protein, 379 aa, unidentified
MRNDSTVYVGLDLHKDSITVAYAIDAGEVELLGKTGTTGADIDRLCTRLQSKAPHVRVVYEAGPCGYGLYRQLVQKGFDCMVCAPSLIPRKPGERVKTDRRDAIKLARSLRADDLSAVYVPGIEDEAFRDLARAWAAAREDLRRARHRLKSFLLAHGVRYTGSANWGEAHRRWLGRCSFPSAWQHLAFDEHRRTIEDRLAQCARLETALREAVISWRFYPVVLALQAMRGVQFVTAVGMVSEVGDLSRFEHPRQLMAWLGVTPSEHSSGGKRRQGSITKTGNSYARRLLVEAAWSYRHPARVSPEIQARLEGLPKAIIDRAWDAQVRLCRRFRRLTARGKPINITVVAIARELAAFIWDISRLAMSLAIPRTKLLAACV

SEQ ID NO: 376091 - protein, 342 aa, unidentified
MTYYAGIDVSLEYSSVCVVDGAGKIIREQRIASEPEALIAWFRGLGFGLERIGLEAGPMSQWLYAAMRAAALAVELLETRHVRDAFKAMPVKSDRNDARGIAQLMRLGWFRPVHCKSLAAQEMRALLTARKLVQSKLLDVQMSLRGLLRGFGLKVGPTTPSRFAGRIRELVEGNATLEVIAAALLVVHETLRRELAGFEKRVRSIARSDGRVRLLMSTPGVGAIVALTYVSAIDDPARFKSSKGVGAHFGLTPKKYQSGETDITGRISKIGDEGVRTALYEAGHIILTRPLKGCTALKSWAMRLAKRAGMKKAKVALARKLAVIMHRMLVDGTLFASAAVAA

SEQ ID NO: 376092 - protein, 460 aa, unidentified
MRRQPDKSKHTPSPTSLPVVKPMVAGLDVGSSEHWVCGPVRADETPNVRVFGTTTSQLNELADWLVDQGVKSVAMESTSVYWIPIYELLESKGLEVVLVNARQFRNVPGRPKTDFRDCQWLQLLHSCGLLEGSFRPRDAIIRLRTLQRQVTNLVGERTRIVQWMQKSLDQMNVQVHRAVAEITGATGMAIVRAIVAGERDPMGLAALRDTRCRKSVEQIAEHLTGNWREEHLFNLASALRLFDVLEKEMASYEGRLLKELESLQPADRTQERVPRHPNVAKEKAIKARGDHETRTTLWRFSGSDLMRIDGIGAGAAQTVLTEVGPDLSAFPSEDNFVSWVHLCPPTAVSGGKRLSKRRYSLGASRVAQALRMAATAVQRSKTALGAAFRRIARRKGMAVAVFAIARKLAQLVYRMLRYGQDYVDIGEAAYEQRFQVRRLAAITDAARDLGYTLVPRVATT

SEQ ID NO: 376093 - protein, 318 aa, unidentified
MKFIGVDVSKEKLDVYIRPDKKHFIVENKPEALIKLANELEKLKPELVAMESTGGYERQLVRELVKSGVKTSVVNPKLIKDFGRSGGARAKTDKLDSGVIAHYAEVHHPHEVILASEEEEKLEALVTRRRQLSNMKVAELNRLKHAEGEIATDISDHISWIDKKLKEIEQKLQTKIQQSEELQQKGELITSMKGVGPVLTSVLLMDLPELGKVSKKKISALVGLAPFNVESGKFKGQMKIYGGRKEVRAALYMPTWSAIKHNPDIRDFYQKLIAKGKKKKVAVTACMHKLLITLNSIVRKGVKWTPQYSACTKVEGLN

SEQ ID NO: 376094 - protein, 349 aa, unidentified
MKIIGCDFHPSYQQIAMLDTVTGEIVEKALSHERKEEVRDFYAGLEGSVRVGIEASGQSQWFERMLAELGHEVWIGDAAKIRASCERKQKTDRRDAKLLLRLLAEDRFPRIWVPTAAERDDRQLLLHRHKLVRMRTQVKNQLQAQALNQGVQRKRKLWSEAGRKQLESLPLLPWASRRRAELLQLLDQLEASISELDRAVAEQASARPAARRLMTHPGVGPVTALAFALTMGPAERFQRGKQVASYLGLIPIEHSSGGRNQRLGHISKQGNPFLRGLLVEAAQSAVQHEPEMRRAYQRLAQRKCRALAKVAMARKLAMRLYWMLRLQVNYAQLIQGSHAGQPGTFCGRG

SEQ ID NO: 376095 - protein, 443 aa, unidentified
MKALPVLDPQAAAIDVGSERLHVSIGGDAPKVFGTFTGDLEVLRGWLKERGVRTVAMEATGVYWLYLYEVLEGAGLEVVVVNGRHVQNVPGRKTDMADCQWLATLHAHGLLRGGFVPPNDIRQLQDYQRLRSDHIVGAASQVQKMQQALERMNVKLHDVISDLTGVSGLKVVRAILKGERRPGELLALCDEQIRKKKSEALKESLRGCWKKEQLFALRQALELWEAYQQKISDCDLEMQALLQQMAMPGDGQSGGGLIGPVKLAPAKALGKNGPAIQRLQELLARLCGGHDATQIPGLGTSLVLQIVSEVGTDMSAWETEKRFVSWLGLAGGQKQSGKRKRSIKVHRNRAGRMFCAAARSLAQTVDKALGGFYRRLRGRIGGLAANVALARKLALLFYRLLRYGSDYVEKGLKAYEAKVLLTEARLLRKLAKKQGFILVPAPA

SEQ ID NO: 376096 - protein, 349 aa, unidentified
MNHYAGLDVSLEETAICVVDGTGRIVKEVRAASEPEALIAALREIDLPLERIGLEACSLTAWLQDGLCAAGLPAICIETRQADAAMKTMPNKTDRNDARALAQIMRTGWYRKVHVKSRQCRLWRSLLVARRTVLNEMRSIENVVRAVLREAGIKLGTPSRTAFAGRVRELAGGDPLVMALIEPLLAIIATMLDQLACLTKQVLAIARREDVCRRLMSVPGVGPITALAFRATIDRPDRFRRSRDVGAHLGLTPARYQSGETDIQGRISRCGDELARTSLYEAAHTLLVRSKKWSSLRAWGMKVAKARGMARARVAVARKLAVILHRMWSDGAEFRFGKEPSAATSLAAA

SEQ ID NO: 376097 - protein, 413 aa, unidentified
MRDIVHRRCCGLDVHKDQIAACVRWAEDNGEIEQETRVFGTTTEQLRSMGDWMRGHGVQLVAMESTGVYWRPVWNVLEGDFQLKLANSQHIRNIPGKKTDKKDGAWIAKLLQHDLVPASFVPDTRIQELRELTRARARLVQEKTAVANRIQDVLENANIKLASVASDILGRSGRAMLEAIMGGESDPVRLADLAKAQLRGKMQRLRLALEGRIREHHRFSLRQLMDHLEFLEGKIFIIEEELRRRSQPYEEAIQLWMTIPGVRWLIAVTLAAEIGVDMQQFPSAAQLASWAGVCPGNNESGGKRKSGKTRKGSVWLRRALCEAAWAASRTKNTYLSAQYRRIAAKRGQKRASLAVAHTILVIAYHLLKNKVRYHELGGDYFDRIRTAGLKRYYLRRLEQLGVSVTESPTALDS

SEQ ID NO: 376098 - protein, 350 aa, unidentified
MIIIGADYHPGFQQIAFVDTETGDYGEQRLAHSEGAEKFYRDLAAQGKKVRVGMEASGHARWFEGLLAELAFELWIGDATEIARKRERKQKTDRQDAQHILQLLMENRFPKIWIPSGENRDLRQLLWHRHRMVQMRTRIMNQLQAVALNEGLRCKKRLWRQHGREQLESFRLAPWASRRREDLLQLLDRLNPTIADLTQVIEQEVEKCPEARRLRTHPGVGALTALAFVLIIGRTERFQCGKQIAAYLGLVPLEDSSGNRRRLGHITKQGSSMLRFLLVEAAQVTARSNPEWRNKYFHLAMRRGRKIAKVAMARRLAIALYWMWRKGWDYEQLRKFGSHAGKLGTGDGVQ

SEQ ID NO: 376099 - protein, 338 aa, unidentified
MNYVGIDHHRQYSHITWLDEKGEVVKSGRVANRRRELEGFLQGARDVRAVIEAGRSSYTMVDVLADLGIETTVAHPKDVKAIAKSKIKTDERDSYKLAHLLRTGYIPEVHKRSRENRSSQRVLRQRAFYVGKKTSVKNRLRALLAQQGEEIRLEVERVEDLFTDKGMKILRGLALPEREAKLVGALLRTYDHLEERINETNAIVKQLYERMPSAQLIQTVPGFGIFLAVLVAVEIEDIGRFEDVSQFHAYAGVIPSTHSSGERSWHGKIIKEGNRWLRWAAVEAVWPALRADFDIRCFYDRLKSRKGANSAKVATARRLLTIIYRMLKENRPYIPYKR

SEQ ID NO: 376100 - protein, 350 aa, unidentified
MLYTGIDYHRSFSYLTTMNEKGEIINQKKLPSNGEILDFLKEFGEDMEIALEASPSWYWLYDHLEDEGFQVKLSHPLKTKAIAYAKVKTDKVDSATLAHLLRSDLLPLSYVPEKPVRLNRELLRYRASLVKIQTGVKNKIHMILAKNNVSHSYTDLFGKAGMSFLHSLALAENYKIALEGYLTVLDSVRQEIRMASKKVRQLAEKDPDTLLLMTIPGMGYYSALLTKSEIGDVRRFRSAKQLCNYAGLVSSTYASGNTCFHGHITKQGSRWLRWILVEAAIHAVKRPGVLRRFYFKIERKKGGQIAKVATARKLLEWIYHILRDGKTYLEVEEIADMLGRGELGNYSGRA

SEQ ID NO: 376101 - protein, 362 aa, unidentified
MKKVSKAQWLEEMGSDRPALTVGLDLGDRYSHYCLLNAGKEVMEEGRIQSTEAAFRRHFEGEERQRIALECGTHSPWVSRLLKSLGHQVIVANARKIAAISSSESKNDRNDAEQLARFAASDPKLLAPLLHRSMERQQDLNLIQARATLVRARTMLVNALRGLVKSAGGRLPACSTESFPVRVRASIPSVLTTVAVPLLEQIATLNRQIDSMEEQIEKLGTRYPEIGVLRTVPGVGPVVAATYVLTLDRPNIASNRSAGAWLGLRPGQSQSGDSDPELGISKTGNRYLRSLLVQSAQYILGRFGPDSALRRWGLKLASSGGKRAKKRAIVAVARKLAVLLHSMWRSGQSFQHFPQPAMATVA

SEQ ID NO: 376102 - protein, 317 aa, unidentified
MEAPVAGIDVSKDKLIMYFQGKLYEFTNDRQGFEEIRKILPSGCKVGIESTGVYHVNLAKYLNNEYDVRIINPFILKKFKDFRGKKSDKNDAKKLAEIVVSMGSELTTSDARELTSQWDFVIRSIARVKNRLRRDLVLLGYRDSLSKKNLEEVLRGGGDSVVLSEVRFLLEELERLEGRKREIEKELEDFVPKDSLIFTIPGIGKTLGCIILARVGDVRRFSDKKRFVAYCGLDPVVESSGKSVVSRGISKRGDAVLRRAFYLAALTAIKVNPVIKRFYEEHKGRLRGKKLIVACARKLAVITWAVLYYNKPFDASE

SEQ ID NO: 376103 - protein, 314 aa, unidentified
MRNCIGIDVAKQYFDLHDLKTGHDQRMENSTDGIRQCVAICNKIRPELIATEATGGYELTLAATLQAEGFAVAVVNPRRIRDFARAAGQIAKTDRLDARIIAQFAATMEPMPAEQFSEHTHKLKALVARRNQLVGLHTAESNRLEHADGKEIRRSVAAVLKVIEAQLKTIDRQISEHVENTPRLRQRSEIFDSVPGIGPTTANMLVTELPELGRLNRRQIAALVGVAPMARDSGTFRGKRMTGGGRKKIRCRLFMPTLVAVRHNPILRAYYNKLLGRGKCKMVALVAVMRKLICILNTMAKNNQKWNPNLIKIA

SEQ ID NO: 376104 - protein, 381 aa, unidentified
MAQKRRARQHCNKACPPRVFIPWMRREVLMVAVMIGIDPHKGSDTAVAIGPGEKLLGEIRVRACPSQAAQLVAWAAAWPQRAWAVEGAGGPGYLLAQQLVAAGERVVDVPPKLAARVRLLEAGDTNKNDPNDALSVAVAALRSRAPRPVIAEDHAVVLKVRAKRHRDLARARNQAACRLHAVLCDLVPGGIRKEITAGQAARILDEVTSAGAVAEARCELAAEFLADIRRLDAQLRETKKKLAAAVKAAGTTMTKIFGVGPVIAGTIIGDVRQVSRFPSRDHFAAYNGTAPIEVSSGNRKTHRLSLRGNRRLNHAIHMAAITQIRHRHSDGRAYYERKLAEGKTHKEALRCLIGGLSVPRPGWPGCGSPVAPGDGLVAEPL

SEQ ID NO: 376105 - protein, 303 aa, unidentified
MEAQHKPVDREGQPLCIGLDVHLKSWTVTIRGAGTELAHFNAPPDAGALATHLRRRYPGAAYRSVYEAGFCGFAPHRALEQQGIHNLVVHSPDVPTTHKEKLAKEDHRDSRKLARELENSNLGGIYIPNPAHEHLRALCRARHRLAADGRRLKCRIRALFHTAGISLPPNEVLKHWSRRFITHIETFARGNEPWVLSLRTWLDALNDHRRQMTVLTRRLRACVRRDGDPETVRLLTSIPGIASISATTLVCELIDMDRFHSTDQLASLVGLVPNTHSSGDSDVPRGLTGRANPFLRHLLIEAA

SEQ ID NO: 376106 - protein, 431 aa, unidentified
MLANTSTTNDMNACTFKATIGLDWADQRHDLWIQAADATKPQHVHLEQTPEALHAWVAKLRERFPAGQVAIGVETSRGPVISALLAYDFLVLFPINPKALKDYRAAFAVSGAKDDRTDSQLLEELVRLHPDRLHPLQPDTELTRKLAGLVENRRHLVDERTRITNQIHAKLKTYYPLAETLLRPDLASAMGAEFLSRWPDLTRLLAASPEQIRRFFHKHGSRSARKMEERLAAIQNAKPLTTDPAIIEPACELILGLAAMLKCLNTAVARLERSIQKAMDEHPDAPIFRSFPSAGPALAPRLLVAFGTQRDRFESADQVAQFYGIAPVVIQSGNTEITRMRHRCPKFGRQTFHENAACAAKSEPWAGVYYQQQKEKHEDKHHQACRALAFKLIRIYFACWKNRQRYQSQTYFAALAKTGSPLHHKLNEVGE

SEQ ID NO: 376107 - protein, 370 aa, unidentified
MENRSMFVGLDVHKETIDVSIAEGHRNGEVRHYGVIASDLEPLDKVVRALRAPNRRLHFVYEAGPCGFGIYRHLTKRGEACVVVSPSMVPKRSGDRVKTDRRDSVTLARLHRAGELRAIYVPNDVDEAMRDLVRAREDAVVLGTQAKYRLKAFLLRQGRRYPGREGWTQPYRRWLTDLSFPTAPQHITLQEYRDTIDETERRIARLTEQLRQLAPTWRWAPVVAALQALRGVSFITAVALVAELGDLTRFGHPRELMAYLGLVPSEYSSGPSVRRGAITKAGNPHVRRLLAEAAWAYQGIPRIGRQHAYRQEALPKVVCDIAWKAQLRLTTRFRRLVARGKAKPKVATAIARELAGFIWAIAQEVSPASQ

SEQ ID NO: 376108 - protein, 400 aa, unidentified
MSTSHARIRVGIDAGKGHHWAVAVDTGGETLFSTKVINDEAQILALIDTAREKAGEVRWAVDISGRASALLLALLIAHGQQVVYVPGRTVNRMTGAYRGEGKTDAKDALVIADQARMRRDFTPIQTPPELVSTLQLLTAYRRDLIADRVRLINRMRDLLVGICPALERAFDYSAAKGPVIMLTEYQTPAALRRIGVKRLTTWLERRKVRSAGTVAAKAVEAAQSQMAALPGEGRAAKLVRDLAHQLLALDERIKDNDREIRETFRTDDRAGIIESLPGMGPILGAEFVAITGDLSGYRDAGRLASHAGLAPVPRDSGRRTGNYHRPQRYNRRLRWLFYMSAQTAMMRPGPPRDYYLKKRGEGLVHAQALLSLARRSVDVLWAMLRDKRLFTSAPPATQTA

SEQ ID NO: 376109 - protein, 344 aa, unidentified
MNTIRVVGIDIAKSVFQVCVWMDDGSVAWNKKISRSRLQDTVRQFEPGTLIAMEACSTSHFWGRTFSAMGYPVRLIPAQHVKAFVRSQKNDANDALAICETAFRPGIHFVSVKTTEQQDIKALRNTRQLMVEQRTALANQLRSLLAEYGFTIPVGIIRLQQHLPELIEDASNSLTFTLRRLLSSLLADMQALNERVASLDSEIAALSSQQTVYRHLLTIPGVGPLIAAAFISEVDATQFSSGRKLSAWCGLVPRQHSSGGKQRLSSVTKNGNRSLRTLIIHGARAVMRCVKKRDDNLGRWLQKLEARRGFLKTTVALANKLTRIIWRVLTDSVDFNMNRAFSMV

SEQ ID NO: 376110 - protein, 304 aa, unidentified
MFGIGIDVSGENLDVAVHEQAFRQFKNNKRGWASLIRWLQRWPAKQVVLEASGGYEQKALDALHEAGLPMVRINPGRGRSFASATGRQAKTDRIDAMVLAHMADALKLTRYVPPAAWQRRLGELCQRRRHLVQMRVSEHQRMRAFSEPCLISMLNQHLDEIQKSIKQLDATIAALLAEQDGWRDFAKLKGAGPVLMATLACELPELGKLSGKAISALVGVAPMNRESGTWKGRRNITGGRAVVREALYMAALTAKNYEPRLKEFFESLVNQGKPGKVALVAVMRKMLVILNARKREAEAQMASA

SEQ ID NO: 376111 - protein, 348 aa, unidentified
MMIIGVDFHPEFQQIGSVDSETGEFQEKRLAHPAEAEKFYRALVGQKVRVGMEASGHARWFERLVAELQFELCIGDAAEIRTKRVRKQKTDRQDAQLILRLLLEDRFPQIWVPSWENRDLRQLLWHRHRMVQARTRIMNQLQAVALNEGLRCKKKLWRERGRQQLESFRLAPWATRRRRDLLELLDRLTPTIAELSQAIEQEVEKCPAAQRLRTHPGVGSLTALAFVLIMGEVNRFRCGKQVASYLGLVPLEESSGNRRRLGHITKQGSSMMRFLLVEAAQVTVRSLPEWRNKYLHLVLRRGRKIAKVAMARRLAVHLFWMMRKDWNYQQLKKFGSHAGEPGNRHGVR

SEQ ID NO: 376112 - protein, 343 aa, unidentified
MKILKQSAGIDVSKSDFKVCLGKLDEQLSVAFSFQKAYDNNLKGVTLFLKEVSHLFTAEVTVQFILEASGVYHELLAHKIYQHGYEVSIILPSKSKAFFKSITQKVKTDKVDARLLSQLALERQLDNWVPADPIYTQMRSLTRERESLIKEKTVIINKIHAQQSAYQIAKSTLRRSKQRLKLLQKQITSIDLELKTLVESSEMLCSKVNRITKVKGLSLLTVATVIAETNGFGIIRNQKQLVGYAGLDVIINQSGQKSSKGRLSKKGNPHIRKALFMPALSSSRSNELMKIIYQQLNQRQAAKKQGVMVVAKKLLLLIYALWKNSTEYDPQKNIQSRLLLATV

SEQ ID NO: 376113 - protein, 354 aa, unidentified
MTKGLMAGIDLHSNNVMIGIVDQSGQRLQHRKLACDLKAVEAFLKPFKPRLKSVAVESTFNWYWLVDGLRASGYPAVLANPAKIEQYSGIKHADDKNDAYFLAELQRLNILPTGYIYDPQLRPARDLLRRRVGLVHQRTALLLSSKSLYMRTTGQELKSNRLKAMKPAEAGKLYAHPANQLIASLQKEHIEQLDQSIGRIEKAVLACARELPYYERLNTLPGVGRILGMTITMEVGDIGRFKTAGDFASYCRAVDARRTSNEQGKGWNNRKCGNKYLSWAFVEAANFARRYDERSRKWFDRKAARTNPVLATKALACKLAKAAWHVMAHQVDYAAERVFGRAAGSQGKGLAKSP

SEQ ID NO: 376114 - protein, 343 aa, unidentified
MELYVGMDVSLKETSICVVDGSGEIVSEGTVISEPEAIAEFIKVKAPQAKRIGLETGPTTTWLWHELRALGLPVICIDARHAKAALSMQINKSDRNDAAGIARIMQCGWYKEVQVKRLSCHEIRAVLNSRAQLVKIKRDLENQIRGLLKNLGLVIGKAGGNVFRRRVEELLGGRGLLWQAVRPLLEVREKVGREIAALYRKLLGLARNDADSRRSMTLPGIGPINALAFHSAIDEPSRFRRSRSVGAYFGLTPRRHASGEVDWTGRISKRGDTMVRTYLFEAAGVLLTRVPRWCTLKAWGHRLWKRIGFKKAKIAVARKLAVILHRMWRDGTDFIWSSKEAAA

SEQ ID NO: 376115 - protein, 398 aa, unidentified
MNVIGIDVARGKSKCALIIGDLVDKYFEIKHNRSGFSRLYNIARETKSLIVFETTGVYSSQLTQFCIQEDLDFLELNPLEASIRMAGLRRDKTDRSDSEKLAFLAINQHNLLVGRRPWDSSYEELRMLGSRYFQVTKESARSINHLHAALERVFPELNDVFDLIKSTLDLRMIELFTHPDFVMGQKIDDMVEKVWSSVNHKIHHDLVVQKCEEVWHASRSSYPAVESDSILVEITQSYCNEIRNFNAEKNSIKKKMINLARKEPELKIINSIPGAGELSVALLIGYVGDIRRFLTYKQMNAFVGIDLHRIQSGGLKNDHINRRGQKNARYIMFDMVRSMLRNQATIDNHIVDYYYKLKKGPHPKSDMVAMIACINRLNRTIVNLVRTNQIYDYFKTAH

SEQ ID NO: 376116 - protein, 346 aa, unidentified
MELYIGLDVSLASTAICAVSGRGKIMMEATAASEPEELVAALKAMPGGVVAVGLEAGPLSQWLYRYLTDAGFAAVLMETRQVKGALKAMPIKTDRRDAEGIARLLQMGWYRPVHCKSVSAQEMRALLSARKAIQQAAINLELSIRGVLRNFGLKMGRVAKGRFEARVQELTEGNPMLEAAANPILATRRTLRQELAGLEKALRDHVKEDPACRTLMTMPGVGPVVALTVKATIDDPARFRSSKDIGPWVGLTPRREQSGERDIMGQISRAGDVGLRTTLYQAATTMMHRGRKNWLTAWALNVAKRRGKKRATVALARRIGVVLHRMWTDGTDFRFTRKDAVAAAAA

SEQ ID NO: 376117 - protein, 366 aa, unidentified
MDEITFVGLDAHAETTAIAVAEAGSAAPRFIGTFGAKFAELTKVLDKLGKHSELRVVYEAGPCGVAMVRQLRQVGYHCEVVAPSKIPRKTGDRVKTDRRDALSLAGLARAAQLTYVTVPDERDEAMRDLSRARIDAVRARLKTRQQLKALLLRHDRRYTGKSSWTAAHERYLAQVSFAHRAQEIAFVEYRRAIGEAQMRVDLLTQALSQELVDWRMRPLVQALMTLRGVDELSATSLVAELGEMKRFAHPRELMGYLGLVPSEYSSGQKRSLGAITKTGNSHARRLLIEAAWNYRFPARISLPLQKRQEGQPAAIRDIAWRAQLRLTQRYRRLSSRGLQHNKVCVAIARELAGFVWSIGQQVTVGS

SEQ ID NO: 376118 - protein, 368 aa, unidentified
MFVGLDVHKDTIDIGVAESGREGEIRHIGTIGGDLAAVDRALRKLISAGHRLHVVYEAGPCGFVLYRNLVKQGITVDIVSPSLIPKRPGDRIKTDRHDAMMLARLARSGDLTAIVVPDAGDEAVRDLLRARADVVRAQRSARHQLKALLLRNDIRYAGKSAWTAAHQRWLATVKLAHPTQQITFQEYVHAVTEATDRIVRFDQAIVEAVATWRWRPVVEALCALRGIALLAAATLVAEIGAIERFGNPRQLMAYLGLIPSEHSSGPSRRQGAITKAGNTHARRILIECAWLYRYPARIAPILQKRMDKVPAEVRTIAWAAQVRLCARFRRLAARKLPHNKIVVAIARELIGFIWAIARIQPPLTSAPH

SEQ ID NO: 376119 - protein, 341 aa, unidentified
MRRAVGVDLHKNSFTVCFYESEARHTFKTYRVSRVGLAAFRKQLQVDDELAVESTGNTAFFVRAIASCVQRVRIVNPVQFKVIANSVKKTDSIDALTIARFLSRDMIPEVRMRSTEEAQRSSLIGTRDKFVKLRTALKNKRHNILNANGIVSKPEMFTGEKGLAQVLEVPLDPSYRFEIELLVTEIRHLNEAIKKLEEELKRQGQALPGHQNLTSIKGISDTGATIFLTAIGNIADFKDEKALASYFGIVPRVYQSNQTCHYGRITKRGNKIARTALVQSTLVAIRYSPYLRAFYDQVKARRGSGKAIIATSRKLLGIIYNTLKHNWVFEDFPTFKLATSS

SEQ ID NO: 376120 - protein, 346 aa, unidentified
MKVKTLGIDLAKETFGLHGVDALGRVAVHRRVTRKQLLGFLVKLEPCLVGLEACGSAHYWAREIEKLGHTVKLMSPQFVIPYRKGNKNDPNDAEAICEAVSRPSMRFVPIKNEEQQDLQALHRVREQLVKNRTALANQIRGLLRERGVVVAQAIARLRAALPLILEDQSNRLSGLMRELLGEMAERLRMLDDRLRQYDQRIARICQQDERCRRLVKVEGVGPLVATAVVAAIGNARQFTNGRELSAWLGLVPREHSSGQRTMLLGISKRGNRYLRTLLIHGARAATRVVERKRDARSIWLSRLKLRGGPNVAAVALANKNARVMWALLARGDSYRVRPAMDRAAAA

SEQ ID NO: 376121 - protein, 429 aa, unidentified
MEVLHPRCCGLDVHKETVVACVRLVIDGKPVKEVRTFSTTTVSLIELSEWLTETKCTHVAMEATGVYWKPVWHILADDGFQLVLANAAHIKNVPGRKSDVKDSDWISDLLSHGLIRPSFVPDGSTQEMRTFLRTRKQFVHEKGSHILRIQKTLEDANIKLDSVITDIIGVSGRNMIEALIAGERDPAKLAALADRRLKASQQTLRQVLRGRVTAQHRFLLRLHLDQIDALDAAIARIDREVEASIAPFRTAVEQVRTVPGIKSLAAQTILSEIGIDMTRFPSSGHLISWACICPRSDESAGKRRSTRIRKGSPWLKTTLVQCAWAATRKKGSYLQAQYYRIRARRGPKKAIVAVAASILTAIYHMLKDGTMYQDLGPNHFDANAKERQKNRLLKRLADLGYDVELTPFPTGVAPAEALAAEALAAEALA

SEQ ID NO: 376122 - protein, 404 aa, unidentified
MYNAVGIDVSKGKSTIAVLQPGGTVIRKPFDVSHTSQNLNELADYLGSLEGPSKIVMECTGRYHEPMLKVLYEAGLFVSVVNPHLIKNFGNNSLRKVKSDPADARKIARYTLDNWTELRQYSNMDDTRTQLKTLNSQFSFFMKQKVAAKANLIALLDNTYPGVNKLFDSPTREDGSEKWVDYAYSFWHVDCVRKIGLKTFTERYKAFCKKHHYIFQQDKPEKLFNASKELVAVFPKEKTYKLLIQQSIQQLNLASGHVERLRQEMNALASTLPEYNTVMGIYGVGKTYGPQLIAEIGDVSRFTHREALTAFAGVDPGVDESGQHKSKSNRASKVGSARLRKTLFQIMTTLLQNAPVDDPVYRFLDKKRAQGKPYYVYMTAGSNKFLRIYYGKVKECLRNLEQAE

SEQ ID NO: 376123 - protein, 393 aa, unidentified
MIYVGIDVAKDKHDCHIVRQDGEILLDNYTFANNLNGFLSFFDTVENLRKRREEVKIGLEHTGHYSQNLIRFLSDKGMTVVALNPLTVNMYRKSKSLRNTKTDKSDARYIAEVTAKTAVDKRRHILNDIGTLKSLTRYRYRVLKTLQTMKNRYRRVLQIVFPEFETIFNVNYKTTIDLLAKYPSPKDILKTDKDALVKSLDKISRGHYGKKAVPLIEAAENSIGSSNAGDAFELKHLAKQISFLQEELEILEEKLEIILNRLGTPILSIPGIGVNTGAAILAEIGNIKNFETPAKLLAFVGSEPTIYQSGKYLLTRTPMVKKGSKYLRNAVFQATKAAYISDPIMRAYVDKKRDEGKHFFVALSHGMKKMVRIIFAVLMSGKEYHAPVPATVE

SEQ ID NO: 376124 - protein, 331 aa, unidentified
MKFEEVIGIDVSKLTLDAFIHSHQIFTQVPNTKKGYSKLLTWATKSTGCLMDKVLFCFEHTGMYSYALACHMTEKQMNYIMVPGLEIKRSLGIQRGKNDRVDAMRIAQYAYRRREEVTTYQLPEKAINKIRQLLSLREKLVKQCAGYEASLKDLPDFIESSESKVLVGVQRNMIKALAREIEKVEKEIDSVLESSPDIMNNYRLITSITGVGRQTALYLIIVTNNFLSFDDHRKLASYAGVAPFANTSGTSIKGRTKVSPLANRKLKSLLSACAVSAIRHDPEMKLYFNRRTEMGKHKMNSINAVRNKLLARVFAVVRRGSPYVPLCQYAA

SEQ ID NO: 376125 - protein, 349 aa, unidentified
MGEASTIGIDIAKSVFQIHGVDANGTVVIRKRVSRARFLEFFADLPPCVVGMEACATAHQWARELKKLGHDPRLMPPTYVKAYVKRGKNDAADAAAICEAVTRPSMRFVPIKSVEQQSALMLHRTRDLLIRQRTQLINALRAHLAELGLVAAKGHEGLQQLVIAVTESSDERLPSNARFACQSIVAQLHAVQTQVNGLDKRIIQAHRANADSKRLDAIPGFGVILSTAVVATMTDPKAFKSGREFAAWIGLVPRQNSTGGKERLGSISKQGDRYLRRLLVVGAISIVRTARMRPDKYPWVIELLARRPAKVVAVALANKMARIAWAVLTKGETYRAPARSGNVATAAAA

SEQ ID NO: 376126 - protein, 348 aa, unidentified
MKYIGLDCHKQYDHATMIDTETGEVKARKLAHIKEEFREFIGDKTGTRVVIESCRDWSRTYELSKDLVEDIILAHPLKVKAIASAKVKTDAVDSRTLAQLLMADLIPEAHLRKAENRVKQRVIRHRTFMVVMRTRVKSRIHNLVDSQLLSPEALKAKPKNLFSKKGMKWLTSLEWAKEEDNRLVESHLRVMEAINQEISITNDMVKEIYEKDRDAQLLITIPGIGITLGMLISTEIDGIERFHSPSKLCSYAGLVPSTHSSGGKTYHGKITSEGNRWLRWALVEAAVPASYADAEIKERLDTLRKKKGANVAKTAMSRWLLKVVYHVLKERRPYITDYNVMAKAGAAF

SEQ ID NO: 376127 - protein, 396 aa, unidentified
MISVGIDVSKGKSTVCIMKPCGEILESPFDIGHTADELDSLISLIKSFDEETRVVMEDTGHYHLPVATYLSSHNIFVCCVNALRMKKFCSQSIRRAKTDKIDSIKIASFGITYWNELVKAYPSNVIYDELKFLARQYYQVTGMLVKSKVNFSNLLDQVMPKINDVLSNQGENHKLTEFVNRYIHFQNILDMGEMKFTSDYCKWAKKKGYRLNERKAAEILALAQNGIPTLPNSQSVKIAVSEAVKLIHSIEESRNTILAQMQDLCNTLPEYSVIKEMNCIGDTLAPRIIAEIGDVRRFKNKHSLIAYAGIDAPPYQSGAFHASERHISKRGNSYLRKTGYEIMQSLIKHKPADNAVYNFIQKKRSEGKCGKEAMIAGLNKFLRVYYGKVMEFYSEH

SEQ ID NO: 376128 - protein, 402 aa, unidentified
MYSSFVGIDIGKWNHQAAFLEVSGKETARSLAFQNTSEGFQSLSESLAPFDKGQTVIGLEATGHYWLALFSFLVDNGWTVKVINPMQSDALRNMNIRKAKTDRKDCVVIADVLRFGRYTETVLPDEDLLQLRELSRCRVAHVELLGDLKRRALGILDRIFPEFASCFSTVFGAAPTELLQECTDPEELADYDVDKLIKLLEKESRGRHSREKAEELKAKASRSVGTRFGRDALKFELKMLLEQLDFIKGQVKEFDKFLKKLMKNHELIYTIPGISVTLGSAILGEIGDVKRFGTPQQLQAFAGMDPSVTQSGNFQGTQGKMSKRGSPYLRRAVYLAANAARRFDPVFKDFYDRMIARGKHPKQALAAVGTKLLRVIHAVMTSQKPYNPQKLLTPAAISQLNP

SEQ ID NO: 376129 - protein, 355 aa, unidentified
MEKPEITIGLDLGDRFSHYCMLNGDGDAIESGRIQTTEEALRRHFEGEPTMRFALECGTHSPWISRLVEQMGHQVIVANTRKIRAITGSESKNDKNDAEKLARFAFCDPRLLSPIRHRSPERQQDLNLIHARSTLVRARTMIVNALRGLVKSAGGRLPACSPQGFQERVEASIPPALAEATRPLLHQIAALNTGIRQMDRGIEQLAERYAEINTLRTVPGIGPLIAAAYVLTLDRPDAVQHSRQAGAFLGLRPRQSQSGDSDPQHRISKTGNVYLRSLLVQAAHYVLGRFGPDSELRRWGMKLAASGGKRGKKRAIVAVARKLAVILHRIWQTGKPWQAFPQSTPNIATSNVSVT

SEQ ID NO: 376130 - protein, 319 aa, unidentified
MSTLPVWVGLDVAKETLDVAVRPSGELWSTPNTEGGITALLARLRSLHPALVVCEATGGFERAAIAALAAAGVPVVVANPRQVRDFARSTGQLAKTDALDAGILALFAERVRPTPRPLPDDAAQLLDAVLTRRRQLLEMLTAEKNRLGFAPKPLHRGIQAHIRWLERQVDDVTKELATLIEASPVWRAKDDLLQSVPGVGPIVSYTLLGELPELGTLTHKQIAALAGVAPLARDSGTLRGKRMIWGGRTSVRTALFMAALCGRRWNPALKVFYDRLIAAGKPKKVAIIACARKLLTILNAMVRSNTQWMRPEAKLEYSC

SEQ ID NO: 376131 - protein, 335 aa, unidentified
MEAWAGLDVAKAKFDAALAWESSDRKIEEAVCGTFARDAGGVKDFLEMAASAVGGDAAFQIVMEATGSYSSELEKMFASAGLPGRTRIVNPRLVHHYAKSLGLKNETDKIAASMIARYGLERKPPLQDTLSVSRAKLRALIRGRADLVKARTAIGEQLKEAASCETLAASLKRIHDFIAKEVKSIELEMAALIKSEPDMRRDAELVESIPGVGFINACAILGELGDLRRFRKRGQLIAFAGLNCVSKESGSSVRRKFGISKAGPSEIRRVLHLAARASINSSAPNIFSSFYERKCKEGKAKLSASTAIMRKILLVARAILLKNGSTPELVGEMAS

SEQ ID NO: 376132 - protein, 423 aa, unidentified
MRIIYRRCCGMDVHKKKLTVCVMSTDGVSPVQVRKRAFGTYTRDVKKLRHWLLACKVTHVAMESTGVYGKPVWNVLEGKFTILLVNAAHYKGVDGRQTDQIDCEWLAELLQCGLLKASFIAPQEIRELRDLTRMRVPVVQEENRVQNRIEKVLESANIKLSVAVSDTLGVSGKLMLKAIIRGQEDPGWLADYARGSLRSKRKELELALAGKVTDHHRFLLQECLDPIEFLEGKVARLEGRIGEMLQPHADLIRRLDAIAGVDEITAWTLLAEIGWNMDVFQTSERLASWAGMCPGNRQSAGKRSSGKTRKGNRWLRRALVQCGWAASRAQDSYLRSVFWRIAGRQGKKKAAVAVGHRILKIAFYLVRDGVEYQDLGPAYFDRLNPVRTAQKPVHRLERLGFAVNILPASAKAIAEGGSNIANA

SEQ ID NO: 376133 - protein, 392 aa, unidentified
MRYVGIDVGSRTHMVAIVDADCAIVLKPVAFGEDAAGYEKLFLLLGSAEDTLIAMEATGHYHRNLFAAVTARGFVVALLNPLRTHRFAEEDLQRGKTDRVDAVMLARFAAQKRPAPESRLDAGTVELRELVRLYERVTQDFGDRVRQLHRLVALCFPEFRQHVLGLDSQRATAILASYPTAAALRDSSVASVARLRYDGRHRVGPALARALVDAARTSVAQHHGPAYEAGVRALCEDIDRLRGRMHGWASDLEGRVAAHEVASLLTTIGGLGAMAAARIVAAVGDPARFRSASAFAAYVGVVPRDQRSGLHQPSRSPIGRLGHKRLRCALYMTTLGAVRRNPWLRVYYERLRGAGKLPKVALIAAERKLLVAVYAVAKRRQPFVPRVGSLNG

SEQ ID NO: 376134 - protein, 348 aa, unidentified
MVKNSAAEVQVFAGIDVSARELSVAVHSRTVDREQAQTFSNNASGHHALRAHLLRGKGHVRVCLEASGNYSLDLALTLHAHRRVEVSVVNPRRARRFAESLGERSKTDPVDAHVLCQYACRMPWLPSVPPSRLALRLRGLTRAIEALGVTQTQEKNRRHWLRASKVLSTFLIRELQRHLDYLQVRITRLRREALRLIARDPELDRRFRLMLTTPGIGETSALQILGELAVLPDTLDARQWLAFAGLDPLRFTSGTTVDKKPRISRGGSRHLRRALYMPALVAIRHEPHLRAFFQRLVARGKAPLQAVVAVMRKLLHAFFAMFRSDHSYDRFKLCPVASVSDPGALCAA

SEQ ID NO: 376135 - protein, 439 aa, unidentified
MNDIWTIQAALDWTVGYLERKGDENPRLSAQWLLSEATGLSRIELYANFEQPLSMGERDVLRAYVTRRGKGEPLQYITGEVGFRHITVKVRPGVLIPRPETEMLVEEVLNYLDAMRFHYGDDAVFICGYEAGCLGFTLYHQLTQHHVKCIILAPTSMAKPAGKKKVKTDKLDAALIARCMAHHDYSPVHIPTDKDEQVKEYIRMRSDHKAALKKVKQQISAFCLRHNYRYETTRSHWTQAHLNWLRSLKPEGLYEEILSEYLSTYDQLTDKLERLDKRIEELASDTDYQEKVRKLSCFLGIKTHTALTTIVEVGDFKRFPSAQKFAGYLGLVPGEDSSGGSHNGLGITKAGNSHVRMLLVEAAQSYTRGRAGCKSQTLKARQYGNTAQVIIYADKANERLRRKYYRMVLTQNKKPNVAKTAIARELSCFIWGMMTGNMG

SEQ ID NO: 376136 - protein, 325 aa, unidentified
MSNILGIDVSKDKLDLVLLSEEGKYHKVIRNDLSGFKELDQWLISRHIDRVHVCLEATGQYGDEVSEYLYERGHDVSVVNPTRIKRYGESKLHRNKTDKADADLIAEFCLKEKPALWEPLNPDLKHLRALVRRLTDLQANYRQEGNRLTSGEKDDWVIRDISVHLEYLKASMEATEAEIQNFTNQTPGLKAKQELLVSIPGVGKKTSARLLAEIGEINRFENAPQLAAYAGLNPKGFSSGSSVHKKTRISKQGRSELRACLYMPAIVAMTHNPVVRALKERLRKKQLPTMAIVAACMRKLLHIVYGVLKSQMPFDPDYDRQFNFW

SEQ ID NO: 376137 - protein, 374 aa, unidentified
MPHYVGLDVSQKTTSICVVDERGRRLWRGVCVTDPGAISACVLKHAGVDAKVGVETGAMTPWLVHGLRSTGLDVECLDARRVKAALQMRLNKTDENDAEGLAQIMRMGWYRPVHVKSLNAHRARALLGARAQLVGMTTRLSNMMRGVLKTFGLLPGAGRGLRFDQRVEALIDGAPDIALIVRPLLATWRQLREQIAVFDKAVQQQVRTDPICRLLMTVPGIGALSSLMYVSTIEDPDRFSRSRAVGAHLGLTPRRYQSGETDRSGHISRCGDGLARTLMYEAAIVIRHRVKRSLHLKDWAEAIERRSGPGKARVALARKLSVILHSVWRAVPLGTKRPGSVVYRNLLAASRTPLSLPGEDAGNCVASRWARDQT

SEQ ID NO: 376138 - protein, 431 aa, unidentified
MKLPKHLEHINRYAAGIDIGSKSHFVAVPEGTDEQPVREFSTFTADLERLAEWLISCGVTTVAMESTGVYWIPVFEILESHGLEVKLVNARHVKNVPGRKSDVLDCQWLQQLHTYGLLHGAFRPADEVCTLRAYVRQRSSLVRSSASHIQRMQKALAQMNLQLHNVVTDITGTTGMRIIKAILDGKRNPDALAAMRDPRCKNSSATIARSLKGNYRPEHLFSLQQAVELYEVYQTKIADCDRQILKQLKSFDDSPNTMPPTSVEDALVRMSGVDLTAIDGINATTALKILSEIGTDMSRFKSAKHFASWLGLSPGTKVSGGKVLSSATKQVANKAAAALRMAAFTLFNSKSALGAYLRRQRSRLGAPKAITATAHKLARLVYAMLTHGTAYVDAGQQYYEERHRSRVIQNLKRRAQELGFELVTIKATAVL

SEQ ID NO: 376139 - protein, 344 aa, unidentified
MKCKAIGIDLAKTVFQACGVNDHIKPQFNKKLKRKDFIEFMAQQPPTDVFMEACYSSHYWGRRLNEMGHTAKLIPAQHVKPFVRGNKNDRNDALAVVEASQRPYIRFVPVKTEHQQEISSLHTIRERLIKNKTATSNQARGLLSEFGIIFNPGKKAFIEGISAFIQDDYQSLRLRSMMSEMLYEYQYLIKRITKIEDELTQFVKQCPNGKILLSIPGIGVINASALVASIDKGQAFNNPREFAVWLGLTPQQYASGTNSRMGGITKRGDRYLRKQLVHGARTVVSNAKNKTDQLSVWATNLLERKSFNKTAVAMAHRLARLIWILLQRQELYTPQFDTKNAVVN

SEQ ID NO: 376140 - protein, 366 aa, unidentified
MTSPVAGIDPHQSTITVGIVNANGVKITHDSYPNTAEGFIAAIELLTTHRVERVGVEGSASWGAHVAIAVVAAGFDAREVPPQRSAAQRRARRTDKTDIVDAVAIARAVLAEPTLGPVQALEVYDPHVAKIEAVLEHRRMLVEVRSLALHHVADQIAKLPTDIRDQLTVNGKIEGRLRRLAQLEHPDTTSVAGAYRLTWLVAFIEQDRVARREIRRLETELGTLLDEHGTTLRDEPGIGPIAAATLLVEVGDPHRFATESKFARWCGTGAVALSSGEGQGIPVRHRLDFGGNRRINSVLYIASVTQQRDIDEARAYIDRKTAQGKTPREARRAHKRHLASRVIRRMWKDETRHRNEPPSNRLRNAA

SEQ ID NO: 376141 - protein, 427 aa, unidentified
MSERKSLELRVSVDVGSRRHSVAIGLSDGQVLEEFEITHRPEGFHEFFSRIEKHQKAQGCGVAVAMEGYNGYARPLDSLVRQHGYRLYNINNLKLARFKEIFPGAAKKDRIDARKGLELFQLRDHLPLAKEVLQEVTGTPKENEILKRLTRRRRRLVNERVRVVNNLQADLQAVCPGLLEITTEASNQWFLNFLLSADTLGQLARLRKSTLLKISGVGRKYASVIQEWQKRAHFSEEAQWVGEMIHEDAQRCVELEEKIKTLATKIEQVAKGSKIAKVLLSIPGFGPVCTSELAGEIGTVRRFGKEGGLALYLGMSTLDNSSGNYHGTKQPKHVNTRAKAAMMTALDRHRKYVLESQIYYEKKRSEGKKHNQAIRSLGRHLCRIIYKMLKDQREYEIRLHQGNTKTKVGSRSCVKTKIRRPKIFPNS

SEQ ID NO: 376142 - protein, 344 aa, unidentified
MDELSTIGLDLAKTVFQVHGVDTQGAVALRRRLRRSEVLKFFARLKPCLVGMEACCGAHYWARELMALGHAVKLMPPAYVKPYVKRGKSDTADAEAICEAVTRPSMRFVPVKSAQAQAMQSLNKVRTALVGQRTQTINTLRSLLAEFGVIAPQGAAAVRKAWAGLAEDALPAAANLALSELVRNFATLEEQIKRLEVEILAHNRASELSRRLAAVPGIGPITAFALSASVPDAGAFRSGRHFAAWIGLTPRQHSSGGQERLGHISKMGNQDLRRLLVMGATSILRRAAKEQTPQGQWLRNLLARKPARLVTVALANKMARIIWALMARAAMSIARSPLGPRAPG

SEQ ID NO: 376143 - protein, 489 aa, unidentified
MMKLYLGIDVSKGYADFVLLNENREVVEPVFQLDDTAAGHRQLEEFLQRLFRRWPRAVLYCGLESTGGYENRWYDHLLAASVRWNLKVARLNPTAIKAHKKALATQTDTDPVTARAIASYLVTYPQNVRYAEGSDFRSLRQLVKLIHQLNQQKTRHVNQLEKMIYQYNPTLLLYWNNPLPKWWLKVAHRYPTTSHLRAASVKELCAIPYVTPAKAQELLGRARQARPVPFDPLVEVTIRTLVQQLLLLDKRIEDLKATLAEHVSKQPRLAPLFQLWLTYKGCSEYTAAALAVYFVNVHRFAKAKSTAAYFGVNPVYRESGDGNWGYHMSKKGNRIVKSLLYMISRSGVQSNPVLQAVFTSALRRGKSKSAALGICMNKTVRILYGMAKSGKPFDPELAFQHMGRHKQLDRSKQRAVERKRRYQGFDQTAPISMRQRKKREQVESQPASAQDQSSKDRDHRTCSPCESTPLGKHFQIDSLNPAKQTRPFA

SEQ ID NO: 376144 - protein, 354 aa, unidentified
MKRTTKYVAFDVHQATTVASVREEGGRVIARSVLPTDGGALTEFVRGMRGARHVTFEEGTQAQWLYELLAPLVDRVVVCDRRGAPHQGNKGDQIDADQLSELLRRGALRAVYHGSADRATLKELTRTYRNLVEDATRVMLRLKALFRARGIPTAGTAVYHPRHRARWLAQLLEDGARFRAAALYAELDVLRQLRPKAKAVMVTEARRDPAWRVLRTIPFLGPVRVALLLATMQTPWRFRTKRHLWAYAGLAVVTRSSADYTLVAGAPVRRRRAPMTRGLNRNHNRVLKDVFKGAATAATARPGPLQDFYRTVVARGTREELARLTLTRKLAALTLRLWKKGERYDPTKLTTPAR

SEQ ID NO: 376145 - protein, 360 aa, unidentified
MKYVGIDIHKRYSVCVAQDERGRRLGEARVEGNLAAGFAQFFRSLGGKSRVVIEACWNWQAIYDRLEGIAQVEAIQVANPYKARLIAEAQIKTDRLDANGLATLLRGNFIAPVHVPGRQARARKNLLRQRLYWARLRTRIRNRTHALLDRQQELQLPQCSDLFGARGKSFLRRLELAKPDALLLGEDMELLELIGRQIKEQERRIRAGNQHDALSRRLQSLPGMGLILSAVAAAEIDSIERFNSAEKLCAYAGLAPSTYSSGGNTWHGCMLPFCNKWLRWAFIEAAWVAVGCSGYFGNFYRRQKARGKKSNTAITIVARRMCRIAWALLREERDYTAQPPSKHNNFPGRSALRTGGPNYN

SEQ ID NO: 376146 - protein, 363 aa, unidentified
MKAYNVDNFAVLIGMDLADKKHDICEHPTGTNKYHYTVIKHTPEALHEWAMDIRQRYPEQKIAIVCELKKGPLIYALAKYDHLTLFTVNPCAVAKYRQAFTPSGAKDDPSDAFVQVEILTLHMDKLSVIEPESAAMRTLSQLVEYRRSLVQDSVDLSNKITATLKNYYPQALEWFKEKDTYIFCDFIQKWPSLTAVKKARKQTLLDFFESHNSHYSTVNNARLDSIKNSMPLTLDEGVIVPNQMLVEVLITQFKVLLKGIEKLDKAIKSAYKAQQDKKIFDSLPGAGPQLAPRLLVAFGSNRARYNDAAELQKYAGIAPVIERSGQKMWTHWRYSCPTFLRQTFVEWAGFSIRYSFWAKAYYE

SEQ ID NO: 376147 - protein, 340 aa, unidentified
MDEVSTVGLDLAKSVFQVHGADATGAVLLKKKLRRDQLLSFFAQLPRCLVAMEACASAHHWAREIGRLGHEVRLIPPAYVKPFVKRQKNDMADAEAICEAAQRPTMRFVQPKSAEAQGAAVVFRTRDLLVRQRTQLINALRGHLGEFGYVVRQGAGHVGKLIDLVGDPASDIPADARPVLAVVADSLQAIQARIALLDREIAARAKADETAKRLMTIPGIGPVAATALVALAPSASTFRRGRDFAAWLGLTPRQHSSGGKERLGRTTKMGERSLRRLLILGASSATKVAARDPSRASAWLAGMLARKPRMPITVALANKMARIVWALMAHGGSYRAPAAA

SEQ ID NO: 376148 - protein, 355 aa, unidentified
MSEERANVIGGVDCHSRTHHAVALDGRGQRLGDAQFPATIAGYQALHAWLEGFGAIEALGIESTSSYGAGLTRWLTARQIRVLEVNQPHKHARSRKGKSDSVDAEAAARKVLAGETVVVPKDTAGAIESIRQLRVAREGAVKARSAALCQLGGLIVTAPAELRESLPCKTLLGQARQCARLRPDPKRLAEPLHAAKFALRSLALRIVALDREIGQLDQALEELVRRAAPRTTSLLGVGTHHAGQLLVTAGQNIERLRSEAAFAHLCAADPIPASSGLTRRHRLNRGGDRSANRALHMIAVVRLRYCPRTRVYVARRTAEGLSKRETIRCLKRYIAREVYQALSADLRQIDSRRST

SEQ ID NO: 376149 - protein, 411 aa, unidentified
MVKENFIYVGIDLHKETHTAVMIDCYNQKLGEITFPNRPADFPKLVTKVKKCNTDAKEVVYGLENAYGYGRPLAVWLIDKGYFVKDVNTAISHRQAKHRGAMYRKSDSDDAEAIALATLNMLDKLPDACPNDAYWSLGQLVHRRDNIMKQRTRLVNQLHEQLCIAYPSYKQFFNDISRPTALYFWEHYPSRKYLKGKSVEDLRAELVPVSHNKCSTKTCEKILDAVASDKVKNNAYQDARDMVTLSIVSDLQHYDSQLAEVDKMLEQMYKMLGCTLTTIPGVNVITAVKILAEIGDIKRFSNANKLAQFAGIAPLHLSSSGKGKDVATKQGNRRLQATIYFLAIQMVQLSSKGTPRNPVVRAYYEKRKAEGKTSQQALICISRRLISIIYGMLKNGTEYRMPVVENAGEKL

SEQ ID NO: 376150 - protein, 353 aa, unidentified
MIIGVDYHPGFQQIAFVDTDTGELQERRLEHREDAEKFYRDLAAQELKVRVGMEASGHARWFERLLAELQFELWIGDAAEIRTKRVRKQKTDRQDAELILRLLLEDRFPRVWVPNSENRDLRQLLWHRHRMVQARTRIMNQLQAVALNEGLRCKKRLWRDAGREQLESFRLAPWASRRRRDLLELLDRLTPTITELSQAIEQEVEKCPTAQRLMTHPGVGALTALAFVLIIGRADRFQCGKQITSYLGLVPSEESSGQRRRLGHITKQGNSLLRFLLVEAAQVTVRSIPEWRSKYFHLAMRRGRKIAKVAMARRLAVRLYWMWRKGWNYQQLTKFGSHAGQPGNPDGVQSSTE

SEQ ID NO: 376151 - protein, 353 aa, unidentified
MDQFIGCDAHKKFSLFIAMNEEGGYGKAIRVGHRREQMRAFLEELPAGSEIALETSGSYYWLVDEMERAGHRPRLAHALTAKRRMEGRHKTDERDARGLAMLLRNGTLPEVWIPPAELRDQREMLRLRMSLVESRSQAKNRIHGALLRYNVELKAKDIYTVGGREELAGQLTQLPQWTRHSVVQQLETVDHLEKQIQACEQSLETMLAPNAERDLIRTLPGVGKILSAVIALEIGAISRFESAENLVSYAGLVPAARVSAGKKRKGKCPADCNTYLKWAFVEAANVIAIHHSKWPGRHVAQLYARVKHTTKMHGKATVAVARHLAEASYWILSKQELYREPKSNRKALSSTHG

SEQ ID NO: 376152 - protein, 316 aa, unidentified
MEYFAGIDVSLRFCAVCIVDGKGTVLLERELPCEVSDIAECLGTLPHPIERVGFEAGTMSQHLFYGLKAEGFDVVCMEARQANAALSAMRNKTDKNDARGIAQVLRTGWFNPVHMKSRAAQGVRALLSTRKALLKKTMDLANEVRGLLKIFGIRLPMTVKHGSFDGVVRPLIEMDDVLTHALVPLLDARVVLYQHFLELDRRVKRAASHDEVCMRMMTIPGVEPIASLTFKAAVDDPTRFKRSRTVGAHFGLTPRRYQSGEHDNPGRISKAGDRDVRATLYAAANALLMRTMAGPQIKSWGMRLMRTKGRRRAVVA

SEQ ID NO: 376153 - protein, 373 aa, unidentified
MPRYSTAFGMDVHLRSTTVCALDAETGEAVTRRFRGNPWGEVAEWMSGFPGPSLAAYESGYLGFAPQRELSGLGVDCVVAAVSKVPRSAADFSSKNDRNDAARMAKAILSHDISPVWVPSPEIEGLRDLAGAHDAATARLAAAKQRLLAFLARRGYAYGGTTPAGNPRRYWTYDFLRWLDKVRPADDGGIRALAALRSEVEAAAETRDALLAEYRAAVAAGPLSAEVEALQSIKGCGFALAAAFASEVGDFSRFRSGRQVTSYFGLAPKQRSSADSVRLGGISGAGDALVRRLAVEGSWSYVQASHQPKLMPKGSGVPLEVRMHGRKGSERLLRRREEMLARGMPQAKANAATAAELVRWLWALGAMCREATE

SEQ ID NO: 376154 - protein, 400 aa, unidentified
MNPVVGLDVAKGESQVQAFLDQSKPYGKSFSMKHTKEELDQFLDFLKEVEEVAGQMPMVILESTGHYHSPVIQYLEEQGILYILLNPIISYQAKKSSLRKVKTDAIDAYQLCVLYYKEDFEPHKIRGIQLLDLRNLSRQQEIITNMYVEAKLQFHTILDQVFPEYRKVFGDLYSKVSLLMLKVYPTSEAVLTAGESRLAESVIEFCPSRSGQWAWEKAKKIMESASRNPFQKNVYESHVINLRMYIELLFHYQGHLSDLEDRIVSLANEMEEYKIIQSIPGIGEKIAATIISEIGEIDRFNHPKKLVAFAGVDPSVYSSGKFTATINRITKRGSSRLRHSLYLAVLCGIRSSRNKKLKAFYDKKKSEGKPAKVSLVACMNKLLQWIYALLSRKETFLDLA

SEQ ID NO: 376155 - protein, 403 aa, unidentified
MYKYFLGIDILKDSFDFCFTDETEKVLYKDHYQMNMSDFCKLSDYLASFSSNEILIVMEATGIYHLNLLSYLLKQGFNVSAVNPMFIHAFAKSLSIRKTKTDAKDAHVISIFAKRSHTTIRLSSSLDLESIKPIVREKEKLTNQISAIKTDIKSIVNQIFPEMLKNTNIFSKSSLNLLLQAPSKRIIRNLKERTIKRYLSDDITRGAKPKISESEILSLAKNSIGINNKSLEKILVSKIKQMFFMQSQLDEFNQLIESFVDEHHDNDIGLLTSIPGVGKPTAASFLTELGDINNFKTYKHLTAFIGTDPSVYQSGSSVNGRSSIAKRGNAHLRRAIWHMARASTVWNETLKAYYDKKHSEGKTFKQSVIAVANKLIRIIFSMLKNNTKFQDDFSNLATKGASI

SEQ ID NO: 376156 - protein, 348 aa, unidentified
MTMVGGFDVHRKQITFDYVDDDGLVRWGQIRPATRKTLRAWLGEHCPDGDAEFALEGCTGWRYVTEEVASAGVGVHLGDPAEIAVARGPKKRAKTDRADARLLRTLLLEGRFPESWIPPVHILEIRTLGRLYCTLMDERRAWQQRIHAQLFHQGCPPIRALLSEAGRDALARVDLSAAGRQYVDTALRRIDELSTEIGPLRTQLVNFARRQVGCQALQAHYGIGWLCAAIIWAEIGDARRFTSSDQLVRFAGLDVTVYSSDGKRSPGHLSRQGSPELRWAAFEAAKCAARRSSPDYAYYHQLAAKRDGHNGKNPTLAVERKILRRCYHTLRELGDAALALPIPEEVAA

SEQ ID NO: 376157 - protein, 375 aa, unidentified
MKALQRVLLTLQAKPTDGGAAGNMEQFIGCDAHKKFSVFVAVNEKGQAGEALRVMHDRQLYREFLARLPPQSAIAVEATGHYSWIVDEMESAGHRPKLANALEAKRRMALTKKTDKLDARGLAILLRNGTLPEVWIPPRELRDQRELLRLRIFLVHLRTRVKNRIHGTLARHNVQVPGADLFGVEARLQLGTRLPELPLHSREAIEQELATLDFLETQIESAELRLEMIMKVSAEADLLKTLPCVGKILSMVLMLEIGSVDRFPTAAHLASYAGLVPHVHSSGGHTRMGQVCGNVNRNLKWAFVETGNLVVINQRGLAGTHVVRLYHRIKRAKNHQKAVVAVARHLAEAAWWVLTKQEVYREPRNARQVLSSTHG

SEQ ID NO: 376158 - protein, 408 aa, unidentified
MNPLFVGIDVSSKNNVAYLMKPDGSKHSSFSVQNNLGGAKLLSEKIVSALHSMQLNDVVIGLEATSIYGDSLVYALREDGSLGRFQRKIHVLNPKQVRKFKEAYPDLPKNDWVDAFVIADHLRFGRIAKEVYMDDYRYQALRTLTRARFDIIQNLTREKQRFANYLFLKCSGIAQDKDIQNTSATTIALMEHFETVDDLANADLDELTAFISEAGRGRFVDPDATAKAVQAAARGSYRLPKTVNDTVNQAMSVSIASMRALKEQVKVLDKAIEQHLEIIPNTLTSIPGIGKVYSAGIIAEIGDIHRFDSQASVAKFAGLVWHRNQSGDFEAEHSQMIKSGNRYLRYYLLEAANSVRRCDSEFRRYYDLKLKEVNKYQHKRALALTARKLVRLVFRLLKDNRLYIPPEG

SEQ ID NO: 376159 - protein, 406 aa, unidentified
MNVVHERCCGLDVHKATVVACRLTPGRKEVRTFPTTTRGLLALADWLAEAGITDVAMESTGVYWKPVFNVLELTDLEIMVVNAQHIKAVPGRKTDVKYAEWIADLLKHGLLKASFIPDRGHRELRELVRYRKSLTQERNNLVNRIQKLLEGANVKLGDVVTDVMGKSGRAMLRAMVAGKTDSVELANLAKGSLRGKRAILEEALEGSVGAHQRYLLEHQLDLVDFLDRQIEELSVEIEERMRPFEPAIQQVMRLPGIGRRSAVQILAEIGVDMSRFPSHRHISSWAKVCPGNNESAGRSRSGWTGKGNPWLRAALVEAAWGAARSHKSYFAVQYNRLKIRRGTKRAAVAVAHRLLIVIYHLLRDGTIFQDLGAAFLDERQQQSVVRHSVKRLERLGYRVTLTPAAA

SEQ ID NO: 376160 - protein, 342 aa, unidentified
MDIEVLGIDLGKTVCSLAGLDAAGAVVFRKRLQRHRLLDFLDRLAPCVVTMEACGGAHHIGRFCLQKGHEPRLMSPLYVRPYVKVHKNDDRDAEAIAEAATRPTMSFVGIKSEEQLDLQALHRARERLVSDRTRLINQSRGFLMERGIRIGVGRHVFQKELTRLTAEGSDDLSRRMLMLLSDMASELDVINNRIAAIDAEIKALAKADADMQRLMEIPGVGPTIATALVAAVGTGSSFGKGRDLAAWLGLVPRQITTGGKAKLIGISKHGNRYLRKLFIHGARTVLHLVRDRASPITAWADGLKERAHVNVAAVAMANKMAHIAWAVLTKGERYRPNALSGL

SEQ ID NO: 376161 - protein, 343 aa, unidentified
MQIRSVGIDLGKTTFHLVALDNNGTVLIRRKFTQRQLITFTANLQTSLIGMEACGGAHFLGRMLRAQGHDVKLIPAQFVKPFVKSNKNDFLDAEAIAEAVDRQNMRFVPIKTDDQLDLQALHRVRDRLIARRTSVINQLRAFLLERGLVFAKSPAKLRERMPEILENAEEDITPRMRNLLALLWNEWTDLESQLEEMNDEVERIASSDAACMRLRQIPGIGPLVATAIVAAIGNGAAFHKGREFAAWLGIVPRQYSTGGKARLYGISKRGNNYLRKILIHGARAVVLRSKRERIAMGAWMTALEARAPRNVLIVATANKLARIAWAVLSTGQDYRAVQDPVPA

SEQ ID NO: 376162 - protein, 358 aa, unidentified
MKYYVMKYYTSTTKFNCGIDLHARQMYVCVMDREGKKLVHTNIRNNDFEFFLKLVAPYRQDLTVCAECMFGWYWLADACQAAGLHFVLAHALYLKAIHGGKNKNDRIDSEKLAHLLRSNLIPPAYVYPAEKRPLRALLRQRILYVWRRSELLSRIQSHQLAYNRPTSRRNLYNRDAWTEQLLASEPDPVRQLALQNDLALIRHYDAQLASLEKDLLKLTKQTASRDFTLLQTTPGIGDYLGLTLLHEIGDIGRFPTVKNFLSYCRLVKGTVASAGKIKGLRGAKLGNPYLRWAFGEAAVIAKRDGVLGPLAQRLEARLGNKFKANTVLAIKLARAVYFMLKKKTAFDPDRWVATLSKN

SEQ ID NO: 376163 - protein, 315 aa, unidentified
MREPAIVVVGIDVAKAHLDVAVRPQSEPRRCSNDAEGIAELVTWLRTLGPQVIVVEATGGYEAPLVAAVGLAGLPIAVVNPRQVRDFARATGQLAKTDQLDAQVLAHFAEALHPVPRPLPDAQAQELAALVERRRQIVAMRTAEQNRLGAARVAHVQARIQAHLTWLETELAAVDEELRRLLRASPLWRERDDLLRGVPGIGPVLSLTLLADLPELGRLSHGQIAALVGVAPRNRDSGTQRGRRAVWGGRAAVRTVLYMGTLRATRCNPVIHQFYERLLAAGKAKKVALVACMHKLLTILNAMVRHQTPWQAQAA

SEQ ID NO: 376164 - protein, 357 aa, unidentified
MTALAVAETPYQTTPAVLKLGVDIHQSGLVVAVQEDHAPPKPARRFAAEAFVRWVEQLRARGHRVFAVYEACGFGFGLQRTLSRLGATCYVVAPQRLDERNQRVKTDGRDATALCLRLSRYVDGNTKELAVVRVPSEAEEALRAIHRQRESLVRARTKMQAQGRALLLNHSQPAPARWWRAAGWKALQRLIPEWLLARLEVLRPVLAALDAQIARLTAELEAAAPPALPTGLGKLTSVVVTREVCDWTRFANRRQVSSYTGLCPGEYSSGGKRVTGSVTKHGNPRLRAALVELAWRLVRFQPGYPPIHKRLSLLAKGARATGAQRKKAIVAVARQLAVDLWRLHTGRATAEQLGLHG

SEQ ID NO: 376165 - protein, 359 aa, unidentified
MQRKEISFNGQSIYVGIDVHKATWSVTVLTEHSNLSKTFSQEASARKLFDFLKKNFPDGNYLAVYEAGFSGYSTYYELKSFGIDCIIVNPADVPTKDSERKTKTDAVDSAKLARCLKNGDLTPNYIPSKEYLDDKDVVRTRSMFQKQLSGYKSRVKHLLYRNGVEYPERFERLGTHWSKAFIKWLREDVSLLSDGRMSLDLLLDQVESLRRSVLVATKAMRTLGQTARHKENLEHLLTIPGIGEVTAMTLLTELCEVGRFSNERQFTKYIGFVPNVHSSGEREGVGEMTRRGNTRLRTMLIESAWKSIAKDVTLAAAFGRYRQRMTPNEAIVRIARTLSHIAFAVVKNNTVYDPGRHLE

SEQ ID NO: 376166 - protein, 445 aa, unidentified
MHYKRLLSLIDSVSSYLSVGLDVGADFTWMSIALPNGSFIGKPFKIIHSDPRSRDLAVTKIKEAQETYSLKSRCFLESTGIYHIPLLCFLRDKGFDCSVINPIITKNSTNINIRKLHNDKFDSKKAALVGLNVSLKTSILPDDSVVDLRNLVRDYYYFKDLQSAVALKLTAELKVSFPAYAKVFSKVTTQSSLKLLSSYPLPADMLAASKEDIVDIIRSTARFGEAYALRKYDAIISAAQDAAVFGRALPSNAVRIRLYIDTYQEYQKHLDALLKALHETVEKLQDTLIYDQICLLQSLYGIGFLSAVVLVAEMGDFKLFSSPKKLYAYFGLDPAVKQSGKLNGDKVHMSKRGSSLARRVLHMAALNNVKVAKGSGTPVNPVVYDYYTRKCSCKKKPVAMGAVMHKICNIIFAMLRDNKPFEIITPEEHCRRFAAEHPDKIRKAA

SEQ ID NO: 376167 - protein, 410 aa, unidentified
METLIKRCCGLDVHQATVVACLRIARPGKKVSREIRSFATTTAGLLELRDWLTAAGCTHVGMESTGVYWRPVHAILEDAFTVIVGNAQRIRNVPGRKTDVKDAEWLAELLALGLIPPSFVPDRGLRALRDLVRFRRSLVEARTDCRNRILGVLEGAGIKLASVATDVFGVSGTAMLQAIVAGHLTPAEIADLAKGRLRKKRAALELALHGSVTDDHRLMLDLLLGSLNDTEGRIAAIETHINVRLEPYRQDHLNLTTIPGVDWAGAASIVAELGTDMAVFGTAGRAAAWSGVAPGNNESGGRRRRAGARKGNVHLKTTLHTAAVAAGRTKHTYLADKYHRIRARGGPGIAGGAVAHKILIAAFHILARKVTYRELGADYLDRRAKQRVQRTIVRRLERLGYDVTLRPKAA

SEQ ID NO: 376168 - protein, 425 aa, unidentified
MKKTDYLSTLFVGIDIGSRTNVVSAIDFNQEFLIRMKPVPNAKEGAENLESLLVDVLSAHHEFNHVIIGLESTGFYGVHIANYLSASDLLAPFGTEVYCLNPKEVAKYKESFNALDKNDGIDSFVIADFARVGRISIKPWRGAQYLALQRLTRHRLHIAECIAREKTYVLNNIFLKFSEFAMLKKEDHPFSNKYGATAEAILEQYVTNDDIIEASIEELVELIESKSHGRITDPEETVKILKAAANGSYRLDRVVAEPITLSISSSFNCIRAFEKELKAIEKAIEHTVQGLNPVEYKILKSIPGIGHVYAAGILAEIGTIKAFTGNGALAKYCGIVWKENQSGNFRAEDTKMSKAGNRYLRYYVIEATGSIINNCPEYKDFYDKKFAETTTHQHKRALALTSRKFLRMLFGLLDKSQLYSLERSR

SEQ ID NO: 376169 - protein, 448 aa, unidentified
MSTYVGIDVGSEEHAVYGIEKEDDEPAYKTTVTNDSDGFEKLEDLLREHSSGSIHLGLEATGSYWKPVFNRLMELKDKLDITPSLINPNEIHQFKRMDLSRVKTDSADAKAIARYVLRFKPKSTPRTNERLRSLRRLCRYRSSRVEEKTRLIQQLDHVLVGVFPEYSDCFGKLSAVSSLAVLKKYPGPEEIAKQNVEELSSLRYGKINHRLGRQKAKKLIEVASNTVGEGYGSEIEITIRHLAEQITVVKREVEDLDERIEKSFREIAPNKLESVDGIGPVNAAVMTTEIWDINRFATATKLNGYVGAYPELSESGNYEDPHPDMTKKGNPRLKQAVFTSTMSAVNSNPVIKEHYEKQRKRGKDRMVAIGSCMRKLVHIIYGILTSGEEFDPNYEEKTKGDNENQKEEKRTRKPQTGSYPEDERSSELSPKSNNGKVAPNYQLAGGET

SEQ ID NO: 376170 - protein, 472 aa, unidentified
MPKIVDEKDVLLMSLTGLETQNIKEDVMTQSSGLSRGDKRRNERMARLRALVPASNAILGIDLADEKQALVVTDHDSRVLARRRVRAKAWKLGPVLMWARQVAQHHGFADVTIGCEPTGHRWRVLDQLAAQQDMRLVCVQPLLVGRAREAEDYTRDKSDDKDAVLIARLVAQLRCYEPERADETWARLRHLGARRERLIAEATACVQQLRDLLECAWPAALTAAAEPFDSTNWCAAMAVVLDRCNGHPERLARLGEKRFDAAVRRELSRWGGQRAWRRIIAAMYATLTDPAGVTAQRPGALERAHWVLADWRATKTRLAEAETRMVEVLDQLQLTDLLTSISGISAVGAAAILAETGDPTRFDSPRALVKHAGLCPRDNASGTMTGRSRISGRGRPRLRLAAWRAVWGALHTNPVMAARYQHLTTRTTNPLCDGQARAALAAALLRWMHVIVTRRVSWDAAVAGTGEDLQAA

SEQ ID NO: 376171 - protein, 324 aa, unidentified
MAKRITICAGIDTGKRKLDVAIDGSSLLLQVENTAEGHKVLLEWLRRHKVKRIGIEASGGYEIPVVTELRRKRFVVVVFQPAQVRAYAKFHLQLAKNDKIDAALIAACTAAVRKIHAAPDPRLQPFAEHLTLIEQIGEDIKLYKNRIETCRDPRIQKLWKEEISRLNKRERAELKALVAAIRQHPDLAQRLDLIYSVSGAGMSTAVVILVRMPEIGTLSREQVAALAGLAPYDDDSGERSGARHIEGGRKRLRRALYTAALPASFFWNPHLIALYQRLRAAGKVHKSALIACARKLLIFVNTVVARGTPWQNEQPVRATNPAAA

SEQ ID NO: 376172 - protein, 355 aa, unidentified
MTSTKYIGMDVHKESISIAVLNCVGKVVMECVIETKASTLLQFIHGLRGDVHLTFEEGTWAGWLYDLLKPHVTELVVCNPRKNALLKEGSKSDRIDARKLAELLYMSKLSSVYHGEHGLRMLKELSRSYLTITKDLGRVMNRLKALYRSWAIPCAGTQVYAPRYRSEWLSKITEAGVRRRAEFYYQQLDALRLVRQQARKELLAEARKHRATKLLRQIPGIGPLRAAHLVALMQTPHRFRTKRQLWNYSGLGLETHDSAQYRVVEGQLHRSKKPVTLRGLNDNHNHDLKDIFKGAAMRASTAAGPLRDFYEALLAKGRKPTMARLTLARKIAAITLMIWKKEVRFDANYLKQQAA

SEQ ID NO: 376173 - protein, 400 aa, unidentified
MRAVFGIDVSKTSSEVAILVNGEKVHGYTILNDAIGFNRLLGDLKTVHNPEIIFEATGVYSRRLQAFLEEYSYAYTRLNPLEAKKQLDSLRVRKTDKIDAEKLAKSQLVHNRKPTYVQEEVYQHLRDLSRFYQNMTEDLVRTKNRLHKVLQVTFPELENLLSTPTGEQYWNLVMAFPCKEFVLSLFQSNLCEIIRQSTSKRISEKRVTYLVDKLIKLANQSYCAVKKTSPMLEEVRYYAQELLRLSERRQVVLSDMVALAQPLPEYDILRSIPGIAETTATSIIGELGNIRRFQSTNQINAFIGIDLKHYESGNFLAKEHITKRGNPYARKILFKCIHNIASASHTNPCHIADFYEKRKRQSTIASTKPHTIASIHRLIRTMYYLITHNKLYDYSLTQNR

SEQ ID NO: 376174 - protein, 412 aa, unidentified
MQDILTCAMGLDVHRDIIVACLVKGAVDAEPEAETRTFSTLIPEMQKLRDWVIESECRNIAMESTGIYWQPIYEMLESCFDGEISILVVNARHMKNVPGRKTDMKDAQWIATLLRAGLLKGSFIPDKAFRELRHLTRYRKSVVHDITAQKNRIDKFLQSSGFRFTAFLSDTFGASGRNIIRHLIEHGSIDREALDKCLKTKTRNRIDEILVALNGSLSEHQRRFLNMVFRHLEDLEAHKHTVEDEITEEVLKHTDALNLLCSIPGIDVTAAAAIIAEIGTDMSSFPDSQHICSWAGLSPGNNESAGKRKSVHINKGNPYLKSMLCEVAWIMASHRKLYLSGWYWKVKQRKGAKRATIALARKILSIIYTMLKTGTPYNEECFEQRRLRCERKRANRLVNELQKLGYVAVAPD

SEQ ID NO: 376175 - protein, 356 aa, unidentified
MSREIKYIGMDVHKEAMVIAVLNGSGQLVMESIIETKASSIVQFIHGLRGELHVTWEEGTWAAWLYDLLKPQVHVVLVCNPRRNALLKEGSKSDKVDARMLAELLRTGMLRPVYHGEHGLRTLRELARSYQTISKDLNRVMNRLKALYRGWGIACSGTQVYAPRYREEWMNKIEHAGVRRRAELLYEQLDGLQGLRRTLRPELLAESRKHKAAKLLRQIPCIGPIRAARLLALMQTPHRFRSKRQLWTYSGLGIETRDSAEYRFVQGQLQRSKKPQQLRGLNQNHNHEMKEIFKGAATRASCGVGPLRDFYVALLDKGMKPEMARLTLARKIAAIALTLWKKEERFDAEQLKPQAA

SEQ ID NO: 376176 - protein, 370 aa, unidentified
MAQSTPLFVGLDVHKDSIAVAHAAGGSAEPPVFVGAIGPRQADLDQLLRRLQGKTHTLAFAYEAGPSGYGLHRYLTAKGLSCQVVAPSLIPKKPGDRVKTDRRDAVELARLLRSGDLTAVYVPSVEDEALRDLSRARDAARVTGKDAKLRLKAFLLRIGRHYVGRATWNDAHRRYLAKVVCPTSAQQIVFQESVRAVDEQVDRLRRLDAELLERAPAWRLFPVVEALQALRGVQFLVAITVVAELGDLTRFDSPRQLAAFVGLIPSEYSSGGSRRQGGITKAGNGRARRALIEAAWAYRHPAKVSLHIQQRIDHLPKPLQDLGWKAQVRLCKRFRRLVARGKHPNLAVTAVARELIAFMWAIAKEVPVPA

SEQ ID NO: 376177 - protein, 378 aa, unidentified
MNAFGTALQGKHTVEASELYMAFELGEKNWKLSLGDGARSPSRYTVAAGDTAAVLECIAKAKARCGLVSEARVASCYEAGRDGFWLHRWLIEHGIDNMVVDSASIEVNRRARRAKTDRLDADKLLAMLIRYGAGERRVWSVLRVPTPEQEDARRAHRELGRLGHERTAHVNRIRALLVLSNLRVKYVGGRLWQRWWTGHAQELAPCVRAEIERESERLLLVKKQMDMIEAVQRQAVAAGSEPQVARLARLRGIGMSSGWVLAKELFGWRRFRNRREVAGCLGLTPSPYDSGESEIEQGISKAGNRRVRTLMVELAWSWLRYQPQSELSQWFNRRFAGGGKRIRRVGIVALARRLAIALWRYLEDGLIPNGAQLKPIGG

SEQ ID NO: 376178 - protein, 376 aa, unidentified
MERGSLMLNTTTFVGLDVHARSIKAVALDAMTGEVRSATFAYDAAAVAEWVGSLDPAAKCVYESGVTGFDLQKKLTALGVDCVVGAVSKMIKPSADRKRKNDRNDAEFLARMLSVGNVVEVWVPDDECEAARDLVRALDDAREDLKRCKQRLSKFLMRHGYAFSETTPTGRRKGNWTAAHWAWIRSIEFPEKADDEVLAYYIDAVRQAMENKKRLEKLVEAEASKPRWKKRVDSLRCLKGVDAMTAADIVFEAGEFSRFKNARSFAAWLGLTPSEHSSGESARQGGITKAGNKHLRRVLVEAAWHYISASPHPKDLAKGQAPDPAARRHAAKGIRRLVKRREEMLGRGVHKNKANVATARELACWCWAVGRMIENG

SEQ ID NO: 376179 - protein, 341 aa, unidentified
MKEVTIIGVDLAKNVFQLHGATADGSVVFRKKLTRVQFHKFMSAHPTCLVAMEACGSAHYWAREMALMGHDPRLIAPRYVKPFVKRHKNDTADAEAIVEAALRPTMRFVDPKTPEQQAGAVLFRTRAQFVRQRTEAINALRAHLYEFGYIAPIGVQNVKQLVGIVEADSSELPALVRFTCRELIEQITRLTERLGALDKEITRLSGQGEVARRLRTMPGVGPITALAIETFAPVMESFRCGRAFAAWLGLVPLQRSTGGKQILGKTSKMGQRDIRRLLIVGAMAVVGWAGRRGAAEGSWLAKMLARKPRMLVAIALANKMARGLWAMLTKNEEYRGPVMVG

SEQ ID NO: 376180 - protein, 366 aa, unidentified
MGKSITPIGTPVGVDVHKRRCKVVEFQDGEIKVRKPMANTREEWLAMLTELPPDAEIGLEVSTAGYFAMSVLEEAGWRERAHWVHTAGIDTNRRQKNDRLDAERLARKLAAHHVDPLPEAWFPPPEIRALRLRARARCWLAHLRTQCKNHFQSLLEMHGLQPPGSDPFGGKGRKWLAEQKLPLPLTESVPQIQRLLKVLEEELKISEQYLQAEDERFPEIALLRTIPGIGPILAPVIWGELGTMERFDSAKALSNDTGLVSSFFDSGDTKVQGGITRQGSPWLRWAFVQAANVAIQFRNPFARRYHRLRRGKKPNVAKAAIAHSLARCVYGVLKHGCPYREDRWGRRVGVLEQEARAGARSTKTVV

SEQ ID NO: 376181 - protein, 379 aa, unidentified
MKNVRFVGLDVHAQTIAVAVAETGAEVRSLGVIPNSAESVSRLIKKLGKPEQLRVCYEAGPTGYVLYWQLTKLGVRCEVVAPTLIPVKPGDRVKTDRRDAEKLARCYRAGDLTAVWVPDAAHEALRDLVRAREAAKSDQLRARNRLGKFLLRQGRRAAEGTKAWTGKYLQWIKEQVHFEQPAQEATLLDYLHEVEHAGERIQRLEKSIDSAIETVPQKMRAVIQGLQSLRGIAQVSAVSIVAELGEISRFAKPSQLMGYSGAVSREHTSGERVQRGSISKAGNAHLRRIVVEAAWSYRHRPSIGAGLAARQKDSSEEVKQIAWKAQHRLHGRYSKLLAKGKSKQKVVTAVGRELLGFIWAIGVHVEQAVSARAPKRRAA

SEQ ID NO: 376182 - protein, 344 aa, unidentified
MKIIGCDFHPSYQQIAMLDLVTGEMVEKALSHERKEEVRAFYAGLEGSVRVGIEASGQSQWFERMLVELGHEVWIGDAAKIRASCERKQKTDRRDAELLLRLLAEDRFPRIWVPTAAERDGRQLLLHRHKLVRMRTQVKNQLQALALNQGVQRKWKLWSQAGRKQLESLPLLPWASRRRAELLQLLDQLDASIAGLDGAVAEQAQARLEARRLMTHPGVGPVTALAFTLTMGPAERFCRGKQVASYLGLIPREHSSGGRQQRLGHISKQGNPFLRGLLVEAAQSAVRHEPEMRRAYQRLAQRKCRGLAKVAMARKLAVRLYWMLRLQVDYAQLIQGSHAGQLGT

SEQ ID NO: 376183 - protein, 345 aa, unidentified
METMYYIGLDVHKKTISYCVKDGSGRIHTEGTIPATRLDLDIWMKTLPQPWTAAMEATIFTSWIYDHLLPHAAAVKVAHPLMLRAIAAAKKKNDRIDANKIADCLRCDFLPECYMASTEIRERRRTLRYRNLLVRQAVQMKNKIAVLLMEAGVSYNKQKLHKVGYFRELLATNQDIDEGLKPLLRLCRETVVRLGKTESALVRSLERDSLLVERVERLMTIPAVGPITALTWALEIGDVQRFSSIKKAISYCGLCGAEKSSANITMRTPLSKQRNKHLQTVLIEAAKMAPRNSPELAMVYEQEKQKGSANRATLAVARKMVAYLVAVDRRQKGFLVVENKNRTAA

SEQ ID NO: 376184 - protein, 397 aa, unidentified
MYIVGIDIAKRKHEAAVIDGEGTVIIKPFSFTNNCSGYNRLLAMLAKAKLPLDEVSFAMEATGHYWLALFTRLQKEGFRVQVINPVQTNSIRSFYIRQAKTDPRDALLIAEVIRFGHFSESTLHPENIYELRELCRGRHAIVSMQADVKRKVVALLDQVFPEYETAFTNLFGDTSMAILQTCPTPKELSEMPLEELCHLIEVSSHKRFRMAKAQELQELARNSFGFVMAGGVFSTMIRLYAKHLDFLKQQVREMDRKIAEIMDTLDTPITTITGIGPTLGAYILSEIGDISRFSSAAKLAAYAGIDPTMRQSGEYNGVRNRMSKRGSPYLRHAIWLAASSAVLHDPALKLYFQKKRDEGKPYMASVGHACRKMVSIIYAVMRDNKAYMPYIPNEISA

SEQ ID NO: 376185 - protein, 368 aa, unidentified
MDVHAETIAVAVAEQGEEVRFLGGLPNREESVRKLVKKLGPMEQLRFCYEAGPTGYALYWQLTALGAKCEVIAPTLVPVKAGERVKTDRRDALKLARSYRAGDLTPVWVPDAAHEALRDLVRAREAAKKDQLRARHRLSKFLLRHGRRPPMGVQLWTLKYMEWVKREVRFEQPAQEATLLDYVHEVDHAAARIVRLDLAIEETVKSVPPNMRTVIEALQALRGIAQVSAMTIVSELGEISRFPGARQLMGYGGIVASEHSSGENTRRRGITKTGNAHLRRVVIEAAWSYRHRPGIGKALRKRQEIVSEEVREIAWKAQHRLHARYRKLTARGKNKGQVVTAIGRELLGFIWAIGSKVEAEKKALRPAA

SEQ ID NO: 376186 - protein, 344 aa, unidentified
MEHFAGLDVSVKETSVCIVDETGKVVREVRVASEPETLLAVLASPAYRLKRIGLEAGPLSQWLFSAIAETGLPVICVETRHMRAALKAQINKTDRNDARGIAQMMRAGLYRPVHVKTLRSQKLRMLLTHRKLLQSKAIAIENDLRATLRNFGLKVGVVGTAKFEARIKELVENLPDLVVLVEPLLIVRRTLREQIAVLHRRLLAMVRDDEVCRRLMTVPGVGPVVALTYRATVDVPARFRSSKAVGAVFGLTPSKYQSGEIDRTGGISRCGDEMIRAMLYEAAHIMLVRSTKWSWLKAWAMQIARRRGLKKAIVALARRLAVIMHRIWVDGTEFRWTREQAAAA

SEQ ID NO: 376187 - protein, 361 aa, unidentified
MLYSGVDLHRRLIVICTVNESGSIVARKSMKTQPDLVTAYFRQWPDQHRAVVECTTGWYWFSDLLRSLGVDVVLAHAKYLKAISYAKVKTDAVDALTLAQLLRMGYIPEAHQLPPEYRAMRDLLRQRMVMEHKRTNIIQRVTSILAQFNITDLPFSPYQSGFADFLNQCSIPDEYRMTLMMYHLECVQTTEHRKQLEKYFKAQLRPTPAVQLLMSLPGIGDITGSIIAMETGDIHRFADDKHYCSYCRLVPGAKDSGGKHSHRSGSKDGNQYLKYAFTESAVKAMQFYPEIKHFASRLERRSSKAIARTVVAKELAKISYYVLSRQEEFKTFKGIEINKLRNWPRSRKPVRITGGITPPSV

SEQ ID NO: 376188 - protein, 387 aa, unidentified
MPQPNDLSRSLVALDQNSTIIAVVELSQSSWLVGGVVPGIERQPCKKLEPSPERLLAVLHRWRDEAVRAGRTITRIALAFEAGRDGFWLARWLEARGVEAHVIHPSSVAVSREHRRAKTDRLDTELLKRGFLGWLRGERGHCSMARVPTIAEEDAKRPNRERECLVGERTRIVNRMKSTLVRLGIRSFKPTLRKAADRLATLHTPEGMALPPNAVAELQRDMARLGFVVSQIREIEEARQKRLERQPETGPHAMVRLLARIVGVGVETADMLVHEVLSRPMRDRRAVARYAGLTGAPDESGAQRREQGLARAGNARVRRGMIQLAWRFLMFQKESALALWYRARTADSRIGTRKTMIVALARKLVIALWRFVTTGELLEGVVLRPAS

SEQ ID NO: 376189 - protein, 370 aa, unidentified
MTSIIYVGMDVHKLSHTLSYFNPETGEISEPHQIRADYKNILQYLETIRKGLGKNSKFLCGYEAGSLGYSLYHQLTDCGVKCVIMAPTTMPKYKKNILKNDKRDAKNIAMALAHNTYSKVFVPTEEDDAVKEYIRMRCDERQAFKRIKQQIIAFYTRHGKQFIEGRSHWTGKHVLWLQQLDFENDILNETLKEYLVLYYQAADKIILYDQRIEEIANTESYKEAVKSLSCFLGIRTHTALSLIVEVGDFKRFKSAKCFAAYLGLIPGEHSSGNTIKRTGITKSGNSHLRRLLTESAHCYHRGSTTKKSKALLLRQFGNSPEVIAYADRANERLRRKFYRMIYRCKRNVIVTAIARELACFIWGMMVGDLN

SEQ ID NO: 376190 - protein, 346 aa, unidentified
MKVTTSGIDVAKSVFQVHGVDEGGKVVLRRQIRRAQLLLFFSRLAPCLIGMEACASSHYWARKLSALGHTVRLMAPQFVKPYRKNDKNDGNDAEAICEAVQRPSMRFVPVKSPAQQAELAVHRIRRRLVGQRTALINQLRGLIAEYGVVLPQGANHVRSKLPALLEDCSESLPTLAVELFRDLYEEPVQLEQRIGTYERRVERLYRGNPVCQRLGQLDGIGALTATAFVATVAHATQFKNGRQCAAWLGLVPKQDSTGGKPRLLGISKRGDVYLRTLLVHGARSAMRHTPKRNDPKSRWVEQLRKRRGENIAAVALAAKHARILWALMVQGQSSPQPATQSIEQPV

SEQ ID NO: 376191 - protein, 328 aa, unidentified
MTNLDQHGKVHLGIDVSKRTLDACILPEDASQEGESFVVTNDQEGVEEILSRLAKLGTSVELAVMEATGRYERLAATMLAANGISVAIVNPRQARDFAKAIGKLAKTDKIDSFVLARFARAVEPRISVIPNEEAQRLQGILARRRQLIDMLVSENNRTRMAPKALAKRIRAHIEWLEKEIERIDADLDRAIEDNAAFKANEALLRSVPGVGRVLSRTLLAELPELGTITHKRLCALVGVAPFNRDSGQRRGKREAWGGRAPVRAVLYMSALLVATRHNPHIKEFYERLVAAGKPKKVALVACMRKLLSILNALMRDRATWRCPHALTP

SEQ ID NO: 376192 - protein, 370 aa, unidentified
MAKRSMFVGMDVHKESIDVSLAEEGRDGEVRHYGMITGDVDALAKVVRALRAPSRRLRFVYEAGPCGFGIHRYLTAEGEDCVVVNPSSMPKRSGDRIKTDRRDGNALARLHRAGELTAIYIPTPDDEALRDLVRAREDAVGLSTQAKHRLKAFLLRQGRRYPGRAGWTRPYRRWLADLSFPLAPQHIALQEYRDTIDETERRVERLTDQLRQLTPAWRWAPVVEALQALRGVSFVTAVGLVTEVGDIRRFTHPRQLMAYLGLVPSEYSSGPSVRRGGITKAGNPHARRLLAEAAWAYQGVPRIGRQMLYRQEALPKPVCDIAWKAQLRLTSRFRKLVARGKAKPKVATAIARELTGFIWAIAREVPPPPA

SEQ ID NO: 376193 - protein, 468 aa, unidentified
MHTIPDNATRIKCFREVKATLRTSRERLVVGIDIAKAAHVAQVRLAHTRILEAKLPVLNTAVAFAAFWTRLQTHAAAAGVREIVCAVEPTGTYHEALARFLEAQGAHVVLVSNHVAQLNRRTLDGTWGKSDPKDAHNLCDLLEQGKALFYSLPGEPLADLRRLVRLLRRARVELTACKARFTVTLLPQFGPVGDGLAPAVAAAVPAPLRAFLPRPVRAGAGAAAPGAAVSSGLAFELTDLAARVTAVAARIAAVETELLRVAAPLPAFALLQTIPGIGPTVGAILLAEIGDIRWYTKFSQLRKLAGLDIVSIQTGQWRGRGRISKAGRALLRWALYQAALGACHNPAWRARREALLAKRQGDRHAFFKATVELGAKLLRLVWGVWRSGQPYDPARGPAAPLAPAHRKTRVGRRSALVAPPTRSPRGRRPAAAAPGPVSPPAPAPRQPRGRRRAGRVAAPTRSPQGRRP

SEQ ID NO: 376194 - protein, 343 aa, unidentified
METIKTIGLDIAKSVFQVHGVDAAGQVVVRRKLKRRYVLAFFEKLPPCLVGIEACASSHHWSRELQTLGHTVRLMPPAYVKPYVKRQKNDAADAEAICEAVTRANMRFVATKTPEQQSGLVLHRTRHLFIRQQTAVINAIRTHLAEFGIVAPVGRNGVEQLLNVVANPNDKRVPEIARACLLALGAQLQRLKGQILEFDRMIRAWHRSSETSRRLDDCPGVGPALATALVATVADPKSFRSGRNFSAWIGLVPKQHSSGGKNRLGSISKQGDRYLRGLFVAGALAVIRYAKIHGSGHRPWIAALLARRPTKVAAIALANKIARMAWAMMAKGERYREPVALAA

SEQ ID NO: 376195 - protein, 352 aa, unidentified
MDAPCTGVECAKMEELLTPQQGTPMSEITVIGLDLAKHVFQVHGADLDGRPVLRKRLRRGQVLEFFATLSPCLIGMEACAGSHYWGRELQALGHEVRLIPPQYVKPYVKTNKNDATDAEAISEALTRPTMRFTAVKSAEQQSVLMLHRTRELLVRQRTMLVNALRGHCGEFGIVAAQGLSRAGDLIKRIEDPADTVLPDLARQALQCLTSQIRAIQEQIALIEKKLLAWHSSCEASRRLAEIPGVGLITATAVVASVGNATQFRSARQFAAWLGLVPQQHSSGGKERLGHISKRGDGYIRRLLVHGARAISAGRDARSRSARPGSPACSPAGRPTSRCSRWPTRPRASPGPC

SEQ ID NO: 376196 - protein, 340 aa, unidentified
MEHYVGLDVSLEETAICVLDRTGKVIWRGRCSSDPDAIARTVRDRAPFAVRIGLETGQLSTWLVHSLRRLDLPVVCLDARHAKAALSLQVNKTDDNDAHGLAQIVRTGWYREVAVKSMDSQAVRVLLMARAQLISQRQATANQIRGLLKTFGLRVGQAGGSRFAVRVRELVADHPVLVAIIEPLLTVWQTVREQVVELDRQVRMRVREDAAARRLMTAPGVGAVVALAYTAVIDDPARFAKSASVAAYLGLTPRRYQSGEVDCAGHISKCGDGLLRSYLFEAANVVLSRITRPSGLKTWGQALAQRIGARKAKVAVARKLAVVLHRMWRDNTEFRWEPAR

SEQ ID NO: 376197 - protein, 341 aa, unidentified
MKLYGGIDLHSNNCVFNLVDENANVVLKKRINNDIEAIILLLEPYHDAFEGLVVESTYNWYWLVDGLMDAGFKVHLANTAAIQQYSGLKHGDDDSDANWLANMLRLGILPEGYIYPKEERMIRDLLRKRFQLVQQKTLNLLSMQGLYARHLNKKLNSDQIKQLTENQLKIDFSDLNVRLAVSANLVMLLCLTKQIKQIERVLKQQLKLKEKFVKLTSIDGIGLILALTIMLETGDISRFNKVGQYASYCRCVNGGRYSNGKKKSKTNTKNGNKYLAWAFIEAAHFAIRFNDTVKRYYQRKLAKKSIVIARKTVAHKLARACYYVMRDQVEFDVNKAFGYSK

SEQ ID NO: 376198 - protein, 320 aa, unidentified
MNKKQKYVGVDISKDSLDIAVFDSNQRWRLNNNPGGIKRAIGMFQAMKAELVVFEATGGLEIPFWAALFQAGIKTAPINPRQIRDFAKAKGRLAKTDIIDAQVIAHYGQAIQPRPLSFPDTQELKEVMARRSQLVGMISAEKNRLRATRQESIKQGIKAHIEWLETGLDSVDKELRKAIEASPIWREKDQLLRSTPGVGPILSAVLLTQLPELGTLNRHQVAALAGVAPLNRDSGSMRGKRSVWGGRGRVRGALYMAALVATRCNPVIRAFYQRLCSQGKPKKLALTACMRKLLAILNSMVKHHTPWIYRSAPTLIGPCQ

SEQ ID NO: 376199 - protein, 413 aa, unidentified
MSVTDACEPARPTAGVDWASADHAVAIVDPDGEQTARFAVVHDAAGLRTLVGKLLAAGVDRVGIERPDGPVVDALRQAGLTVYVIPPGQLKNLRSRYGSAGNKDDRFDAYVLADVVRTDHRRLRPLLVDTEPTTALRQSVRARRDLVAHRVAVANQLRAHLQICLPGAVGLFADIDSTISLRFLERFPTQDRADWLSAKRWAAWLSATGYSGRATPETFHTRLSDAARGHSGPAADTAATVTGAFVAVLRTITTQIEALAARIAEQLDLHPDAPIFTSLPRSGTVRAARLLAEIGDARGRFPTADSLACLGGVAPSTRQSGKVCVVSFRWGADKQLRDALCDFAGDSRHANPWAADLHRRARARGHDHPHTVRILARAWVDIIWTCWTTNTPYDPDRHGALQRLLNEDQPAAA

SEQ ID NO: 376200 - protein, 341 aa, unidentified
MSIVTIGLDLAKHVFQVHGVDADGKVVLRRQIRRDGLDEFFKSQPSCLVGMEACASAHHWARRIVAFGHEVRLIPPNRVKPYVQRGKKNDANDAAAIAEAVTRPQMAFVPIKTEDQQSMLMLHRTRELLVRQRTMLVNALRAHLAEFGIIAAQGRSKVQELIKGLAEAPIPPLARAALAETCGQIENCVQRIEGLEKQIIAWHRTNEPSRNLATIPGIGPITATVLAATVPDPSIFKNGRHLAAWLGLVPRQNSSGGKDRLGHITKAGDSYIRRLLVIGATSVIRYARDKAPGEATWLKGLLERKPPKIAAVALANKMARIAWAVLTREEVYRKTCPATAA

SEQ ID NO: 376201 - protein, 426 aa, unidentified
MKKADLLSTLFVGIDVSSRENVVCAIDYEAQKLLRFSVPNNHPGAIEMAEKLHAFLYGNRDINKLMLALESTSFYGIHIANYLSSCELLMPFHTHVYCLNPKMIANYKKSYIDLGKNDAVDAFVIADFARVGRITTAPWRGSQFLALQRLTRHRLHIAASLTREKTYMLSNIFLKFSQLSMLHEDQQPFSDHYGATASSVLTDFLSTEDIANMPLQALIDHIGQKGKNRFVNPGHTASLLQQAARNSYRLDKCLYEPLTLSIASSFNLISAYESEIKAINKAIEKTLKGLDPNAYHSLLSIPGIGPVYAAGIIAEIGSIDAFNSHSAFAKYAGLVWRENQSGNFRADDTVLSKAGNSYLRYYLIEAASHVKNHIPEYAAFYHKKYDEVKTHQHKRALALTARKFIRLIFGLLVNHQLYSKSRVSQI

SEQ ID NO: 376202 - protein, 286 aa, unidentified
MPSQVFVGIDVAKAQLDIALRPTGERWALTNDDAGIAVLVPRLQAIAPQLIVLEATGSYQRAVVAALAAAGLPVAVVNPRQARDFAKATGQLAKTDALDARAIAHFAEAVRPMPRPLPDTQADELRALLARRRQLVTMRTAEQNRLGSAPPRLLPDIQAHITWLNTRLTTLDDDLDTTLRASPVWQEREELLRSVPGIGPVCARTLLLDLPELGTLNRRRLAALVGVAPLNRDSGTLRGSRTTWGGRAHVRATLYMSTLVAVRYNPVFKAFYERLRAAGSPRAFGT

SEQ ID NO: 376203 - protein, 338 aa, unidentified
MRQGGAWVVAVEKRGPMSLPCCVGIDVSKEFLDVAWTTDRSAIWRTTNDDAGWPALVAKIGPVLPTVVVLEATGGYEIGAATALAVAGLAVAIVNPRQVRDFARARGILAKTDTLDAHVLADFGARMQPTPRPLADDLQSDLIALVTRRRQLVDMLIAERNRVPLARPAVQASLRRHIRWLEARVRDTERDTAARIQKSPVWRGRDRLLQSTPGIGPQTSSRLIASLPELGRLTGREIAKLVGVAPLNDDSGTREGRRRTWGGRTAVRHALYMATVVAVRHNPVIRSFYQRLRTSGKPAKVALIAAMHKLLTILNAMVKHQTIWTLTPSRSSTCSVTR

SEQ ID NO: 376204 - protein, 426 aa, unidentified
MGETEYSSIERFRQIKEQIRGSKEYLIVGIDVAKEKHHAFFGTATGKTLLRRLVFENSRAGFDKLLFQAEALKAQHLFKTVVFGLEPTANYHKPLGEHLIKNEHMVVLVSGNAVKRNRELLDGRWDKHDLKDAANVADLISQGKCLFYDHPGEGLRELRSLISLKRRLKKHEHGFKVRIRNHLIAQYFPELDRFVGYGEGLAIVRWCLAPRAIRQMGCQEFVRMVGSRNGGHRQRRRLQLIWDKAGESIGCATGEALAFEAQLMVEQLKQTQEAIRVTDEKIKERCIKFPEYTHLLSIPGFGPDVSAKVLAAIGNPSRFESAKQVLKLAGLDLSAQRSGKGSDGAIPVLSKKGKAHLRYALYQAALIASTRNRTFITYFTNKLKGREREKGIKTKMRVKLSAKLLVIAWTIMKKKEPFNPEFLTID

SEQ ID NO: 376205 - protein, 347 aa, unidentified
MDHFAGLDVSVKETSICIVDDAGKIVREVKVASEPEALLAVLKNPAYHFKRIGLEAGPLSQWLFSALAEAGLPVICVETRHMQAVLKAQINKTDRNDARGIAQMMRAGLYRPVHVKTIRSQKLRMLLTHRKLLQSKAIAIENDLRGTLRNFGLKVGVVGKVKFEARIRELVENLPDLAVLVEPMLIVRRVVREQIVILHRRLLAIVRDDEVCRRLMTTPGVGPVVALTYRATVDVPARFRKSKAVGAVFGLTCAKYQSGEVDRNGRISRCGDEMMRVMLYEAAQSMLRSKKWSWLKAWAMQIARRRGMKKAIVALARRLAVIMHRIWVDGTEFRWTREQATAAAAAA

SEQ ID NO: 376206 - protein, 347 aa, unidentified
MKRIAVDLAKSVYQVAESFRSGQVVQRKRLNREAFRRYIQEQAEPVEWVMEACGTAHYWGRVAQALGHQVRLLHPRYVRPYRRRNKTDRNDCDAMLEAARCTDIHPVPVKNHGQQQLQQLHGLRETWKKSRTQRINLLRGLLREAGIEAPASTAAFIRAASELVDQPELAPLSRLLHIVLAEINLYEQCMAECEQQLKRWHADDDIVRKLDEVSGIGLLTASALTAAVGRPERFASGRQLSAWLGMTPREFSSGERRKLGHISRQGNVYVRTLLIHGSRAALLAAQRCQARTPEKLTQLQRWAVATAARIGHNKAAVALANKLVRICWAVWCHERRFNGNWQSTKPA

SEQ ID NO: 376207 - protein, 385 aa, unidentified
MQKRHDDSKACLTAFIQDNTVIVIIEMSLRSWLVAGMIPGINREPLKKIAADPEVLLRLLYRWRDEAIKAGKEITRIAVAYETGRDGFWLARWLRDRGIDAHVIHATSVAISREHRRAKTDRIDTAMLRRGFLGWLRGERGHCSMAVVPTIAEEDAKRPHRERESLVKERTRTINQMKAILTQFGVRNFKTASRKAAEKIDDVRTPEGVPLPPNAGAALRRQIEHFRLINGQIKTIEKTRLQRLRQQPTDKFNAMVFLLVRIIGLGVETAEQLVHEILSRRLRDRKAVARYSGLTGSPDESGARRREKGLSRSGNGRVRKILIQLSWRMLQFQPDSRLVRWFKDRTANSQRSRKPMIVAFARKLIIALWRYVNTGVTPEGFKLAK

SEQ ID NO: 376208 - protein, 494 aa, unidentified
MKAIAGKAKAKHSNSSKRNAKMAARGEPKGMEIVNPHAGGIDCGAEEHYVAVPPQSVEPGQPAVRCFSAFTEGLDASVEWLKACGVTTVAIESTGVYWIALCQKLEAAGIEVFLVNARHVRHVPGRKTDVKDCQWLQRLHSFGLLSASFRPEDGICRLRSLQRHRLNLIWTAGAEIQHMQKALQQMNLHLHHVVSDITGLSGLRIIDAILAGQRDAVQLAKLRDYRVCKSTVAQMEAALVGDYRPEHLFVLGQSLQAYRFYQARIQECDVQIESHLQQLAQRYESSSALAAKLPEPEVLNDAQAQNPQPAKPKVKRKPQANEPKIDLADYLRRICGVDLTQVIGLNVLSVLLIVSEIGVDMSKWRSAKAFSAWLGLCPRNKISGRKVLDTRTCKVISRVATTLRLAAQSLGRTNTALGLFYRRKRAHLGPAKATTATARKLACLVYHLLKYKEQYREPDPTTYQLKVEKAILARIQKQAAVLGYKLLPTALVPA

SEQ ID NO: 376209 - protein, 347 aa, unidentified
MLHAGLDLSRRRVDVHVLNEAGKTLVVDAFPPDADGLAHLVRHVASFGEEVHAVIESMNGARFVHDTLELHGWGVEIADALRVKGLAPLACKTDKIDAKVLAELSRRDLVPAIWLPTPSVRAERERARFRLHLVHHRVALKNRIHATLLAFGHPCPVSDLFGESGRALLDRLAIPEPWAGTVSASLRLIDELDDQIDAAERELRRLGANHPYMSLLQTVPGVGWVLAYTIASEVGDIARFESPKKLVGYTGLCPRVYQSGGTDRRGRIAKNGPTYLRWALIEASIHACKSPLYKPAYDRTKARLGRDRGGKVARVELGRKLAEAMWHMLTKGERFAPARSQVVALVA

SEQ ID NO: 376210 - protein, 448 aa, unidentified
MAKKQYPLPEERDTFEPLKGVKSVLNALKNRVRASTDILIAAVDIGKFRNCACFMISNGKVLAGKYYFPNTAKGFEWFLNKVGFYKNRDHCKDIIFGMEPSGQYWKHLYQFLILQGELTVTVSPLAVNRNRETMNVSKDKSDPKDARNIADLIMQGKFYFPVQRDKTVSQLHRFMQLYFRSMNAKSALRNRLRNAVGYVFPELEKYFSNIEAKTMLIILGKYPLPSMITRIPKDQFVKNVARLNPHFSHKRLKEIYDMAKNSVGIVGEDEAVLFEISTLLQDLGVLYSRIAQINEKVHKIVKDRKDYRLLLTLPGVGPITAASIIAEIGDVQHFTSGRQLIKLAGLDLWSEESGTSIHTLKHITKRGRKLLRTIMYQAAVRAIRRGSPLRSFYLRIIANQPEKKKKKKKALIAVACKLLRIIFRMLTEEIAYDGDYDSKLQARYKKAA

SEQ ID NO: 376211 - protein, 310 aa, unidentified
MEDIIVGIDVAKDRLDVAVRPGGEAFVVERNAAGLETLVARLRELCPYLVALEATGGYETIVAAALAGATLPVVVVNPVQVRAFAKALGQRAKTDPIDAAVIAHFAEATRPEPRPLPDEATQLLADLVARRRQIVEMIGAERQREKRVTIAHLRKSIARLIKTLEKELASLDTDIGDAVRGSPAWREKEDLLASVPGIGPTIARTLIAELPELGRLGRKQIAALAGLAPFTRQSGQWQGRSFIGGGRTTVRAALFMGAMVAKRHNPVLKAFFDRLVAAGKPKMVALIAVARKLLTVLNAILRDNRPWQNA

SEQ ID NO: 376212 - protein, 342 aa, unidentified
MKSATTIGIDLAKNSFSLYGVDDKGKTVLSRTLTRAGVVRFFANLPSCLVGMEACASSDYWARTIESLGHEVRRIHPQYVKAYLLGAKNDTNDAAAICEAVQRPNMRFVPHKSPEQIDIQCIHRNRQGYIKSRTALVNQARGLLAEYGIIIRQGISAIRNQLPLIIADEENALSGLMRRNIASLYESICFFDSQILEQDKLLKTVAKENEACQQLMQVPGIGIMTATILLTVAGVASNFKNGREFAAFVGLVPRQNSTGGKTRLLSISKRGDCYIRTLFIHGARSAITRILAGQTPKYRPNPWVIELIARRGRNKACVAMANKTARIAWSMLAQGTEYRHAA

SEQ ID NO: 376213 - protein, 337 aa, unidentified
MSIITVGIDLAKNVFALHGVNEAGKPELLRPKVPRAKLLEVVATLPPCLIGMEACSGAHHWAREFAQHGHRVKLMAPKFVAPYRRSGKRGKNDAADAAAICEAVRRPNMLFVPIKSQEQQSRLMVHRARQGFVVTRTATLNRIRGLLSELGLVMSLKASTVRREATLMLEALPGYANTVIGDLLSEVTHLDQRIAQYDAHIRAMAKDTSARQLMHLRGVGETTATALVAMIGRGHDFTGGRQLAAWLGLVPSQYSSGGKMRLGRITKAGDPYLRSLLIMGARAVVNAAKAKTDALSQWVTRLVERRGYWKAVVAVAAKNARMAWAVLSKGEAFKMPA

SEQ ID NO: 376214 - protein, 351 aa, unidentified
MMLLGVDYHPSFQTIAFFVEETGECGEREVNHSAGEAEKFYRDLKERGISVRVGMEATGYSRWFERLLVELGFEVWIGDPAVIKTKRVRKQKTDREDARLLLKLMLEDRFPRIWVPSPENRDVRQLLWHRHRLVQMRTRIMNQLQALAMNENQCRKSKLWSERGRAEFEKLPLSFWASRRRQELLELLDWMNPKIEELTAAVEQEAKKRPDALRLMTHPGVGPITALAYVLIIGTPARFPRGKQIGTYVGMIPSEDSSGGKQRLGHISKQGNSLLRFLLVEAAQAAARIHPDWRRRYVHLAMRRHKNIAKVAMGRRMAVELYWMWRNGCEYSQLSKCGSYAGQLGTGHGGK

SEQ ID NO: 376215 - protein, 451 aa, unidentified
MANRGKTACGTTILGRSEMFGKEIDKGIWWTVGVDCGEERHRFVLVDDRGERQRACWVRNRRDKIEEAVAQMVLALPTGVRLRLVTEGVRSLGWVVAQVSGSLDLEVWQVNPKALNHYRDLEGQPRKDDDIDAYLAARMVVFGMEGCRVAVDPRPEERALCRLTRLRRQLSDRRAVVKNRLRSLLVELAPEVVSKDWKGPVHDGKGMRAVLKRWPTFEGLEKARASTIEKMLKSSTRYGARCGAMSVLLKEMAGRVAMAPMEREIVKMDISMAIAELDVLDDSIAKLEKEIKHRVMEHPVGKKLLDMPGEGPVTAGTDIGEVLPVARNASEGKAATYAGLTPLSRLSGKGSKPSKLARGVNKHALRTNYLSAIAAVSASAIDAAYHQAQKERHQGHPKPHVKATLSLARQRFKVKYKLMTTDAVYDKEKLISSHLERRRRVRASQSQQHVA

SEQ ID NO: 376216 - protein, 365 aa, unidentified
MASVSHLAQIHLGLDVHKDTISVGILDPDHQVPDVERITHDEPSIRRLVARFAEPRSLRACYEAGPTGFELARLLHSLHVRCEVIAPSLIPRAPGDKVKTDKRDCRRLARLHRAGELVAIRIPTPAEEAVRDLCRTRADMVADLTRARNRLGKFLLRHGRPWRGGSTRTKVYQAWLRAQRFDQPAMTQTFGHYLAVVEVRNQALDAVEADLVGWCARPPFAWQVARLAAYRGITRLGALTLAAEVGDWRRFASANAFMGFCGLVPSEYSSGNRVHRGRLTKAGNAHLRAQLVESAWSYQHRPSVGAEIARRQQGLDPAVTARAWAAQQRLSGRFRRLAARKHTKSIVAAAIARELAGFLWAEMTA

SEQ ID NO: 376217 - protein, 407 aa, unidentified
MAITSSKELREGPSVKVTRIGLDIAKQIFELHGVDRHGRVAIRKTLRRERVLEYFSQLPACEVALEACGGAHYWHREISKLGHTVRLLPAHKVKPYLDGNKNNAHDAAAICEASSRPSMRWVEPKTVAQQDLQSLHRVRQVTVRQCTLLANHIRGLLLEYGIAVARGTAALQRALAQLLEPDEQRLSPLLKQLIAGQWRMLKLHEQQVKVHDRRIANIARHDASCQALLKVEGIGPLTATALVATAGNGRQFKNGRHLSAYLGLVPGHSNTGNKTVMLPITKRGNRYLRTLLVHGARSTLYHARRKTDPRSLWLQRLQAKRGHNVAAVALANKNARIAWALLRFGQAYRPNLAHAPVAEHGATPAASAPGRRAGLTLKLHRVSAASAESPIFPSRPQRVKGGTEKCS

SEQ ID NO: 376218 - protein, 319 aa, unidentified
MTQPERFIGIDVSKATLDVAFGHDEQAPVESIPYTPDHVAHLVERLQQLQPTLIVLEATGGLERSLVDALQQAGLLVVRIQPQRVRALAKAEGLLAKTDRLDARLLARFGERIRPPAEAAPDPQQQEMSDLLARRAQLLQMRTAERNRLGTAGPAVRKRIQEHLDWLDKALAEIEHDIEERINSSDDLPRQQQLLQSVPGIGKITAQTLLVRLPELQSKDRKAIACFVGVAPLANQSGAKDKKRHIYGGRQDVRSVLYMATLSATRCNPVIREFYQRLRQAGKPFKVALVAAMHKLLTILNAILRHNRPWDPTLHASKT

SEQ ID NO: 376219 - protein, 316 aa, unidentified
MQTTVLYIGADVAKAELVISVAGQRPCIIANTATGITRWLKTVSEHALIAMESTGNYHALLAQLAYLHGLTVYILNARDVFYYARALGSRAKTDNIDAEVIVRYLQEHQSSLQAWQPLTPEQQQLRQLLSRRAQVITHQSALRQAFTDVDLSGVDTQALQHGFDVVLASMDQQIQHLIANDPQLEQGYQRLRSVSGIGQQTAALLTELLNRIPFANADALVAYSGLDPRPNDSGTKRGRRRISKRGPALLRRQLYLAAMSACRSAACKPLYEAYRARGLAGTESIVILARKLLRIAYAVWKSGQAFDPSKLSPKTA

SEQ ID NO: 376220 - protein, 307 aa, unidentified
MTYGVGIDVSKQWLDVHVHELDRTTRVANSPEGLRKLVSWLQGSALGQVVIEATGGYEVAALDALHEAGFAVARVNPRQARDFAKATGQLAKTDALDARVLAHMAQVMPLPGYQPAAPWQRQLAQYQQRRTQLQLGVMQQRQQLAYVTDGWLRKQAQRALKHWQKMLGEIDARMAELMKAQPQMEALRTIKGVGPVLLATLASRLPELGRLSGKAIAKLVGVAPLAHDSGTMRGRRGIWGGRSNIRAVLYMSALTAIRYEPKLREFYQSLRQRGKQAKVAIVAAMRKLLVILNAKMRDQLNTCHPSS

SEQ ID NO: 376221 - protein, 345 aa, unidentified
MPNIEIGVDSMVKENFIYVGIDLHKETHTAVMIDCYNQKLGEITFPNRPAAFPKLVTKVKKCNTDGKEVVYGLENAYGYGRALAVWLIDKGYLVKDVNTAISHRQAKHRGAMYRKSDSDDAKAIALATLNMLDKLPDACPNDAYWSLGQLVHRRDNIMKQRTRLVNQLHEQLCIAYPSYKQFFNDISRPTALYFWEHYPSRKYLKGKSVEDLRAELVPVSHNKCSTRTCEKILDAIAGDKVKNNAYQDARDMVTLSIVSDLQHYDKQLAEVDKMLEQMYKMLGCTLTTIPGVNVITAVKILAEIGDIKRFSNANKLAQFAGIAPLHLSSSGKGKDVATKQGNRRL

SEQ ID NO: 376222 - protein, 450 aa, unidentified
MKVFIGIDIGKEYNYASFLNNEGIEIDKRFKFKNNYLGFLSLKDNIDKLTYDCNFNYDDVLIAFESTGHYWINTDWFITEKLHIKTVMVRNDTVRHTRALNSQGKGKNDSLDSRTIAECLKNGYYFDVQGRKEDYIVLRRLTRERSELEKEIARYKNRFRAWLDVNNQIFLENFSNVFSAGALALLKVYPSPLDIIQDSYLEVREKLKEVGYNRTNNTFKIYYEEARTYKNIINGITYADRLEINEYIEALEMYMKKKESLDERIEALMNYLEGKVYTSLSQVKGMPVAQVASLLAEIGNVNNFKSARHLISYAGLNIQGEGSGKNKGYSWISKTGNRRIRKEIYVITFTLVKHNDYFRGLYCYYKSYKRANEKSNKAMLIALACKILRVIYGMLKYNVEFDLNEMLKNYDFRNINKEKFIDEFLGNSEKKQKIISQEIEDIFLSNRKSN

SEQ ID NO: 376223 - protein, 353 aa, unidentified
MTEYVGIDWAYRRAAWCAMSAGGVISAEGFTPADEDGLAKLVLRLGRDVKACLEMMSGAVWVRDRLRSAGWQVEVADARRVKGVAPLACKTDRVDARVLAELCRRDLVPALWIPSLEERELRERLRRRMHLVRLRTSAMNRVFGLGTQWGLRLSAERLRRQGGLEQLAQRGMPAVWQRSIEEALAVIDLLEARIAPLEAELAPIARADRDVALLVTIPGVGEMLALTFAAEIADVSRFPSPGKLVGYAGMAPGVKQSGQSSRSGLPLSKAGSRTLRWAAVEAAQHAWRESNPWHQLYSDVAKRSGKNAAKSAVARKVLIASWHMLSRCEPFKPSRPRGGAHTVPASSISVLAA

SEQ ID NO: 376224 - protein, 338 aa, unidentified
MELYAAIDLHSNNSVLVVTDAEDRVVFAKRLRNDLDLIVQALRSCPGDIQAVAVESTYNWYWLVDGLRATGFDVRLANTAAIKQYDGLKHGDDFSDGKHLAQLLRLGILPQGYICPPELRALRDLMRKRAQLVRQRTTQILSIHNLLARNLAKSVKGDDIKRLEDNEIDELALLEDQKRALRANVAVMRCLEEQIRLLERAILAKGKLRKEFHGLKSVSGIGDVLALTIALETGDIRRFASAGKFASYARMVDSRRESNGKSKGVGNRKCGNKHLSWAFIEAAHCAVRYDPSVRRFYQRKCAKGLSVVAIKAVAHKLARACYHIMRDGAPYDGTRAFA

SEQ ID NO: 376225 - protein, 425 aa, unidentified
MKKGQDTRGYERYMALDIHREYVLAGAWNEEKDWVLTPRRVSIEKFPEWAKKNIRTGDIVVLETTTNVWTIYDIVAPLASRVLVANAAEVGEIANARVKTDKEDVKRLLKLLIGGIVPEVWVPPMEVRELRAFISYRSRLVKTSSMIRNRLQSLLHKHNLQLSEAGLLDQAWWEAQENVSTLEKIQIRQELTLLQEVEKLKDTVDEELQRQSTSAMWGKEALQLMQLPGVGFVVAMTVLSAIGDISRFENAKQLVGYAGLGAGVHDSGKTHKEKKITKKGRRELRWAMVEAAWRAVRMSPFWKAEFEKHLKRMRKPNQAIVVIARKLLIAIWHVLSKEETDLHASEEELAYKMLLLSWSLSKDVRLGLTYKQFAKYALTLAPPARAGVKLGVEADITRLVRKNVPRRLAPREEVLARMTELGLSA

SEQ ID NO: 376226 - protein, 412 aa, unidentified
MSHGHVMWVSREAAFRSTDDWKDTTMPSAISPPKAVLGIDVGKSSHWACLVTREGEVALNRRVRNSEGDLDGLFSQVACDTIVVVDQYRNIGLLAISRARLAGLGVAYLPGLAAHQAARLFAGDAKTDERDALVIAKTALGIPDALLPVPEPDEALEAARSLAAQRSHMVTCATRDKNRLRSILLESCPAFEALADLGDRHWLNMLEKLGGPWGCIDAGKPAFGAVTKGANRARMDAAWNAAMASTRPSKRRVDAENPQVRMLARRIREALEEADGIDREIAALLAGDGTYECLVTIPGIGPRTASELVIGINIEDFPDHDHLASYCGIAPRNRRSGTSISSVSASRQGNRRLKNLLIFSCNSLVRSENRFGEYYRACRGRGMCHGEALKAVARKRLKVIYAIMRDKVPYSA

SEQ ID NO: 376227 - protein, 343 aa, unidentified
MTKISTIGLDLAKNVFQVHGIDASGTVVVRRQLKRAAVERFFAGLPPCLVGMEACGSAHHWARVIRRYGHEVRLMPPAYVKPYVKRNKNDGRDAEGLSEAVNRPTMRFVPVKSVEQQATLAVHGTRALLVRQRTMAANALRAALSELGIVAAQGYEGLRKLMTRLEEPSEEIPENMRCALLLLAKQWQALDVDERVLERQIGKAARGDRDARRLMEVPSVGPIIASTVLAKVPDAKVFRSGRDFAAWIGLTGKDHGTGGKHRPGRISKQGDRMLRALLISGASAHLRQQKRRGVADPWLRDLLARRPYKVVMVAFAAKTARILWAMLSKGEAYRDRASAPAAA

SEQ ID NO: 376228 - protein, 412 aa, unidentified
MSKCNYFVGIDTGRYSNLAVVVDDQGTKVESIKFDNNHKGCSMLMEHLSKHNDSCLIGLEGLGTCSNILTQRLSSYNFVIKPIMPINIKRHKDYFTQDTKSDEYDAYVIADFLRLRHSYIKELNIQKYKNLTAIRELSKLYKDFAKQKNAYLNMLNQAIMEIFPEYITDGIFSKINCKSSLVLLSELPTPKDIANTAFKKLETIISKNSRGHMGNEEIKQLYTQATLSLNEALDYNASGLRISSLAKMILYIQQEQQRIKRLISSYLKDIPEAEILLSLPGVDAVLCARFLSSIGSIDKFADSNKLALYCGVACLDDKSGKRQRTKRAFRVNHNAKDAIMQIAHCSIRFNPASKEFYARKRKEGKKHWQAVKALARNIIRVVYAMLKNNTKYNPSLQRQLKTQKPRQVAIYC

SEQ ID NO: 376229 - protein, 392 aa, unidentified
MKTNAIKEGTVEGAEQGSKTHQLIKLGVDVHWHEYVVVRQIDGSSPQSAQRFTPEGFVAWAARQTQLAEQVWCCYEAGPFGFVLHKQLERLGVRNVVVRPRNWDEYGAKVKTDRRDALALCSSLDRYLAGNTQALAVVRVPTDEQEHSRSQTRQREQLVSERKRLGAQGLCAARYYGYDLPDQWWRPRRFAALQSQTPDFLLELLARWQRLLLAIDEELDSLGGLIESAQQQMLPTGLGALTAQILDREIGEWNRFKNRRQIASYTGLVPSEHSSGQTQVRGSITKHGNPRVRHILIEAGWRLRQFQPEYRAVKQRQAAFDVAKQKGNSPARKRLGVALSRQFIVDWWRIKTGRTTPAQLGLQMSWPTCPHLPSKPKPSSETSVQPPTQPID

SEQ ID NO: 376230 - protein, 413 aa, unidentified
MLIVGCDVGSETHYIRAIDVRGREVSRGAFEFSNTEEGFENARTWMLILAAENGKKQIVLGLEPTGHYWFALAAWMISNGISVVQVNPYAVKQSKEIEDNSQCKDDRKDPKLIANLVKDGNYGMPYLPEKIYADMRRLSMFRDQLTEDRIRNINRLHRELKIYFPEYMDAFGKIDGAFTLEVLKVSAIPTDIVALGTDGLRNIWHNAKLRGRGYSRAHEIVSCAEKSVGLTDGIDAGCEAMKWYAGQILKLDVQLAAIESTLHKKCREIPYAENILAINGVGENILSGILAEMGDISRFDDVKEIQKLSGMGLVACSSGKHKGQTKISHRGRKRLRYWLFQAAKSAVSHADEFKQLHEYYTTRADNPLKKMQSLIVIACKILRIVYTILKTGTTYDRQKMLKDIKRPVSSQAA

SEQ ID NO: 376231 - protein, 415 aa, unidentified
MALKIVYKICCGIDIHKNFVVACIAKTDMQGVTTYERHHFSTYTKGLKQLLKWLLDRNCKDVCMESTGKYWIPVYNVLEHDCSIVLAHPKYVKAIRGKKTDKKDAKWIADLFKHDLVAGSFMPPSDIRQLRDLMRYRFKLTCFKSSEKNRYQNCLTVSNIQLASVVSDTFGKSSQKIIAKILENPDDTSFDIGSLIHGSMKDKLPELELAIDGYITPEQAAKLKIIKEHFDNLEARKAELEELILALANPYQQEISIILTAPGFKNTFTAIGIISEIGTNMEAFPSAKHLCSWAGLTPTNNESAGKKKSVRVSKAGCYIKPLLVQCANAAIKSKKHPEIRDRYLRIKKRRGHKKAIIAIARMLLTALYHMLKNGENYNSDLYQKSDILPITREITVEQAILMAQFQGYRIKSATD

SEQ ID NO: 376232 - protein, 275 aa, unidentified
MAKDTIGIDVSKDSLDAFWHSRTEACCLPNTPEGFRQLYDWLANEEDFLIVFKATGAYHRGLEWYLSLAELPFIKVNPKQARRFAQAIGRLAKTDSVDARMLARMGVVLDLAPQVAEGEDVHDLRELLTARRALVKDQVTAKTRLATALNPLAREQLGRRIEGIGADIQALDEVIAQIAKQRGTLEERICRLMTILGIGRPTATTMLIDMPELGHLDGKKITALAGLAPMTSNRESGRARRGSPGVGHQFGARSTCPHLSPSASTGTFTTSISNY

SEQ ID NO: 376233 - protein, 322 aa, unidentified
MTKHTTISAGIDTGKRKLDVAIEGRHEPLQVENAPEGHEVLVAWLRRHRVKRVGIEASGGYEQPVVAELRRKRFVVVVFQPAQVRAYAKFHLQRAKNDKIDAALIAACTAAVRKIHAAPDPRLLPFAEQLTMIDQVNEDIARLKNRTESCRNALFRKLWQEDIVRLQQREKAELKALVAAIRKHPDLARRLALINSVDGIGLPTAVAILVRLPEIGRITREQAFALAGLAPYDDDSGDRVGERHIEGGRKRLRRALYTASLAASFRWNPQLIQLYQRLTAAGKEHKRALVACARKMLIFANTVVARGTPWCDEPPLRSFSVS

SEQ ID NO: 376234 - protein, 391 aa, unidentified
MIFIGIDAAKDKHDCFIANSDGEVLCDVFTISNTLTGFNDLLSKLKSFSKDLTKTKVGLEATGHYSYNLLGFLLDNGLPTYVLNPLHTNLYRKSLSLRKTKTDKVDARTIASMLMSCKDLKPYTRALYHNEELKSLTRYRFDKVSERAKLKTSVSRLITILFPELEKLVPVVHCVSVYALLSEFPSAKHIANANLTRLTNLLYSASKGHYNRDTAIRLREAARNSIGSVMPAKSLELKHTIKLIGELDNEISEIEAAIKQIVDSLGTTILTIPGIGYATAASILAEVGDFSNFETPDKILAFAGMSPSTYQSGQLTNCYAHMEKRGSKYLRFALYNATKYVCKWDSNFAAYLAKKRSEGKHYNVAISHAAKKLVRLIFALEKSRLPYMPVA

SEQ ID NO: 376235 - protein, 339 aa, unidentified
MIIQSEIIVQESKPLFAGIDVGAEELILVIRKNGIPHKAQKFANNPADRARLVKKLVNLPGIIVCLEATGVYHFDLSIALHDAGVALMVVNPKAFHNFAKVLMKNSKTDAVDAETLAQYAERMDFVAWTRPSDEKIALRSFARRIDALTRQKAAARNNLHALSASQETPKAVLRDVKLAVSQLEKRIDRLSNEALALIGKHAELERVFRLLTSIKGIAKTSAIALMGELLLLPPGLSHREWVKFAGLDPRAFDSGKSVHKQARLSKAGNRHIRSALYMPALSAKQHDPHVKAYFQHLVDNGKKPLQAVCAVMRKLLHAIHGMLKDNTPFDNTRFYAIPA

SEQ ID NO: 376236 - protein, 309 aa, unidentified
MGEIFVGIDVSKDLLDIAVLPAREKQQYTNDEAGTSKLAARLKKLSPVLVVMEPTGGLEAMVAAALAAEGISVAVVNARQVRDYARATGKLAKTDNLDALIMAEFASVIKPPARQLRDEESEEIKAMVSRRRQLLEMLTAEKNRLAIARKHLKPNILAHIEWLKKEIADLDRDLRQRIESSPIWRVKDNLLQSIPGVGRVLSATLLADLPELGNLNRRQIAALVGVAPFNRDSGTMRGKRSIWGGRASIRAVLYMATLASTRFNPVIRSFYQRLLARGKAKKVALVACMRRLLTIMNSILKHQRAWQYV

SEQ ID NO: 376237 - protein, 394 aa, unidentified
MNSVGIDISKGRSTIAVMRPFGEVVISPFEVRHTDSELSELARQLKSLNGETRVVMEATGNYHASVAKLLHDAGLYVSVINAKLVHGYGNNDLRRVKTDRKDAVKLANYGLDRWLTLPRYVPEEDTRLLLKNCYRQYRQDSKVQTVLKNNLISLLDTVFPNVNRLFSSPARADGSEKWVDFVAKFWHCECICERSEKAFVSKYQKWCKKHRYNFGEEKACAIYAEASGHIGVVPKSETTKLLVEQAVSQLRATSAALAALKHEMQSLASVLPEYPAVMDMFGVGPTLGPQLIAEIGDVRRFYSKKALVAYAGLDAPPNDSGDVTGRHKSMSKIGASSLRRTLFLVMSVYLQNAPLDEPVYQFMDKKRAEGKPYRVYMMASANKFLRIYYATVKA

SEQ ID NO: 376238 - protein, 411 aa, unidentified
MENLFPCCAGLDVHKDSVEACVRRIEPNGRWHQQTRHWGTMTRDLLAMADWMAAQGVTQVAMESTGVFWKPIYNILESRFTMLLVNARHLKQVPGRKSDVRDCQWIAQLLQYGLLKGSFIPPRSQRELRDLTRHRTQLVEEKTRTANRIHKVLQDTNIKLSSVATDVLGVSGRAMLEALITGEEDPVKLAHLAQRKLRSKIPELEKALEGHLTEHHRFMLQLLWKQLAQQEELIAELDRKIEEQTRPFAAEIDRLDAVPGVDRRVAEVVLAEVGADMKPFSAHENLASWAGMCPGNEESAGKRRRRRITPGNPWLKPTLAQAAWAASHTKNSYLASQYRRLAGHRGRKRALIAVGHSILVIFYHMLKTGTSYTDLGGDFFDRLQPERLTRYYVKRLERLGHKVTLESRAAA

SEQ ID NO: 376239 - protein, 411 aa, unidentified
MQVLYPRCAGLDVHKDTIVACVRCVCPPMHQEVRSFGTTTTELLALGDWLAEHDCTHVAMEATGVYWKPVWHVLEAEFELVLANAAHIRNVPGRKSDVNDAMWIADLLAHGLIRSSFVPPQAIQQLRDLTRTRKQLVRELSQHSLRIQKVLEDANLKLGSVLSDVLGKSGRAMLDAIVAGQSDPAQLAALAQGTARNKSAELREALRGRITEHHRTMLRLHLQVVDALHHTLAELDAAVGKALAPIRQRARLLTTMPGVSDLTASVVVAEIGVDMSRFPTAGHLISWAGLCPRSDESAGKRRSTRVRKSGTWIKTTLVTAAWAAVRVKSSYLRAQFLRIKARRGAKKAILAVAASMLTAAYHMLRDGTEYNDLGCEHFDRQDRTKTIRRLMKRLQDLGCEVPVQAHAGSAS

SEQ ID NO: 376240 - protein, 329 aa, unidentified
MIPNGRKGRVASPHVQGRGKSLMFVGIDVSKDRLDVHLRPSGEAFAVPRDSEGVEVLAGRLQELDPELVVLEATGGFETVVAAGLAAAGLPLAVVNPRQIRDFARAVGRLAKTDPLDAAVIAHFAEAVRPQSRPVPDEATRALGELVARRRQIVEMMVAERNRRRQMTQPKAIRTIERVLTTLQAQLSDIESEIDDAIRGTPAWRDKEDLLTSVPGIGPKIARTLIAELPELGHLDRRRLAALAGLAPFNRDSGKRCGRRTIAGGRGPVRAALFMAVLVSIRRNTPLAQTYHRLVQAGKPPKVAIVACMRKLLAILNAILREQNPWQTT

SEQ ID NO: 376241 - protein, 390 aa, unidentified
MPLDHHSEEPTAIRTNLGAIFVSLELSRSTWLITSLSPGGGEKMSKHSVSAGDIAGLLSRFSELKQKAFARMGQSFPIIVIQEAGLDGFWIHRVLQSEGIESYVVDAASIATSRRRRRAKTDRIDGEALVRALLAYKRGEPRVCAMVRAPTPEDEDRRRLCRERRTLTVERVQHVNRIKGLLFSQGVSGYEPLRRNRRQRLGELKTGDGRPLPPHLKGQIGRELDRLELLLGQIKAIEAERDALLTPATETEGMPGPQAMLIDLRGIGAEFAAVVWSEGLCRSFANRRQVAAYGGLAPTPWQSGSVAREQGVSKAGNPRLRTTMIQLAWLWLRHQPNSALAQWFKERVKRNGGRLRKTTIVALARKLLVALWKYVTAGVVVEGAVMKAVS

SEQ ID NO: 376242 - protein, 388 aa, unidentified
MLLDHPSDEPTAIRTHIAAIFVSLELSRKTWLVTSLSPGKGEKMSRHSVTAGDAAGLLTLFAELRRKAEDRTAQSYPIITIQEAGLDGFWLHRVLRQNGVESHVVDAASIAMPRRQKRAKTDRIDGVTLLRTLLAYKRGEPRVCAMVVAPSPEEEDRRRLCRERRTLIEERVTHGNRIKGLLFAQGIFDYAPLRRDRRKRLEALRTGDGRELPSHLKAQIGRELDRIELLLGQIKAVEAAQEALLAAARKPADEAAPDPVTMLLALKGIGANFAAVLWSEAFYRQFGNRRQVAAYAGLAATPWQSGGLRHEQGVSKAGNARLRTTMIQIAWLWIRHQPQSPLTRWFKERSQQGRKRAIVALARKLLVALWKYITQGVVIEGAVMKPAA

SEQ ID NO: 376243 - protein, 454 aa, unidentified
MRKPQVVPDEDHEVVYERVAAVDVAKASGVVCLRAPDPARPGRFVNRIWDNVPAMRAQIAELGGELLRCRVQMVTLESTSDYWRIWYYVLESIGLAVQLVSASQAKNLKGRPKTDKLDAMWLARLTQWGMLRPSFVPPAAIRRVRDFTRARQDLVAERTRCLQRVEKLLEDAMIKVTSVAKDGMKAKSVVAMVAALAAGERDPRALADLAKGPLRARRDQLAQALDGMFDSHHGMIARSLLDQVAFLDRQITLMEDQAIAALAGVPESWGVDADGQTGPQAGTSPDSPVLAAAHRLAEIPGISLWLAIVIIAEIGLNMTCFPTPAHLVSWMGLCRSAASSGTRHGKGKPKKGNSYARAAAGQAAIGAARTATFPGERYARIARRRGKAIAQAAVARSIMIIAWHLLNDPQARYRDLGPDFYASRINRDKKIRNHIRGLQALGLTIAITGDEQAA

SEQ ID NO: 376244 - protein, 335 aa, unidentified
MHYLYYVGLDVSKETFDASLVAFEDANEMAHRKFANSRKGICSCLHWVEKRHGIRLDDVIFFAEGMGRDISEMAVCASDRTLNFNFSLISPLVIKYSMGIARGKTDRVDARRIAEYAITHYRKIALYLPAEKELCQLRTWLILRAHLAKQRVAKLVLLEKLDYKEKFADVSIQRSMLQEEIAYAETHMKTIEREMKELIAADSNICRNYKLLTSIKGVGPITAIVMLCSTLNFTKITDHRKFACYCGLAPFEHSSGTSVRGGCHTSSMANRDIKVQLNRSALIAIRCDPQLKAYYERKVAEGKHKFSVLNAVRAKIAARCFAVVRRGTPYVALQI

SEQ ID NO: 376245 - protein, 382 aa, unidentified
MMEEVVIGLDPHKSSNTIAVLQRDETLLARRRFTHSDDGLVAMFDAVSDYPKRVWAVEGANGIGLNIAQRLVACGESVIDVPAKLATRVRVYSTGHGTKTDDTDAVAIARAAIHSRHLRFVQAGGSSEALKLLSDRRTELVQARTRAVCRLHRLLRELISGGARTSLSAEHAFDLLTTLKTDNPADQARVEIALEHIDDIARLDLKIDEATRRINKTVKVSGTTLTRVYGIGPISAAVILGEVGNIARFANRDKFASYCGTAPIAVSSGDQNRHRLSRSGNRQLNRALHMAAVTQIRNDTPGRDYYRRKISEGKSKLEALRCLKRRITDAVFRQLQIDRQDDQTQDDSWPRRPSTRRGGPSYYSPATLRQNGKPMQPKPAKV

SEQ ID NO: 376246 - protein, 341 aa, unidentified
MEQISTIGIDIAKTVFQVHGIDGSGEPVVRRQLRRRQVLPFFGRLSPCLVGMEACATSHHWARELEKLGHEVRLMPPRYVKPYVKRNKNDAADAEAICEAVQRPTMRFVPIKTAEQQSVLMVHRTRHLFVRQRTSLINAMRAHMAEFGIVAGIGRNGVEKLLELISKGEDERLPSAARECLMALAAQLELVKRQILEADRRVRAWHRTSKTSKRLEAIPGVGPLVATALVASVPDPHVFRSGRDLSAWIGLVPKQNSTGGKERLGSISKAGNRYLRQLLVVGALSVIRRAKQLGYTRHPWLVRLMERRSTKVAAIALANKIARIAWAMMARNESYRAPLPA

SEQ ID NO: 376247 - protein, 351 aa, unidentified
MDVHATKVVAAVLDVETGELAFFSMTADIARVAGFCAGLPGPVRAAYEAGPTGYGLARELARREVECVVAAPSKIPRGSGERVRTDRRDAELLARLLLAGKLHPVRVPGREEEALRDLIRAREGIRVDLMRCRHRLSKLLLRHGIRFEDGDAWTTRHRQWLSTITLAQPAAQATLLDARGAVDALVHRREQLEREIIALLPGSPWSVQSSRLRCMRGLDTLSAVGLCAEVGDFANFRKPAQLMSYVGLVPSETSSGQQRRLGSITKTGSTHARRLLVEAAWHYRKRPRIGTTLTERQAGQPPEAIAIAWSAQRRLHRTWTRLEQRNKRRTLIAVAAARELAGFCWAICQIE

SEQ ID NO: 376248 - protein, 340 aa, unidentified
MKLYGAIDLHSTNNVTVVIDEQDRVVYQKRLPNDLALILKELSVYQSELEGIVVESTYNWYWLVDGLMEQGYKVHLANTAAIQQYEGLKYTDDHSDARWLAHLLRLGVLPQGYIYPKAERPVRDLLRKRSQMVRQRTTNLLSIQNLMTRNTGSSLSANRVKGLDTQQVDELLPNGDLALAVKANLSVMCSADEQTEILERTVTQRVKLSPQFCFLKTVPGIGQILALTIMLETGDIGRFSSVGNFASYCRCVGSQKISNGKKKGQGNTKNGNKYLAWAFVEAAHFAIQFNSKIKSYGQRKKAKTKGVVAIKAVAHKLCRACYYIMRDRVAFNITKAFGPK

SEQ ID NO: 376249 - protein, 353 aa, unidentified
MLIIGCDFHPGFQQIAIFDNQTGAYEERRLSHRAEAEQFYRALAGQEVRVGMEACGHYPWFERLLAELGFELWLGDAAKIRASVVRQQKTDRRDAEHLQMLMREDRFPRIWVPSLEERDLRQLLVHRHKQVQARTRTKNQLQALAMSQGVQKKRKLWTAAGRAELESLELLPYAAQRRRQLLHRLDALEAEIAGLNRQVEEEVKGRPAAVKLMTHPGVGPVTALALVLTLGPAERFRDGRKVGSYFGLIPSEYSSGGRQRLGHISKQGSSFVRFLLVEAGQSAARKDAELGRFYRRLGARKHRALAKVAVARKLAVRLYLMLREDWTYAQLCRAVVQASPSHSVAASSNRPLE

SEQ ID NO: 376250 - protein, 353 aa, unidentified
MREPSVTDIIRIGLDTSKSIFQLHGVDASERPVVRKQLSRREMITFFETLAPTVVALEACGASHHWARLLGSFGHEVKLIAPQLAKPYVKRGKNDAADAEALCEAASRPTMRFVPVKTADQQAALMLVGMRTRLIKRRTQLANAIRGNAAEFGMTTAKGMRRIEPLLATIAADEALPALARELFALHGREYAALKTEIERIEEKLMAWHRSDECSQRLAKIPGVGPIGASMLMMKTPDPRLFASGRAFAAWMGLTPKDHSTGGKTRLGGITRAGDELLRSTLVVGATAVIHHVRRTKGKNASPWLVSLLERKKPKQAAVALANKIARIAWKLMVSGEVYRQNTRTPAAVSVAA

SEQ ID NO: 376251 - protein, 355 aa, unidentified
MVYVGVDLHRKVSQVAALDPSGEVMFNRRIPSDRRELLRVFGELEPGPIEVAFEATYGWGWFADLLQDAGIEAHMAHPLATKAITAGRLKNDAVDAKTLAQLLRTNLLPEAWIAPPEVREARRLVRMRSSLVRIRSRLKCQVHALCADHGVPVEMTDLFGSAGRELLAGLVLPPLSGSRLAANLRIIDALGSEITAAEREISRGFARDERVRRLMVIPGIGLLVGATIVAEIWDVGRFNSPERLCSWAGLTPTERSSAGPTRRGHISQQGSRWLRWIMIEAAAHVRDPALRRFAAGIEDRRGSKIARVALARRLLTLSYYALRDPAGCRAYPSLHRTRTSLTERARLGPGLSDGR

SEQ ID NO: 376252 - protein, 347 aa, unidentified
MAAVMIGVDPHKGSHTAVAIGTGEEPLGELRVRASAAQAQRLLAWAAGWPERTWAIEGAAGLGHLLAQQLLAAGERVLDVQPKLGARVRLLAAGAVNKNDPNDARSVAVAALRSASRREVTADDHAAVLKVWSKRHRDLGRTRTQVACRLHAVLCELIPGGVSKRLTAAHAGGLLEAITPSGAVEAARCELAAAFLEDLRRIDAQMRDAKKKLTVAVAASGTTVTEVFGVGPVVAAIVIGAVRDVSRFPSRDHFAAYNGTAPIEVSSGPRKIYRLSRRGNRRLNHAIHMAAVTQVSHRHSDGRAYYERKLAEGKTPKEALRALKRQVSDAIFARLQADAQRAAAGPR

SEQ ID NO: 376253 - protein, 341 aa, unidentified
MSELYAGLDLHSGNTYIGLIEKGTMKRVFEKRVRNNLEEVVWTLAPYREEIRGIAVESTFNWYWLVDGLNEAGYGCVHLANPAAIQQYKGLKYADDRHDAFWLAQMLSLGILPEGYIYPREERPVRDLLRKRSFLVKQRTAHIISLQSMIERNTGVHMNANALRKVKAEDIKQILKEDHLVLLGTTSLETIDFLGKSIKEIEKTVKKTVKTRDAFEKLHMVPGIGDILAMTIMLEVGDISRFARVGDFSSYCRCVPTGRFSNGKNKGKGNVKNGNRYLAWAFIEAAYLSMRQSPKIAGYYKRKASRTHKMVAVKTIASKLARACYYILRDGVEFKEEMLFC

SEQ ID NO: 376254 - protein, 324 aa, unidentified
MNDFPKLGLDIAKQTFQAVLLRQGKQRHKKFDNTPAGFAELRQWLAQQGVEQVHACLEATGIYSEAVARFLYQAGHLVSLVNPARIKAFAQSRLVRTKNDKVDAGLIARYCLEAVPDAWTPPPPEIIQLQALMRHLDSLEETRGQLRNRLTDGPQVAPVLTSLRKLIAEVEAESERIWQQVREHIKGHPELKEQAALIDSIPGIGELTAAKLLGELTQLRSYQSASQVVAYAGLNPQERQSGTSIKGQSRISKTGNARLRKALYLPAIVALKHNPLIRALGIRLEERGLAPLAIIAAAMRKLLHLVFGVVKSGKEFDPDHALAS

SEQ ID NO: 376255 - protein, 348 aa, unidentified
MHSTTVAVDLAKNVFELAIADGGWKITERLRLNLKSFGAFFVQLAPACVVMEACGSAHHWARSIAAHGHEVHLLPAQYVRAYVKRNKTDRADAAALLEAMRCADIRPVPVKTLEQQQILGLHRLRSQWMGTRQRYVNTLRGILREFGIVIAPGVGAAKRQIAQQLAQSPSELPPGIRPLLTQMLGQIADLEHNVEHVERQLTSLSRTDERVQQMRQIPGIGLLTSTAIRATVGDIQRFLSGRHFASWLGLTAREYSSAEHRRLAGICKRGDDLRTLLVHGACSALLAAHQAQRSGRPMDYLRQWALQCERQRGHNKATVALANRLARIIWATWKYERPFDGNWATAVA

SEQ ID NO: 376256 - protein, 386 aa, unidentified
MQRNDLSRSLVAFDQNSTLVAVVELSLNRWVVQGLVPGLSKQPLKALGPDASALLALVNRWQLEGTKGGGRIKRIVVAFEAGRDGFWLARWLRSRGIEVYVIHATSIPVSREHRRAKSDRLDTELLMRALLGWLRGERKHCQMVRIPTIEEEDARRPNREHQTLVGERTRNVCRIKSTLVLHGIRDFNPKRLKASERLETLRCPEGGSLPPNTLAELRREMAQLRLISGQLREIEKTREERLKRAPRQGTHPMVLLLAKILGIGIETADMLVQEILSRELRDERAVGRYAGLTGSPYDSGAKRREKGMSRAGNARVRRGMVQLAWRWIRFQKDSQLTQWYNSRTESARGDIRKTMIVALARKLLVSLWRYVTTGEVPVGAKLKAAA

SEQ ID NO: 376257 - protein, 345 aa, unidentified
MATMPQTLGGVTVGVDTHGKIHVGAVADPLGRILGTIEVTTDERGFRQLENYAKGLGTIERFGVEGTGAYGATLCRWLTNRGHEVLEVDRPDRKIRRLRGKSDPIDACAAAQAVLSGRASGVPKARDGAVEAIRVLRMARGSAVRGRTQTMNQMHALVTSAVDPLRMQLRSCSPAKLVERCVGMRPGKLDSPAAATKFALRELARRHRALDEEVERFDEELSRLVAKRAPRLVALVGVGTDVAGALLVTAGDNPDRLRSEASFAHLCGVSPIPASSGRIHRHRLNRGGDRSANQALWRIVMVRMSWDERTRAYAARRTSEGLSKREIIRCLKRYVAREVYEVLVA

SEQ ID NO: 376258 - protein, 324 aa, unidentified
MKTTPVLGIDVALRSLAVALWFDSARCAKAQFTNDSRGFRQLSRWLRQHLAGQLRVGLEATSTYGEAVAAWLHQAGHQVFVLNPERVACFARTLGQRNKTDPADAVTIARFIAGREDLTVWQPPSAEQQALRSLTRVRQQLTEQSLLLRNQLRTAEPPARQHLQTVLRTIVRQLAALQREIRAHLQAHPSLGEQVRRLMTCKGIGLVTAAIAIAELPPITPQSDPRAICAWTGLTPRRWQSGQTESPARLSRKGNAYLRQALFMPALVAKRHNPVLRAFAQRLAASGKRPGSILGAISHKLLRIMVGLLRSQTDFDPNWSPLKT

SEQ ID NO: 376259 - protein, 355 aa, unidentified
MEKAYDGRQVVGMDLHRRRSVLVRMAEDGRRLGMARFTNSPEELRAQIARAGKSPKVVLEATYGWYWAADALAAAGAEVHLAHPLGVKAFSYRRVKNDERDAADLADLLRMGRLPEAWIAPPRVRELRELTRYRHKLVGLRTSCKTQVHAVLGKLGIPVGYSDVFGKAGSAWLDELTLPQPYAGKVTSLRQLAGQLTTEIAMLSRVIADLLADHRGYQVIQQLPGIGPVLAAVIIAEIGEVTRFKNAGQLCSWAGLTPRHRESDTKVARGHVTKQGSRLLRWALIEAIQRIPADSVIGSVKAAIVARRGKEARNIAKVAAARRLLTLVYYGMRDGQIRCLTAGQPPVTQPPARAA

SEQ ID NO: 376260 - protein, 309 aa, unidentified
MDNIVGIDVSKDRLDVALAASDTAFFVENSHAGIDDLAQRLKGVNADIVALEATGGFETLAVAKLSAAGFAVIVVNPAQVRAYANAIGRRAKTDAVDAAVIAAFVSATKPQIRPLRDQQTQLLSALVDRRRQIVQMIVAEENRLRMALEKATRKSIQRLLAALHREVDSIDAEMDDHIRKSPVWRVREALLTSVPGVGPATARTLLAEMPELGSLDRRQIASLAGLAPWTRQSGKWKGKSFIGGGRGKVRAVLFMAALVAARYNPVLKAFRDRLVQAGKPKIVAIVATMRKLLTMLNAIIRDTKPWQNA

SEQ ID NO: 376261 - protein, 362 aa, unidentified
MKEITRAPVARVGVDLSKRVYQVHAVDAQGRVVLARAMPVDRFFAWCAELPQGCVVAMETCGGAHHVARRLRLLGLDARLIAGNFVTPYRMAGKSGKNDANDAAAICEAAGRPHMRFVPVKTCEQQGQLAVHRLREGFKEERTALINRIRGLLAEFGLVFAQGPDVLRLVLAGVIEDASNEIPGVARLALQRAHLHWIDIDLQIAWCDERIAAHVRTDARATKAATLLGIGPTTASALVASVGEFGQFANARQFGAWLGLVPSQNSTGGKARLGGITKRGDDYLRTLLIQGAKSAVMSAAKRSDRISLWLVQLKERVGWQKAVVALANKNARILWAVLTRNGVFDPDHVPQIPAARQKPQPA

SEQ ID NO: 376262 - protein, 307 aa, unidentified
MFVGIDVAKDRLDVHVRPAGEAFTVARDGEGIEDLAKRLSAVTPTLVVLEATGGFETIVAAGLAAAGLPVAVVNPRQIRDFARATARLAKTDTLDAAVIAHFAEAVNPPPRPLADAQSRLLGELMARRRQLIEMIGAESNRRRMLTVRRTLKSVDRVLATLKTQLEQIDGDIDIAVRGTPAWREAEDLLISVPGIGPRIARTLIAELPELGRLDRWQIASLTGVAPFNCDSGTLRGRRTIAGGRPVVRAALYMSVLVSIRRKLPLAHTYHRLRAAGKPAKVAIVACMRKLVTILNAILRDKKPWATA

SEQ ID NO: 376263 - protein, 424 aa, unidentified
MKNSAARKLKQVPDGYLIIGIDPHKKRHAAVAITQDYSPRAKFKFDNTREGFEAMLHRVRTEMVESGCRGVMFAIETGGHYWRNVAYFLDEQGIPFRFINQFTLKRRREGKDLNRRKNDYRDSEVAAQLLCTGEFTESKLPQGVYAELRSAHNAYRRLVVERARITNLLKGLLDSLFPEFTLVFKDPCGLTALSVLSTCAIPSVIAGMAEDEFVAKIEERHQGHRLMRMKLRKLHYLARMSIGIDAGAPSVSAEISFLVEKLELICRQTRIMERTLAKLLDETEEGKYLLSIRGLSYIAVAGLLAELGCFRAYRSAKQMIKMAGSNPTESESAGKRRTRTPMSKRGRPVLRYCAWTSVIPMLRLNEEFRDWAKQMRERPAHANPLNGREIVGAALNKLLRLAFALVKNQTYYQAPKQDPELVAV

SEQ ID NO: 376264 - protein, 420 aa, unidentified
MTVFCGIDWAERHHDVAVVDDTGTLLAKARISDDAAGYSKLLDLLAEHGDSPETPIPVAIETSRGLLVAVLRTSDRKVFAINPLAASRYRDRHGVSRKKSDPGDALVLANILRTDMHAHRPLPADSELAQAITVLARAQQDAVWSRQQVANQVRSLLREYYPAALHAFQGKEGGLTRADARVVLALAPTPAKAAKLTLAQLRAALKRSGRTRGFDTETARLREIFRSEYARHRPAVEDAFGQQLLALLKQLDAACQAADDLTTAAEAAFKEHADSEILLSFPGLGPLLGARLLAEIGDDRTRFADARALKSYAGSAPITRASGKKHFVGRRFVKNNRLMHAGFLWAFSSLTASPGANAHYRRRREHGDWHNAAQRHLLNRFLGQLHHCLQTRQPFDEQRAFAPLLPAQLEGVTGARKPSH

SEQ ID NO: 376265 - protein, 437 aa, unidentified
MLLSLNPKAAGVDIGATEIYIAVPGDRDPQPVRCFSTFTEDLHAAADWLKACHIDTVAMESTGVYWIPLFQILEARGFQVFLVNAHHVKNVPGRKSDVSDCQWLQYLHSVGLLRASFRPEQAVCTVRSILRHRDGLVQMASSHVQHMQKALNQMNLQLHPVISDITGVTGIAILEAILAGERNPHTLAALRDRRIKASAEIIAKSLVGDYRREPLFTLGQSLAAFRHYQELIAACDREVAQYLEGFESKMDPPPASTSPSKDGSKPKASEPPFDLQTHLHRIFGVDLTQVPGINVLTAQTLLAEIGPDFSRFASGPELTSWLGLCPDNRVSGGKVLSVKTRKVKNRAATALRMAALSLYRSQSYLGHYFRRMRAKLGAPKAITATAHKLARIVYHMVDTRHAYDETICAHNEVQNRQRLEARLRKQARELGLQIVAI

SEQ ID NO: 376266 - protein, 375 aa, unidentified
MCNKIRFVGLDVHAEKISVSVADSGEEVRSHGEIANRPESIRKLIGKLGPTEDLKVCYEAGPTGFVLYWQLTQMGVACEVIAPSLIPQKAGDRVKTNRRDADKLARCYRAGELTAVWVPDASQEALRDLVRAREAAKKDQLKARHRLGKFLLRHGRRPQELKAWTKQYLEWIKAHVHFEQQAQEATLADYLEEVEHVAARIVRLEKAIDEAVQQAPAEIKAVIEALQALRGVAQTTAATIVSELGSLSRFESPRPLMGYSGLVASEYSSGNRICRGAITKTGNAHLRRVLVEAAWAYQHRPNVSGFLLRRQKNLALSEEVKQIAWKAQQRLHKRYKTFAARGKNKNQIVTALGRELLGFIWAIATKTEQGKKAAA

SEQ ID NO: 376267 - protein, 246 aa, unidentified
MLSFGGIDVSKDRLDVMVLPEEQCSSVPNDAAGWAKLVEQLRGFSISAVGIEASGGYQRGAVRALLAAGMSVRQVNPFKLRQFARASGVLAKNDPLNARMIASFIAIMPTRPAQPHAPAVERLAEILTVRRQLSDAKVAAENASRLLEDAMLQRLSRRRIARLAADIDVLDGRLVEIVMADAALVHRYQLLTSMPGVGPVLACTLIALLPELGRMNRKQVAALVGLAPYAFDSGKLKGALPATGRG

SEQ ID NO: 376268 - protein, 456 aa, unidentified
MRKKIKKAIPVRYHDDGLSQLRPNAGGIDIGASEVWVDVGNKDAEPTRMFETFTADLNRMADWLKSCGIQTVAMESTGVFWIPVCQILESKGIEVYLVNARQAKNVSGRKSDMLDCQWLRILHSYGLLPASFRPAKDIGVLRAYMRHRQMLIEYAAAHVQHMQKAMTQMNLQLPHVISDITGWTGMKIIRAIVAGERDRRRLAALRDERTKANEETIAKALEGDYRAEHLFALKQSVELFDTYQKQIESCHDQIEQHLKSLATKVDPAELQAARTKKRRYRNQPEFSIREQAFRISGVDLTQIDGIHESSALSLIAEIGVDMNAWRTEKHFSSWLALCPNNKISGGKILRRSTRKTANRAREILQLCAQSLLRSHSALGAFCRRMCGRLGTPKGIVAAAHKLAVLVYRMLKFGHHYTDIGQERYEQQYKQRVLQRLARKAQDFGFQLVPCPEKQVP

SEQ ID NO: 376269 - protein, 404 aa, unidentified
MKVFVGHDWAEGHHDLFVEDESGDRLDSARVPEGIEGVRRIHELIAIHVEDPADVTVATETDRGLFVAALVAAGYRVIAVNPMSTSRYRERLSTSGAKSDPGDARVLAELARVDGHLHRRIAGDSDLADAVQSLARAHQSMIWTRQRQVNQLRSTLREFYPGALQAFDVLASGDALAVLAIAPTPTRGRALSISKIGSALRRGGRQRRVDARAEQIQTALRSEQLQAPPLVADAMGSTVSALVAVITEMTVQIQRLEAELTDRFDRHPDAKIIRSLPGLGTILGARVLAEFGDDPNRFENAKSRKNYASTSPITRASGKHRVVLARYARNKRLADACYLWAFAALSRSPGARAFYDQHRAAGSTHNKALRALANRLVGILHGCLTHHTLYDEHHAWGHRQHLAA

SEQ ID NO: 376270 - protein, 389 aa, unidentified
MKIFVGIDIAKLNHFAAAISSDGEILIEPFKFTNDADGFQLLVSKLESFDKNSIIIGLESTAHYGDNLVRYLVAEFYQVCVLNPIKTCQMRKNNVRKTKTDKVDTFVIAKTLMMQDDLRFITFFDLDMMDLKALGRFRQKTIKQRTRLKIQLTTYVDQVFPEIQYFFKSGLHQNAVYALLKEAPSPKEIASMHMTHLANLLKVNSHGHFTKEQAKELRVLAQKSVGANDSAISIQITQTIQQIELLDSQLDKIEAEMTDIMKFNDSVIMTIPGIGYINGGMILGEIGDIHRFSNPNKLLAFAGLDPSVYQSGNFQAKTTRMSKRGSRVLRYALVNAAWNVVRNNATFKAYYDAKRAEGRSHYNALGHCAGKLVRVIWKMLTGEVEFNLE

SEQ ID NO: 376271 - protein, 409 aa, unidentified
METMHERCAGLDVHKDTVVACVRIASGRSAQREVKTFATTTSALLDLHDWLHGCAVTHVAMEATGVYWKPVWHLLEDTFELVLANASHIKAVPGRKTDMNDATWIADLLAHGLIRASFVPPTPIQELRDITRARKQLVQERTRYVQRIQKVLEDANLKIDSFITDLLGKSGRAILNALVEGYTNPEVLVSLTSGRLKASRAELLEALRGRVTKHHRFMLKLHLRQIDQLDRSIQELEAQAREATAPFRHRVAQLTAIPGISETAASVLLAEIGTDMSVFPSAGHLLSWAGMCPRSDESAGKRRSTRLRHGAPWLKATLVQIAWPATRRKDSYFRALFHRLKSRRGPKKAIVAVAASILTTVYHLLRDGTVYQDLGMSHFDSMNRDRAAKSLVRRLQALGFAVDVRPAAA

SEQ ID NO: 376272 - protein, 389 aa, unidentified
MKIFVGIDIAKLNHFAAAISSDGEILLEPFKFTNDADGFQLLVSKLESFDKNSIIIGLESTAHYGDNLVRYLVAEFYQVCVLNPIKTCQMRKNNIRKTKTDKVDTFVIAKTLMMQDDLRFVSFYDLDMMDLKALGRFRQKTIKQRTRLKIQLTTYVDQVFPEIQYFFKSGLHQHAVYALLKEAPSPKEIASMHMTHLANLLKVNSHGHFTKEQAKELRVLAQKSVGANDSAISIQITQTIQQIELLDSQLEKIEAEMTDIMKFNDSVIMTIPGIGYINGGMILGEIGDIHRFSNPNKLLAFAGLDPSVYQSGNFQAKTTRMSKRGSRVLRYALVNAAWNVVRNNATFKAYYDAKRAEGRSHYNALGHCAGKLVRVIWKMLTDEVEFNLE

SEQ ID NO: 376273 - protein, 472 aa, unidentified
MLADFYGGILIPPTVVEHNKQGFDSMIAEIRSAIQSHGLGDVLVAIERTGIYHLPVKRACVSNQFDTRIVHPLTTKQYRLPADPGNKTDDTDLFAIHRATTNGFGLIELPLDEIHGPLRLLARYRRSLVRKNASLRNQIIALLDVILPGYTGIFNDVFNNQAALSIARSVPSASKVRALGSEGLAQILTELKVRSQRRTLKKILDWANGIDSTTEYSEMYHTILVHLDDERCGRLQHIAKLEQEMASFLVRTAYVVLLSIPGVSIVTAAEFAGEMGPITNYANDQAITGRAGIYPSRYQSDKVDRCDGPLVRRANRKLRGVIMMIADNLLSCNRFFQALKAPWVAAGMEQQAMCVRVAKRFCRIAYQMVAGGQVFRHPSCQKRDAILRKLSIFHSEHGSSMAQVMTDLQAATDHIPKSEHAPEAKSLYEELQPSTRRQQCGPRRLGEILPVVLAKLGVNAVDLSLKGENDLT

SEQ ID NO: 376274 - protein, 345 aa, unidentified
MKHYCALDVSVRETAVCIVDETGKICRETKVATHPEDLISVIKDPKWQIERIGLEAGPLSQWLYEGLAKAGLPVICIETRHAKAFLKAQPNKTDRNDARGMAQMMRVNLYRPVHVKTLTSQKHRALLTARKLLQEKAIAIANDIRGLLRNFGLKVGLVGKIKFEERINELVEDRPDLHEIMQPLLAARKLLRDEFTKLHKKVLDLVRDDEVCRRLTTIPGVGPVVALTYTATIDIPGRFAHSKAVGSVLGLTPKLNESGESKRVGRVSCCGDAMMRSLLYEAAQVLLVNVKKWSWLKAWAMNIAKRRGRQKAVVALARRLAVIMHRMWSDGTEFCWTRESLPGAA

SEQ ID NO: 376275 - protein, 388 aa, unidentified
MKVLADRPEAPSAIHTDLRAIFVSMELSRSSWLITSVSPGGGEKMSKHAVAAGNIAGLREWLAQLKEKAHARTGRDYQIITIQEAGLDGFWIHRVLQSECIESHVVDPASILTSRRRRRAKTDKIDGEMLVRALLAYKRGEPRVCAMVKVPTPDEEDRRRLCRERKTLVAERVEHVNRIKGLLFTQGIYDYDPLKRKRRAQLEGLQTGDGRPLPAHLKAQICRELERLEMILTQLKTIEEERDALLSPASDKALTTPAAMLLQMKGIGAEFAAVLWSEGLFRHFDNRRQLAAYAGLAPTPWQSGSIAREQGVSKAGNPRLRTTMIQLAWLWLRNQPGSALSLWFQDRVKRNGGRLKKTTIVALARKLLIALWKYASHGVVIEGAVMKA

SEQ ID NO: 376276 - protein, 400 aa, unidentified
MRRPVYDRSSVGSFNQIQRTRGAKRRPALKKNTTSSARPKKARQTASNKTTAKLTVGIDLGDQNSAYCVLDADGDVLSEGTVRTSESGFTQQFQSISPCRIALETGTHSPWVSRLLQKYGHDVIVANARQVRVIYESDRKNDKVDARTLARLARIDKDLLHPIRHRSEKAQADLAMLRARDALVQVRTKLMNCARGMVKSVGGRLPGASSACFAKKVREHIPAAIRDALTPVLDEIEQLAGQLREYDKRIEEMAKAKYTQTQLMRQIPGVGVITSMAFTLTIEDPHRFSKSRDIAGYLGLLPRQGDSGDSKPQLSITKAGDHMLRRLLVGCAHYILGHFGPDSDLRRWGLSLMVRGGKNAKKRAVVAVARKLAVLMHKLWVTGEVYEPLREANRIKAAAA

SEQ ID NO: 376277 - protein, 329 aa, unidentified
MSEATQLKRFSQSPDPDALYAHLVRNYPEAEYHSVYEAGFCGFWIHYRLVGLGIHNIVVNPADVPTTTSEKLRKTDAVDSAKLARSLRAGELKGIYVPGSESLEIRSLIRLRDSITKDQTRLKNRIKSHLRYLGIEIPEEFSGPGRCWNRRFVVWLKGAETGTAYGRQTLDFLVRQYEALRGQRLEMLRAVRALSRTERFEKPLENLMTVPGIGQLTGMSLLSEIDDIRRFKSADQLAAFIGMIPMCHSSGEREGVGDITVRRSARLRSVLVEASWVAVRQDPALSMAYGSYCKRMAPGKAIIKIARKLVNRIYFVMKRNQPYVKCVVA

SEQ ID NO: 376278 - protein, 325 aa, unidentified
MIISNQAKKIKSDTIIGVDISQDKFDIAITSKEGPVHTFANDPKGHQNFIKLIKPLKPKLILMEATGKCETRLALALQKAKLPFRIENPAKMRSFSRSMGMLEKTDKIDARMIALAGERLDISAKSSKLNHLIIKLKEHVRTRFTLIEELIRLENIMDRMLDADLKMELLKLHTRISESKEIVEKKIKKIIDSNEEFSSRYKLLTSVPGIGFVTAVTIIAECEELGETGRGQLAKLAGLAPLANDSGKMQGRRHIRGGRKNLRNALYMAMLATVKYNPKIKAFYERLKSKGKPPKVAMVACARKMLGLLNAMIKHKKGWNEFADC

SEQ ID NO: 376279 - protein, 342 aa, unidentified
MTHYVGLDVSLEETSICVIDEDGQRVWQGKTSSEPAAIAKKVKLHAPELIKVGFESGPLSTWHWHELRGLGLPVVCLDARQAKAALSLQLNKTDANDAHGLAQIVRTGWYRKVEIKSIEAHLVRALLTSRSKLVEVRTRLSNQLRGILKTFGLIVGKTSGGAFEKRVRELTKGHIGLESIMESLLSVWHCTCEQIQVLDRQILAHARADEVCRRLMTAPGIGPVTALAYRAVIDDPSRFKKSSSVGAYLGLTPRRYQSGEVDRSGRISKCGDGLMRSYLYEAATVILSRMRKWSSLKAWGARLARRVGAKKARVAIARKLAVILHRMWIDQTDFRWSASQEA

SEQ ID NO: 376280 - protein, 357 aa, unidentified
MTQSNRISFKGQNIYIGIDVHLKSWSVTILSETSVLKRMSQGVDPDALHRFLISHYPEAEYYSVYEAGFCGFWIHDRLMELGIHNIVVNPADVPTMSSEKLRKTDAVDSRKLAVSLRAKQLKGIYVPDSETLEIRSLIRLKNSITKDMTRQKNRIKSQLRYLGIDIPAEYLEPHSNWSKRFLNWLKQVAMRTLSGRQALDILIMQFETLRKQKAEMTRRLRALSHTERFEETLELLMTVPGIGQTTGLALMAEIVDITRFANAEQLAAYIGMIPMCHSSGEHKGVGDITLRKHAILRSNIIEAAWVAIRKDEAMQLCYLNNCKRMVASKAIVKVARKLVNRIYFVLKRHQPYVNAVA

SEQ ID NO: 376281 - protein, 415 aa, unidentified
MLFIGDDWAEGHHDVGAQDDAGKTLARRRLPEGADGIARFHEIVAFCLGEDAEPDPALVIVVIETDRGPWVKALAAAGYRVYPANPRQAARHKETVANSGKKDDFFDAGALADMGRTRRHQMRELAADGDAAEAVKIAARAHQKLVWERTRHLLRMRSALREYFPAALEAYADLTLGGKDALELLAKAPDPESAARLTVTQITAALRRAGRRGDLAQRARDIQAALRAPHLAQPDVIAEAHAASVQAAAAVITALNEQVKIMEAKVSGLFRRHPDAGLYLSQPGIGDITGARILGEFGDAPGRYATAKARRNYAGTSPLTIQSGKKKTVHARYIRNRHLIDALHAQALSALTASPGARAYYDGLRAREIGHDDAMRRVASRLTGILHGCLKTGREYDEATAWSHRAGTPEAAEAA

SEQ ID NO: 376282 - protein, 429 aa, unidentified
MSYRIAAIDVHKKMLAVVVSDVDVESEYVFERRKFSSNPEQLRLLAAWLLEQEAEEVVMESTAQYWKPVWESLERYWKPECEKRENARRKSGTLHLAQALSNRGRQGRKRDFPDAERLVKRLVAQELTLSFVPNPEQRLWRTVTRKKHQLRRDRIRLQNQLEALLEEAHIKLSSLVSDLLGHSAQRMLKAIAEGEINPATLAALADERLRATTAELCDALGACTELNPVYRRLVSMALEELRLINEQITRLDQEMAGLLKAHQDAVERLAEVPGLGVDSAQQIIAEVGPTAAAFPYAKCLASWVGVCPGTDETAGVNYSPRSPKGNRQMRRLLNQAANAGARTKGSIFEIVYRRLVPRLGHNQAIGAIAHRQCRLIWLILHERVRYEERGSGLSKRSKQLRTWKMIRELRKLGYQIEPPISEQDRTTVG

SEQ ID NO: 376283 - protein, 351 aa, unidentified
MDRYIGIDAHSESSTVVVMGPTGKRIRQQVMDTDAKVLIAFLKGVSGDKYVCIEEGQLAEWLVEALSPHVKDVAVVQPPEHGGRKSDLDDAWSLAERIRVGARGTYVFKPTTQYRALREAVRAHSTAVKEQTRAKNRFRALLRSRGVPKLDETIYEPESRERWIAKLPQAYRRRAEWLGQQVDATSEAHALAEKWLKEEGKKVADVQRLKTAPGLGDVRAAQIVAVVVSPHRFRKKRQFWSYCGLAIVTRASGEWKRSNNGQWRHVPGNVQVRGLNLNRQPLLKAVFKGAAISALSKNDHLRKHYDQLVADGTKPHLARLTIARQIAAATLAIWKKKEEYEPSKHYPTEAA

SEQ ID NO: 376284 - protein, 422 aa, unidentified
MKSIDFDDYAAFIGLDLADSKHDICLQKAGSQRRELSVIQHTPEAIQQWALGLLERFDNKPVALCCELKKGPLINALAKYPHIVIFPFNPASVAKYRKAFAISGAKDDPSDAELQCDLLQRHFNRLKPLLPDSPEMRTLQQLVEYRRRLVGDRVRITNRITSSLKNYFPQALDWFGTTHTVLFCDFLDRWPTLTSLHKVRTTTLQTFFNRHNVRRQTVIDARIDAIRSAQALTDDPGVIDGNSVVVKTMVAQLRVLLDSIKLVDNRIAELCNAHRDHSVFASFPGAGAVFSARLLAAFGDNYDRYTDASQIQMYSGIAPVLERSGNKSWVHWRYCAPSFLRQTFVEWAGESVRYSFWANAYYRQQKERGKPHQTIVRSLAYKWIRIMFQCWKHHRAYDESTYLTALKEKGSPLLQYATKVAL

SEQ ID NO: 376285 - protein, 340 aa, unidentified
MNITTVGMDLAKNVFHVVGLDEHGHEKMKKQLSRRQVLKHFANHPACVIGMEACASAHYFARELRKLGHEAKLIPPQYVKAYVRGQKNDTNDARAIAEAVRVPSMRFVTVKTVAQQDVQSLIRLREGAINARTAAANRLRGLLGEYGLVRGKSLSTLRRALPEILEAVSNGLTDVFRRLLAQERQHLLELDAHIDTLTAELTALSKQDDRVQRLQTAPGYGPIVASVFASVMGDGKQYRRGRDASASVGLVPRQHSSGGKNVLLGISKRGDRYLRSLLIHGARAVVNAAQKKDDPLSRWINHLREKRGMNKATVALANKLTRIGWAILRNGTTYQPAQAS

SEQ ID NO: 376286 - protein, 415 aa, unidentified
MALKIVYKICCGIDVHKTFVVACIASTNSKGITTYERHRFSTYTSGLKDLLQWLLTRNCKDVCMESTGKYWIPVYNILESDCSIVLAHPKYVKAIRGKKTDKKDAKWIADLFKHDLVAGSFMPPADIRQLRDLMRYRFKLTCFQSSEKNRLQNCLTVSNIQLGNVVSDTFGKSAQAILDKILENPEDTSFDLEPFVYRSLKKKLPELRDAIDGYITPEQAGKLKVIKAHYESLESRKAELEELILALAAPYQQELAILQTAPGISSGFTAIGIISEIGTNMEAFPSAKHLCSWAGLTPTNNESAGKKKSVRVSKAGCYIKPLLVQCANAVVKSKKHPEIRNRYLRLKKRRGHKKAIIAVARMLLTALYHMLKNGENYNAELYRKSDLPPIDCEITVEQALIIARNQGYRIKSATA

SEQ ID NO: 376287 - protein, 408 aa, unidentified
MNAVGIDVSKGKSMVAALRPMGEVALLPQEFLHTEVGLEQMAYAIVALGEDTRVIMEATGRYHEPIAAALHEYGIYVCVLNPLFIKQSGGGSIRKVKTDKADAMKIAKYGLDNWVDLREYTPMDTVRQQLKLCSRQYNLYMKTVVSLQNNLISLTDKTFPGVNELFSSPEHADGHQKWVDFVMTFYHCDCICRVSGKAFTERYQKWCKRKGYHFSAEKALDVYAGSCGHITTLPKNDNTKLLIATAAQQLLSGKMTLAALRAEMTRLAKQLPEYDTVRAMYGVGETTAAQLMAEIGDVRRFPRRSSIVGFAGVDPAVDQSGKHSAKSVPTTKRGSPHLRKTLYQIVCTYLKRSPADEPVYQFLDKKRAEGKPYFVYMTAAQNKFLRIYYARVKECLEAFDERQDTVQN

SEQ ID NO: 376288 - protein, 311 aa, unidentified
MSSSVGIDVSSATLAVHIRPEGVNFSVSNDLKGFQLLVEKLGGYAVSMVLLEATGGYECNVLKALQDADFPVCRINPSRARDFAKSMGKRAKTDPIDAAVLAHLAEVMPPRPCQVMTPERALLRELLMQRDRFVQQRDDDKRRLKQARAISVCLRLEQHIAYLKGEIRALEQEIAQQAAALPDDRVKQLTQVKGIGLITAGKLMALLPELGQVDKKEIAALVGVAPFNQDSGKQSGKRSIWGGRSQVRRALYMACWVVIRHNKDFSERYNALRAQGKCAKVAVVACMRVLIVRLNAMLKTGAPWQEQVVHS

SEQ ID NO: 376289 - protein, 362 aa, unidentified
MTQFIGCDTHRKYSVFRIQAETGPMGPAIRVDHEKGELERFLEGLEPGSPIALEAGLNWMWMVEQIEKANLEPHLTNPLEAKKRIGGVNKFDSKDAAGLLTLLRSGTLPEVWIPRGNQRDLRGLMRSRLVIRRHISAFKCRIHGVLTQYGLKPFADEEEEIEYRDWFTVKARFALMKVIDELPSATREGMRQEYMAMADMERHLKSQETAIQARVGKLGWLRLIRSMPGVGLVLGATIWTEVGDVKRFAGAEQLAAYAGLIPRTHSSGGKTWRGPTSRACNHYLKWAFVEAANVIAGKRKSMEAKHPHVVRLYERVKGNTKISGKAKVAVARHLAEACWWILTKKQDYREPTSAAVASSTNG

SEQ ID NO: 376290 - protein, 473 aa, unidentified
MDFVGGRTQGEYVERTRDQDPARCLVAAVDVGKSAALALLADHHGALVGAPVEFALTEPGVARLEAALAAARAARDAVSLRVGVETAGHYHRTLVARLVSGAHDVVELNPAHVKAARATLGSRRLKSDLRDAAAMVELLVRGAGRRPQIRDAAMAAQSAWVAHRRRKIAARTALGNQLLGTLDLVFPGLDGCFGDLLGARAGRLMVAQLADPDRMRRLGVDGLRRFCHRRGVALRRPKAAQLIGAAQAALRLPAGEHAVRLAMLASEVALLAALEADIAAAEAELASVLPDTPAGVLSSLPGVAVIRASAYGAALGDPARYPDAAAAYRASGLVPAAYESAGRARGRQAISREGSVELRRAILELGRGLGRSEPDFVRYRRELTARGKPAGVVAIAVAHRAHRLAFALIRTEQSYDAGRWATSVATKGERKERQAGGPVRTTRRQAASRDDVTRPPGSTVPAAARPDNLAVPV

SEQ ID NO: 376291 - protein, 385 aa, unidentified
MPSPIADGKGQPSLTLHRYGVGVDCHWRFFQVCVLIPNGTEIVKIERHVPAVWPELHAAKEWILRTLKEHGIELSPSDLRYTCESTGQYHMPLCLAWRGRPAIINPSDTGHVRPKTDRLDAEKLAQHSLHGLWRESWMAPDEIQELRMLANQRSKLVAERSRLTNRINSDLLRFGHVVGQLGKINGPVVRGLIEDFCANGSVAVHRDHFSDTRIPAGVVRVFDQRWKRIDALDQEIKMIEDLCTKQADDLTWRIGEGRTASGRQLRANLESIPGVGPQTVITWLGEIGDITRFGSVNKLLAYGGLDPSDQISAGKVTGTKTRKGNAQLHGALRNAARAMLAHAPSCKFATWARVHGASLPSRQVETSPCVGTADRQGVVLLPSQK

SEQ ID NO: 376292 - protein, 369 aa, unidentified
MNDITYVGLDVHKATVSVAIAESGRGGEVREVGVFENRPDVLRKMIARIGKHRRRLNFCYEAGPCGYGLHRLLTGLGHDCVVVAPSLIPMKAGDRVKTDRRDALMLAKLHRAGELTPIWIPDAAHEAMRDLVRARATSVRALSKARQHLQGFLLRHDRIYHGARPWTLAYRRWLTTVRFDHPAQQIVLQDYIHAVEDAESRRDRLTRQIEELMPSWSMAPVATSLQAMRGVALVAAVTVVAEVGDFRRFTNARQLMAYLGLVPSEHSSGSTVRRAGITKAGNALARRVLIEGAWTYRMSARVSRKLYDRLEPLSAAIRDIAWKAQVRLCARYRRLVAIGKPKVVVTTAIAREMVGFIWAIARVAQPELI

SEQ ID NO: 376293 - protein, 315 aa, unidentified
MVTGIDCSKDYFDITVLKDGKAVFKGRFSNNAVGFRDMLPHVLQTHVVMEATGPYYFQLARFVHDSGIKVSVVNPLTVRRFAQMRMSRAKTDKKDAMVIAEFAQMTSPRLWEPPTEAIQHIRNVETYLEGLKQRRHMLSNQLHAFEAAGTIEELLYKEIKEELENHDNRIRDKERHIEQLIKENYAEMATHIRSIPGIGPRSVSMLIIATGGFGMFENYKQVISYFGLAPRIYESGTSVRGKGHICKMGMGQVRKVLYMAATSAIRCNKACKNLYERLRSKGKPYRVALIAAVNKLIKQVFAIAKSGKPYIPQFG

SEQ ID NO: 376294 - protein, 427 aa, unidentified
MVQTDSTAEPQFAAFVAIDWADQKHAWSLQAAGSDQRESDEMKHTPEAIGAWVSMLSARFAGKPIAVALEQSHGALVFMLGKYANLHLYPIHPRGAAQFRAAFYPSGAKDDPVDADLLLDMLVLHRKHIRPLRPDNEQTRLVQHQVEARRRLVNEKTRQILRLTAKLKLYFPQVLEWFDKVESPLVGALLRRWPTLPDLQRARPETIRSFCRRHNCRDAERIEERIQKIHQAVPAITDPAVVQPAVTMTRNLVELIATLHAGIAELDQQIAQATAGHPDFGVFDSFPGAGPVLAPRLLAAFGSRRERYATAAEVQKLSGIAPIVKRSGKAESVHFRRACPKFLRQTFHEWAGHSIAFCDWARVFYQQKRDKGLDHHAAVRALAFKWIRIVYRCWQDRVPYDDYRYVASLRRHGSPIAAALDAASSPE

SEQ ID NO: 376295 - protein, 392 aa, unidentified
MLYLGIDVGKFSHSLCRLSGDGEDKTIWQMTNDRSGFEQLKERLKDVSREEVLIGMEATGHYFLNLYDYLLQLGFLADRIALLNPLQVKSFRNTNLRGAKSDNVDAERIASLLRFGDFDRCNVTIDSLMNLRELTRLKADLVANSGDLKRKIIAVLDRIFPEFAAIFSNRFGTTAMALLTDYPTPEELSELSLEKLTKVIKGLSKRGIGKKKIELLHAVAKNSIGISFGKEAFKIELDILLARLKVFQEQTDFLESKIATLVQEVNSPIFSIPGIGPSTGAAIISEIGNINNFSSAIKLIAFAGLDPKLKESGAYQGRTSISKRGSKYLRNALWYSAMVTCRVEPTFKKQYQKRRFMGRSHRYAVTAAANKLTKVIYHILKNNCSFDSTKLA

SEQ ID NO: 376296 - protein, 355 aa, unidentified
MDPTKYIGMDVHQASISVAVRDAAGKLVSESIIETKASSILEFVRGIRGSLWITFEEGTSAAWLYDLLKPHGTKVIVCNPRKNALLNAGSKSDRVDARKLSDLLRAGLLTPVYHGENGVRTLRELGRSYITITKDLTRVMNRLKALYRSWAIPCPRTKVYSRRHRNTWLEKLSEAGVRRRAEQLYQQLDALRNIRQEVRAELLAESQKHPAHQLLRQIPLLGPIRVALLIGLIQTPHRFRTKRQLWAYCGLALQTRASGEYRFSAGELQASKKAPALRGLNINHNHDLKNLFKGAAMHVSTSTDPLGDFYRNLLAKGMKPSMARLTLARKMAAIVLAVWKKGVGFDPGELKQKAA

SEQ ID NO: 376297 - protein, 346 aa, unidentified
MKTVALDVHSESSQMTVVSPAGEILLEMKLPTQPEDLRRVIAGIDGPKRVVFEEGPMSGMIKDALAGAAEEIVSCDPTHNALIARAEDKNDERDALRLAVLSQAKAIRPVYVPPEPYRTLRSLVRYDHALARSIVGAKNRIKGLCRRLGIRCRGVRVYGAAGQKEALEQISDAGLRWQAKSIYRQLKVLRTERLRARSVLLRQSRKFPEMERLKSIPGVGPVVARTIVAWVVDPHRFKSRNALSSYGGLGLGQGWTNWQPIGRARASKKGQRELKRVLFIAARGALLGENSLNRRYRARIRSGWEDRKAIRDVARCILMTARAVWITGMAYDDAMVSVPQVESRCR

SEQ ID NO: 376298 - protein, 348 aa, unidentified
MMIVLGVDAHKRNHTVVAADGLGVQVGVLTVTATAEGHLCLLAWAGQFGSRRWAVEDCRGLSRRLEADLLCAGERVVRVPPGLMADARRGGRTRGKSDPIDALAVARLALREPDLPQACLDGESRLLRLLVDHRESLVAERTRAQNRLRWQLHELEPGWDPPASSLSSPLTLRKLQDGLVGYQGLVADLAREEVAHIAELTRRAGDLQRRIVQQVSGLTPSLLQLPGCGPLTAAKLVGETAGIHRFSTPDKFAAWAGAAPIPVWSANSERFRLNRGGNRQVNAALHRIAITQLRCHPPAQAYLKKRLAAGSTKAEALRALKRHLADIVYHHLQADTATTGRQPQQAAA

SEQ ID NO: 376299 - protein, 341 aa, unidentified
MAKYIGLDVSMKETAVSIRCEGKRIWRGKCASDPKIIAQLVRKRAPGVERIVFETGPLSVWFWHALTAEGLPAICIDARHAAKALDMAPNKTDANDADGLAQLAEIGYFKQVRVKTFDSMLTRALVAARTRLVQITVELSNQIRGLMKTFGLVVPAGRGSVFEKNVRDLLADEASLARIILPLLESWRSLRQHVAELSRQLISEARQSQDCQILMSIPGVGSITATSFMAAIEDPANFRKSRSVGAWLGLTTRRYQSGEIDYDGHISRRGDKHLRGLLYEAAVTVLTRSQADSGLREWGLKLRERIGFKRAAVAVARKLAVIMHTMLKSGELFDPAIGATA

SEQ ID NO: 376300 - protein, 454 aa, unidentified
MKKVKNAPQPKVQANLQIVFPNAAGLDIGASEIMVAIPPDREGVTVRGFGTYTPDLAALADWLKEGGVTHVAMESTGVYWIPIFELLEERGFEVIVVNARHIQHPPGRKSDVMDCQWIQQLHAHGMLRGSFRPEADMCTLRAYLRHRDNLLEDRAKHIQYMEKALLQMNLQLGQVLSDLTGETGLAILHAIVGGEHDPLVLSRMRHGNCKHSQEDLIKALTGHYRKEHLFVLKQALEMFASFSQRLQECDQEIERLLEEIKPELPDDFPPLPPDPKPNSHCKNAPSYDARALLYPLAGVDMMAIPGMNEILLQKILAEVGLDMSRFPTVKDFCSWLGLAPHNAISGGRILYSHTLKNHNRAGQCFRLAARAVSRGKTVYSEFYRHIRARSGAKEANVATAHKIARTFYFMLLRGQPFLAPDLQTFLQVQREKDIRRLQARAAKYGFCLQPVEVA

SEQ ID NO: 376301 - protein, 452 aa, unidentified
MVKKEKKDSNKMITMPVVNPNAAGIDIGSRSHYVCVSQDNVKEFKSFTTDLHEIAKHLEFYGVKTVALESTGFYWQQLFTLLQSYGFEVILVNARHVKNVKGHKTDVVDSKWLQLLHSIGLLSNSFQPDIFTKELRQYIRHRKSLIETSSRHVSKMNKSLVLMNIQLKTVLRDLTGESGLKVIRAILQGERNPGRLAENVGENVKASRKDIEKALEGNWREEHLFELEQNYSLHQFIWAKIRETDNQIEVLLKKKGDHGNKETKSKPYVKHKVRQKNDPYFDVASYAYQMTDGVDITQIDGVGIRTVMTLMSETGFDLKSNFHSAKHFSSWLGFAPNRKITGGKTISSNTPKVKNPLSKAIRDAANAAGNSKGKLGDFFRRIAYRKGRVVAIIATARKISVIIYKMLENHESFCYEYSKQESKRFKQIQINKTIKSIKKLGMSQLDLAVVLK

SEQ ID NO: 376302 - protein, 371 aa, unidentified
MSDVSSNQPAEVRLWVALDVHKFSIVAATLPPAGGAPEVQRIETTERAIRRFVDRLGGPDGLAICYEAGPGGFDLLRLLTRIGVACDVIAPSLVPVRAGDRVKTDRRDAKKLVRLFRAGELVFVQPPDEQTEGLRDLMRCRDDLRCARTAARHRVMKQLLRHGRIYRDGKKAWTQRHRAWLAHQQLGDRLAQQALEQMLCHLDGLDRQLDALDRDLERVAAEEPWRDRVHALVAFRGISTRTALGLIAEIGDFRRFGHPRELASWLGITPTEYSSGDQQHRGHITKTGNRHARRLLVEAAWHYRHRPRRPDRGPQPTDRAWQAQLRLYRRHRDLAEHGKRSTVATVAVARELAAFIWAAMTDQPARQEATA

SEQ ID NO: 376303 - protein, 342 aa, unidentified
MEITTIGLDLAKSVYQVHGVDAAGNVVLRKALRRAQVLPFFGKAVPCLVGIEACGTSHHWARELAKLGHEVRLMPPAYVKPYVKRGKNDANDAEAICEAVTRPTMRFVAMKSPEQQAALALHRTRDLLVKQRTQLVNMIRGLLAEFGIEIVRGLHHALELAARIASGTAPEVPELAVRVITGLAGQIGDLQVRLTALEKELLAWHRSNELSQRLGTIPGVGVISATALAASVTDPGRFRSGRQFAASLGLTPLQNSSGGKERMGRISRMGDRYLRRLLVVGMTSLVRRARAKPDSVDPRIAAMLARKPARVVTVAAANRTARVAWSIMARGGTYRAPTSVAV

SEQ ID NO: 376304 - protein, 340 aa, unidentified
MNFVGVDLHKKTISVCVMSQVDNSREVNARRRFHCADEDKIVDFFRDLGPFQVVVEATASYEWFVQLVEPFADRVVLAHPKKLRVIAESTKKTDKLDAQILAEFLALGMIPESWRPTPRVREHRTLVRLRYYTKKRTTSVKNKLRRVLADYNADVRELFTKRGRQYLAGLQLTEADRFHCKLLQQELDQHAKRLTQVDKKLARFAKHAPVVEREARRILNTIPNVAQVTTDVVLSEIGDVRRFGSQRKATAYAGLAPGIRESAGRAKHLGITREGSHLLRWALVQTAWRMVNRTRRWGSLYDRLKKRCGAKKAIVAVARRLWCMMVAMLKSGQEYRYGAT

SEQ ID NO: 376305 - protein, 369 aa, unidentified
MNKFSKYVGLDVHQETIAVAVADTAGELRYMGEIVNTPEAIAKLVAQIKRGTGRLSFCYEAGPCGYTICRQLLELKQDCQVVAPSLIPKKPGERVKTDRRDALSLARLHRAGELSPVWIPDEAQEALRDLTRAREDMKHLQRQAKQRLLSFLSRHGHRYAGRSRWTQAHWRWLEGIKFARPEQQIVLQEYIDTVQACGSRVASLDREVETAAHASPVWPVIEALMALRGICLLAAVTVVAGLGDLARFAGAPELMAYLGLVPSEHSSGKRERRGAITKTGNSHVRRVLVEAAWTYRHPARKTAILQRRAERTPPEVQEIAWSAQKRLCQRFRNLMARGKLKNQVCTAIARELVGFIWAIGQHVAPLSRA

SEQ ID NO: 376306 - protein, 426 aa, unidentified
MKNTSLSLVSEVKIAIVSCDVSLDKLNLVCPSLDRPGFKARWEIANGSEAIRSTLDSILHRAHLEGYEQLSVVVEPTGVYHRLLLRIARSLGCATHLVDASHVVKMREVLFGDPGKSDERDPQAIDAVARQGRLIIDRQVPEVYELLRHRSKLYEDAECAIIDAKARVHRIMVLLFPDFSFTTDFLYGPSGSAIYRCYGLNPHRLAGLKAARVYDRLRNHSKILRISVDRLLANARLSVTTTESGRRNELLEHELDLAWHDLELASERREVEREAIEALYEEARQSDPRLPQAQTGVISAVALGRFFAETGPLSDYQSWRQVLRMGGLNLCERKSGKYVGQTKISRRGRPRMRTVLNHIALPLVKRNGLFGTYYHHKTEKEKMPGKKAMTAVSRKLVKMLWGWYHSGEAFDAGRVFVCEAQYRAAA

SEQ ID NO: 376307 - protein, 299 aa, unidentified
MHQSRTLDVGMDVPTESSAVAYVAKEHDAEVISLGTFGTRQCDSDTLMRKLQAQATHLVCVSEAGPCGSGLSRSLTKKDSVCWVVAPSFMPQKAGARVKTDRRDARPLARLLRSGDLTPVSVPAGAAEASRALRRAREDTRRDRKAATLRLKAFFLRHDIRDTGRATWSPAPLRWRSEVGWPTPAQPSVLQAYVQTVTEQRARLGRLALARHEQGKTWRFAPGVEALQALRGVQCPVAGTTGAELGDLTRVETPRQLRHSLGRTPSAYARGARRQQGRLTQTGHTHARRALGEGAWAYR

SEQ ID NO: 376308 - protein, 394 aa, unidentified
MRFVGIDVAAERHVVAVVDETDRVLLKATPFTEDADGYAKLFEVLGVPTDALVAMEATGHYWKNLFAALVAGGFAVALLNPLRTRRFAGEDLQRTQTDAIDAVGIARFAAQKRPPASRLPDRATEELRELVRFRDRLRQDFGDRVRQLHRLVDLGFPEFTRHVRDLGSELATGLLREYPTAAGFHGVPVRRLAALRYDGRHKVGDALAASLIAAATGSVGRHHGEAYRIQVRYTCEDLDVLRRRLRDLERDIDRLLERHEIGRLLTTIDGIGPQTSARLVATFGDFSSFPSAGALASYVGAVPALKQSGKRTFQRASLTPIGAARLRAKLWMPVLTAVRTNPWLRAYYERLIARGKLPKVALVAAMRKLLHAVYSVATHRRPFVANLVTAEARP

SEQ ID NO: 376309 - protein, 344 aa, unidentified
MEYFVGIDVSLRSCALCIVDGKGTVLLERELPCEVSDIAECLGTFPHPIERVGFEAGTMSQHLFHGLKAEGFHVVCMEARQVNAALSAMRNKTDRTDARGIAQVLRTGWFSPVHMKSREAHGVRALLSTRKALLKKTMDLANEVRGLLKIFGIRLPMTVKHGSFDGVVRPLIEMDDVLAHALVPLLDARVVLYQHFLELDRRAKRAASQDEVCMRMMTVPGVGPIASLTFKAAIDDPTRFKRSRTVGAHFGLTPRRYQSGEHDNPGRISKAGDRDVRATLYAAANALLMRTMAGSQIKSWGMRLIRTKGRRRAVVAVARKLAVLLHRMWIDGTEFRQDQVGGTA

SEQ ID NO: 376310 - protein, 416 aa, unidentified
MNSSAYAALVALDWGDQEHAFALRSEGKHETGTIAAAAESIHPWLEALGQRHGYRPIALAIEAGKNALLHALTAHPWLTIYPIHPATSERFRQAFTPSGAKADGPDAEVLLTVLDQHRDQLRALNLDTPQTRALAALTEVRRNAVDHRTQLSNELRSTLKLYFPQALELFGDDLWTPLALDFLARWPELAAVQRAKPATVQMFYTEHNSRRQTVIAERIALIQQARPMTTDRAVIAPAILQVQLLVAVLRPLQQHLLGIEAEIAEAFAAHEEVDLYRDLPGAGPALAPRLLVAFGTVRSRYPNASSMQKYTGVTPVTERSGRQIWIHWRWNAPKFLRQTFVEWAGQTIPKCAWAKAYYLQQKRAGKHHQTILRALAFKWIRILWRCWQDRTPYDESRYIQSLIRQNSPLKKYLLAA

SEQ ID NO: 376311 - protein, 329 aa, unidentified
MSNLLKKVIGVDVGAKFLTVSFNDDSNQNQVQNIENNQRSILAFLKKISREDYCFVIEATGNYSSRLLHLSLSKGFESSLINCMSVKHFSRMKNIIIKTDAEDAKLIKLYGEMFRPEIYVPKSIQIEHLDQEIKLLNDLEEEKRRYAVKLKALRYNPHLNPNTEKHYEKRLKQLEKEVQEVELRLPQLQDEEFKEIKNLIQSVSGIGEKTSLQLITATSGFKNFDSAKSLVKYFGLAPRIYQSGKKSYSPGKCRTSKTHIRGMLYVCSWTAMKHNIPCKELYLRLLAKGKPKKVALIAVCNKLLRICFGVVKNKIAYQQDYQKNLKILT

SEQ ID NO: 376312 - protein, 322 aa, unidentified
MRYIGIDVSKATFVVAYSSDKGGEIRTFNNTTTGIKQFIGALPKDGSIHCVMEATGNYSALLLYMLNVAGITVSMENPLKVKNFAKAMLSTIKTDKSDARLITLYGEKMNPRPFKVQGEAILRLRQKRTVIRQLTKQITAMSNLRGSLACLPVPDKGATHTVDETIKFLEKRRDRLQSELTDLVEVEFSRQLALLTTIKGIGITLATALIITTGGFTYFQNAKQVSRYLGICPTYEQSGTSVNIRGHINRNGDAYTRGLLYVAAWTASRFNTKCGETYTRLRQNGKPGKLAMIAVANKLVRQAFAVVTHDKEYVDGFVSNRP

SEQ ID NO: 376313 - protein, 374 aa, unidentified
MKTVRSFVGMDVHKATISISIAEDGRSGPVRFLGVIPNTADEVAKLAKRLAKHGELDFCYEASGCGYGIHRQLTALGHKCMVVAPSMIPRKPGERIKTDRRDSEKLAILHRSGDLTPVWVPDTTHEALRDLVRARVDASMHLMRARQQLLAFLLRHGRSYPTGKHWTQRHRSWLAGQTFQEHAHGIVFQDYLETVWTTQQRRDALIDRISAMVGSWSLGPLVEALRGLRGIDMISAATFIASTGDLSRFESPRLLMGYLGLVPSEHSSGGTTRRGGITKTGNREARRMLIEAAWSYQYPARIAKEKAEILVRLPKNIRDIAWKAQTRLCTRYRSMVARGKKPTVVVAAIARELAGFIWAIGQEVRCSNLSVVGD

SEQ ID NO: 376314 - protein, 401 aa, unidentified
MHAVIGIDVSKATSQVAVAVDGKVVQNFKIAHDVFGFNQLNTVIMQFNTFPDIVFEATGIYSRRLKTFLEAHNYPYTYLNPLTAKKQLDQLRPNKNDLNDAKHLAETQFILKRAKSYVQKPIYMELQDMSRFYQQLNHDIVSAKNRLHRLLQLTFPEIETLFSTTDSQQYWEIVSLIPHATMAKHSRQTLSDTIQSSVSRQIGAARLTRLVDKLVALGSLSAPAVAVASYNVTEVRYYAQRLIALSQSKANVLATMVDQTKDLPEYDIYQSIPGFSDKTVVSLIAELGDLHRFATSNKLNAFVGIDLRFNDSGDYKSSGFITKRGNTIARKVLFKAISNIASTATYGHQNHINDWYQKKKQSSMSKGTKKIAIGAMSRLLRTMHYLVLNNQLYDYDTASKR

SEQ ID NO: 376315 - protein, 384 aa, unidentified
MRAPNVRTPIAGHNGTIFVALELSQRSWLVTMHSPDKDRFSRHKLEGGDDVGLLKLIERIRGRAEQALGGRMPVVSCYEAGYDGFWLHRRLLGAGITNFVFDPASIAVDQRARGAKTDRIDGELLLRTLMSHWRGEPRVVRIVHVPTPEQEDVRRTTRERDRLIKEQTAHTNRIKALLRLVGVAAGNPRRRGWVAWLKAQREHNGDPLRPHLVAELRREHARLMLVGEQLKELGRADTAPVSDGAAEMARRSAFLQRLKSLGPVFTASLTNEVFYKDFHNRRQVAAYIGLAPSPWRSGGTNREQGISKAGNPRARHKAIELAWLWLEHQPESALSRWFRERTAQGKGRIKRVAIVALARKLMVALWRFLTTGLVPEGAVLKAAA

SEQ ID NO: 376316 - protein, 342 aa, unidentified
MGEVSTIGLDIAKSVFQVHGVDVAGAVVIRKRVSRAKVLEYFGELPQCLVGIEACPSAHHWGRELQALGHTVRLIPPSYVKAYLKRSKNDANDAAAICEAVTRPSMRFVPIKTKEQQTALMLHRARQLLVRQRTMLSNALRGHLAELGIVSAKGRNGTAELLRIIADGRVLSPAVCGILKVLARQYGAIGTEIASIDKSIMALHRGCEASRRLAEIPGIGPIGATALVAEIGDWKTFSSGRSVAAWIGLVPKQHTTGGKDRLGSITKQGNRYLRWLLVVGAMAVIRYARKHGTQKRPWLGRLMERRPTKVAAVALANKIARMAWAIMVRGERYKEPKLLLAA

SEQ ID NO: 376317 - protein, 370 aa, unidentified
MSQSRTLFIGMDVHKESIAVAYVAQDHGAEVTYLGTIGTRQGDIDQLIRKRQSKAQHLIFVSEAGPCGYWLSRYLTKKDDDCWVVAPSLIPKKAGARVKTDRRDARQLARLARSGDLPVVYVPTVEDEAIGDLTRARADTLSDLQDAKFRLKAFLLRHDIRYTGQANWGPAHLRWLSEVVCPSPAQQIVFHEYVRAVTEHTERLQRLDQELHEHGQAWRLHPVVEALQALRGVQCTVAVTMVAEIGDLTRFDTPRELMKFLGLIPAEYSSGERRHQGSITKAGNTHARRALVEGAWAYRYPAKVSRHLPLRLETQPKMSQDISWKAQVRLCTRYRQLVARGKHAHIVTVAIARALAGFMWAMAQQLPVVA

SEQ ID NO: 376318 - protein, 325 aa, unidentified
MPTVLPALSIDVSKDILDVALWREDHPLASGRFANTRSGFDRLQHWISEQGFERVHVLMEATGRYGEDLAHALHEHGHTVSIINPVCIAGYAQSQLVRSKTDRGDAALIARYCWKERPAPWHPAREAEQSLRELTRAVEQLKRERRRLENQRQQAQHPTVREALRRSAEAIEQETACLEEEMARHIEADEALRRDRDLLLTIPGIGLATASVLLSEIGHARRFAHVRQVAAYAGLSVSHRDSGTSVKGRPRLSKKGSTRLRTAMYFPALAAMRHNEAIRALSQRLDKRGKQRKAIAGAAMRKLIHICYGVLKSGRPFDPALHPCF

SEQ ID NO: 376319 - protein, 341 aa, unidentified
MDHYAGIDVSLEYSSVCVVDANGKIAREGKVASEPEALIGWLRSVGLGLTRVGLEAGPLSQWLYVGMREAGLAVELLETRHVRHALDTMPVKTDRNDARGIAQLMRLGWFRAVHCKSMGAQETRSILTARKLLQQKLRDVEASLRGTLRGFGLKVGRTTPKRFAGRVKELVVGHASLEAIAEALLAVHAVLLREFNGFERRVRTMARHDAKAQLLMSAPGVGTMVSLTFASAIDDPGRFKSSKQVGAHFGMTPKKYQSGETDYTGRISKIGDKQVRTALFEAAHVILTKPVKGSALKSWAMRLAKRAGMKKAKVALARKLAVIMHRMLVDGTTFDFAAAAA

SEQ ID NO: 376320 - protein, 429 aa, unidentified
MSYRIAGIDVHKKMLAVVVSDVEIDSEYQFERRKFSSNPEQLRLLAAWLLEQEAEEVVMESTAQYWRPVWEVLERYWKPICEKREGTRRKSGTLHLAQALSNRGRRGRKRDFPDAERLVKRLVAQELTLSFVPDAEQRLWRTVTRKKYQLRCDRIRLQNQLESLLEEAHIKLSSLVSDLLGLSAQRMLKAIADGETNLATLAALADKRLRATPEQLCDALGACTQLNPVYRRLLKMALEELRLIDEQIGRLDQEMASLLSKHQDAVQRLAEVPGLGVDSAQQIIAEVGPTAATFPSEKCLSSWVGACPGDDETAGVNYSHRSPKGNRHMRRLLNQAANAAARTKGSIFEIVYRRSVPRLGHNQAIGAIAHRQCRLIWLILHQGVRYEERGPAVTKRSKQLRTWKMIRQLRSLGYRIEPPNPHPNQAGAQ

SEQ ID NO: 376321 - protein, 354 aa, unidentified
MNYVGVDIHKRYSVLVAVDERGRELARGRISGNSVHAFAQFFEALQGPGRVVLEACWNWGRIYDVLSEIEQVEEVVLAHPLKTRLIAEAQIKTDSLDALALATLLRGNLIARAHVPSKATRARKELLRQRLYWARLRTRVRNRVHAVLDRQRELEMPQCSDLFGRKGLNALSKLRLAEPDAILLGEELDLLKLIDSQIKAQEGRIVAFNANEQATQYLQSLPGMGKILAAVAAAEIDAIERFDGAAKLCAYAGLVPTTYGSGGKVHQGHLLKSRNKWLQWAFIEAAWVAVGCSSYFGGIYRYHRARGKKANIAITIVARRMCRIAFTLLKERRNFQEQHRTFPGRSAVRLTAAA

SEQ ID NO: 376322 - protein, 346 aa, unidentified
MEHYAGIDVSLELSSVCVVDAQGKIVKEAKVASEPEAVVAFFEALGFAVKRIGLEAGPLSQWLHAGLKRAGFEAVLLETRHVKAALSAMTVKTDRNDARGLAQLIRMGWFRAVHAKSIASQEVRALLVARKQLLGRLIDVELSIRGILRGFGLKVGPVTRKGFEARIRELVTGQAMLERIAGAMLSARATLKTEYDKLHKAALAMVREDAVCRRLMTVPSVGPLVAITYKSAMDDPNRIVKSKAAGALFGLTPKKYQSGEKDVTGGITRAGDEMVRTALYEAANVLLARITRFSKLKRWGMDVAKRRGSKRAKVALARKIAVILHRMWLDGTTYRWAAAEPIATQA

SEQ ID NO: 376323 - protein, 388 aa, unidentified
MPQPNDLSRSLVAFQQDSTLVAVVEMSRSSWLVAGIVPGIRRHPLKKLDSSEEALLALLGRWRDEAAAAGCTITRLAVAFEAGRDGFWLARWLRARGVEAHVIHPTSVAVSREHRRAKTDRLDTELLKRAFLGWLRGEPDHCSMAAIPTLGQEDAKRPSRERESLVGERTRIVNRMKGALARLGVRGFKPTLRGAPERLEALRTPEDAPLPPNTLAELRRDMARLRLVRDQIAEIEAARLERLRQAPAEDRPHAMVRLLARVIGVGIETADMLVREVLSRNLRDRKAVARYAGLTGSPDESGARRREKGLARVGNARVRRGMLQLAWRFLRFQGDSQLARWYRARTADARGGTRKAMIVALARKLLIALWRLASTGEAPEGVALRPVP

SEQ ID NO: 376324 - protein, 347 aa, unidentified
MKIIGCDFHPSFQQIAMVDLQTGEYTERRLTPEEARQFYAELKKPVLVGMEACGNTLWFERLLAGLGIELWLGDAAKIRALEVRKQKTDRRDAALLLRLLLEKRFPRVWVPTLEQRDTRQLLLHRHKLVGMRRQVKNELQHLALNQGVQQKRKLWSVAGRQRLQELPLAGWTARRRQDELELLDELDGRIAKLDIAAQQEASKDGVAKLLQTHPGVGPITALAFSLTLGTIERFARSRQVVSYLGLNPAEHSSGGRQRLGGISKQGNPLLRSLLVEAGQSAARSVPELKRAYQRLKHKKHSGVAKVMVARKLAVRLYWMWKTQQPYAAARTQGSPSHPVVAGRRPAA

SEQ ID NO: 376325 - protein, 356 aa, unidentified
MSQKSSSAIAVVGIDIGKNSFHVVGHDHRGAIVLRQKWSRGQVEARLANLPPCLVGMEACVGAHHLSRKLQLLGHNARLMPAKYVRPYSKGQKNDFRDAEAIAEAVQRPTMKFVATKTADQLDLQALHRVRERLVSQRTGIINQIRAFLLERGVAVRQGLRFLRSELPGILATRTDVLSPRIVRILEDLSADWRHLDARIEGLSGEIETLAHQDQHCERLMTVPGIGPIISSAMVAAIGTGEVFSKGRDFGAWLGLVPKQISTGDRTILGSISRRGNRYLRTLFVQAAWVVLVKLGPKHWERYGLKSWIEAAKKRLHHNVLAIALANKLARIAWVVLHKGRAFTCDKTDAMASRPA

SEQ ID NO: 376326 - protein, 412 aa, unidentified
MELTPIYKRVIGLDVHQAKISACAVAEQADGKVTVESREFGGFKRDRRALAEWAKSFGPEVVVMESTGIYWKSPYAALENVGIAAWVVNARHVKTVPGRKTDVADAQWLATLARAGLLRASFIPPADIRHLRLIARQRQKLGGMLSSEKNRLHKLLADAGIRLNVVVSDIHGEAARAMVKALIEGQSITQILDLAGRLRASRADLFEALQPEELSGAHLFVLTEIMAHIEELEARMGRFEQALLAGLSPWMPQLVLLQTIPGIDVMGAAMLLVEISADMQSFGSAERLASWVGICPGNNESAGKRKSGKTRKGNAWVRRLLCEFAQAAARSRCALKDKFAALSIRKGHKKSIVALAHKMLRIVFAVLKSSQPYHDRAVDYEALSVQRNAPRWMKMLLKHGFLEAGASPVTTA

SEQ ID NO: 376327 - protein, 387 aa, unidentified
MIFCGIDVAKLKHAVSLMDEKGLILKAAFTITNNRSGFDQLHKDLQAVGGIVTVGLEATGHYWLSLYDDLTRNHYPVIVLNPLQVAAYRKSGIRKVKRDASDAFWIADYIRVANLPPTEQNLPIFLQLRELSRFRFRLTEQVGDLKRKLLTILDRVFPEYEHQFSSVFLQASRAILQEAVSAQEFADFDLQELADVLNQASRGRFGLEKAEALQSQARQSVGIGFLTSSVHLEMRCLLAQLDLLDAQRGEIDQTIADLMQQIPQHITSIPGIGPVTGAAILSEIGDIQRFESADKLVAYAGIDATVYQTGQFEASEAHMSKRGSPYLRHALWCAATAAILHDPSLKAYYQKKRDEGKHHGTALGAVCRKLLGRIFVVLKEQRAYVIR

SEQ ID NO: 376328 - protein, 310 aa, unidentified
MDATVVGIDVSKDRLDVYVYPSAEDFSVARNAEGLDALIARIGPLQAQAIAVEATGGFETVVVASLGGAGLPVIVVNPSQVRAFAQALGKRAKTDPIDAAVIARFVAATKPEIRALPDSETRLLADLVTRRRQIIQMMVAERQRERHLPSRHLKKSVARLLKALEKELSALDQGIDETVRGSPAWREKEDLLKTVPGVGNIVARTLLAELPELGQLDRRQIASLAGLAPFTRQSGRWRGKSLIGGGRSSVRAVLFLSAMVAKKHNPPLKTFHQRLIASGKPKMVALVAVARKLLTILNAILRDQRPWQPA

SEQ ID NO: 376329 - protein, 514 aa, unidentified
MSEGTAQSPFSRLCPRLLRKHSAWLIRHIPLTQKFHPQPLAPAKMADWVHAHYARVRSPYAAQDKPFASGFTNPYRNGGDIMLKINYMSTLFVGIDVSSKSNSVYAMDFEENKYLSTSFGNNQPGADELVNRIAACMQKHKNLDTLLIVLESTSVYSVHISNFLASSEVLMPYKPYVFCVNPKATANYRKSYIGMEKTDPTDAYLIADFARVGRTKKLEPWRGGQFIALKRLTRHRMHLSECITREKTYMVSNLYLKFSELQLLEGDDKPFGNLYGATSSAILTEFLSPQEIIDMPEEDLLAFLAQRSRNRICDLSKTSELLRKAARDSYRLDKCMYEPLNISLASSFNCIQAYQKEIRLIEQAIEKCIKGMNPNALIILQSIPGIGPVWASGILSEIGDISAFHSSDALAKYAGLYWPKGDSGDFISEDNQMSKAGNPYLRHYFGEAANSIRKHIPEYADFYARKYAEVSKHQHKRALALTSRKFVRLVFGLLAKNQLYTGEKLDTEYNIESN

SEQ ID NO: 376330 - protein, 348 aa, unidentified
MEAPLIFVGIDVSKAQLDVAIRPSAQSLSVTNDRAGIKSLIKHLKKLRPQLVVLEATGGLERQVLSALIAGEIPVVMANPRHIRDFAKSIGQLAKTDRIDASVIAHYAEAVRPKPRPLPDEASLELRALSARRRQVLDMIVAEKNRLATASKVVKKRITAHIAYLEQELNDADQDLDRFIEKNAAWKENQQILCSTPSIGPVSNRTLLVELPELGALDRKKISALVGVAPFPRDSGTLKGRRTIWGGRASVRSALFMATVVATRFNPVIRDFYKRLKAKGKPSKVCLVACMHKLLTILNAMIKNKIRWSENLLTRPLDMKHSCYISGLRLRLARSCTGEFIPSADCGF

SEQ ID NO: 376331 - protein, 312 aa, unidentified
MNSVASEIGIDVSMDTLDISIGGGKAFLVKNDRNACEELAARLPRPCVVHIESSGGHERLVARVLRASGIEVRTHDPLRVKRISQARAGKAKTDPIDARNLASAGRLLPVRTPKTVEHDNLADHSRAIEALKDAAREFLVRARSAQLDSVAQSAYLDAAQTLRMRAETLERQFVARVKASSHATRYELALSVEGVGPCMARVCVAELPEDLTHLTTAQIAAYAGLAPIDNSSGRHTGRSRLGRGNSHLKGGCYMPAVSAVRHQPWATALYTRLKAKGRLHQQAIVAVMRRMLVRVAAVLKRGSPWEAEPVRA

SEQ ID NO: 376332 - protein, 454 aa, unidentified
MAQRKKRSKKFQVTDLPPQLQHVNLNAAGIDIGSDQHWVAVPEGRDKVSVHEFAAFTTDLLALADWLAQCGITTVAMEATGVYWIPLFELLEHRGFEVKLVDARRVKNVPGRKSDVLDCQWLQQLHTFGLLAGAFRPADQLCILRGYMRQREMLVQASSMHIQHMQKALQQMNLLLHNVVSDITGVTGMKILKAIIAGERNPKVLAKHRDARCRHSAATIAKSLVGNYREEHLFALTQAVSLYEIYQAKIGDCEAAVARHLSSQPQRTDDEPPTSQKRSQAKDFMRAEVDMRAQLFKLTGVDLFSIAGLGADTLLTLAGEVGFDMTPWKSEKHFTSWLAVCPGTKKSGGKILNSKTRRSSNRAAAAFRIAASTLLRSKTALGAFYRRLRARIGAPAAITATARKIAVLYYSLLKNGTTYVETGQAAYEQKYQQRRFKGMQKQALAMGYQLVPIN

SEQ ID NO: 376333 - protein, 320 aa, unidentified
MNSENFIGIDVSQSHLDVNVVPDGQAVQFVNDEAGVAQLVKFLKSVSPALIVLESTGGLETLAVSILSAKQYPVVVVNPRQVRDFAKATGKLAKTDKIDAAVIAEFAHALRPEVRPLKDDQTQLLSALNARRRQIVDMLTAEKNRLHRAPLPNRKNITAHIRWLEKNLTDINKDIHKTIRKTPVWREKDDILQSFKGIGPTTSASLLSDLPELGRLENKKIAALVGVAPFNCDSGRYRGRRRVWGGRSQVRRILYMATLSAVRSNPVIKSFYNRLRQSGKSHKVALIACMRKILVILNAMVKNNTFWQGPINLVDAKHSC

SEQ ID NO: 376334 - protein, 375 aa, unidentified
MKNKVRFFGLDVHAETIAVAIAEPDGEVRSLGTIANRAESIRKMVKKLGAAEQLKACYEAGPTGYVLYWQLAGLGVACEVIAPTLAPMKAGDRVKTDRRDAERLARSFRSGDLTPVWVPDEGSEALRDLVRAREAAKQDQLRARHRLSKFLLRAGQRPAAGVKAWTQLYMAWVRQLHFSQVAQESTRLDYLHEVEHMGERVARLEQAITEAVKQASPAVQEVVKGLQALRGIAQISAVTIAAELGNITRFESARQLMGYSGAVPSEDSSGKRTQRGSITKTGNAHLRRIAIEAAWSYRLRPGVGPGLRKRQQGVPEEIKEIAWKAQVRLSKRYARLAAAGKDQRKIITAVGRELLGFVWAIGVKAEAAAKLKMAA

SEQ ID NO: 376335 - protein, 407 aa, unidentified
MEVLYPRCAGLDVHARSVTACVRIASGPDVTYQHRTEPTTTRGLLALADWLAEAQCTHVAMEATGVYWKPVWHILEGQFTLVLANAMHIRHVPGRKSDLTDAAWIADLLAHGLIRGSFVPPAPIQEFRDLTRTRKQLIGEIARHTLRLQKTLEDANLKLTHVISEILGASGRAILKALVAGETDPERLADLTTGRLKASRAELVDALHGRVTPHHRFMLDLHLTQIDALEAAVDTLERHIGTAMAPFHAAVSLLTTMPGLSDTAARVLIAEIGDDMSRFPSSGHLVSWAGLCPRLDVSAGKRHSTRIRHATPWLKTTLIQAAWAATRKRDSYLHAQFLRLKTRRGPKKAIVAVAASMLTAAYFMLRDGVEYHDLGGRYFTQRDKQETTKRLLRRLRDLGVTVEIKAA

SEQ ID NO: 376336 - protein, 373 aa, unidentified
MNTTITHVAMDTHKKQHQVAWLHPDTGEIQEFTVANTAREIERMVKKIRKQAPGEIHVCYEAGVCGFVLQRLLEKLGCVCQVIAPSLVPTKPGDRVKTDRRDAKKLLGLFAAGQLTQVHPPEASQEADRELTRCRECAEMDRKRARQRLNSLLVRHGYIYSEGSLWTGKHGVWLGGLVFDQPRVRTVFEEYRSELEHCDQRLESLDKQLAQLAMSERYREAVAALRCFRGIDTLTAITLLTEIYSFGRFSSPRALMSYLGVTPSEHSSGESRRTGGITKTGNRRVRRLLTESGWHYRHPPRVSKTLKARRENQPGWAIDLADRAALRLYRRYKHLTERGKPLPQALMAVVRELAGFLWAMLHRLLSPAVSASS

SEQ ID NO: 376337 - protein, 409 aa, unidentified
MNSTLYVGIDVSKDSNQVHAMNYDQKTLLAKSFPNTESGANNLEVALLKLLSKHEFENIIIVLETTGVYSAHIATYLSASSKLLFYNALVYLINPKISRNYNRSFTDMDKTDPKDSFILADLARVNRLVNVKPFSGSQRLALTRLTRHRQHYAELLSREKTYTLNNVFLKFSGFSIVFSDNFGATAVEILLEYKTIDEIVEASLEDLTDFIIKTSKNSFSNPTEVSKKLKAAARNSYRLDKLAYDPINISLASSINLIKFYEREIKELDKQILNQVKGLNNSHYNILKSIPGIGPVYAAGILAEIGEIDQFHNDNALAKYAGLTWRKNESGNFKSENTRMTKTGNKYLRYFLIQATNVARIHNNEFKLYYTKKFNEVTKYQHKRALALSSRKLVRLIHSLLRDNRLYQE

SEQ ID NO: 376338 - protein, 309 aa, unidentified
MEIVVGIDVSKERLDVAILPQEEVFAVGNDHAGIDELVERLKGIGVDAIALEATGGFEMLAVAGLSAAGLTVLVVNPAQVRAYAHAIGRRAKTDPIDAAVIAAFVLATKPEIRPLRDAETQALSELVARRRQIVQMVVAEENRLRMALAKQAQESIKRLLKALRRELESLDADLDSHIRKSPVWRVREALLTSVPGVGATTARTLLAELPELGSLDRRQIASLAGLAPWTRQSGKWNGKSFIGGGRGKVRAVLFMAALVASRYNPDLKAFRDRLVAAGKPKIVATVATMRKLLTILNAIIRDGRPWQNA

SEQ ID NO: 376339 - protein, 466 aa, unidentified
MKPFYMGVDVSKGYADFMILDSKKQPVAESFQLDDTFEGHQSLYRILGRFLGDHPESTLFVGMESTGGYENNWYKSLIEFQGSLRIQTARLNPLGIMHNSKADLKKNTTDKISAQNIAEYLIAHPEKVVYQQDDKLAGLRKQWSFIKMLTKQCTQFLNQLNTLLYTANPELLSHCQDGVPDWMLKLLVKYPSAAKLKRAHVKTLANIPYVSRMRAQQLIGDAKRSVASATDPTTEQLIVATAQQILHLKKTIADQTKRMLKDCPIPEIELLKTFKGIGDTSAIGLLIEIQTVKRFASVKKLTSFFGVHPVYKTSGDGAGGFKMSKQGRKEPRQILYMVALSAIKYNPLIKEIYEKHQQQGKHNMATIGICMHKILRILYGMLKHNTPFDPQIDVKNRQRSVQTKSDVPTKDAKRRFQDYDRRAPVTRRQRKKRLERETSHSVTNTKSGISTPVPLANIIAGILPQL

SEQ ID NO: 376340 - protein, 319 aa, unidentified
MDVLGIDISKQKFQVALLLSSGKWKQHTFQNSNPGFAELLEWLAKQYATDVHACMESTGGYGDALATFLCDRGNAVSVVNPSRIKAFAGSELVRTKTDASDASVIARFCASQSPELWQPPSELERALQSLVRRRTDLLAAHSQEILRLQAPTVSAQVRPSLEHHIAFLDQEIVDVEAQIQELIDDDPDLRRRRDLLVSIPGIAERSAASILGEMPGIEQFRDGKAVAAYAGLCPRHNQSGVFTGRSRLSKIGNARLRHALFFPAMTAMRLNPALKAFANRLRARGKKPILIVAAVMRRLLVLAYGVLKSGRAFHLAETP

SEQ ID NO: 376341 - protein, 427 aa, unidentified
MPYKIAGIDVHKRMLHVVVSDVEVDGEYEFTRRIFGSSPEGLRSLAAWLMEHQVEEVVMESTAQYWKPVWGALERCWKPICQKREGALATSGTLHLAQALSNRGRRGRKKDFRDAERLVKRLVANELILSFVPDAQQRLWRTVMRTKYQLTRNRVQLRNRLEALLEEAHIKLSSLVSDLLGVSARRMLKAIAEGETDPAALAALAHERLRAKPEQIRDVLGVCQELHPVYRRLIQMALDESASIDKRIDRLEQEMADLLRLHEDQVQRLAEVPGLGVDSAQQIIAEAGATAATFPSEKHLASWVGACPGDEESAQVNYSRRSPQGNHHMRRILNQAANAAVKHKGSIFEILYRRHVPRLGHKHTIGIIAHKLCRLIWKILHLGVRYEERGPEVSKMSKLRRTQKMIRELRRLGYRIELTTSPPAISA

SEQ ID NO: 376342 - protein, 311 aa, unidentified
MNANTNLTVVGIDIAKNVFQLHWTDPSTGEVIRKQLTRAKMLQFFANREKCLIGMEACGGAHYWARELIKLGHEVKLMPGEDVKAFNRGNKSDIRDAEAIWLATKVNSPRKVAVKTEEQQAVLTIHRIRELKVKQRTAEINQIRGILMEFGLVTARGHKAIREWLPHALESLQERVPRIALKALSQLWSDVQQLDQQIKELEDDLKSWTKTQPDCQRLMQMPGVAVLTATATVATVGNAKAFKNGRQFAAFLGIAPRHRGSGGKIKVLGMSKRGDGYVRKLIIHGASQSSCDCVQRATQDSNAIEEGSLHK

SEQ ID NO: 376343 - protein, 310 aa, unidentified
MDITCVGIDVSKDRLDVHILPGGEAFGVPRDGKGLAELVERLRPLGARLIAVEATGGFETVVAAALAGAGLPLVVVNPAQVRHFALASGQRAKSDPIDAAMIARFVAATRPEVRPLPDAATQLLADLVARRRQIIEMIVAERNRARRTAVKRITKSILRLIAALEKELAEIDTEIDTGVRGSPAWRETEDLLASVPGVGAVTARTLIAELPELGRLDAKRIASLAGLAPYTRQSGQWRGRSMIGGGRKSVRSALFMAALVAARHNPPLKAFRDGLIARGKPKMVAAIAVARKLLTILNAIVRDKKPWQPA

SEQ ID NO: 376344 - protein, 343 aa, unidentified
MNYIGIDHHKQYSHMTIMDEEGKVLKSGRVLNYRSEVEEFIRYKGEEIKAVIEAGRASYVMVDMLDGLGVEVRLAHPKEVKSIARAKIKTDKRDSKILADLLRANLIPEVHKRSAESRRAQRVLRQRVFFVSTMTRVKNRIQALLAQQGEVIEEEIGLEKDLFTRRGIERLKGLNLPSEDKRLLEGLLELYEELEVLIKKSEKLVNDLYKRMKEAQLISTVPGFGKFFSVLVATEIDDISRFDAVEKLHSYAGVIPTTHSSGERVYHGKIIKEGNRWLSWAAVEAVWPAIRSDFDLKVFFHKHVKRKEVNVAKVITARRLLTIIYKILKEGRCYVSYPRKHER

SEQ ID NO: 376345 - protein, 367 aa, unidentified
MKKVRTAATKRSRNFSQSNLTIGLDLGDRSSCYCVLDETGRIVMEQKVSTTPKALQMAFGAMPRSRVALETGMHSPWISRLLSGLGHEVIVAHARNVRLIGESRRKDDRLDAQTLARLARIDPQLLCPVKHRSAKAQADLTVIRARAGLVRARTALVNTARGLAKSYGERLRGCNVRNMNPEKAAGLSPELQTALEPLLVALESLSEQIRDYNERIEKLAQDSYPQVALLKQIKGVGTLIALTFLLTLEDPHRFRKSRDVGCYLGLQPGRRNSGQSEPQMHISKEGDPYLRTLLVQCAQHILGPFGIDCDLRRWGLKLAERGGKSGKKRAIIATARKLAVLLHHLWVSGEVYKPLHNSGRMAMPAAA

SEQ ID NO: 376346 - protein, 458 aa, unidentified
MERYRGPEQPHSIAPRQCAVCPVQASTERTERDMQNESTPDARGPVFCGVDTHADSHWLCVLDWRGRKVLSRRFPADAAGYEALAGAIAAAGEPACVAMEGTSSYGAGLTRHLASLGMPVREALSPARTQRRRPGQGKCDEADAERAARAAMSGSKLGTPKSQDGWVDGVRCMLAARSGAVKARTSAINTARSLLATAPEGLRSRFRGMAGPRLMEELPSVRAEGALGAALGALADLWAAALDMERAIEASLEENCPALLAMYGCGPVSAAKLAVAAGDNPGRLRSEASFAAICGACPIPASSGKTVRHRLNRGGDRQANSALHEIARQRVMRDPETAEYAERARARGKSDREVMRCLKRYVAREAYRALMRPHEIRRPEDASDLVAARRAARVSQVRAASILGTSEKYISMLERGQRELKPIRRAYEAWVEAGLPLDWDRQAFEAERKMDSKKHLAK

SEQ ID NO: 376347 - protein, 398 aa, unidentified
MDLPVYYELETNNGNRDYRIQIGGHYMNYNTVYVGMDVHKESFTLCSCKYEDEKASHYQRTPASYKNVLRYLAFLRTIYGEDTRFVCGYEAGCLGYSLYHQLENFNVECVILAPTTMLEQRSKRRIKTDKRDAEIIARSLAQHNYSPVHIPTETDNQTKEFIRMRDDHKAELKKIKQQILSFCLRQGYQYDGSGNWTAKHVKWLRSLKPAGLYKEILDEYLLTYTILTDKLNRLDQRIEELASKEEYKESVSKLTCFLGIKTHTALSVIVEVGDFQRFVSARKFAGYLGLVPGQHSSGDDRNGLGITKAGNTHVRRLLVESAQSYTRGKIGYKSRVLRSRQAGNSPQIINYADRANERLRRRYYQMVLKDGKKYNIAKIAVARELACFIWGMMTDNIY

SEQ ID NO: 376348 - protein, 318 aa, unidentified
MTIHTESQIQINVGVDVGKSKLDIVLHPLDLHFQISNDEQSILKVVHVLKKRNIERIVVEATGRHEHAFVFACDQANLPIVVVNPISIRRYAQAIGVLAKTDKIDASVIAHFAATIQPDIKPIPDKQSRLIKDLLIRRSQLLEMQTMEKNRLQILPKALHRSIKTLLRSLQTQISTITKQIDEAVMQVKHWRTKTEILTSVPGVGKVLAYTLLSDLPELGKLNRKEIAALVGVAPMNRESGSWNGKRRIRGGRHRIRTVMFMAMLSSIQCNPVFKRFYEHLKAQGKLPKVAIIACMRKLIVVLNTMLKNETRWGENMA

SEQ ID NO: 376349 - protein, 414 aa, unidentified
MESVYRSVAGIDVHKKMLAVVIRRQPDEQAEYEKRKFGATRAEIQHLEAWLRAQGVSEVVMESTAQYWRPVWYGLEPHFRLHLTHPLKTRAPRGRKSDFRDAQRLADRWSSGDLEESFIPGAEQRSWRWLTRTRVQLKKKLGVIHSHVEGLLEQGGIKLSAVVSDLFGVSGWAMLELIGQGVTDVEVLAGKARGVLRKKDRELQEALAGRLEPVYRLLLRQHMEQVRLLRRQVEEINQTLAEAMQEHLAALHRLSKIPGVDLYAAQELVSEIGPQAAAFASAEQFASWVGVCPGSQESAGVNYSHRSAKGNRYLRRLLCQIAWAAIHTKDTFFAGLFARLKPRVEGKGAAWAVAHRIAKIVWLVLHQEVEYQEKGSAPPNERTLVRKFKRLLKEFGSVGLDVRALLDQQLPAPA

SEQ ID NO: 376350 - protein, 399 aa, unidentified
MEQIHDRVAGLDVHRDQVAVSVRTPGPRGGVHTEKARFDTTTGGLAALAEWLAGHAVTLAAMEATGVYWKPVYYALEGRFLVWLCNAHHVKNVPGRKTDMSDAEWLADVAAHGMVRPSFVPPPPIRELRELTRYRKTQIDARAAEIARLEKVLQDAGIKLTSVASKVLTQSGRAMIEALIAGEHDPAALAGLAKGKLRPKIPQLTAALHGHFGAHHAIVAARILAHLDSLDDAIAVLDGQIAARVAGGYQSAARLLADVPGLERRSIEVIIAETGADMSCFPCPAQLASWAGLCPGNHESAGKRRKVATTPGNQWLRRTLIESARAAARTRDSYFGAQYRQIARRRGPNKAAVAVAHSLLDVIWHMLTFTSRHDTEHQTQRLVSQLEKLGYTVQLAAAA

SEQ ID NO: 376351 - protein, 454 aa, unidentified
MTLNNSSKSKAKRIKKHLEQINLYAAGIDIGSREHFVSVPDSLDEEPVRNFGSFTVDLENMADWLVRIGITTVAMESTGIYWIPAFEILEARGLVVILVNAHHVKNVSGRKTDVKDCQWLQQLHTYGLLAGAFRPDDEYCILRAYMRQRGTLVSTLSTHIQHMQKALRQMNILLDNVVSDITSKTGMSILRAILSGERNAEKLASYRDRRCKNSVEVIAKSLMGNYRKEHVFSLKQSIEIYDFYHEKLSDCDHQIEQQLSQLEKQPDLTEGQRPTKKRNKKHERNAIQFDVANYLYDLCGTDLTDIDGLDEGSVLKVLSETGTDMTKWKTASHFVSWMGLSPNNKISGGKVLSSKTIKTRNRAKQAFKLAAWGLSNSKSGLAAHYRRLRARIGAPKAINATARKIAVIFYNMLKNKTAYVSQSQEEYDKAHKQRILKQLQQKAVQFGFELVPAA

SEQ ID NO: 376352 - protein, 437 aa, unidentified
MLPTSHTIQSADRARHTKNNMNTENYGALVTLDWGETEHAFATEVAESPVETGKMSATPESLHGWLEQIHERAGGRPVAIALEGGKSAVVHALLEHPWLVIFPVHPATSDRFRKAFTPSGAKDDIPDALVLLTILKQHRALLRPLKLESPQTRKVEALVAARRQAVDRRTRIACELGSLLKTYYPQALELCGREPATDLMLDFLTRWPELKSLKAARPATLRAFYAAHNSRHADVIAGRLALIAQARALTEDRAVIEPAMLEVQMLVDLLRPLQKNIALIEERIAEAFEAHPEADLFRGLPGAGPATAPRLLAAFGTDRSRYPDASSLQKLSGIAPVTQKSGHSLWIHWRWNAPKFLRQTFVEWAGQSVPKCAWAKAYYRQQRAAGKHHQATLRALAFKWIRILWRCWQDRVPYSEARYLASLKRQNSPLAARLAPT

SEQ ID NO: 376353 - protein, 335 aa, unidentified
MQIYGIDLSMEKFDVNFIDQNGNEKNKTVKNGINSISNFLKEVPAGSILCAENTGVYGDLLLFLCNQMGIDIAFIPGYNIKHSLGLVKGKTDKVDAMRIREYGERFYDKIVPTQYEDETMRELQELYTLRAQLIRSRKALQASETGRKHQPMQSICAHTSAQSVIDNLNSEIEHVENEIKKLILADQQLKDNYELATSIKGIGPVIATDLLIKTGNFKTIDTARKAASYAGVCPFPNSSGKMVKKARVSPFADKKLKSLLYMGAKSAVKYNKEYRLYYQKKKLEGKPHFLIMNNISNKMLRTVYSVVKNEIPYNENYVCLDPRERKINSSKIKVA

SEQ ID NO: 376354 - protein, 324 aa, unidentified
MDMAWLGIDIAKRKYEVALLRPDGKWRSKSIANTPAGHGELLAWLRRQHEGPVHACLEATGTYGAAVAESLHDAGHRVSVINPAAIEAFGRSRLSRTKTDPTDARLIAQFCRTQEPPPWAPLPREVRELQALVRRLDALEGMRQQERNRLAADPGSAAVCASIQHLIDTLDDEMTALKGQIVDHFDAHPTLRQQRDLLTSIPGIGAATAAILIAEFGPMARFAHARQCAAFVGVVPRERRSGTSLRGKPVLSKLGSAAVRKALYYPALTALRCNPIVTALRDRLRLRGKHPMAIVGAAMRKLVHLAYGVLKTAQPFDPNFLQTT

SEQ ID NO: 376355 - protein, 404 aa, unidentified
MNNVAGVDVSKGKSMVSVLRPFGEVVAKPFSVGHTGSELKELADYLKSLDGETRVVMEHTGRYYEPVARFLHEEGIFVSAVNPKLVKDYGNNTLRKVKTDKADARKIARYGLDNWMELRQHTPMDTIRMQLKTLNRQQGLYSKMKTMMKNNLIALLDQTYPGVNSLFDSPVREDGSQKWVDFAASFWHVDCVRSMSLAAFTERYRKWCKRHGYNFSQSRAIEVHTKAQDLIAMLPRDALTKTMIRQAIDALNAVSASLERLKNEMRTLAAQLPEYPVVMAMRGVGNSLGPQLMAELGDVTRFTHRNAITAFAGVDPGADQSGTHEAKSTRASKSGPPELRKALFLLMDCLLKTMPSDDPVYRFMDKKRAEGKPYLVYMTAGANKFLRIYYGRVKEYLASLESAD

SEQ ID NO: 376356 - protein, 351 aa, unidentified
MKEFIAFDCHKRYTLMERENIQTMKAKQYRVEHEPGAIKRCLQGREPGTFVAVEATGNWYWIVDEIEQAGLQPKLVHPRKAKLMMGLINKTDKLDAHGLNQLQRNRTLPIVWIPPKELRDLRELTRTRMVLGAQRTRLKNRIQATLNKYGWVLKDYSDPFGKKARVELNLRIGHLPPQTAYVTGVLMNQLDALEVQIAEMEKRIRALAQETPEMKRLMTLPGIGWILAVVVVLEVGDILRFPSAQHLASYSGTTPRIHQSGDKTRYGRLRPDVNHYLRWAFIEAAHSVCLNQGCHPEWHVTRLYQRIRGRKGHAKAVGAVARHLAEATYHVWSTGEPYRDPVLKQGRSTEV

SEQ ID NO: 376357 - protein, 326 aa, unidentified
MLLEQRVSTTAKALREVFGGMPRSRVALETGMHSPWVGRLLSEVGHEVIVAHARKVRLIGESRKKDDRLDAQTLARLARIDPELLSPVKHRSAKAQADLTVIRARAGLVRARTALVNTARGLGKSYGERLRGCNVCNMNPEKAEGLSPELQAALQPLLGALESLSERIGEYNEGIEKLAKESYPQVALLKQVKGVGTLIALTFLLTLEDAHRFRKSRDVGCYLGLQPGRRNSGQSEPQMHISKEGDPYLRTLLVQGAQHILGPFGVDCDLRRWGLKLAERGGKSGKKRAIIATARKLAVLLHRLWVSGEVYEPLHNSKQSALPAAA

SEQ ID NO: 376358 - protein, 350 aa, unidentified
MRIIGCDFHSRFQQIAMLDDETGEIIERRLEHSSGEARAFYAALGSPVRVGIEATGPVQWFERMLTELGHELWVGDAAEIRARVVRKQKTDTRDACHILDLLLSNRFPRIWVPSPAERDLRQLLRHRFKLVCFRISVKNQLHALAMGQGVCRKRKLWSPSGRQELEGLALGPWAHRRRQELLEILDRLNASVEELDLAVKQEAHSRAEAVRLMRQPGVGPVTALAFVLTIGPIGRFRRSKQVVSYLGLNPQENSSGGRQRLGSISKQGNSMMRYLLNEAAQTASRYDSKLRRDYQRLKFRRGGAVAKIAIARKLAVRLYWMLREAAQPVPPARMQGSPVCPLVDASPPSR

SEQ ID NO: 376359 - protein, 391 aa, unidentified
MEARTVNNLPPAGTHDDAICCVLAIELSKKSWIVAVNTPLSDKISRHTLKPSDGKELLDLCERIRTRVAKETKKRVEMVSCYEAGYDGFWLHRLLQAHDIRNHVIDPASLQVDRRARRAKTDRVDAERLLRSLMAYLRGEPKVWSVVRVPSVAEEDDRRLHRERGRLINERIQHVNRIKGLLAIHGIYDYQPLRRDRIQRLEQLHTADGRTLPPRLEAEILRELQRLEIVIGMIKTIEAERDAIASANTETERGSVKKIQHLAKIKSIGPEFATTLVGEVFYRSFDNRKQLASYVGLTPAHFQSGAMSRDQGISKAGNAKARTVMIELAWLWLRHQPDSDLSVWFRDRVGKLKGRIRRITIVAVARKLLITLWRYLETGLVPKGAALKVCD

SEQ ID NO: 376360 - protein, 315 aa, unidentified
MMPQETAYVAVDVSKASLEIGCYGERRTWRAANAASGWAKLIGWLGRLGRPAVVGVEPSGGYERGVVEALLRAGIEVRWCDPARVRAMARALGAPAKTDAIDVGVIGAFLAHAGGRPARLDPERDALKAALAARRAAQDSAQRLEAQAAALPQGPAREALAAVAQTARQAARELTRQALELVRASARLRAVSQRLQTAPGVGPLVAAELLAQMPELGCVSAKAIAKLAGLAPFVRQSGAWTGRAFCSGGRPRPRQVLYLAVIASLRAKHGARPVYEKLRAAGKPAKVALTACMRRLLVALNAMVRDGATWTLEAA

SEQ ID NO: 376361 - protein, 377 aa, unidentified
MGSQTFIPREYDVFAGLDVDKKSIAATFSGHQGFIRSLSMPYKVEDLLNHVRNHFADQKVAFVYEAGPTGYGLYDGLAAQGYTCLIAAPSMIPRAPGQRVKTNRLDSKALSESLRGGQLKSIHVPSPLYRQLRHLTQLRDTMMSEAVAMKQRIKSLLLFEGIAFPPAPAGSQWSFIVKAKLRKLPCSNTVRFKLDQLLDSLEFAEKQVFKSTKEIRRFCQTDPELSQCIEYMMTVSGVGWIVASQLLARIGDWRELENIRQLGGFLGLVPTEHSTGDKTDRGPITHTGDGRLRSKLIQAAWSAIRKDGELREFFRSVCQRHPRKVASRVAIVAVARKLSVRISVVLMQQRPYEVREKVHSAPLTQEETSPQGTTRRR

SEQ ID NO: 376362 - protein, 348 aa, unidentified
MILLKGVDLMIYVGIDIAKLNHFASVMDSDGEVLAEPFMFTNDFSGFQKLLDCISSFPRDELYIGMESTAHYAENLTSFLFTRDFNVCIINPIQTSALRKSNIRKTKTDSVDTYLIIKALSMNHFRLYTQRDYDSLQLKNLCRFRQKLMKARTRVKIQLVTYVDLLFPELQYFFKSGIHGKACYALLKEEPNPDKIASMHLTRLSNLLNKTSKGHFGKQHAIALKELAAQSVGIKNDTLSLQILQSINQIELFDSQLNEVEGSINEIMDKLDSVIKTIPGIGSLNGAMIIGEIGDISRFEKPCQLLAYAGLDPSVTSQETFQHPGQGCPREAPEYSDTLSSMLHGRQH

SEQ ID NO: 376363 - protein, 396 aa, unidentified
MHKTFVVAVIAITNNQGITEYHRKRFSTFTNGLTQLRDWLEYYSCFDVCMESTGKYWIPGFNILEEQTNVCLAHPKYVKAIRGKKTDKKDAQWIADLFKHDLVASSFIPQLKIRQLRDLFRYRMKLTQLQVGEKNRYQNCLTWSNLQIASVVSDFFGKSAQAIIKSILDNPQDKPSIEQLVHKRMKNKVQDLEIAMEGALPPEQAEKIRVIKAHYDALAICKEDLEQMIRELGQDYQHQVKLIQTVPGFKEDLSAFRIISEIGCDMTVFDSAAKLCSWAGLVPANNESAGKKFSTRISKGGKYLKPFLVQVANAVVKSDKHPELRNKYLKLKKRRGHRKAIIAICRRLLVSVYQVLRKQEDYNPVLLGLTEIRNPDKTMFVQDAVRFAQQHGFNVA

SEQ ID NO: 376364 - protein, 393 aa, unidentified
MPRKRILVKSIDTSISYQVIGIDLAKHLVSACLITGAGEIFGIDRLTYDDLLKSAKRMSPTLFCMEPCPEVHYLAEKLQGYGHHTKVIDGAAVKEYIKTHFGGQKTDLNDAQAIAFLSLDTNLPEITPKNTSNSVLSSIQAVREQFRKEYIQSFVSLKGICQRWGLPISKGVMNKNKVEELVSESKKIPQEVKDWLLELLQSCRELQKRLNKISKYLKEYADNDEICQKIMSVPGIGPITATRLKATIGDIQRFEKPKSIVAYYGLVPKSKATGHNEKKGGITRRGDRVARSLLIEGAGVVLNLAAKGFLRSKPLNKWIEKKRKLKMPWGKLCCALAAKMLRIVRAILIQGTSFNAKIAGVARCSLPKESRNNVMGNNKLSEIPSPNGSVYIH

SEQ ID NO: 376365 - protein, 391 aa, unidentified
MIFIGIDAAKDKHDCFIANSDGEVLCDVFTISNTLTGFNDLLSKIKSFSKDLSKTKVGLEATGHYSYNLLGFLLDTGLPTYVLNPLHTNLYRKSLSLRKTKTDKVDARTIASMLMSCQSLKPYTRALYHNEELKSLTRYRFDKVSERAKLKTSVSRLITILFPELEKLVSVVHCISIYALLSEFPSAKHIANANLTRLTNLLYSASKGHYNRGTAIRIREAARNSIGSVMPAKSLELKHTIKLIGELDDEISEIEAAIKQIVDSLGTTILTIPGIGYATAASILAEVGDFSNFETPDKILAFAGMSPSTYQSGQLSNCYAHMEKRGSKYLRFALYNATKYVCKWDSNFAAYLAKKRSEGKHYNVAISHAAKKLVRLIFALEKSRLPYMPVA

SEQ ID NO: 376366 - protein, 429 aa, unidentified
MQNESTPGARGPVFCGVDTHADSHWLCVLDWRGRKVLSRRFPADAAGYEALAGAIAAAGEPACVAMEGTSSYGAGLTRHLASLGMPVREALSPARTQRRRPGQGKCDEADAERAARAAMSGSRLGTPKSQDGWVDGVRCMLAARSGAVKARTSAINTARSLLTTAPEGLRSRFRGMGGPRLMEELPSVRAEGALGAALGALADLWAAARDAALDMERAIGASLEENCPALLAMYGCGPVSAAKLAVAAGDNPGRLRSEASFAAICGACPIPASSGKTVRHRLNRGGDRQANSALHEIARQRVMRDPETAEYAERARGRGKSDREVMRCLKRYVAREAYRALMRPHEIRRPEDASELVAARRAARVSQVRAASILGTSEKYISMLERGQRELKPIRRAYEAWVEAGLPLDWDRQAFEAERKMDSKKHLAK

SEQ ID NO: 376367 - protein, 365 aa, unidentified
MQKISTMRTSGKKILKGQLTIGLDLGDRSSSYCVLDEAGEIILEQQVPTTGEAVKQTFKRMPRSRIAMETGTHSPWMSRVLTELGHEVIVAHAQKVRLIVKSRRKDDRMDARTLARLARIDPELLTPVQHRSAQAQLHLTEVRARAGLVRARTALINAARGLVKSYGERLQKCGAFQVSREIGSGLSAGLREALQPWLQEVESLNEHIKEYDRRIEQMAREKYPETALLKQVKGVGDLIATAYVLTIEDPHRFRKSRDAGCFVGLQPGRRNSGESEPQMHISKEGDEYLRKLLVQGAHYILGPFGEDSDLRRWGQKLAARGGKNGKKRAVVAVARKLAVLLHRLWVSGEVYEPLRNSQKAMTVAA

SEQ ID NO: 376368 - protein, 471 aa, unidentified
MTSYERVNPFATVLPLRALSHTMEEILMARKSKQQRLKIVHPNCAGIDIGSREHWVAVDPECCEEPVRCFSAFTDSLYALADWLQSLGVEIVAMEATGVYWIPLFEVLDARGFHVHLVNSRATRQVSGRKSDVLDCQWIRQLMSYGLLKGAFRPADPVCHLRSLVRQRDNKVKEQSRCIAHIQKALTQMNIQLDHVVSDLMGKTGTAILRAIVAGERDPHQLAALRDRRLRADEDTVARSLRGNWREEHLFARAQALAYYDFLSQQIRECDHAIEQHLAVLPSLADQPPEPVKPLRNPHRTAAQQAALHQALYHVMGVDLTAIPTMGIDTALVLASEIGPDLSRFPSASHFCSWLNLAPPTRISGGKPLPGRAPRVSNRAGQALRQAASNARNNHSFIGASHRARLARMDGASAVKATAHQLARLIYAMMTKGQPYVEQGMEAFEARSQNRQIRALQRKARKLGLHLVEAA

SEQ ID NO: 376369 - protein, 317 aa, unidentified
MQTFLNIGVDVAKDAVVVACAAQSFPAYSVTNQHAPLLAWLKSLPAGSRIGLESTGGYHELLADLAQAQGYTVFLLNPLDTRHYAKAMGNRAKTDRVDAELIARLIAQEHTRLRAYIPPTANQRKLDHLIRRRAKIVRIKSTLKLTMLNLGGFAAELKAVLLKLDALIARIDAAMSATAARSPQHVEAQQRLQTIVGVGPLVGMALTNTLERVPFRNADAFVAFTGFDPRANDSGHKTGRRRLSKRGPGELRRLLFNAAMSAVKTKIWKPVYEHYRTQGWSTTAALVIIARKIARSAWSIHHYHSTFNPERITKCLT

SEQ ID NO: 376370 - protein, 451 aa, unidentified
MDQGNDGLSRGDRNRNARLAVLRAVLPRDHAILGIDLAQSRQAAVLADHDSRVIARWRPRCSPWRLGELLDRARRKALSAGYAGITVACEPTGHRWMVIAQLAAERGIPMVCVQPLVVARAREAEDYTRGKSDDRDAVLIARQAAQLHCYLPERAGQAWARLRHPGARRSRLIESATACGQQLRDLLEVAWPAALGAAADPLGSATWLACLSVVLEGSAGDPGGVHVMGRDGFTAAARARLGAFGARRICQRIAAAVYAALADPAGVAAQRPGALERAFSVLGDWTTVRGELAEVNARMLQALDRLGVAEVAGSIPGVSALQVAAILAETGDPSRFATARAMVKHAGLAPCENSSGNHAGEAVISRRGRPALRLAAWRAVWGALRHNPVYAARHDGLTRRARDPLTDQQARAAIAAALIRQIHAIITRRVPRDADIAAGRRRPGQEVNAAA

SEQ ID NO: 376371 - protein, 411 aa, unidentified
MRLFVGDDWAEDHHDVEVMDEAGKVLAKRRLPEGVAGIAQLHELIGAHLGEDPDAAEVIAGIETDHGPWVTALVTAGYTVFPVNPLQASRYRERHGVSGAKSDGGDAHMLADMVRTDSHQLRPAAGDSPAAEGIKVLARTHKTLIWERTRAVQRLRHQLREYFPAALEAFEDLDAPDTLELLGKAPDPARAAKLTRAQVSAALKRARRRNIPDKATAILAALRAGHLGQPPALTAAYAATVRALIAVIATLNEQVKVLQGQVEENFGRHPDAEIYRSQPGMGAILGARVLGEFGDAPRRYADGKARRNYAATSPITRASGKKKVVAARFVHNDRLVDALNAQAFASLNASPGARACYDELRARGIEHNDALRRLANRLVGILHGCLKTRTLYDEATAWGHRENLPQSPAAA

SEQ ID NO: 376372 - protein, 322 aa, unidentified
MSETVLGIDIAKQKFDVALLSEGRMKNKTCKNSVEGFETLSLWLEKQGVQKVRACMEATGSYGEDLAIYLHEAGHTVSMVNPARIKGFAQSELIRTKTDKLDAGLIARFCLAMKPEAWIPPALEIRSLRALVRRVDSLIDMRSQEKNRMGTAHESVIVLIKEHIAYLDKEIEKIRKQIDDLIKRNPQLKQRKDLLDSIPGLGKVTIPHLLAELNNLDKFTHVREMVAFIGLAPRETISGSSIKGKPRLCKIGHARLRKALYMPALVSIQCNPVMIAFYNRLKERGKNGKVIVCAIMRNLVHVIFGVLKSGKMFDPNYKPVLT

SEQ ID NO: 376373 - protein, 350 aa, unidentified
MLIIGCDYHPSFQQIAFVDTSSGELSERRLFHREEAEQFYGKLKEQSVPVRVGMEASGHARWFERMLRDLQFELWIGNAAEIRAKRVRRQKTDRQDAQLLLRLLMEDRFPRIWVADAENRDLRQLLWHRHRLVQMRTRVMNQLHVVALNEGLRRKKALWRQAGRQELESLALAPWANRRRQDLLDLLDQLTRKIQQLTQALEEEVEKRPVTRRLMTHPGVGPLTALAFELVIGTPERFHCGKQIASYVGLVPSEESSGNRRQLGHISKQGNALLRYLLVEAAQVTIRTQAQWRSRFFHLAMRRGRKIAKVAMARKLAVHLYWMWRQGCDYGHLQKLGSHAGEPGNPYGVR

SEQ ID NO: 376374 - protein, 356 aa, unidentified
MNKRSKLNFSGQAIYLGLDVHKKSWSVSIFTQHGEYKTFSQPPEAEALIQYLQRHFPGAQYYSVYEAGYCGFWIHDQLRERGIENIVVNPADIPTQDKERRNKRDRIDCRKLARGLRVGDLKGIYTPARWRLEDRSLIRTRLSMGRKQARCKNQIKSMLLFYGVSIPEQREMGHWSRRFIRWIEEIRMERSSGDMALKLHLEELCHLRQIIAKLNRSILVLARTEEYRLWISLLKTIPGISTLTAMIVLTELYEISRFRSLDQLCSYVGLIPDTQSSGEKEHVGGITQRHHSSLRWLLIEASWIAVRKDPVMMEAFNEYCKRMRKTKAIIKIARKLLNRTRYVLKNQAEYVTGVIE

SEQ ID NO: 376375 - protein, 344 aa, unidentified
MNEEYVGQQIVGIDLHRHRSVLVRMTESGERLGGVRINNDPYAFRSVMAEAGVHPEVVLEATYGWYWAADLLAELGAEVHLAHPLGVKGFAYRRVKNDFRDAADLADLLRMGRLPEAWIAPPAVRELRELVRHRAKLVHLCTSLRCQVHAVLAGQGITVPVSDLFGVRGSKLLREVQLPAACRYRVDSLLQLIAAFDREITQTAQLTSDRLRDDPGYAAVRTVPGVGPILGAVFVAEIGDVHRFARAEQLTSWAGLTPKHYESDKTVHRGRITKQGSRLVRWAAVEAVQHAPAGTPMKQVRDRIVARRGKDARHIATVAAARELVEMVFYALRDHHVRRLAAAA

SEQ ID NO: 376376 - protein, 342 aa, unidentified
MYYIGLDVHKKTISYCVKDASGGVCQEGKVGATRWQLDEWIKTLPQPWTVAMEATIFTGWIYDHLKPHATDVKVAHPLMLRAIAAAKKKNDSIDAGKIADCLRCDFLPECYMAATETRERRRTLRYRHLLVRQMVQMKNRVSGLLMETGVSHNKQRLHKVGYFPELLANADAVSASIRPLLQLSRESITRLQRTEGAIIRSLQRDPLLAERVRRLQTIPAVGKVTALTWALEMGDISRFRSIRQAISYCGLCGDEKRSAGKVMRTPLSKQRNKHIQRVLIEAAKLAPRRNPDLALVYANARLKVNANCATLAVARKLVAYLMAVDREQRDFQPMRGFAGTAA

SEQ ID NO: 376377 - protein, 326 aa, unidentified
MQKVLGIDVSKEKHDIVLVIEGKKYHQEISNDPKGFDYLERWLGAHQATHVHACLEATGQYGEAIAEYLYTRGYLVSVVNPARIKRYGESKLHRNKTDKADADLIAEFCLKEKPTLWEPLSPEVKHLRSLIRRLQALKANLHQEKNREKSGETDSWVMDDLAIHIEFLNERIQAIKKEIRDFLKQTPDLKSQHDLLISIPGIGHLTAITLLAEIGDFLAFENAPQLAAYAGLNPQGHRSGSSVFKKTQISKQGRVELRRCLYMPAIVALSFNPVIQSLAERMTKTNHHKMEIIAAAMRKLLHLAYGVLKNQLPFDPNYGKKFDFSS

SEQ ID NO: 376378 - protein, 352 aa, unidentified
MGDHNTICAGIDIGDCYCQIAVLDLEGEVTETSRIRTTPAAFKRYFQGKLPMRVAMEVGTHSPWLVQLVNSLGHEALVGNACKLRLIHRNDQKSDEVDAELLARLCRFDPQLLYPICHKGNEARTAWAVLRSREALVRSRTALINHVRGVVKPTGHRLPKCSAPNFGKLKNELPEPLIPILGPILQTVSQLTIQIKAYDQKIQLTGQDQYPQAMLLQQVPGVGPITSLAFVLTIGDPWRFTHNRDVGSYLGLVPRRSQTGQSDPELPITKAGSRYLRTMLVQCSHYILGPFGPDSDLRRSGERICSRGGKNAKKRARVAVARKLAVMMLSMLKTGEAYEPLHGSHSDEISAA

SEQ ID NO: 376379 - protein, 358 aa, unidentified
MRELSKSRTPRTAGLDLGDRFCTLCVLDEEGEVVERGRLATHRQDLSRRFEGKAKLRVALEAGTHSNWISHSLEGWGHEVIVANPRKVHWIFKNTKKCDRVDAESLARLARADVELLSPIRHRGAEVQAHRSVLSSRDALVRSRTALINHVRGVVKALGERLPSCSSVAFVHKAMPHVPEVLRQVLAPLVGVLEILNEQIREYDRQVERLSEQTYPETKQLRQVNGVGPLAALAYVLTLETTSRFAKSRSVGPYLGLSPRSDQSGDREAQLGISKCGDALLRRLLVSSAHYILGPFARDSDLRRFGLALAQRGGRAAKKRAVVAVARKLAVLLHSLWRTAQTYDPLRHANLQIAKASG

SEQ ID NO: 376380 - protein, 411 aa, unidentified
MKQPNSRHQEGKPACKAALAEVDPLMDTASKCPNVIDHGLHQHHRGSIMNRSTGMSAGQIVGTMDGLQVIGLDIAKQVFQLHTVDMCSGEIINKPLKSAKVLSFFVTQPPRLIALEACAGAHHWARELMAQGHQVRLLHAKMVRPFVCGNKTDATDARAIWLAVQQPGTKFVGVKSVAQQATLTLHRQRELLMKMRNMQSNALRGLLHEFGVSFAQGLTPLLQGVGAALDKLAGQLPQPLRDSLQEQVERIKGLNQDIQTLDKRLALELKANPDMQRIAQIPGVGVLTASAAIATMGQANVFKSGREFCAWLGLVPQQTGSGGKVRLGPITKRGDTYVRTLLIHGARSVLLHTKDSEGWLGQLRQRRPGNVAAVAQAAKTARTIWALTAKQQDYQDGFESVRPGLRGDSAM

SEQ ID NO: 376381 - protein, 323 aa, unidentified
MSKHSMICAGIDTGKYRLDVAIKGSREQLQVDNIADGHAALSAWLKRHKVQRVGIEASGGYEQQVVARLRADKFVVVVFQPAQVRAYARFLLQRAKNDKIDAQLIAECTAATKKIHAPPDPRLAPLAERMTLIDQLTEEIARFKNYREGSRDAQMRQFWKEQIAHLNKQLRAWLKDVEAAIRQHRDLAERLDLIASVDGVGLKTAVVILVRMPEIGRVTREQAAALCGLAPFDDESGTQVGIRHIAGGRERLRGSLYKAALSATFHWNPQLMTFYRRLTAAGRSHKYALVACARKLLIFVNTVVARGTPWLSSRTPSAARAAA

SEQ ID NO: 376382 - protein, 311 aa, unidentified
MPAKAEPHYVGLDIAKDQLDYCINDAAEGRTPNTPEARAGFIEKLKLLGTARVICEASGGYEKIVVAELFAAGIEVCVVQPGRVRAFAYAEGLLAKTDRIDARLLRRYGEKIAPRLAVPTDAATATLRELIEHRRQLTTQLSEVEGRLALAGPTLCKLLQRQKTFLQKQIKAVDAMIGEHIDNDPDLRSKSERLQQIAGVGPVLSATLLAYVPELGKIEAAQLCALIGVAPHPKDSGTMHAPRHVRGGRAQIRHVLYMAAVSAARFNPILAAFYQRLLANGKPAKVCLIAVMRKMVCLMNRLIKDPDFVLA

SEQ ID NO: 376383 - protein, 414 aa, unidentified
MEKERIDIYHKRNTCFVGIDMHKDAHCAVVIDCWMNKLGEVNFENRPSRFPAFVEDVRKICGTKGIVFGLEDTRGFGRNLAAYLVGRKFEVKHVNPAYTSAVRLANPIIYKDDSYDAYCVARVLRDMVDTLQDAKHEDIFWTIRQMVKRRDLIVKSNVMNKNQLHSQLAYSYPSYRKFFGMIDSKSALCFWENYPSPEYIWKTTPEEIYQTIKPVHQALKIQRIHEIISMIERDGDTRKDYQPERDFIVRNIVKDIRHNKELIAEIDDELRKLIPLTGYKLHTMPGIDLVTEAQIISEIGDINRFPDSDKLARFMGLAPVQFSSAGKGKDQRCRNGNRALNAIFHFLAIQMVAVSASGKPRHPVFREYFEQKVKEGKNKPQALVCVARRLVRIIYGMMKTRTEYRPFEKADDKN

SEQ ID NO: 376384 - protein, 402 aa, unidentified
MIGVDPHKASHTAAAIDDTENVLGELKVRSGANQVERLLGWAAQFEERTWAIEGAGGLGYLLAQQLVAAGEHVLDVQPKLAARVRLLSTVATNKNDPNDARSVAIVALRSPSPIEVHAEDNTAVMKLWAKRHRDLASQRTQVACRLHAVLCELVPGGYSGEIYVSRAKELLGELEPEGAVAVARHELVVELLTDLGRIDEQMRETKKRIARAIVASKTTLTDIFGVGPIVAAIVIGDVGDVARFTSADRFAAYNGTAPIEVSSGPRKIYRLSMRGNRRLNHAIHMAAVTQIRFSHSQGRAYYDRKIGEGKTGKEAIRALKRRISDAVYRQLQLDAKQTRDLTTMGPGGQAGNDSVASVTGSHPGGRLFGEATPEPATTLRPAAISVRPRRLRTTSRRVKRAS

SEQ ID NO: 376385 - protein, 407 aa, unidentified
MISIGIDVSKSKSTVVALGFGKEVIFKPFNIYHVKYDVNKLIGKIKSLDEDVKIVMEATEIYHIPILISLVNEGFFVSIINPLKMKRFCQALSFRNVKTDKKDAIHIAEYGLMNWNDLIKYKEDKEEYIRLKQLNRSYQHYQKIRINHLNYLDKEIEKRHPGLKKLIPHANGNYQKDKLIDFVDRWTNSEKILKRSQKQFVNDYEKWAKKKGYHPNAQKAITIYQNALESIPTISSSNSKIDANVLDSIEFLRVINKTLNNILSQMKEISTELEEYKIAKEFSGIGEKLAIQITAEIGDIRKYKNKKSLISFAGIDSPPYQSGNFSAKQRKISKRGNPILRKVLYMTMLCMKKAKDENNPVYKYIIKKEKEGKAKKVSNIAGINKFLRIYYAKVMEEKNKEELLKAA

SEQ ID NO: 376386 - protein, 330 aa, unidentified
MNIAVGIDIAAKSFDMVVRKSGKPGKAASFKQTPEGHAAVIKQLLALKPSSIVMEATGIYYLDLAVAIAQAGLPISVINPKSFRHFAALKLNGTKTDGVDAGLLAEYGERMSPRIWTPPDEACLMLRDVGRQINRLTGSRTQAKNRLHALLSTRTTLPLLIEDEREGIALLDQRIERLSQAALNLIKQDSVLTKHMENLCAAKGVGQTTAITVLAELMVLPSCLKAPQVSRYAGLDVRLTQSGSSINRPARLSKAGNAYLRGALYMPAMCAVRHDPRAKAFYDVLVARGKKKIQAQCAVMRKYLTGMWACIKNDTAFDSSLLFSEEHMKA

SEQ ID NO: 376387 - protein, 451 aa, unidentified
MSRPQVIDDEEHERVHERVAAVDVAKDSGVVCTRIPHPSRPGARRSTVWTVKARMGAVRELGRQLARDGIEVVTLESTSDYWRIWFFVLEACGLAVQLVNASQAKNLPGRPKTDKLDAMWLARLTEKGLLRASFVPPKAIRDLRDYTRARARLVQERTRCFQRLEKLLEGALVKLSAVASKLTTVSAQDMITAMIAGQRDPQALAGLARTRMKARHDDLAEALDGMFDDHHGELAGMLLDQVTFLDERIARLTARAAALTAAMPAAWGVNADGTTGPDAGTSPDAAVLPAAARLAEIPGISQDLARSIIAETGLDMTRFPTAAHLVSWAGLCPSARQSGPRTRAGKKGQGDTWLRGPLGQAATGAARTDTFLGERYHRIARRRGKAKAQVAVARSLLVIIWHLLADPAARYTDLGPGYYQARTDKDRKIRNHIRQIEALLGHPVTITPKAA

SEQ ID NO: 376388 - protein, 361 aa, unidentified
MKPTTQPIPSYVGQDIYVGLDVHKRTYSVVVRCNQMEVKRWSVIAEPEKLAEQLNKFFKGGRIHSAYEAGFSGFRLHRVLVSQGIDNRVVHAAAIEISSNSRVKTDQRDARKIAEQLEAGRLKGIRIPSESEEQARLLSRTRRQLVSQRSRVQNQIRMKAHQFGLIGPEDRRGMSHKMVGEILESFDCMEFQVSVKALQQVWRTLDREIAQLEVRLREQAEADRREATYRSVPGLGAVSARILAHELGDLSQFANERQLFSYTGLTPGEYSSGEHTRRGRITKQGNRHVRGVLIEVAWRAIKQDQSLADVYHRIWVRAGNNRAIVAVARKLIGRIRAAFRSQTLYVSEAMRPADGPESEVA

SEQ ID NO: 376389 - protein, 272 aa, unidentified
MIYVGIDMHPGNMTLAAVNDNADLVCEEKIPCDPDHLSSFFASIDRPVQAVVESTSSWYWLNDWCLQQDIPLILAHSKMVKAISYAKVKTDSVDAQTLAILLRADLIPKAWKTKKQRRELRELTRGRLRLIRRRRRIQNQIYSICTKYNVRYGDNSWYHLTRMERSLHDHLPQIACIEVEYCFDQLRMIQGHIHGLEASIERQVWFNEELSRLLQIPGVGFVTAWTILAEIGDINRFPSDKQFVSYCRLVPGSNDSGGKQRHKSVTKMATPT

SEQ ID NO: 376390 - protein, 433 aa, unidentified
MQDVQDEPLFAQRVAGLDIAKAEIEVTIRVPSDTSPGRRQQETRTFGTTRRELESLADWLRSWGVTKIGMEATGDYWKPVFFLLEARGFDCQLYNAAQVKALPGRPETDRADSVWLARITERGMIASSFVPPEPIRRLRTHTRYRRHLTQARTAEKQRVEKLLEDGHLKLSSVISDIHGVSGRDMLDAIAAGQRDPKTLAQLARGTMRGKIRRLEEALDCSFFTDEHAAVLAMMLAVIDHHTAQIQTLTEKIEKLAEPYLSQIKQLDAVDGIGPVCAQDIIAEIGADMTVFPTAAHLVSWAKWSPQIKQSAGKRKGSNSTGRGNPYLGAALGEATISAGRTQSFLGAKYRRMARRMPKKKALVATGNSMLSIVHALLSDPAATYQDLGADYYETRMHARRQARNHVRSLERLGYKVTIQAIDPDTGELHAAPA

SEQ ID NO: 376391 - protein, 455 aa, unidentified
MPKTITGDRPELRPIDAGAAAIDIGSKMHMAAVDPTCTDVPVRAFGTFAQDLHALADWFKGCGVTSVAMESTGVYWIPAYEILEQHGFEVILVNARYAKNVPGRKTDVSDAAWLRQLHSYGLLRGSFRPDAEIATLRAYLRQRERLVEYAAAHIQHMQKALMEMNLQLHHVVSDITGATGMRIIRAIVAGERDPDVLATYRDVRCHSSIETIRAALVGNDRDEHVFALTQSLELYDTYQAKMLDCDRKLESLIAALTDKGAKPVGKLSRPRVKTKQVNTPSFDVRAALYGVLGVDLTEIHGLGPSLALKLIGECGTDLRAWPTAKHFTSWLCLAPGNKISGGKVLSSRTRRSSSRAAALLRLAATTIGRSDTALGAFYRRLSSRAGKAKAVTATARKIAVLFYNTLRHGMTYRDLGADHYEEQYRSRVLANLKRRAKSLGFVLQAVPRDAEVAVS

SEQ ID NO: 376392 - protein, 291 aa, unidentified
MTITTVGIDLAKNVFAVHSVDQNGRTVLVKPKVSRAALPELIASLPPCVIGMEACSGAHYWARLFRQYGHEPRLMAAKFVSPYRMAGKSGKNDAADAQAICEAVRRPHMRFVPVKDESQQAMQCLHRTRQGFIEEKTATYNRLRGLISEFGVIAPQSADALRHMVSVQKSSLPLQVQQCVDDLMEHVDRIEANITEYDRILSHIAKTDHRSQRLMELKGVGPTTACALVASIGNAHDFKNGRQLAAWLGLTPSQYSSGGKSKLGRITKAGDSYLRTLLVQGKRAVRTVLTK

SEQ ID NO: 376393 - protein, 411 aa, unidentified
MRVHHNVCCGIDVHKKSVTACRMWGPADKEPEFEIRRFGTTTRDLQKLAEWLKQAGCEEATMESTGSYWNPVWNVLEGQIPRLILANAKHVRALPGEKTDRKDGKRLAELTRHGQVRPSYVPPRAILELRDLTRYRSKLLSAGSSERNRIQKVLEDANIKLGSVLSDVFGVSGQKMLQQLVKKDTVDIANVMQLAHWKLKPKMEAIEQSLEGKLTDHHRFMVKASLEHMRFIEEQLKRLDEEIQRRLQPYQEEYALLQTIPGIKETGAARILAEIGTDMSAFPDGDHLSSWGGVCPGNNESAGKKFQSKIRKGNVHLLSALTQCAWAATKKKDCHFRNKYYRLKSRRGSQRAIVAVDHAMLKCVYVVLSQRKPYEEPKPVSLSEAQKQRKASSLCRQLRALGYDVKIQKTA

SEQ ID NO: 376394 - protein, 367 aa, unidentified
MKKVSTAVPKQGRKFAPPTLTIGLDLGDRNSWYCVLDEAGQIQLEQRVRTSAKALQEVFGVLPRSRIALETGTHSPWISRLLDELGHEVIVANARKVRLIGESRKKDDRLDAQTLARLARIDPALLCPVQHRSAQAQADLTVIRARAGLVRARTALVNTARSLAKSYGERLRGCNVRNMNPEKAEGLSPELQRALEPLLAGIEVLSEQIREYHERIEKLAQESYPQVALLKQIKGVGTLIALTFLLTLEDPHRFRKSRDVGCYLGLQPGRRNSGQSAPQMHISKEGDPYLRTLLVQGAQHILGPFGVDCDLRRWGLKLAERGGKSGKKRAIIATARKLAVLLHHLWVSGEVYEPLHNRSRTTVAAAA

SEQ ID NO: 376395 - protein, 409 aa, unidentified
MGLYCGIDWAENHHDFAILNDLGEVVSRGRVDNDAAGFARLLEAFAEAGDTAEDPIPVGIETDHGLWVAGLRASGRVIYPINPLAASRYRSRHSVSGSKSDSADAVMLANIVRTDAVAHRPLPADTDSALAIRVLARAQQDAVWSRQRFGNEVRSLLKEYFPAALTAFQSLEDGLTRPDARSVLAAAPTPTAAAALTRPQLKAALKRAGRSRFLDRDVERLRAILRAPALRQPPQIEAAMGISLMTLLRQFDAACTAAETLAAHVSVLFSEHPDAKIITSFPGLGPLAGARVLAEIGDDRNRFATARGLKAYAGAAPITRASGKKTFVLHRHVKNRRLAAAGTIWAFSALQASPGARRHFDARRAGGDWNHQAQRHLFNRFLGQLHHCLTTREFFDELHAFPPPLPIAA

SEQ ID NO: 376396 - protein, 425 aa, unidentified
MSTEFDWFVGIDWATQAHEVCILDAGGTVVQRHSVPHSGDGLKDLVARLVRLCGGLIDRVAVGIEVPHGAVVETLLERGFAVFSVNPKQLDRFRDRFSPAGAKDDRLDARVIGDSLRTDRRCFRRLAAQPTQIIRLRELVRAEAELKEELQRFSNRLRDLLHRYYPQVLALSPAADEPWLWDLLHRAPTPAKGRRLHQATLEQLLRRHRIRRIVAHDLRQALCETPLQLAPGTVEAVSDRVGSLVPRLQLAHRQLGQLQQRIEALLEELAEPAESATDDADGQTREHRDVEILLSAPGVGRVTVATMLAQANQAIQDRDYHIIRAQSGLAPITKASGQSRRVQMRYACDERLRNAFYHMARVASICDESARCYYQELRGRGHSHGRALRAVADRQLRILMAMLREGTLYDPQRCLRPSSVPTKVA

SEQ ID NO: 376397 - protein, 382 aa, unidentified
MAKRGVARSSVLITEALAGNVVGSDPHKRTVTTTVLDGRGGILGTAHHKVSGDGHRAMEAWVLSFGPVVRWGVEGAASWGRHTAMFLCARGHDVRDVCPNRTHERGKARQQGKSDTLDSERIARETLAHPLLPLAFKRSSAGEAGADVDHELLTLWHGARRSLLKSRQHLLNEAEFLLDALPERLRRRLPDTKAVRPRLAAAARLTRHKSLDAVTVVRLGLLRDHQDAIVALDRKEREVTRQLTALVRASGSTLGEVCGLSTRSVAELLVEIGDPRRFTEGGFARFNGTAPIPASTAEGPDEPVRHRWNPAGNRRVNAVLHRMAVTQLRCEPRAQAIFADARRRGHSKKEARRILKRHLSDVIYRRMIRDLAAQKEPTAGAA

SEQ ID NO: 376398 - protein, 425 aa, unidentified
MATTTNPTADRTLVAIDVAKRSHAILVETPDGKQRRFRMANSADDYDRLVQLLGSTGYPVKIALEPTGDYHRTLAYRLLAAGFEVCLVSSVAGARYREAMFNSWDKNDPKDAGVILALLKQGLTQRYVDPLVAGHHGLQELSKTYYQISMATTRIQHSLMTHYLPLYFPEVERYFHTTHADWFARFLIRFPTAASIRRLDFDTFKREAWSLVGRKVSKTAWVRQLYDSAVRSIGLPTDDDAIEIEAFRLQLRRFQELIHQREELAIKAHELLAGRADYEALRSLPGVGPVLALTILAEAGDLRRFGHHRQFLKYCGFDLAKSQSGATRGQEKLSKRGNARLRFAFWFAATVAIRMRENSFREKYERYIRCDPGNPDRKRKALTAVAAKMTRVAYALIKHQSTYRCYFESALPSGSIPLSRAVGAT

SEQ ID NO: 376399 - protein, 403 aa, unidentified
MNNVAGIDVSKGKSMVSVLRPFGEVVAKPFSVGHTGSELKELADYLKSLDGETRVVMEHTGRYYEPVARFLHDEGVFVSAVNPKLIKDYGNNTLRKVKTDKADARKIARYGLDNWAELRQHTPMDTIRMQLKTLNRQQSLYAKTKTMMKNNLIALLDQTYPGVNALFDSPVREDGSQKWVDFATAFWHVDCVRNMSLTAFAERYRKWCKRHGYNFSQSKAVEVHAGAQDLIPMLPKDSLTKTMVRQAIDALNAVSASLERLKTEMQALAAQLLEYPVVMAMRGVGDSLGPQLMAELGDVTRFTHRNAITAFAGVDPGAEQSGTHEAKSTRVSKSGPPELRCALFLVMDCLLKTMPQDDPVYRFMDKKRAEGKPYLVYMTAGANKFLRIYYGRVKEYLAQLENS

SEQ ID NO: 376400 - protein, 350 aa, unidentified
MLIIGCDYHPSFQQIAFVDTESGELGERRLVHREEAEQFYGKLRDQSVPVRVGMEASGHARWFERLLRDSDFELWIGDAAEILTKRVRKQKTDRQDAQLLLRLKMEDRFPRIWVPEAENRDLRQLLWHRHRLVQMRTRVMNQLHVVALNEGLRRKKALWRPAGRKELESLVLAPWASRRRGDLLDLLDQLTPKIQELTRALEDEVEKRPVTQRLMTHPGVGPLTALAFELVIGTPDRFHCGKQIASYVGLVPSEKSSGDRRRLGHISKQGNALLRFLLVEAAQVTVRSQPQWRNKFFHLAMRRGRKIAKVAMARKLAVHLYWMWRQGWDYGQWQKFGSHAGEPGHPDGEQ

SEQ ID NO: 376401 - protein, 318 aa, unidentified
MNIIGLDISKDTIDATLHKTNGSIHYIKFKNNDDGLKQFRLWIKGNRIRKAYIGMEATGIYYEKAADMLSSYYTVYVINPLKINDYGKSRFNRTKTDKADSNLIADYIKRHQDTLIPYQIPKNKALQKLINLKNQLHQHQKQIKNRLHSTEEDFIRNIHQDLIDTIQDKMEQVKIAISEQIKKQTDNNHYRNLQTIPSIGKDTASVLYAQLTEKHFKTANQFVSYAGLSPAIIQSGTSVRGRGRLSRYGNRRLKSTLYMPALCAYRFNAFPKLINNLKKAGKPKMVIIVAIMRKLAKLAYYIVKTGQPYDAERHRLNQ

SEQ ID NO: 376402 - protein, 431 aa, unidentified
MYDITEGYRQLQSLIARWLDIGFEHIYCGVESTGGYENNWVNYLQQMGKNDPVHIARLNPKGVKSLGEARLTRTITDSVSAENIALYLMDHPGKVHYLKPSQTSKAYSEGRKHNSFIRMLKKQRNQLGNQLEKLLYEQLPPLMCYCRHGQPLWLLLMLEKYATAASIKKAGVSKLSKIKGISEEKAKSVVAKLTGSDIQSSDHIGSIIKSTAAQILHLEGSIKKEKLNLYSRFKHTEEAVLLTSITGIGEQSAVEILVEIEDINRFETAKKLGAYFGTHPMWKQSGDGTWGNHMSKKGRSEIRGVLYMCGMSAVRHDEMFKGIYARARAKGKNHFSAMGVVMNKMLRIIYGVLKNKTKYNREIDYKNQQNAQTTQKQKEEKQEELKQEKQTKLERYNLREVSEMPVSKRYAKKKRQSPKLQPEECTGSSAS

SEQ ID NO: 376403 - protein, 428 aa, unidentified
MEPSISTGPSAAVTAYIGIDWADQKHAIALRSAAEPSKVQHQVVEQKPEALMQWIGQLEQRFGAQGKILICLEQSRGALIYHLMGYEFLELYPVNPLQLARYRETFSPGGAKDDRPDSELLCELLYCHRDRLRAWKADSTLTRKLAFFNEGRREAVDQRTALSNAIKSQLKVYFPLALELLNEESSTALAADLLLRWPSLEVLQKQSANTLRKFFYGHNCRGETKMLQRLELIQQAQPLTQDSAVIEPAAFRVQLLARQLKSLLVDIARYDQKIAQLFEAHPDRFLFENLPGAGTALAPRLVTAFGSDPTRWDSAQEVATLLGIAPLRRASGKNTGKKASVHFRLACPKFLRQSLHEFAGCSIRSCSWARACYEAQRARGKAHHASVRAVAFKWIRILFACWKQRTPYDPQRYQSALQHRGSPFASAC

SEQ ID NO: 376404 - protein, 354 aa, unidentified
MIVLGVDPHKDLLVVVAVDSNGRQLDVTSAPARPRGVKSLLRWARQYGERLWAVEDVRHVAGGLMRGLLAAGEQAVWVPTQLTARHRRVGRGQGKSDPIDALAVARAALREDLPPALPEDESRVVKMLLDHREDLVGEMVRMCSRLRWLLHDLDPDFAETIPARKLHKRRWVTHVRDYLAAQTGSVGLSIAAELLGRVEELARRADQLERELHELMKAQAPQLLALPGCGPLSAARIVAETGNVRRFHSSAAFAMHTGTAPIPASSGATHRHRLNRGGNRRLNAAIHRIVITQARIHDGARRYLERRKSMGNSRTEAIRALKRHLARHVYGLLTTAAASTRLSLPNSAPAGATG

SEQ ID NO: 376405 - protein, 398 aa, unidentified
MSMYFIGIDISKYKHDCCIISAADQKVVSKVTIKNNKAGFNELLTIIHSLANPADIRIGFESTAHYALNLELFLENSLLTFMEVNPVLISEYKKSKTLRRTKTDSVDCESIARWLMTVEYKPHSKGFYHAYSLKSLTRLRDKLIRQRSFYLVKITNVLDHTFPEFKPFFNERLSKTALYLLENYGSAEKMARMNSASYEKLRSLSRGKFSPQQFLRLKELAANTVGVNNSIFDVELNSLLSLYKSLVKEIDTIEKEINKLIEEVHPHYMSVPGIGPLSAAVIYSEYGDISNFTNSGQMLAFAGIEPGINESGTESHGGKMVKRGSSQLCYTLINWNLLSIIPIADLILQIVRKLFYINACINDEKSLKISVLSQIRKAINMLKVLKLYDFQICQFFNK

SEQ ID NO: 376406 - protein, 356 aa, unidentified
MVMIGTDSHKRTHTVVALDEVGRRLGTKTVRTNAEGHLALVEWAAQFAELDEHGVRFALEDCRHLTRRLESDLLAAGQRVLRVPTRLMAGARRSSREPGKSDPIDAEAVALAALRHPGLPVAELDGPAREVKLLSDHRHDLVVQRSRIAQQVRWHLHELDPDLMIPSRGLRRQKVVRELLVELERFDGVVARLARRHLLRCQELTTLINDLERELRELVRQLAPSLLEIPGCGVLSAAVIVGETAGVHRFRDKDAYARFTGTAPVPVWSGSSAGKVRLNRGGNRSVNCALHMIAVTQARGVGPGRPYLDKQLARGKDRVAALRLLRRRLSDVVFTALRVDLRAAQQPASSPLQLAA

SEQ ID NO: 376407 - protein, 347 aa, unidentified
MKRIAIDLAKSVYQVAESIHVGRVDRRRRLDPKAFGRYVQQQQEPVEWVMEACGTAHHWGRLMQAAGHRVVLLHPRYVRAYRRRSKTDRNDCDAILEAARCEGIRPVPVKSMQQQQLQQLHKLREGWKKARVQRINLLRGILREMGVAAPSGTQAFLRQACALIDQPEVQPLRGALQVLLGEISLYEQSMRECEEQLARWHADDEVVHKLDEVSGIGLLTASALKTAVGRPERFASGRHLSAWLGMTPNEYSSGERRRLGRISCKGNTYVRTLLIHGARAALLAAKRCQARTPERLTRLQRWALQTAERIGHNKAAVALANKLVRICWAVWCHERRFSGDWQSAGPA

SEQ ID NO: 376408 - protein, 344 aa, unidentified
MSIAVLGIDLGKNVCSLVGLDATGAVVLRRRTRRETLIGMADKLPRCVVAMEACCGAHHLGRIFAAHGHDVRLMSPEYVRPYVKAQKNDDRDAEGIAEAATRPTMRFVELKTQDQLDMQTLHRSRERLVGERTALINQLRAILLERGIVVGQGKRKLQEFLVQLIDDRKGEGLSSRLALLVTDARAQWAELDRRIAAFDAEFAAAAKASDDVRRLTTIPGFGALTATALVAAIGGGESFEHARDFAAWLGLVPKQFTTGGKAKLLGISKRGNKYLRKMLIHGARAALPHVAARDSALGRWAKALLGRAHKNIAIVALANKLARIAWAVLRRGAPFSTTTEMVVA

SEQ ID NO: 376409 - protein, 407 aa, unidentified
MFVGIDWASTEHAVCVLDQTGKTVRAFGIPHSAAGFDDLVARLRRLGAPAGLPVALERPDGRLVDRLLEAGHPVIPVRSNAIKAWREGEVVSGAKSDTGDAKVIAEYLRLRHHQLRALTPFSDATRALRAVVRARGELVRQRVAAINQLTATLDAFWPGAKAVFPDVERKIALTFLERYPTPESAIHLGEQRMAAFLTRHRYCGRTPAAELLARLRAAPAGVAGGDEATARRDAVLAFVGVLRALNQAIRDLDRSVVARLGEHPDSKVFASLPRSGQINAAQMLACWGDCRDAYDGPEAVAALAGIVPVTRQSGKHAAVSFRWACNKRFRNAMTTFAHNSRLASPWAAKLYADAIARGHDHPHATRVLARAWVRVIWRCWIDQVPYDPVKHGAAQRLAEEAAAAAAA

SEQ ID NO: 376410 - protein, 449 aa, unidentified
MSKGSGITRGDRRRNARKARLRALVPHENAVAGLDLGEKKQALAVTGADGVVLARRSPRVSVHDLGPYLDRAVEQALAAGYAGLSVACEPTGSRWMVVQDLCEERGLPFVCVQPLVSHVAREQEDLTGDKTDEGDSGLIARLARELHCYEPERLEGAWAELRDEGRRRAQLITNATAAKQLIRDKLGLAAPALLESACEPFDSPTWLASLEVVLECCGGDMAAVTAMGYAAFAAAAARALPGWGGQRVGGTCRQLFSALGDGRGVMRMRRAALRRVRGALADLKYARARRAQAEADMIALLGELGVDADRICQIPGLSAATLAAILAETGDLHNYESSSSVVKHAGMSPARNESGSFRGQAKISRRGRPVLRLAVWRATWPVLRHCAVLAAKHTALTSRDDDSKLTPEQARVACAASLLRWIWSLTVHGTRWDARIAAGELGHHHAMAA

SEQ ID NO: 376411 - protein, 347 aa, unidentified
MYSIGCDLHSKRMQLCLVDDAPSHEGYPLPEEAVLLEAKVPATREALAGWLGKADRVAEGSKAIAVETTSNWEWFVDAASLLVEDVHLVHAQRAKAIASARIKTDKIDARVLAWLLKNDLVPDVFIPSFEDRELREVFRHRSYLIKERTAFKNRVHSLLKKRGIRQNHSDLFGAGGRQFLTELELGEPHELVLEQSLEVIDGLTERIEASDLYLDGHPRRPSGMVGRLKTTPGLGQRLSMHAALEIVEISRFPSDGDYVSYCGLAPGTHESDETSHRRGLLPHGNRYLKWIYTHGAQHAKRHPYFRSTYRRQKRKNGKMIARLTVARKMARSNYHMLRKGEDFLGGA

SEQ ID NO: 376412 - protein, 378 aa, unidentified
MNRIIKIGMDVHTTNYTLCIFEPSFEHDGTVHCITQVKPEIKKIIHVIEVFKKKHENEELNIVCGYEAGCLGYSLYHELKEKGVECVILAPTTMKTEKGGRKLKNDYRDAKMIAECLAYGGYSAVHVPTELDNSVKEFIRMRDDIKENLKSIKQQIIAFLTRNGKQFNGKNYWTKKHIDWINTISFSEPLLLDTLKEYMIEYNHLCDRVETLDKQIEEISVKEEYVEKVQQLQCLIGIKTHTALSLIVETSDFNRFKKGKMYSAYLGLIPGDDSSGGHEKKLGITKAGNSHLRKLLVEAAQGYTRGKVGFKSKDLKSRQEKCSSEVVAYADRANERLRRKYYRMTLRGKKYNVAKTAIARELACFVWGIMTDHIDLCS

SEQ ID NO: 376413 - protein, 355 aa, unidentified
MNAIKYIGMDVHVATISIAVLDANRKLIMEVTIATQTGALLDFIRGLSGTLNVSFEEGTSAHWLYTLLEPQVAKVVVCDPRQNPRRLGEKKSDRLDARKLAEWLRLGTLKPVYHGNSLGPALKELARSYRTLVSDTARVMNRLKALYRARGIGCAGTRVYSPRFRDQWLEQLREPGARARAERLYRQLDLLLPLRQEARAAMVAESRKHPAHKILCSIPALGPVRVALLLALLQTPYRFRGKRQLWTYAGLALVTRTSADYQVVGGQVTRARKPALVLGLNANHNHTLKGLFKDAAASTLAHPGPFKDFYTTRVAQGMKPELARLTLARKIAAIVLTLWKKGECFNVEHVKAQAA

SEQ ID NO: 376414 - protein, 354 aa, unidentified
MTKSSNQKIPALSSLGVDIGKNVFHLVGFDTAGKIAVRRKIKRLSLVDEFKKLPRCIVGMEACLSAHFVSRTLRGLGFEPRIMPAKYTKPFLKGQKNDYNDAEAIAEAALRPNLRCVREKTQDQLDLQALHRVRFRLVSRRTATINQIRAFLIEQGITVRTGAHALRNSLFAILRNRKDEISPRMNDIIVGLYEDWLRLDERIESTTTEIEMISKREANCQRLMSVPGIGPIISTAVVAAIGTGEAFDRGRDFGAWLGLVPRQFSTGGKTTLGRISKRGSRYLRTLFVQAAHVILMRPKNWEKFSFGPWLEQASQRMHKNKLAAALANKLARIAWSVLRHGKAFDTNRIEVTAI

SEQ ID NO: 376415 - protein, 392 aa, unidentified
MVISVGIDVSKDKHDCFIVNSEGEVLADVFTIPNNMDGFHYLLQRIQDCANTQNKIKVGLEATGHYSYNLLGFLLDNGLPTYVLNPLRTNLYRKSLSLRKTKTDRVDARTIATMLLSDAGLKPYTDTAYHNEELKSLTRYRFDKVKERAKLKSSVSRLVCILFPELEKLVPTLHMTSVYSLLEEFPGAKQVAAAHLTRLKTLLETASKGHYKRDMALEIRDAARNSIGSRMPAKSLELQHTIRLIRELDDEIAEIEKQIQAIMDELNSPITTIPGIGFRMAAMIFAEVGDFTRFDSPDKLLAYAGMSPSTYQSGQLKNCYPHMEKRGSRYLRYALYNATKYVCHWDPTFAAYLAKKRAEGKHYNVALSHATKKLVRLIFAMEKSRQPYCSAA

SEQ ID NO: 376416 - protein, 345 aa, unidentified
MRNSIVKSEIKVLGVDLAKNSFQLHGIDAQGNVVLGKRVSRKRLLSTVARLPSCLIGVEACGGAHYWAQVFRVHGHEVRMMAPQFVKPYVKSNKNDRIDAEAICEAVQRPSMRFVPIKAPRQQDIQSLHRARSLALSHRTAQVNQIRGLLAEYGIVIARGRRRVRGCLPGILEDAENGLSVAFRELLHGLYEELVHLDERIDKFDQRLKQLSRENAQCRRLMTIAGIGPLVATALVAAVGDEVGVFKNGRQLAAWLGLVPRQCSTGGKTQLLGISKRGDRYLRTLLIHGARSVVRCVGTKADRHSRWIRALVQRRGRNIAVVAVANKIARIAWALLNSKQAYQTA

SEQ ID NO: 376417 - protein, 450 aa, unidentified
MSLDCCCEHVGLYPGRGTSERPLARSSGRAEGRMVRELIGMEVVFDRVAGLDVGKASVTVCVRTPGAWRGRQAETRTFKTTTRSLEVMRDWLLEQGVTIAAMESTSTYWKPPFYCLEEVMEVWLLNAAHMKAVPGRKTDVRDAEWIAQLLEHGLLTPSFVPPPAIRRLRMLTRYRVQLYGDRTRETVRLELMLEDASIKLSTVASSLTTVSARAMLAAMIDGETNARVLAEMAKGRMRSKIPDLAQALEGHFDAHHAQLARSILDRLDRVEQALAELDEAIAAACEPWAHQIELLQTIPGVGLRVAQVIVAETGADMSRFPTAAHLASWAGLAPAMYESAGKRSPAGRRRGNKWLTAMLVESAGSVGRMKGKNYLAVQHTRITRRRGMSRAQIAVAHSILVAAYYMLKRDEPYRDLGPEWLTKRNEEAHTRRLVAQLEKLGHTVVIDPAA

SEQ ID NO: 376418 - protein, 423 aa, unidentified
MNHSTLCVGADVHLDQIVLRAVDQVEAHEVIPRFHVTNNLPGAQAAATAIAQAATPLGYTHIEIGWEATGMLWIPFHRYLSACPQLHPFTLKLVCFNPQLVTRFKEGLVLRRPKNDKLDASAIAARLRVGELPLSYVPDDFWQGLRRLTRYRFQLARNLSREKMRCASYAFLKASDWQRVEPFADLFGATSMALLTEFTAAELRGMTHDQLVDLICHRGRSHFQDPASTARQLRQALHSSYPIDPPMDEMVTVALATGWDHIRFIQRLMKQIDKHIARYIDPVPNPIISVKGLGAVITAGVLAEVVDILRFPEHKHLAQYMGLTWEKRSSGNFVSQNTRLTKVGNKYLRYYFILGANTLRQFNLEYKAFYWRKFNEVSKYQHKRALVLTARKLVRLVHALLTKNVPYVRPRTLAHLQEDGSLQ

SEQ ID NO: 376419 - protein, 375 aa, unidentified
MKETLRFLGLDVHAETIAVAIAEPDGEVRSLGTIANRAESIRKLVKKLGPSERLKACYEAGPTGYVLYWQLAELGVLCEVIAPTLMPTKPGDRVKTDRRDAERLARSYRSGDLTPVWVPGEGSESLRDLVRAREAAKQDQMRARHRLSKFLLRTGQRPATGVKPWTLAYTAWVKQIRYTQAARESTRLDYLHEVEHMAERVIRLEQAITDAVKLASPAIQEVVRGLQAMRGIAQISAVTIAAELGNISRFQSPRQLMGYSGTVPSENSSGQRTRRGTITKTGNAHLRRIAVEAAWSYRLRPCIGPALRKRQQGVPEEIKEIAWKAQQRLYKRTMRLAAAGKDQRKTVTAVGRELLGFIWAIGVKAETASSQQRAA

SEQ ID NO: 376420 - protein, 371 aa, unidentified
MGLIFDKGHKETLAVAIAAPERLGEVRYYGTINNEAQAVRRLFQKLQGLYGNILSCYEAGPCGFGLYHQLTAMNIKCQVIAPSRIPKSPTDRIKNDHRDAISLARLLRAGELTPVWIPDLTHEAMRDLIRARAAAKRDSRVARQRILSMLLRTDKRYAGKHWTGKHRTWLANQSFSQPSQQIAFQHYCQSLEQIEDRILQLDQEISRLLPEWSLCNLVCQLQALKGVGQLTAITLVAELGDFSRFSSPKQLMAFLGLVPGEYSSGNSIRPRGITKVGNSELRRLLYEAAWSYRTPAKVGAWLIYYRPDSVTQYSKDIAWKAQQRLCSRYRSLTAKGKKSQVAITAVARELTGFMWDIALAAQSPFSQQKQN

SEQ ID NO: 376421 - protein, 361 aa, unidentified
MNKSSNRSERGPKYASLGLDVSDRKSCWVALSREGKVVEQGRVATRSPEMEKWAMGMAPTTIALEAGPHSPWISRLLERCGHEVIVGNPAKLPSISRSRSKSDWRDAEQLARLARFDRSMLHQIKHRSERLQQDLQVIRSRDAVVRARSRLISHVRGTVKAHGQVIGRCSTAAFTRRAQGVVSGPLLVIIDPILEAIDKLSATIDSYERKIEQLAAGPYAETRWLTQIKGVGALTALAYVLVLGEATRFRRSRMVGPYLGLVPARDQSGESDPQKGISKEGDRLMRRLLVQSAHYILGPFGIDSDLRRHGEAIAARGGKNATKRAAVAVARKLAVLLHHLWISHDEYVPLFNHKTNDAIAA

SEQ ID NO: 376422 - protein, 475 aa, unidentified
MTPRATDFDPVEAASKKKRRRRCGKKIRLPVSLKHVNLNAAGIDIGANEHYVAVPEDRDEQAVRSFGAFTIDLIAIADWLESCEIDTIAMESTGVYWIPIMEVLEERGFTVLLVDPHKLKNVSGRKTDVLDCQWIQQLHTYGLLTGAFRPSDGICGLRSYVRQREMLIRRAAEHVQHMQKALTQMNVKLSQVLRRVTGKTGMRIIRAIMDGEHDPKKLAEFRDGRCHNDEATIAKALEGNWRPEHLFSLRQAVELYDFYQDKIVACDRELEAKLGTLSEAREGLATLGKKPKGQPSHPLVFGGHAELYRVTGVDLTEVPGLATPTILTIISEIGLDMTKWRHVKAFVSWLGLCPGSKISGGKVLSSRSKASANRAAAAFRMAAYGLQHSNSYLGAFCRRMKAKMGPAKAITATAHKLARIVYSMLLNQVPYSEKGLDYYEEEYRQRRVANLKRNARELGFQLLPEPEPLTAGATT

SEQ ID NO: 376423 - protein, 389 aa, unidentified
MKKNTTTKKSPKKTAAKEQSKRIRQLGAKQKLYVGIDLGDQTSRYCILDEGANVVSEGQVPTTKAGLDSLFAKMPASRIAMEVGTHSPWVSRHLEAMGHEVIVANARNVKLITQSVRKNDRIDARQLARLARADPKLLSPIRHRGERAQLDLAVIRARAELMEARTMLINSARGLVKPLGERLKKCDADQVRVGLGEGLSEGAQAVIVPLLKAVEGISEQIGKYDEQIAEMGKRYPEKKLLEQVYGVGPLIALTFLLTIEDAGRFAHSREVGPYLGLTPKQRDSGESQPELGISKAGDKLLRSLLVQGAHCILRKRAPESDLREWGMGKMGKGGKRAKKRAIVAVARKLAVLLHHLWATGEVYDAHYNRKAAEAAAAKAKGKSKGKVAA

SEQ ID NO: 376424 - protein, 475 aa, unidentified
MNVNGNRRKKQDAKLSVIDQQVILRKVEEIKSALKASTWHELETNGKFDRNDKLTFISEDMLILGCDIGNETHYARAIDTRGRELSKSAFSFSNTEEGFKSVLDWALKLAAENEKHQIVMGLEPTGHYWFCVATRMVNNGISVVQVNPYAVKQTKEVEDNSQLKDDTKDSKLIANMVKDGNFGMSYLPEKLYAEIRRLSMFRDQLTEDRIRNLNRLHRELKIYFPEYKDAFGKTDGMFCLELLKVAPFPKDLMQLGADGIRQIWHDAKLRGRGYAKAESILDYAKKSVGIKDGSDASWQSVKWFVNKIQELDIQLEDVQQQLNKRCGEIPHAENIKEISGIGETTLTGILAEIGDISRFDDVKEVQKLSVLGLVACSSGKHKGETKISYRGRKRLRYWLFQAAKSAVVHADEYRKLHTYYATRTDNPLKKMQSLIVIACKLLRVIYVILTKETKYNPKKMLGDIKRSEKQLTAVA

SEQ ID NO: 376425 - protein, 332 aa, unidentified
MQYVGIDLHKQDVVIAVEDERGPVGKPRRFPCRDEAAIVAHLWAHRPFRAVIEASASYRWLYDRLSALGEVILAHPVRLRASIARPAKTDKLDAALLARLLRIGQIPESYAPPAAYQELRELTRARARLSRSATEAKNRLHGLLTARNIPAPYRRPFGVRGRRWMRSLDLGVVGNLERDELVGRLEHYEAQRDRLDALIEERATEFPQIEALADIRGVGLYTALLVVAEIGEPERFNEPGQVASYAGLATRVYQSGSHDYHGHITRQGSPWLRWALVQAAMKAIGQDRKLANFYERVRKRSSRHIARVAVARKLAEICWIRLRRWHRERAAA

SEQ ID NO: 376426 - protein, 370 aa, unidentified
MLDTTTFIGLDVHARSIKAVSLDVMTGEVRAATFGYDAGAVAEWVRSVDPRARCVYESGVTGFDLQKRLSGLGVDCVVGAVSKMIKPSADRRRKNDRNDAEFLARMLSVGNVVEVWVPDDECEAARDLTRALEDARDDLSRSKQRLSKFLLRHGLAFDERTPTGRRKGNWTRAHWSWIESIRFAEGADNDVLAYYVDAVRRAAEEKARLEGLVEAEARKPRWRKRVDSLRCLKGVDTATAADLVFEAGEFSRFGNARSFAAWVGLTPSEHSSGESDRRGAITKAGNKHLRKTLVEAAWHYLTCSGRPKDLARGQAPDRGARRHAAKGVRRLVERREALLARGVHGNKANVATARELACWVWAVGLMAEEA

SEQ ID NO: 376427 - protein, 418 aa, unidentified
MKIVFPTCCGVDVHKSFLVATIIKTPQNSLQQSYQKKRFSTFNSDLNRFADWLRENDCLDVCMESTGKYWVPVFNILEKQGIRVVIANPKWVKAVKGNKDDTKDSKWIGDLFRIGLVKSSFIPNKEIRILRELTRYRYKLISMKSSEKNRFQNAFTVCNVALDSVVSDMFGKSATAITDYLTSDVEFDAQHCISLLQRSLKKKAPAVLEAVEGYQIAPEQKTRIGIVRDHLHYIDKLIERVDDCVEGMVKKYEGAITLLRTIPGVDRSSAITILSEIGIDMAHFGSSKRLCCWAGLTPGNNESAGKKKSVRISRAGVYLKPALVQAAHAAVKDKSSTYYAVKYERISKRRGKKRAIIAIARMILTAVFCMLSTGEVWNPVDLYKVDMPEHLKEKQLAKAVKQAVHFLETQGLTVLDSA

SEQ ID NO: 376428 - protein, 346 aa, unidentified
MRQIVRIGLDIAKRWFQARGVDEAEREVFNRKLPRDKVLGFLGSLPPCEVALEACSSSHYWGREIERLGHRVRLISPNYVKPFVKRGKSDAHDARAICEAASRPDMRFVPVKTEEQQAVLMQHTSRQLLIDQRTAVANSLRSQFAEFGVIEKRGVENLADLVRRLDENNPDIAEFPQSALAVMRVLADHLRALEAHLALIDEQIEAEQRSSASAQALETIPGIGSLISAALVAHAPDPSAFRSGRDFAAWLGLVPRQNSSGGKDRLGRITKQGNPYLRRLLVLGATASLRWLHKRTDPLAVWTRQLLQRRPARLVTVALANKLARIAWAIMTTGELYRHEAAPVAG

SEQ ID NO: 376429 - protein, 325 aa, unidentified
MEKSTLDVLGIDVGKRDLHAVLLQGKRSASKSVPNSGAGIGQLQTWLTNRKIERVHVCLEATGGWSEEVAIALNEAGHVVSLVNPARIKAFAQSELLRTKTDRIDAALIARFCGLHEPEPWTPPAPEVRILQGLVRRQQSLIEMRVAEENRRGAPLVSAPVLASIEATLAHYAGELERVEREIKQLFKDYPTLRRRRDLLTSIPGIGKTTAARILGEVPNITELRGVKAVAAFAGLSPRHYQSGSIEYRSRLAKTGNAHLRRALYFPAITAIRHNPRIHEFAERLRARGDKSKMTVVAAAMRKLLTLAYGVLKSGRAFDPAYGTA

SEQ ID NO: 376430 - protein, 434 aa, unidentified
MKITRGMRRRSAKLERRAQLVTPDTLIAGVDLARKESVVVFVRARDKVRVGRLRIPTTADGVRTLARRAGELQRRHQLPRLVLGMEACSHYWKVVAKAATEIGLPYLIVQSFVLARSRELDDLTRDKTDPRDAALIADLVAELRFVDAQLESGVWAELRLLAEARDQRGVERRSALQEQRAFLELVWPALLQQVSDLAGTHVQATLRLGLTPLEIAALPLEEFTQRLREEHRDRRFMRWMAQRVWCAAQAATDSDEMTAAILRVQFAAERVQIAERMVAILDRRMLAAFERTGLGWLRGQIRGLGDVMLVNLLAMTGDLRRFDDARCLPKLAGSNPTERSSGQSSAPGGIHRRGRKVLRLLAYQAAVCLVLHHPDFRQRFLALTQREHHRLEKRQAYVAVANKLLRTLWAMASSGRAYDSQVALGLARGEVRAA

SEQ ID NO: 376431 - protein, 429 aa, unidentified
MVSGSAGRAIGLDVHRDFCEVAICESGRVRSAGRIETAPEVLELFARSLGPEDRVALEVTGGAWEIARILEPHVRRVVVVSPDDTGIRQARAKTDRLDARTLARLLWTGELDAVWMPDERCRLMRRRLARREQLVRSRSRAKNEIHAVLMRRLKGKPPFSDLFGVKGRRWLGELELPVEEAETVASALRHIEFLDQEIAAVERLIAREALVWADARRLLTVPGVNVICAASFLAAIGDIRRFRTSRQLVAYLGLDPKVRQSGEQPAKSGRISKRGSASARWALVEAAWSVVRQPGPLHAFYERIRARRGHGKAVVASARKLAILFWCLLARGEDYAHQQPSLTAKKLRLLEITAGAPTLKGKRTGLWATRQRMRQAERELAQQAEASYKRTVSDWQSARPAKGGRERDTGARIVKSLKRGQAARQTTSS

SEQ ID NO: 376432 - protein, 354 aa, unidentified
MPIVAGVDCHKDSHAIVIVDEVGKVLRSFSIAASAPGYREAMVIARDLGVALWGLEGTGTYGRSFARTLVQESWIVFEVPGIVTKRHRKHGSRHGKSDELDAQAIAEAVLRESDRLPRFREFAEQEALRLRYDQRDRLVRERTSVINRIRCAALRLGIDEVPDDLTAAASLQRMSNVVEPLRGAGLVEDALVEELLFETSTLERLNDEIHRLERVMGPFVARLAPELLELRGISTVTAAGLIGHTGDLANLRDAGAFAMRSATAPIPWSSGRNQAVRINSGGDRQLNRLLHGIALTQVRSTGHPGRRYYERKLTEGKTPRAAMRALKRQLATVVFYRLRLCQARIEDAFGRAAA

SEQ ID NO: 376433 - protein, 355 aa, unidentified
MDNLRYIGLDVHRDTISAAVLNREGQLMMQSVVPTRAPAILDFLHGIRGTLHVTFEEGIHSAWLYDLLQRRVARVLVCDPRKNRLLKSGNKGDLIDARKLAELLRNDALSPVYHGELSSLEVQRRTRSYTMLTEDTTRIMSRVKAVFRGQAVPYHGKSIYRPDRRESYLAQLPTEGLRQRVELLYQELDAVHRLRLRAKREMLAECRKHPAMKWLQSVPFLGKVRTAVLIGRVQTPHRFRTKRQFWSYCGLALETHDSAQYHVLHGQVERKPRFVQVRGLNWNHNHDLKDVFKSAATMAAVREGVFRDYYCGLLAKGIRPEMARLTLARKIAAITLKIWKEGGTFNAEQVKPQAA

SEQ ID NO: 376434 - protein, 354 aa, unidentified
MELHTIGIDLGKTVFHLVGLNLGGEVVVRKKFSRTQLLRFTARTQLLRFTANVHVGLIGMEACGGSHFLGRALREQRHEVRLIPAQYVKPYVKTNKSDYIDAEAIAEAVARPTMRFVPIKTDDQLDLQSLHRVRERWVMRRTAVINQIRGLLLERGITLRKGRHHVHAALPLILEDADAKLSGAVRMLLAQLKLDLDQLAARIDEADAVIRKTAHENEACRRLVAIPGIGPVTATALIAAIGNGGAFHKGREFAAWIGLVPREHSTGGQQKLLGISKRGNSYLRRLFVQGARAVLQQRTKQSSGLSAWLAQLTSRTHRNVVAVALANKLARIAWAVLAKNEPYRHPVLADAAAA

SEQ ID NO: 376435 - protein, 318 aa, unidentified
MQISGCFIGVDVGKFELQVAGHEGAIVSGSLANSRSSIVGWLKRLPTGSVIAMEATGGYQELLARLAHERGFAVYVLNPTHVHHYAISLGNRGKTDRLDAEVIAQYIAQRHTKLHRYEPVSAELQQVRSLQSLRAAVVRVGASLRLSSQRHGCASGHQEKALASLRAWADALERELIAKVKAHGEWAKTYGLLTGICGIGPINGAALTTLFSRVPFASSDAAVAFCGLDPRPKESGRKVGRRRLSKQGDKAARTLLYNAASSAARTAHFKDYYATLRARGLPSTAALVVIARKLLRIAYGVWRTGQAFDPAKLNFKKT

SEQ ID NO: 376436 - protein, 316 aa, unidentified
MNEMIVEKFVGIDVSKSTLDVCIEPAVQTLHVAYDEAGISQIAGRLKEVNPTLIVMEATGGLEVRIASELASLGLPVAIINPRQARDFAKATGQLAKTDQVDAAVLAAFAKAIRPHVRPLKDADTLALDDMVSRRRQLINMRVQETLRLGTATTKPLQKSLTKHIVWLDRQIAEVDSDLNKRLRESDAWRAKDDLLRGIPGVGAVTTQTMLAKCPELGTLNRREIAALTGVAPLANDSGKHRGKRFIWGGRADVRAVLYMAAISAMRCNDTIKEFAERLKKAGKPPKVVIVACMRKLLIIMNSMLKNNTPWNPNIA

SEQ ID NO: 376437 - protein, 352 aa, unidentified
MSIVGGFDVHRKQITFDYVDTVTGEVKCGQIASADRRRLARWLERFDGRDDVAFAVEACTGWRYVVEELQRAGVAAHLAEPADTAAARGRKKHAKTDRADSKLIRELLQGNRIPECWIPPQHVLEHRALLELYHDLRREHTAWVQRVHAVLFHQGAERLGEGGLGTHAGREQLRRIAAAQLSPAGRVQIATYLQVLEALEAQLDAVHRRLRDAARHLRGAQVLTERIYGVGPITALACTCWRAGAGRFHSTRKAVRFTGLDVTVYSSAGKRSPGHLSRQGPPVLRWCLYEAGNACPRQRTRSRLLRDGETAHRRQARRHLRSPQNRAPGLSHPGRARRRRARHGVTHPVITS

SEQ ID NO: 376438 - protein, 334 aa, unidentified
MEIIKQVFGIDISMDSFVCRSGIIKIDQQTEISSFKEFKNIIQGFRMFYKFAQSQQIDGVTQYFLMEATGVYYEALAYFLKSQGAHVIVVLPNKAKHFAKTLTIKSKTDPIDAHMLTQMGLEKRLSEWEPPSELMKELKLLTREHLSLKELKTDAKNRIHAKTHSFKPGKDTVRRLRREITLYEALIKEVELSIRSLLQRDLKIWVKIQNILRVNGVGLMTVAKVLAETNAFALIRNGKQLTSYAGLDVVFNESGKHQGKTRISRKGNSHLRQSVYMPAISAIKSNPNLKSYYDRIIEKGKPKKVGVIAVARKLLLLIYFLWINETEYDPAYAA

SEQ ID NO: 376439 - protein, 385 aa, unidentified
MTESSDYESVQVFIGVDVGKDTHHAVAINRSGKRLFDKALPNDENKLRSLISDLKQHGQILLVVDQPATIGALPVAVARSEGVLVGYLPGLAMRRIADLHAGEAKTDARDAAIIAEAARTLPHALRTLKLADEQIAELSMLCGFDDDLAAQTTQASNRIRGLLPQIHPALERVLGPRLEHPAVLALLQRYPSPEKLASLGEKKLAAQLCKLAPRLGKRLAADIAQALAEQTVVVPGTNAAAVVLPRLALQLITLRKQRDKVALEVEQRVLAHPLYPVLTSMPGVGVRTAARLLTEVACRAFASAAHLAAYAGLAPVTRRSGSSIRGEHPSRRGNKALKRALFLSAFAALRDPLSRAYYTRKMSQGNDTIRRLSPWRDDAATFCSP

SEQ ID NO: 376440 - protein, 368 aa, unidentified
MPQVTTFVGIDAHKKDLFIAMLVGRETVPVTWTVANEPNAVRRLIRKLEREAPGPIVACYEAGPGGYALQRQLTSARIGCQVIAPALIPRKPGDRIKTDRRDARKLVELLRAGLLTEVRPPTPEEEAVRDLCRARDDAREDLQRCRHRLGKLLLRRGLHYSGRNWTRAHRAWIDSLEWPQPAERVVVEDYLLAIDHLDARLLDLDARLSDIAESAPYRERVGWLRCFRGIDTLTAILILAELHDFRRFESPRALMAYLGLVPSEESSGEQHRRGRITGAGNALVRRLLVEVAWHYQHRPGVGVGLARRRQGQPARVIVIADKAQHRLCRRFRRLAEQHKPAPKVVVAVARELAGFLWAALQPAAAPVA

SEQ ID NO: 376441 - protein, 447 aa, unidentified
MTQRNRSLARAAPLALTHPNAAGIDIGSASHFVAVPPDRDDCPVREFRSFTGELQRLADWLTACGVDTVAMESTGVYWIALFELLDARGFTVLLVNARHVKNVSGRKSDVLDCQWLQQLMSYGLLRGAFRPGDAVCALRALVRQRATILRTQSRAVQHMQKALVQMNIQLATVIADVAGASGQAILRAIVAGQRDGHALAALCDVRIKAGADEIAASLQGHWRAEHLFALKQALAAFDFCGTQLAECDAQIEAQLAVLQATEAEPAKGKKRSKARNAPKFDLRTRLFKMCGVDLTRIDGIDVTTALVVMSEVGPDMSKFPSDKHFASWLGLCPGTKITGGKVMSGKTARVANRAAQALKLAAAALRTSQSALGAYYRRLCARMDKPKAVTAAAHKLARLIYAMLTKGQEYTDRGQAYYEERYRQRVVANLNRRAQQLGLQVVPIAPA

SEQ ID NO: 376442 - protein, 335 aa, unidentified
MQVYGIDLSMEKFDVNFIDLNGKEKNLQVKNKLASISKFLERLSYDDVLVAEHTGAYGDMLVFLSNQFKINIALVPGYTIKHSMGFVKGKSDPIDAKRIREYGERFFDKLRFRVCDDDTVVELKALYSLRAQLVKSRKGLRTGEHARSQEPFQSIAVNVYIKSVLAALDKEIESVNYEIEQLIMANEATKENYELAVSVKGIGPVIATDLIIKTGNFQNIDTARKAASYSGVCPFPNASGKMVGKAKTSPFADKKLKSLLYMGAKTAVKHNMEYRLYYQKKKLEGKPHYLIMNNVCNKILRTIYSVVQNKKPYTQDYICIDPRERNLNSSNEKVA

SEQ ID NO: 376443 - protein, 430 aa, unidentified
MLENVAVRGSRYREPLTRRTAPVSPQATTVGELWDRCRSHARPNSRQTSIARTRQVTVAQIICGVDVSSISLEACIGPTGPARAFSNTAEGIAELLAFCRQQGVDLVAMEASGGYEKQPFALLWAQGLPVALLNPRAVRRFAEGMGLLEKTDRIDARVIAWFAAVKDSRPCDPASAQQQRLKALVTRLRQLTELQVAQRNQRLLVREETVLTSFSALLALVAAQIRILEADIAALIAADPLWQKLDQAFRSIKGVADRTVARLMAELPEIGMASNKAVSKLAGLAPLARDSGKHQGKRPVRGGRREVRAILFVVAGVVRRYDLDFAAFHQREDVEAAHALTYRGAEAYNEDKYVKKDAVSMDTVKLISLAKIFVGDVGSEIADQCLQFHGGWGYIEEFHIARAWRDQRLLRIGGGTTETMRYYVAKLMGL

SEQ ID NO: 376444 - protein, 359 aa, unidentified
MLAKATASGKKYTYFIGIDISRNELDFAVFKNKEFLFHQETRNRSAAINLFIKELRALPGFKLSKALFCMEQTGMYGNYLLQSLYKAKADIVVENPVRIKNSMGLVRNKDDRIDAIRIGQYTIKYLDDLKLWEPRRPVLVQLANLFSTRTRLLAMSTALKLPLKEQSDFYRPDLQRETVKACKKSIAALQEDFEALEEAIKELINSDARLKRLNQLVTSVHSIGPVTAIQMILCTNEFRDITDPRKFACYAGVAPFKKESGRINGRAKISHAANKRIKSLLHICSMSTLRSDNEFKKYFERKTKIEGKPGMAVINAIRNKLILRIFACVNQDRMYIRDYKRSNEIIADELIDASSLKTY

SEQ ID NO: 376445 - protein, 344 aa, unidentified
MEHFAGLDISVKQTSICIVDDAGKIVKEVKVASEPEALLKVLGKPAYRFKRIGLEAGPLSQWLFSALAEAELPVVCVETRHMQAVLKAQINKTDRNDARGIAQMVRAGLYRPVHVKTLRSQKLRMLLTHRKLLQSKAIAIENDLRGTLRNFGLKVGMVGKVKFESRIKELVETIPDLAVLVEPLLIVRRALREQTVILHRRLLAIVRDDEVCRRLMTTPGVGPVVALTYRATVDVPARFRKSRSVGAVFGLTCSRYQSGENDWSGRISRCGDEMMRVMLYEAAQSMLHSKKWSWLKAWAMQIARRRGMKKAIVALARRLAVIMHRIWVDGTEFRWTREAAAAAA

SEQ ID NO: 376446 - protein, 389 aa, unidentified
MKIYVGIDIAKLNHFAAAISSDGEIIIEPFKFTNDADGFQLLVSKLESFDKNSLIIGLESTAHYGDNLVRYLVAEFYQVCVLNPIKTCQMRKNNIRKTKTDKVDTFVIAKTLMMQDDLRFVSFYDLDMMDLKALGRFRQKTIKQRTRLKIQLTTYVDQVFPEIQYFFKSGLHQHAVYALLKEAPSPKEIASMHMTHLANLLKVNSHGHFTKELAKELRVLAQKSVGANDSAISIQITQTIQQIELLDSQLEKIEAEMTDIMKFNDSVIMTIPGIGYINGGMILGEIGDIHRFSNPNKLLAFAGLDPSVYQSGNFQAKTTRMSKRGSRVLRYALVNAAWNVVRNNATFKAYYDAKRAEGRSHYNALGHCAGKLVRVIWKMLTDEVEFNLE

SEQ ID NO: 376447 - protein, 342 aa, unidentified
MQITTIGLDIAKNVFQVHGIDANEKVVVRKQLRRSRVIAFFEALAPCLIGMEACATAHYWARELTKLGHEVRLMPAKDVKAYLKRNKNDAADAAAICEAVRRPTMRFVRIKSAEQQGQLMQHRTRDVLIRQRTQIINALRAHLAELGIVAAKGDAGVNELLAIVADEADTRLPIDARASVIVLAAQLEALQTLIGSIEKRIKMQHRSNETSQRVETIPGIGVLGATAIVATAADPTVFRSGRDFAAWIGLVPRQDSTGGKQKLGPISKQGDRYLRRILIAGAIAVLRRAQENPGKYPWLTQLLARRPFKVVAVALANKMARTAWALMVHGGTYRAPELVEAA

SEQ ID NO: 376448 - protein, 433 aa, unidentified
MGLIVPTVMPPERADQPPSYDGFVGIDWGSQQQQVSVLDRDRRRMGERVVDHDGASLAQFVAWLWGLSAGQPQRVAVAIEVPRGALVEGLVERGFHVFAMNPKQLDRFRDRHSVAGAKDDRRDAFVLADALRTDQPSFRRLRLDDPQLLVLRELSRAEETLLEAFRRSANQLRDQLHRFYPQMLQLCSAADAPWLWDLIDLAPTPAHAALLREEQVQGVLKAHRRRRLKAQEVLACLQTPARPVAPGAVQAAQAHCRFLLPCLRGLAEHLQACGQQVGALLHTLAEMPGAGEGPSDVAIVQSLPGVGRKMTAWLFAEAAQPLAERDYQVLRTHGGVAPVTKQSGKRRVVVMRRGGNPRLRHALYHMARVAMQRDAHFNSVYAALRAKGQRHGQALRSIGNRLLRILMAMLRHRTCYDASRIHREPVVQMGETI

SEQ ID NO: 376449 - protein, 386 aa, unidentified
MIYVGIDIAKLNHFASIISSDGEVLIEPFKFSNDSGGFRLLLSKLDQFESDSLVIGLESTAHYGNNLVEFLVSRHFHVCVINPIQTSAMRKNNIRKTKTDRIDTLLIAKTLMVQPHRFYDKQDIDLMHLKNLGRFRQVLMKQRTSAKIKLTSFLDQAFPELQYFFNGIHHKSVYSLLKEAPSPEKIASMHMTHLAHLLETTSHGHFKKDKAQALRILAQKSVGSSDSSISIQITQTIEQVELLDSQIHDVEAQITTIVKSSGSVILTIPGISCIEAGMILGEIGDIHRFSSPSKLLAFAGLDPSVYQSGNFNASHTRMSKRGSCVLRYALIYAAHNIVRNNDVFRSFYDAKRSQGKNHYNALGHCAGKLVRVIFKMLTDNVAFCLS

SEQ ID NO: 376450 - protein, 458 aa, unidentified
MSRNKSTDRVRRTMAVVHPNAAAIDVGATMHMAAVNADRTPEPVRSFGTFTTDLHRLVDWFAECGVDTVVMESTSVYWIPIFEILDAHGFAVFLVNARDAKHVPGRKTDVSDAQWLQRLHSFGLLRASFRPKGQIAELRAYLRQRERLLEYGASHIQHMQKALTEMNVQLHHVVTDITGATGLRIIRAILVGERNPAVLARMRDRRCHATVETIEKALAGNYRAEHLFALEQALALYDTYQQKASACDARIEAVLKELSAHRGRKAGPLPSPRQNRSRQQNSLLFDVRTALFALLGKDLTQINGLGPYLALKLIAECGDDLSAWPSAKHFTSWLCLAPSNKISGGRVLSSRTRRSGSRAAALLRLAAVTVGRTDTALGAFYRRLSARIGKAKAVTATARKIAVLFYNAVRHGMDYVDPGASSYEIRYRARVIDNLHRRAKAFGFMLQPMAPTPGMAVS

SEQ ID NO: 376451 - protein, 398 aa, unidentified
MKTSGLDVHKDKIFCAIYDGKINSEVKEFTTTTNSIRSMGDYLRSENVKKVAMESTSSYWVPIWDILNEMGFEQKLVNPYQIKQMPGRKSDIKDAQWIAKLLYQNMLSGSLVPSPLIQELRSYTREYRKLVEQQTKVLTQMDRALVMCGIRLSSCISNMSSKSALQIIKALIDGKTDAPYLTSLVYGNRKNKESGKLKECLTGNMKEHHRIKLMICKQQYDLFEKQIEFYLNQMQKLCVEHFNDDITNLTSIPGVSIISAMIIIAETGGDMSAFENSGKFTGWTGLRPRNDESAGKFKSTATTKGNKQLRSIIVQVAWGASRKKGSYFMDKFQKMAIRKSRKKALVAIGRKILVIIWHVLKEKTQYNPSLVHIYDPVKVENKIKYHEREIEKAKKLIR

SEQ ID NO: 376452 - protein, 446 aa, unidentified
MNSIFQRSNPAIKKLFQEAGSPKKVMCVPIDYAKRQHTALVCNGEGMQLRGTFNIHNTAEGVAFLEDIIKGLCKKHSIRKAHVFFGGEDCTAFCYNFIHALLEKKYLGIGINAYEGAEARQNQLASTDKLDLLGIASVLINKKHGRTLSTAYGQARIMRELTHHRDSLVKAHTASAYRIYHWVDQLMPGFLDAKQSGLEPFSEASLWLMSQNFSPRQLLARKNDILAEKLGLLMLRNTDAKVAQLKQLARTTLPPPTGLCETLQDNLAREVALYRHLRDTLRQLDQQIARRLAATPGAMLTTASGIGIILASGLYAEIGDPARQRNMASLAAYAGIVSRLKQTGGPDNPARSLGRSRRACIPLKRRILDIALSISQYGAEELKADYRRRVEANQDARFTMGRRMLRICAHLIQRQDFFLPPALLANTDPDARKAYFAKAWDPILIK

SEQ ID NO: 376453 - protein, 512 aa, unidentified
MGYYTGIDVSLEVSHFCVVDSAGLIVKEARVVSEPDAIVAWFAELGLEMAAIGLEAGPLSQWLYAAMVEAKLPVALLETRQVRDAFRSMPVKTDRKDARGIAQLMRLGWYRRVHCKSQVAQENRTLLAGRKMLQTRYIDLEMCLRGLLRGYGLKVGPTNRKTFEGRVRELAAAVPGLDSTVDALLKARAMLLEQFRRLDGLVNSRARQDERAQLLMSVPGVGALISLTFVSAIDDPARFRSSRTVGAHLGLTQRKYQSGETDVTGRISKCGDQEVRTALYEAANIILTRPVKGSQLKSWAAKVANRAGMKKAKVALARKLSVVMHRMLCDGTCFEHRLAAAYLSTVLDDFSRYIIAWKLCTNMRAEDVTDTLDLALKASGCDSATVLHKPRLLSDNGPSYIAGELAEYIEARKMSHVRGAPCHPQTQGKIERWHQTLKNRILLENYFLPGDLEAQVEAFVEHYNNQRYHESLNNVTPADAYFGRAPAIIQQRERIKRQTIEQRRLQHRKLAA

SEQ ID NO: 376454 - protein, 332 aa, unidentified
MHYLGLDISKHTIDTYSDICGHHKIDNTIQSIQGLLGHLQANGLGKENTHICCEATNVYYLLVATTLHQNGYAVSVVNPLAIKGYAKMQLKRIKTDKQDAKLIADFAKKEKPQCWQPNNQTGKAIQSLHRRTEQLNSLLVAEKNRQETADEYTNASVEKMIAALKEELENIREQIQAIIESDEQLKAKQKILSTIPGVGKNTAQILLSVLVDLDKFQTAKHLISYLGLSPIIRDSGKYKGAQKVSKMGDKTLRKSLYMPARAACTRSKLWRGWFDEQVARGKHPKQVYVMMMCKILRYAYTCLKTNAPFDATLHKKADKAERSWKTVKGEAL

SEQ ID NO: 376455 - protein, 345 aa, unidentified
MVTIGHDAHLKTSTMTVLDSNGKKLMRKKIDNDPEKLLAFIRQFPGEKQLAIETCYNWPVFHELFKNEVNQFHLLHAKKLRSVIESQSKCDGHDSDEIAYLIHSGRRLVHSHVADLDTRCFRRLLRVRVSFSLDITRIKNQVHAIINAHTFYSQRPQNFKDIFCKRGLAYIKSLKLPEHDRFIVDKLLDKKNELELRRNEFDEYIEHIDFHADDLKWLQTVPSMTGKLLKYIILSEIDNIDRFRHSRALVAYAGLIPKEHSSGEKNRKGRLRTECNQFLRWAILQAVLIATLRDKGLRQYYQDVKKRTKSSSTARIATARTLLEAIYCVLKERRPYRMMQAVNRG

SEQ ID NO: 376456 - protein, 344 aa, unidentified
MVEHEQVRTFVGVDAHSVHCTLNGQSRQEKTVLEVEVPTDVGELRKAVKDVRGPVWAMVEASAMAPFVKWALEPVVDRVIVCETRRNRSISDSEEKDDPRDAKQLARLLRMKEFKEVYVPCRDRQELRDLVRLYDKTVKDGTRVKNRIKAKFREQGLPVKGCEVYEAEGRKEWMAKIDRPTVRICLEVLYAELDAVEAAAERLGQRVHAMVRHRREYKGVTTVPGYGSVTGSVLVAVIDDPHRFPTVRKSWKYAGLSVRRRKSGESKAKTGGSFSGNRLLKYAVMLAAKRALQGENQFSRHHAQMLERGLDPAMADKTIARRLLATALAVWKSGKDYQEPEQTP

SEQ ID NO: 376457 - protein, 349 aa, unidentified
MLADELDYVVGVDTHRDQHVLAVVVAPTGALIAQRSVPANAQGYAEAIGFAERHAPGARVWAVEGAGHYGAGLTRCLSARGEVVHESGRSSRAERRLRGKDDPLDATRAARSALASNQPASPRSGQRQEALRVLLLTRRSAVDVRRVALVQLRSVVVTAPDDLRNELRRLPLGELLRRCSRFRRSSSRTPDQLATILALRSLAQRIQTATHEADVLEREILAHVRALAPDLLAEPGIGPIVAAQLIVTWSHHGRVSSEAAFARLAGVAPLPASSGLTTRHRLSRGGDRQLNRALHTVILHRRQHDQATKDYIARRVAEGKTTRDAVRLLKRYLARHLYRVLQNTTPLTT

SEQ ID NO: 376458 - protein, 407 aa, unidentified
MLEVKVERCAGIDVGKKFLDVCVLVGPVDRKPAEEVRRFGTNVGDLKALQAWLTEKGCTEVMMESTGSYWKPVFNVLEEHLKVILANPEQVKALRGKKTDRKDSRWLAGLLRHGLVQPSFIPPRDIRELRDLTRRRRTLLQNGTEERNRVQKVLEDANVKIGNVLSDLFGMSGQAMLEALLGNKLNPEQIAELAYGRLRTKIPLIVEALAGHHMSDHHRLLIGQSLKHMQFIEEMVGELDRQIQQKLQPYQKQVEWVCTIPGIAKDSAASILAETGMDMSDNGPFSSCHHLASWAGVCPGNNSSGGKRKSSRIRKGNRWLKATLSQTAWAGAAKKNSAFQFRYQRLKPRRGAKRAAIATAHAQIIALYWVLRNGAPYQQQRGQMEEQQRESLIRHYRQRLQQLENAA

SEQ ID NO: 376459 - protein, 338 aa, unidentified
MNHYAGIDVSLKESHVCVVDASGKIIREGKVASEPEDLIGWFGALGLAVTRIGLEAGPLSQWLYAALRDAGLAIELLETRHVRNALKIMPVKTDRKDAQGIAELMRLGWFRPVHCKSMEAQETRAILTARKLVQKMLHEVEMSLRGVLRGFGLKVGKTTLVQFEARIRELVAGHPSLEGIAQSLLAARAVLRREFNGFEKRLRAMARSDKRARLLMSVPAVGTIVSLTYASAIDDPTRFKSSKIVGAHFGLTPKKYQSGETDRSGRISKIGDASVRAALYESAHIMLTKPIKGCTALKAWAMRIAKRAGMNKAKVALARKLAVIMHRMLADGTTFTPA

SEQ ID NO: 376460 - protein, 357 aa, unidentified
MESQEVKYVGVDCGKKSIEVVRINSENSLERRQFSTTESGINNLLQWLTLNDIVGLEAGSQSFRIAKSILNKGVQVIVLNPGNLATIYQSLKKTDKEDSLKIARLIQRHPIEELPTVPIPNDEEEDNRRLCSEHENWTKQLTQGKNRLHSLFTQAGLTQITKKHLRTKVSREASVTLLSDRYKKEAERILKVLDLVELNLKLIEKEIQEALQKNKAYVQTIMSMPGIGMITSLAIMSYMGDCKRFSSAKQAAYYAGLVPRVDISGDTVRYGRIINRGCHSIRRVIVQAAWSLVRCQHGGKVKEFYQRLYLKKGAKKSIIATSRKMIEVLYVMIRTGKLFDSMPENILNRKLTQYGLM

SEQ ID NO: 376461 - protein, 337 aa, unidentified
MKYSGIDLHSNNSVVVVSDEADRVLVRRRLANDAAAILALLAAHRDDLVGVVVESTYNWYWLVDALQAAGYRVHLANTAAIKRYEGLKHSDDEDDAAYLAQLLRLEILPSGYICPPATRAMRDLARKRMQLVRSRTAQVLSVENMLSRQTGAGMRSYAVQRLTAQAVASLGFHPDVGRALCANVAVIQTLNREIDKLEQRLHQCVRLRPEFGLLTSVPGIGPTLATLIMLEVGTIERFAAVGNFASYARCVDSVRLSNGKKKGQGNVKNGNAYLAWAFIEAANFARRYCVEAQRFYERKKARTNGVVATKALAHKLARACYHMLKENRPFDVKRCFA

SEQ ID NO: 376462 - protein, 433 aa, unidentified
MLKLNYMSTLFVGIDVSSKTNAVYAMDFEENKYISSSFGNNQPGADKLVNMIAECMHKHKNLDTVLIVLESTSVYSVHISSFLSTSEVLMPYKPYVFCVNPKATSNYRKSYIGMEKTDPTDAYLIADFGRVGRTKKLEPWRGGQFIALKRLTRHRMHLSECITREKTYMVSNLYLKFSELQLLEGDDKPFGSLYGATSSAVLTEFLSPQEIIDMPEEELLTFLAGKSRNRISDLSKTSELLRKAARDSYRLDKCMYEPLNVSLASSFNCIHAYQKEIKLIEQAIEKCINGMNPNALIILQSIPGIGPIWASGILSEIGDITVFHSSDALAKYAGLYWPKGDSGDFTSEDNKMSKAGNPYLRYYLGEAANSVRKHIPEYADFYARKYAEVTKHQHKRALALTSRKFVRLVFGLLVKNQLYTGEKLDAEYNIESN

SEQ ID NO: 376463 - protein, 444 aa, unidentified
MRHRSAPSQWETEAREEVVVDDEYRIYVGIDWATEAHQACVLDCTGCILAERSFAHTGEAVAGFTQWLHGVAGGDPSRAAIAIEVPRGAVVETLIEQGFHLYAINPKQLDRFRDRHSVAGAKDDRRDAFVLSDSLRTDRARFRQIRLDDPLVIQLRELSRVDEDLGREINRLTNRLREQLNRFYVQALKLCPSADEPWLWALLERASSPAAGNRLQQKTLERLLRQHRIRRVNAQDVLAALRAPALRVAPGVVEAATEHIALLLPRLRLVHTQRQRCGVRLDALLDKLAAVDGDEGQQREHRDVEILRSLPGVGRVVAATVLAEASGPLAERDYRALRTHAGIAPVTKQSGKRRTVVMRYACNGRLRYALYHWARVAVTCDPASKTYYAALRQRGHSYARALRSVADRLLRILIAMLKSESLFDSTHPRRSPHPAPTPEAPCAA

SEQ ID NO: 376464 - protein, 371 aa, unidentified
MVKIAKYVGLDVHKDTIAVATCEGGPLASARDEGILPHDLVKLRRKLLALAPAEHLNVVYEAGPTGFGLCRDLKAHGISCIIVAPNKVPQMPGPRIKTDKRDARYLAWQLRMGTLAGIALPDEELEALRDLIRAREDALHTRRRTRQQLAGLLLSHSARWTGKSTWSINHLVWIKSLRLGSEAQELAKKQYIGEIEHFDERIEQLTTDIERLAGFLCGTHGELYRALQGLRGVSTIVAATLVCELGDLRRFGTASQLMSYVGMVPREHSSGPRVWRGAITKAGNAHVRRVLIEAAWSGRLRPATSERLKRRQGGLDQAVIDIAWKAQKRLYSRFCSMRARGKPQNLTIVALGRELLGFIWSIGQQVGRHSA

SEQ ID NO: 376465 - protein, 351 aa, unidentified
MSLQINIRVAVVGIDIGKNSFHIVGQDRRGEIVLRQKWSRSQVEARFANMSPCLIGMEACVGAHHLSRQLRALGHDARLMPAKYVRPYSKGQKNDFRDAEAIAEAVQRPTMKFVAMKTADQLDLQALHRVRERLVSQRTGTINQIRAFLLERGIAVRQGHRRLRAELPRILATPSDTLLPRILRIIEALAVDLRRLDERIEGLSSEIEQLAKQDAGCERLTSIPGIGPIISSAIVAAIGTGDAFAKGRDFAAWLGLVPKQISTGDRTILGKISKRGNRYLRVLFVQAAWVVLVKVKPTRWAGHGIQPWIEAAKKRLHHNVLAIALANKLARIAWSVLARGRTFEASKLQVA

SEQ ID NO: 376466 - protein, 384 aa, unidentified
MSKDSIIFIGLDTHKSFIQVAVLQEHRGANPQHLGRIKSNKSALIKLARQLQSKYPKATLHFVYEAGPCGYWTYRLITSLGHCCYVVAPSLIPKKPGDRVKTDKRDAAKLTKLLKAEELTPIYVPEAEDEAIRDLSRARETAMKDLKDAKFQLKGFLLRNNIQATVNDNWSKKHLRWLTDLILPHHSQQIVLQEVIITINERIQRLQRLDNELLHQVKNWRYYPVVKAIQAMRGVRLLVALGTIAELGDLRRFHHPRKLMAYLGLVPTENSSGGKTRRGSLTKCGNSRARRLLVEGAHTYKHKANISVELQLRQEGLPKEIVDIAWQAQQRLCRRYQRLLQKGKHRNVVVVAIAREMIAYIWAIAREVVISDVDPRTRIARLPA

SEQ ID NO: 376467 - protein, 454 aa, unidentified
MAKKPEKRECRAVVLEPDAAGIDIGAEEIYVAVPPDRDEESIRMFSSFTCDLHALADWLQKCRIRTVAMESTGVYWIPLFQILEARGLEVYLVNAHYLKSVPGRKSDVSDCQWIQYLHSVGLLRASFRPARDICAVRSLWRHRASLLQMASEHILHMQKSLSQMNLQIHHVLSDITGASGQAILDAILAGERNPVQLAQLCNCRVKSPREKVAKALEGDYRPEHMFTLKQSLDGYRYYQKLIAELDREIQRLMQTLPSAVETGQEIPQRTKHSAFQRQGNDPGFDLRGQLYRIAGVDLTDIPGVSAVTAQVILTEIGPDLRRFRHASAFASWLGLCPENRVSGGKVLSCKTRKVKSRAALALRLGANSLSRAKGYFGEFFRRMRAKLGTAQAITATAHKIARVLYHVLRTKQPYTETVFHRSDEHARRRAEMRLRKQAALLGFQIIPVPADSAT

SEQ ID NO: 376468 - protein, 333 aa, unidentified
MNAVYCGLDVHKESTYATVLDTDGQVVTQRRMKNEEVPEFLQPLQVEKVAMEASTYIIPMYRRLVEEGYDVTVSHPKKTRYIAEARIKSDRVDSKALAELLRLDSLPTSIIPPRELAELREKIRRRAFIVRQNTKLKVKICDVLAYEGVKPPTGHGLFTKKGVDWLRGLGLEPVDCYLRLMTPLSREVLLLSKELRGMAKDDTDVQLLMTIPGVGYYIALLIKAEVGDIGRFSSGDHLASYAGLVPSTRSSGGVTRRGRITREGSRWLRWAQVEAAMVHVRRDSQVTRFYHRVAERRGKKPALVAVARKLATVCYSVLVNRRPYFDPLDAQAT

SEQ ID NO: 376469 - protein, 407 aa, unidentified
MIPSPLKTDLPSPLNVPVNPAQPNPEANGGEQFDRQTILVGIDWADKLHAFHATGPDGSQWAGNFKQSPQAVLAWLVDLQAHFPNTNAVEICLETSRGAIINALLQYPNIIIRPVNPQALANYRKAFHHGGGKSDPVDAQLILQYLQHYRAKLLPLRRDQPLTRELGTLCEDRRRLVQQRVRLANELISLLKLYFMVILELKPANIYANFIVKLLKRYPTLELIQAAGPTKLRKLLCGIGSKETLNQSIKDYDTEIKRLVRTHADYPIFASLPGTADNTQARMIAVLGDDRSRFSSANALQCAAGIAPVTTQSGKSRYVLSRWACSKFMKQTFHEFAGLSLVKCSWAKAYYEGLLRKGKTPQMARRSLAYKWIRIIYRCWQNHETYDDARYTARLLASGSPLAQQLT

SEQ ID NO: 376470 - protein, 404 aa, unidentified
MKEPTSIRHEVRILPQLNKACGLDIHKDKICCFISDNTGEKQFYQEFGTFTKELHQLKEWLIEHEIRDCIMESTGVYWMSLYSILSASNMNVIVANPQFIKQIPKRKTDKKDAKWLCTLLLNGLSKGSFIAPKTQRELRDLCRSRLHYTQHRSKTLNRIVKVLEINNIKIRSVASSVNTKSCMEMIRHLAKGERDITKLKECCKGRLRKKIDQMGDALQGTLTDNDSWQLQCLLKDIDHIDGQLNSLENRISQFIEQDYRHVVECLDSITGVGLGSAQVIVSEIGKDMSSFASSDHLTSWCGLSPGNNESAGKRRNTSVKKGNKYLRIALIAVAWGAVKTKNSYWRGLFEKLRKRMKSQKAIVAIARRILKVVYKTIKEEKLYSEKGIEHFISMQTRKKENQLA

SEQ ID NO: 376471 - protein, 440 aa, unidentified
MASQQTAVTHELAQFVALVGIDWADQKHDFALQAVGSNRVELGQIEHTPEALDDWVLSQCRRFDGRIAIAVELNRGPLINALMKYEFITIFPLPPARLFSYRQAFSSSGAKDDPTDAQLILDYLHKHADKLWPWTPDDPQTRELAMLCENRRKLIDLQTKLSNTLHSSLKLYFPQSRQWLNDLRTPLACNFLQRWPTLEALQRAKPNSIRKFFHDHNGRCRQRIERVIEEVQTALSLTTDPAIIAATIHVVRALTGQLKSVAKSIAQLEDRIHELFLHHPDAPIFQSLPGAGEALAPRLLVAMGTDRARYDDAAQVQTYSGIAPVTIRSGKSKWVQRRFACPKFVKQTFHEFARMSIRYCDWARVYYQDMRQRGAKHHASVRALAYKWIRIIYACWRDRVPYDDKRYMQALRKAGSRIVKLIPDPVNNLSDIDGSSTSTT

SEQ ID NO: 376472 - protein, 381 aa, unidentified
MTTMTRHQESTAAPASLLLAFELSERTWKLGFTVGRGQRPRFRHIPAGALDALAQEIARAKSRLSLPADAPVVSCYEAGREGFWLHRYLLAQGIVNYVVDSSSIEVNRRARRAKTDALDLAGLLSLLVRFVHGEARVWHVVRVPSVADEDARQVHRLRETLQQERTRLLNRLQGLLTTQGLTIPLHADFGDRLAAARLWDGTPVPAGLQHRLRQGWAHLVFLNAQLAEVDQMRTALAADPQTVSGRCVEQLQTLRGIGSIGAWSLTTEIFGWRQIHNRRELGALVGLVPAPYQSGATSHDQGITRAGNRHVRRMIVQLAWSWLRYQPTSALSRWYRARFSHGRRLRRIGIVALARKLLVALWRYLETGAVPDGAILKPHAA

SEQ ID NO: 376473 - protein, 338 aa, unidentified
MKLYGAIDLHSNNNVTVLIDEQDQVVYQKRLPNDLPLIARQLSGYRDQLQGIVVESTYNWYWLVDGLMDQGHKVHLANTAAIQQYEGLKYTDDHSDARWLAHILRLGVLPQGYIYPKEERAVRDLLRKRGQIVRQRTTNLLSLQNLVTRNTGGSISSNRIKTLDAEQVDELLPNPDLALAVKANLAMINCANGQIDILERTVIDRIKLRAGFSFLKTVPGIGQILALTIMLETGEIRRFPTVGDYASYCRCVGSQKLSNGKKKGSGNTKNGNKYLAWAFVEAANFAIRYNARIKSFYQRKKAKSHGVLAIKAVAHKLCRACYYIVKNRVAFDIAKAFA

SEQ ID NO: 376474 - protein, 365 aa, unidentified
MSASVLDTQPIGQVVIGVDTHKHVHVAVALDVVAGRLAELSIATDQGGYDHLARWAESLGHVLAFGIEGTGSYGAAVASFLRRRGHKVVEVNRPDRRVRRQRGKSDPIDAENAARAVLAGIATATPKSGQGNAEMIRVLKVARDQAVTDRTRAIITLKALLITAPAELRDQLRSLTGRHLVRTCAALRPGPMTTPSAAAKHALRALARRWLVLDAEVAEHDQVIAALVQHAAPALTQAFGIGVDTAAEILIVVGDNPERIHSQAAFAKLAGVAPVPASSGMHQRHRLNRGGHRQLNAALYRAVIVRMRFHAPTNAYVTRRTAEGKTKREIIRCLKRYLAREIYQILITDHTRALPPAHEPAPTAG

SEQ ID NO: 376475 - protein, 337 aa, unidentified
MKVTLIGIDLAKSIFQVCGVNQAGKRKFNRQVRRNRLMAFLMQYPDATIAMEACSGSNYWGRTLQQRGFKVILIPPQHVKPFVKGNKNDRNDAFAITEAARRPELKCVEPRTLAQTDMIQVHRVLDRMTRQRTALINQIRGFLNEYGIVVARGKEKLLAAMPDLLEDAENGLTPSSRALFQGMLEQWRQANDAIDRIEKGLKGQARTDDDAQRLMKMRGVAAKISTATIAHVGNGHGYKSGRHFSANLGIVPKERSSGGKQKLGGITKRGNQYLRRLLIQGAWSVVRNADKNDDRMSRWARQLVERRGKHKAVVAVANKMARIMWSMLYHQTEYRAN

SEQ ID NO: 376476 - protein, 370 aa, unidentified
MKAPSTRPAAVLGLDVGKSSHWARLVDRDGEVLASAPVRNREAELDALFASAPAGTLVVVDQFRNIGSLAVRRARAAGLGVAHLPGLAASRAAGLFAGEAKTDERDAAVIARTALGVPDSLSGVPGRGEALEAARALSSQRDHVVACATRDKNRLRAVLLESCPALEAAVDLSDRRWLELLAGFGGAWGIARSGAAGEAAAASTAPPPALVEAENRQVRFLAARISEALDEAGALEAETAALLEGDETYACLLTVPGIGPRTAAQLAVSVDIARFPDHDHLASYCGIAPRVRSSGTSVRSVRASRRGDARLKSLLIFSCNSLVRSSGRYGECYRACRARGMGHGRALKAVARKRLRAIYAVMRDRVPYRE

SEQ ID NO: 376477 - protein, 386 aa, unidentified
MHDSTDLPFPERTAIRGDSATLFVSLELSRSTWVATSLAPGSKKMSKHTLVGGDGRKLLDLLARLKTRAEQRIAAPVKVVAIHEVGLDGFWIHRLLEANGVESHVVDPASIAVPRRHRRAKTDAIDGETLLRTLMAWQRGEPRVCAMTVPPSPSEEDCRRVSRERATLLRERIQHTNRIRGLLFGQGITNYNPLHKNRRECLEELRTGDGRSLSTHVKAEILREIDRLELVLRQIGEVEAERDEILRPAEASSPAALLMRLKGIGAEFATVLYFEGLFRHFENRRQLAAYAGLAPSPWKSGSIDHEQGISKAGNPRLRTTMVELAWMWVRYQPDSALSGWFRQRVGSERGRTRRIAIVALARKLLIALSRYVTHGEIPAGAVMKPV

SEQ ID NO: 376478 - protein, 432 aa, unidentified
MKEERTPFISVGIDVGADFSELSIALPNYDLAGKPYKLIHSKPQSLQGAVKRIQAVEQREGLCAKIFLESTGIYHYPLYYYFKELGYEIFVLNPLITHANQNINIRKVHNDKLDSQKVARLGLRPDLKTSVIPNDLVLNIRNLTREYFNLQRERTQYVNRLKAQLRQVFPQYLKVFSKVTGAASLKLLEKYTSPEQIRSADRDELISVISTAARRGRAAAEKTCDKLVTAAQDAASFGHGVDSSLYLIRHFVGMIRMLDEKAGELLTQVKQVLKTHQDEAFARQIRLLQTIPGVGFLCAVTLVCEIGDFHAFRRPKQLYSYFGLDPAVKQSGNFVGTDVRLSKRGSGYARRMIYIIAMQSIGSTCTGHPKNPVLKDYYSEKCKSKPKMTAVGAVMHKVCNIIFAVLRDNRPFSLITPEEHRKNFASPNNLAA

SEQ ID NO: 376479 - protein, 315 aa, unidentified
MTLSIAAGIDAGQKYLDVGFAPSGKGFRVANASAGIAQILARLAGAGVRRVVLEAVGPYAQRLIQALALAGFEVSVVNPRRIKAFRDAEGRRAKTDRLDAGLIARFALVMTQAVRPLPSAEQSRLKALSLRRRQLVEMIAMEKTRLKQASEPLLIDSHRKAIADLSAACASIEAELASGLKADPERAATYATLTSIPGIGPRIASLLATDLPELGQIDRKAIASLAGLAPHVSQSGNAPPRAAIAGGRPCVRAALYMAALVAVRHDPWRKAEYEAMRQAGKPAKLALVAIARKLIVTANALVKNKRPYQNQTMNP

SEQ ID NO: 376480 - protein, 347 aa, unidentified
MKKVTTIGLDIAKNVFQVHGVDEGGEVIVDRRLRRSDVVKFFRKLPPCVVGLEACATAHHWGREIAALGHDVRLMPPTRVKAYVKRGGKNDRADAAACCEAVTRPSMRFVPLKTVEQQSALMLHRGRQLLVTQRTRLCNAIRAHLAEFGLAAAKGDAGFTALLAMISNVEDERLPATVRPVLTALATQFRAADEQIDGLDRQIIAWHKANGDSLRVATIPQIGPIIASALVATAGDAKRFDNGRQFAAWLGLVPRQNSTGGKQRLGSITKAGDKYMRQLLVIAATGMISRVRANPAVSPWFADLLARKSPRQATVALANKMARIAWAILAKGGTYQAPMSANTAEAA

SEQ ID NO: 376481 - protein, 416 aa, unidentified
MGRHFLSFLNQHFNKEVQQCLCFFVGIDVSKDYSSAQGLGREGKKLFYLEFAMDGWGFSQFLKMLKTHSEDLSRVTVGMESTGCYHINLFAFLCSEGIVCVVINPLLISNFARLSLRKTKTDKKDALTIAQFLLAHRSKLSQVSYSQNSQDLKDFARERESLAVMIAGLKNDVRRLLKMSFPELEHRRKLFTETMLRFLIKFPSARTIRTAKPKEISKALIHAKGKRKRVGISAEEIIKLAKVSVASNSVAKELILSEKIETLLYLEEKKQRITEVLVEACRSMRVDELDIITSVDGISTITGSTFLAELGDIETFRSYKHVIAFAGLDPSIHQSGQYEGISRLSKRGNRHLRRVIFLMTLCAVRSHNIFREYFLKRKEEGLPPKKAILATAHKLLRVLFAMLTSKSYFRKEVVEV

SEQ ID NO: 376482 - protein, 340 aa, unidentified
MKEITTIGLDLAKNVFQVHGIDGSGQVVVRRRLRRGQVLGFFVELSRCLIGMEACATAHYWARELIALGHDVRLMPPTYVKAYVKRNKNDAADAEAICEAVRRPGMRFVPVKTKEQQATLMLHRARELLIRQRTMLVNALRGHLAEFGVVAAKGLHKVEGLIAVVTKGGDDRIPETARRVLVAIAGQIGEAESKIAALEAEILAWHKSNPTSRRLATIPGIGPMIATAIAATVPDPSVFRSGREFAAWLGLVPRQNSTGGKARLGGISKRGDGYLRRLLINGAHTALFWSKTAKTDPWLMSLCARKHRLVAIVALANKTARIAWAVMSREESYRQGAAVA

SEQ ID NO: 376483 - protein, 338 aa, unidentified
MYYTGIDLHKKTSFFTTVDENGKMVSKKNIVNDEKAILEYLEALDEQSQIVIESTASWYWLYDLLTANGFEVVISNPVKTKAIASAKIKNDRVDSHMLAQLLRADLIPTVYVSPLQVRKLKELIRHRQRLVRDATRMKNRIHALLRKNNKTIPFSDLFGVQGLDYLQKVKLPEYHRDQLKSYLSLYQELVKQIQPLTETIHSAAKDNPIAKLLMTVPGIGAIVAMTIVAEVGDISRFRSYRNLASYAGLVPSLDASGGKQRMGSITKQGSRYLRTALVEAANAIPRMKSSRLNPFFRKRIVRGGYKKAIVATAHKILKIVYYVWKNQTPYQEEYPVCA

SEQ ID NO: 376484 - protein, 320 aa, unidentified
MRNTVGLDISKLTFDATAIVGNAEYSAKFDNDSKGLDQFSDRLKSLGCQNLHICMEATGNYYEEVADYFAQYYSVYVVNPLKISKYAESRFKRTKTDKQDAKLIAQYCRSAKESELVKRQKPTDEQYRLLRMTAAYAQIKSECAAMKNRHHAAKDEEAAKAYAQIIKAMNEQLEVLKEKIKEQTEKPNCKEGVKRLETIPAIGRMTAAVLFHHLTSSKFETSNKFAAFAGLSPQQKESGTSVRGKGKLTKFGNRKLRAVLFMPAMVAYRIRAFPDFIKRLEEKKKPKKVIIAALMRKLAVIAYHVHKKGGDYDPSRYKSA

SEQ ID NO: 376485 - protein, 345 aa, unidentified
MNDTIIGVDLAKHVIQICVVKSNKVISNKEITATEFSAWLTTSKKATIIFESCATSNYWLQVAQESGHHARIISAKLVANIRQQQKTDKNDALAIVQASQLVGINFINGKNFSQQELQSILRMRELTVKHKVALRNQIEGLLLEFNIKVSARNGGLNRIVQSVLEDAENGFCMPFRDALHATWQLYLQMVENIKQTEGLLSEVIKLHPECEKLLALEGVSIINAIHLYIAIGCGEAGLFQSGRDAAACIGLTPIQHSSGGKVKLGSIGRFVKNVSLRSYLVNGAMSVVYHVDKREARTKKEKWLKDLLARRSKKCAAVALANKTVRTAYAMLTKGTQYKAIPLEA

SEQ ID NO: 376486 - protein, 479 aa, unidentified
MCYVSLRLVRYESLQTCLFGLSAHRLLFNGHVLNVDPNMSKCSYVARLRLSFKTRASLISYFLESGDFMNDLLQYLFVGIDVSKENNQVYAMNFSQEKLASFSTPNHQSGASFLEEKLLDILDRHHLSKIIIAMESTGIYSAHIATYLSASKFLFPFDVKVYVLNPKISRNYRHSFSDMDKTDPKDAYILSDLARVGRCNQLTPFKGPQKIALQRLTRHRHHIAELLAKEKVYALNNVFLKFSEFKGILSNDFSKTAVELLLNYKSVDEIIDVPLEDLVDFVMTSSKNRFADSNQIALTLKAAARNSYRLDKMAYEPINLSLAASFNCISTYQTELKSIDAAILKQVKGLNQNHYLSLISIPGIGPVYASGILAEIGQIDQFDSDDALAKYAGITWRKSQSGNFDAEDTRMTKTGNVYLRYFITEAANMARIHNPVFNEYYQKKFDEVKTHQHKRALALTARKLIRLIFGLLSTDRLYK

SEQ ID NO: 376487 - protein, 570 aa, unidentified
MVVVGTDAHKYSHTFVATDEVGRQLGEKTVKATTAGHATAIMWAREQFGLELIWGIEDCRNMSARLERDLLAAGQQVVRVPTELMAQTRKSARSRGKSDPIDALAVARAVLRETDLPLATHDETSRELKLLTDRRDVLVAQRTSAINRLRWLVHELDPERAPAARSLDAAKHQQALRTWLDTQPGLVAELARAELTDIIRLTGEINTLAQRISARVHQVAPALLEIPGCAELTAAKIVGEAAGVTRFKSEAAFACHAAVAPIPVWSGNTAGQMRLSRSGNRQLNAALHRIALTQIRMTDSRGQAYYQRLQDAGKTKRAALRCLKRRLARTVFQALRTVHQPSSEHTQPAAACHRSYCSSHLGEPPRLTDMTQKTRIQPLPPKRAGLLIRALYRIAKRRFGEVPEPFTVTAHHRRLLIANVVHEALLQRASRKLPPSVRELAVFWTARSIGCSWCVDFGAMLQRLDGLDVDRLTDIDNYATSSKFSDDERAAIAYAEAMTADPHSVTDEQVADLRARFGEAGVIELTYQIGVENMRARMNSALGITEQGFNSGDACRVPWAAPDVPSAESR

SEQ ID NO: 376488 - protein, 348 aa, unidentified
MAMTIVEGPRPILGGVDTHLDVHVAAALDPIGGVLGVESFATNPQGYEALLEWLAGFGTVTKVGVEGTGAYGAGLARFLANAGIEVIEVDRPNRQVRRMQGKSDPSDAVEAARAVLSGRATGAPKSRDGNVEAIRALLVAKRSARDGRLRALHQMRQLSYTAPDQLRSRLKGLCVTEFVDQAASLRVRVGTDAVTAATKAALASLGRRVHALEEEAALLDVHLAELVTATGPALLELFGVGIDTAAVLLVTAGDNPERLRSEAAWAHLCGVAPIEASSGKVTRHRLNRGGDRHANQALWRIVMTRIATDPRTQAYMERRTKEGRSKREVIRVLKRYVAREVFKHLPRG

SEQ ID NO: 376489 - protein, 358 aa, unidentified
MTEMITIGIDAHTQVHVAAAIDAHGRVLDELATGTDRGELARMLAWIQGFPAPREVAVEGAKGFGRALTLHLLQAGEQVIDVPTHLTAQGRRHSRRRGKDDEGDAIIIARVALREEGLPRMDAAHLDADLKLLVDARDQLVEEQIRVRNRLHALLLGLHPGHRAITGALTTKVAVRRAHTLAMQGRAEDPVRAHLALNAIRRMRALDAEIHDLEARIFEHLAREPHENLLAIPGVGILTAAKILGETHDPRHFRTAAAFAAHAGTAPIPASSGNTTRHRLARGGNRQLNRALWTIARSQARWHPEARAYLARKRAEGKSAAEARRCLKRHLAAVVYRAMIRDLHHEQTPPSKTAPTAA

SEQ ID NO: 376490 - protein, 416 aa, unidentified
MNAVGIDVSSRKSTVAVLRPLGEVVCLPFDVSHDADGLASLAEKLKALDGETRVVMEHTGRYYEAVAKALHEAGFFVCAVNPLLIKEYGANSLRRVKTDKADAVKIARYALDNWADLRDFTPMDAIRYDLKTLNRQFQLASKQRTASANNLIALLEQSFPGIRKCFDSPVRSDGTQKWVDFAHSFWHVDCVRKQPFPAFCERYRKWCKRHAYFFKLRNAEKVYALAKSAVVLTPKSKVVKVLVQEAANQLSSISRSVEVYRAEMDRLAAMLPEYPVVMAMYGVGKSYGPQLMAEIGDVRRFERKQALVAFAGIDPMPNQSGDKNVRSNKSSKRGSPYLRKTLFNVIRTYLQCAPQDEPVFQFLNRKRAEGKPFYVYMLAAANKFLRRYYAKLRDYFASLDTLQPVAPIPTILKATL

SEQ ID NO: 376491 - protein, 314 aa, unidentified
MICAGIDTGKRKLDVALHGSNEQFAVDNDPAGHGSLAALLRERGVKRVGIEASGGYEMDVVAALHRDGFKVVVFQPAQVRAFAQFHLQLAKNDKLDAALIAACTAALSRIHPPPDPRLAPLAAKMTLIEQISEDIARHKTRLETCRDPDGRELWTQEIARLEKIEKAELKALEKLIRAHRDLAERLDLIESIQGIGIKTAMLILVRVPEIGRLSREQVAALVGVAPYDDDSGDRRGDRHIKGGRKRARAGLYAAAWPASSQHNPLLMAMYQRLRAAGKEHKVALVACVRKLIIFANAVVARGTPWRCAVSQTGV

SEQ ID NO: 376492 - protein, 407 aa, unidentified
MTMWYAGIDWADQHHDAVVIDEAGKRVGTTHVAHTAAGLDTLVTFLKGIGEVADHPDHLACIVETNRGLLIAALLDAGLPVYPVNPKTVDRHRKPAGAKTDAIDAYLLARTGRSDLADLRRLTPDSPLIAELKALTRDQDTLIQSQTRLVNQLTACLKAYYPVALDLFGKLQQPTTLAFLQAFPTPDQARAATVEQIATVLKAAGHPTAQVKARQIHARMSQPQLRGDAVVTRTKTRLMLTLAAQLRVLLPEIAAYDDEITRLFRLHSDSRACASLPRAGTRLAPRLLAEWGDDRGRYTDAASVQALAGTSPVPFQSGNFAKAHRRYACNKPLRNALQQFAWQSTQKESWALTYYQRKRRDGKSHAMAVRALANQWVRLIYALWTNHDTYDPAIFQAAQQAHAPRAA

SEQ ID NO: 376493 - protein, 349 aa, unidentified
MVHFVGLDVSVKETSVCVVDDAGKVILEQKVPTEPADIIALLASLGVSFGRIGIEAGPLSQWLVNALTAAELPVICVETRHMKALLTAQQINKTDRNDARGIAQMMRVGLFKPVHVKTLAAQEQRMLLTSRKLLQRKLLDVESDLRGTLRNFGLKVGVASRSRYEARVRELVEGFPRLAAIVEPLLNVRRVMRQQLAVLHKMLLDTVRDDPVCRRLMTAPGVGAVVALTYRATVDQPQRFVHSRAVGAHVGLTPKRYQSGEIDYDGGVSKCGDALLRTVLYEAAHSLLTHNGKWSWLKAWGVRVAQRRGIRRAIVAVARRPAVVLHRMWVDGSEFRWSKKDSTAVPAVA

SEQ ID NO: 376494 - protein, 339 aa, unidentified
MTIQSKKIVQELKSRFAGIDVGAEELILVIRKNGTPYKPQKFTNTPADRARLVKKLSNLPGIIVCLEATGVYHFDLSIALHDAGVALMVVNPKSSHNFAKALMKNSKTDAVDAETLAQYAERMDFVAWTRPSDEKIALRSFARRIDALTRQKAAAKNNCHALSVSRETPKAVLRDVKLAISQLEKRINCLSKEVLVLIGKHPELERAFLLLTGIKGIAQTSAIALMGELLLLPPGLSHREWLKFAGLDPRAFDSGKSVHKQARLSKAGNRHIRSALYMPAMSAKQHDPYVKAYFQHLVDNGKRPLQALCAVMRKLLHAIHGMLKHDKPFDNTRFYAIPA

SEQ ID NO: 376495 - protein, 373 aa, unidentified
MKKRSNSQKSKKPTVKTKGTQERITIGMDLGDKTSRYCMLSSEGEILREGQVTTTKAGMVEAFGSLGRARIAIEVGTHSPWVSRLLQELGHEVVVANPKQVKLITESSRKDDRLDAQTLARLARIDPQLLRPIQHRSDKAQGALMIIRVRAALMAVRTSLVNTARGLAKSMGERLPKCDADQMGVLQAVSLPPKLRQVLEPLLKEVESLTERIKNSDREIEQIARKDYPETALLQQVAGVGPLIALTFVLTVEDKGRFQKSRDIGCYLGLRPRRSDSGQSQPQLRITKEGDPYLRTMLVQGAHYIISRRGPDTDLKRWGLHLAKHGGKRGKKRAVVAVARKLGILLHRLWVTGEVYEPLRNHNVRQEQKKVAA

SEQ ID NO: 376496 - protein, 420 aa, unidentified
MRNAGIHANSLLEVRRMYNAVGIDVSKGKSTVAVLQPGGTVIRKPFDVSHTSQNLNELADYLSSLDGTTKIVMECTGRYHEPMVKALSEAGLFVSIVNPHLIKNFGNNSLRKVKSDPADARKIARYTLDNWTELRQYSGMDNTRTQLKTLNSQFSFFMKQKIAAKANLIALLDNTYPGVNKLFDSPTREDGSEKWVDYAYSFWHADCVRKIGLKAFTERYKSFCKKHHYIFQQDKPEKLFNASKELVAVFPKEKTYKLLIQQSIQQLNLASEHVERLRREMNELASTLPEYSTVMGIYGVGKTYGPQLIAEIGDVSRFTHREALTAFAGVDPGVDESGQHKSKSNRASKVGSARLRKTLFQIMTTLLQNAPEADPVYRFLDKKRSQGKPYYVYMTAGANKFLRIYYGKVKECLRNLEQTE

SEQ ID NO: 376497 - protein, 383 aa, unidentified
MDQKQGTLSRDKSAPGPVLYVAFELANSTWKLACSDGNKLRYVTVTAGDLAQVRGAITGARRHFDMGDEVHTVSCYEAGRDGFWLHRYLHSCGIDNVVVDSASLEVNRRLRRTKTDRIDAGKLLSMLVRYHGGERYLWRVVRVPSREDEDARHLHRELEALKRERTRYRNRIHGILIQQGLRIKNPSTKKFVQALELMRIWDGRELPPEMKVRLVQVHERLRLVEEQISCLVKEKTLRLKEETARMAQVAQLMRLPGIGPVSSWTFVMEFFGWRRFRNRREVAALAGLTPTPYDSGKRLREQGISKAGNRRVRTLAIEIAWAWLRFQPRSKLSRWFLERFAGGGSRMRRIGIVALARRLLIDLWRFLEYGVVPEGAQVRPLAI

SEQ ID NO: 376498 - protein, 412 aa, unidentified
MAVFCGIDWAEEHHDVALVDGEGTLVAKRRISDDAAGFTALVQLLADAGDTEDQRIPVAIETNRGLLVACLRATGRQVFTINPMAVSRYRDRYSVSRKKSDAGDALVLANILRTDLAAHRPLPSDSPLAQAIAVLARAQQDAVWDRTTAHNKLRSVLREYYPAILDAFADKRGGLLRSEARTLLAAAPTPHAAAELSTAKLRALLTRAGLQRNIDPEAHRLREILQREYLHHPQLVEEAFGRQALALLHQLDAACASAEDLAAAAAEQFDRHPDAEIITSQPGLGSLTGARILAEIGDDRTRFTDARSLKAYAGSAPVTRASGKAITVLHRRVKNQRLAATGYIWAFAALTASPGARAHYDRRKATGDRHIAAQRNLFNRLIGILHHCLQTRQRYDETTAFAATAIPTAAVA

SEQ ID NO: 376499 - protein, 339 aa, unidentified
MELYAGLDLHSRNTYIGIMDKAFNRVFKKRVPNHLEHILQTLDPFRDQIKGFVVESTYNWYWLVDGLMDAGYSSAHLANPAAIKQYEGLKHSDDQHDAFFLAQLLILGILPQGYIYPKKDRPVRDLARKRMFLVQHKTAHILSLQSLIARCCAIKVSANDIRNLTVKELEMWLEEEHIVLSAQANLDSINFLKQKIQGLEKAIKKNVKLKKAFHYLKTVPGIGDILALTIMLEVGDINRFLKVGNFTSYCRCVPSRRLSDGKSKGSGNRKNGNRYLSWAFVEAVHLGRRHNERFRRYYNRKVAQANTSLATKALGNKLARICYYIMRDQVPFQEELFCQ

SEQ ID NO: 376500 - protein, 341 aa, unidentified
MKVSTLGIDLAKNVFQLHGVDHEGHTILRKKLTRAKFVQFVIQLEPCLIGMEACSSSHYFARLFTRYGHEVKLIPPQYVKPYVKTNKTDATDAEAICEAVTRPNMRFVQIKTEEQQAVLALHTERGILIRERIACANSLRATLAEFGITIAAGQNHLTRELPAILEDGENGLSPFVRTSIYRQSKHIRELEEQVKQVEEALASWYRTQEACQRMAKIPGVGMLTATYVVAAVGNARQFSTAKQFASWLGLTPKEHSSGGKQQLGGISKRGDGYFRYLLVHGARALTARVNRNGAVEKNSWLQGLLERKHYNVAVVAMAAKTARIMWSMLSHNTEYQPRQLA

SEQ ID NO: 376501 - protein, 355 aa, unidentified
MSQTANTAIAVIGIDIGKNSFHLVGHDARGAIVLRQKWSRGQVEARLANIPPCLIGMEACVGAHHLSRKLASLGHDARLMPAKYVRPYSKGQKNDFNDADAIAEAVQRPTMKFVATKTAEQLDLQALHRVRERLVSQRTGIINQIRAFMLERGIAVRQGIGFLRTELPTILATRTDALSPRMLRVIEDLAGDWRRLDPRIDGLSGEIEALARQDQACSRLMTVPGIGPIISSAMVAAIGTGDVFSKGRDFGAWLGLVPKQISTGDRTILGKISRRGNRYLRVLFVQAAWVVLVRIKNWERYGLKSWIEAAKRRLHHNVLAIALANKLARIAWAVLAKGRAFELTRTDDAGIVRPA

SEQ ID NO: 376502 - protein, 344 aa, unidentified
MEEGRAAYQLYVGVDVAAETFVAAWLVPGGKPTAPFTEEQTPAGFAALQRRLQGMGSSPAATSVVLEATGNYWVALAVALHEAGYRVAVINPRQAHHFAKAQLRRAKTDALDARDLAQLGAALRPDPWTPPPAVYHEVRQRLVARDGLLAMRTQARNQRHALLQWPVVIAEVRQHLDELITDLDRRIAALEAEITAVLTESVWAESLVCLTSAPGIGLVTASWLLVSTLNFALCDGPEALTAYTGLAPVPRESGRSLRGQPRIGHDGNSRLRTALYLATLSAARYNPAIRAFYQRLRAAGKPKKVARCAAARKLLHQVWALGSKLQRFDPGYHQQHAVLPDLAA

SEQ ID NO: 376503 - protein, 428 aa, unidentified
MKYNQNHKISQIAENTLVVGVDIAKKKHYARAFDFRGMELDKVIKFKANGGGFESFINWTESVAKAHGKKKIVVGIEPTGHYWYTFGRAVIDRGLMLVQVNPYHVKKTKELDDNTPSKSDYKDPKTIAFLVKDGRYQIPYMPDGKYAELRKANNLREEWVQKKIRVKNKVTRWLDIHFPEFLNAFSSWEGKTALMTLGKIALPEKIASKTPEEILCIWRKEVRRGVGIKKAEKLVKEAQNSVGIREGAQMAEYEIKLYIKEYMEIREVLEDIERKLEKIVLTIPGANRFLEIKGVGIKTVAGFFAEIGDIKRFTSAKQIIKLAGLNLRQNSSGQHKGETTISKRGRSRLRALLFRAILPIVATNEVFNKLHHDNISQKERPMKKMQSLIALCCRLIRIVYSLITKDQEFDPDKLIRDIHRDDALQGAA

SEQ ID NO: 376504 - protein, 324 aa, unidentified
MQTISIGCDVSKDKIDLCVWLNDGKQEYLLIGNNQKGYLKALAEIKRLNIKPHICMEATGIYYEGFADFMAENGHLVSVVNPLKIKKFAESEFQKTKTDKQDARLIACYCLKMQPKADYIKPNPEQYAVRRNIALLKQLNADLSGIKNRIKVAKDEFVRQILSNQQKEIKKHIKEVRQHLAEITEQTAAGQVAEKLESIPAIGQTTALILAHYLNMYRFDSENKFVAFAGLAPGKHESGSSVRRPDKLTKYGNRTIKGALYMPAMVAYRFGYFGAFVNRLKNKGKPPKVILIAIMRKLAAIAWNLWKNGQTFDPARYGLNSKTA

SEQ ID NO: 376505 - protein, 393 aa, unidentified
MPRKRILVKSIDTSISYQVIGIDLAKHLVSACLITGAGEIFGIDRLTYDDLLKSAERMSPTLFCMEPCPEVHYLAEKLQGYGHHTKVIDGAAVKEYIKTHFGGQKTDLNDAQAIAFLSLDTNLPEITPKNTSNSVLSSIQAVREQFRKEYIQSFVSLKGICQRWGLPISKGVMNKNKVEELVSESKKIPQEVKDWLLELPQSCRELQKRLNKISKYLKEYADNDEICQKIMSVPGIGPITATRLKATIGDIQRFEKPKSIVAYYGLVPKSKATGHNEKKGGITRRGDRVARSLLIEGAGVVLNLAAKGFLRSKPLNKWIEKKRKLKMPWGKLCCALAAKMLRIVRAILIQGTSFNAKIAGVARCSLPKESRNNVMGNNKLSEIPSPNGSVYIH

SEQ ID NO: 376506 - protein, 451 aa, unidentified
MARAKRSHRERDISTVHPDAAAIDIGATMHVAAVRPERDAEPVQSFGTFTGDLQRLADWFARCGVRTVAMESTGVYWIPVYEVLEQRGFEVVLVNARDAKHVPGRKTDVSDAQWLRRLHEYGLLRASFRPKGELAALRAYLRQRERLLDYAASHIQHMQKALMQMNVQLHHAVADITGATGMRIIRAIITGERDPMVLASYRDRRCHASAEAIGAALSGTWREEHLFALGQALELYDAYQARVADCDARVAEVLKRLQDAAAKPVGRLPPARHRTKTANAPAFDVRAALHALLGVDLTRIHGLGPSLALKLIGECGTDLQAWPDAKHFTSWLCLAPSNKISGGKILSSRTRRSGSRAAALLRLAAVTVGRTETALGAFYRRLSARVGKAKAVTATARKIAVLFYNTLRHGMAYADPGASYYEERHRARVVANLHRRARSLGFVLQQAPSPV

SEQ ID NO: 376507 - protein, 347 aa, unidentified
MRFYTQQHPHYCGIDLHGRTMYLCILNQAGAIVLHRNMKADPDSLLSAIAPFRDQIVVTVECIFTWYWLADLCAREGITFVLGHALYMKAIHGGKAKNDKIDAHKIAVLLRGGMIPQAYVYPADMRSTRDLLRRRMHLMHQRSQLLAHIQNTNSQYNLPEIGKKIAYKSNREGVAERFADVSVRSSITFDLRRIDFYDGLLNEVELEILRHAKLHNPNTFHLLDSVPGVGKILALVLLYEIHDICRFPRVQDFVSYCRLVKPKKESAGKTYGFIGAKIGNAHLKWAFSEAAVLFLRNNPQGQAYVARLEKTHSKGKALTILAHKLARAVYYMLRRNEAFDMKRFLNH

SEQ ID NO: 376508 - protein, 413 aa, unidentified
MKKHSSFLEQRESGKAAKSARRDSREVMAELVAQLTKQLDVESVSVPGEDKNVPDCESPNLDRLTVGVDLGDQWSNYCILGLDGETLTEGQFRTRRQEMAEFFQGLARSRVVIEVGTHSAWVREVIAGLGHEVLVANTRRMEGSKRRRRKNDRIDAAKLARLGRVDPKSLYPIQHRSTEVREDLLVLCAREALVESRTKLISAVRGPVKTMGTRVSSSSSDAFSRKAAAEIPQQIRETIQPLLRLIANLSEEIKSYDRRIEQLASEKYMHTKLLRQVTGVGPVTALGYVLTLETPLRFARSRDVGPYLGLVPRQEDSGDSQPQLGISKAGDRMLRKLLVGSAHYILGPFGPDTDLRRFGKKLCERGGKNARKRATVAVARKLAVLLHRLWVSGDVYEPLGHGTLNKTEHAAAA

SEQ ID NO: 376509 - protein, 379 aa, unidentified
MNHVTSSAFPENTLHGALELSKKSWVLAIQFPDRQQPSLYRIDGGDTEGLMSKLTSARDRWAKITGATPSITLCYEAGYDAFWLARLLKAHCIECLVVDAASLQVNRRGRRPKTDRLDVNMLLRAMIAWARGEQHVWSVVRIPSVDEEDLRRSHRERNRLVHERTAHINRIKGLLFAQGIRGHNIKSHGKSLKPDELMTGDGRPLPPRLAHEISRELERLALVQDQLIQIEREFVDTPTSCKDTEKKRILLQHLKGIGPIVSAVMAREVYYRRFDNRRQVAGFLGLATSPYDSGAVERSQGISRAGSGPLRATLIQAAWLWVRYQQKSALTRWFLERTKGQGSRVRKIMIVAVARKLAIALWRYVEHGLVPDGAILSNK

SEQ ID NO: 376510 - protein, 393 aa, unidentified
MRFVGIDIGAEKHVVAEVNEASEVVLKPVAVAETAQGYVELRQVLGEPKDVLVAMEATGHYWRNLFAFLVSEGFAVALLNPLRTSRFAGEDLLRAKTDGVDAQSIARFAAQKRPRATAITDEATAELKELVRFRDRMVQDFGDKLRQLHRLVDLGFPEFTGLVKSMDSMLATALLHEWPTAQAFAAARPREVAYLRYDGRHFVGRQLAQQLVDTAKTSVGAHHGKAYQVQVKCLCEDLDVLRRRIRELDRDIEDTLDKHQVGKLLTTIEGIGSNTAARIIAEVGDPARFRDGAALAAYVGVVPATSHSGKHQPLRSSLTRIGHAGLRRALWMPLLTAITKNLWLKQYYDRLRLRGKPPKVALIAALRKLLHAIHSVARRRAPFVPVLPPEGSA

SEQ ID NO: 376511 - protein, 412 aa, unidentified
MIYPQLFVGIDIGKFKHVVAIITEAQQVLVKGFEVLETRAGYQQLLAKLEQLARQHETQAFRIGMEATGDYWKNLHHFLTRQAQAPSGSPAFLVSVINPVQTKRFAQSELRRAKTDAVNAMDIARFMAEKKPRPATARSARLESIKDLDRQIHATQKQQTMTLNKLRIELSKVAPEIEHHVALARHQQILVLLKNYPTAEAIAHVPPAELRKLRYGKKRWQLSQPFITKMQALAQNSIAHKTGPGAGLVVQALVDQFLQQQQTVTTLKAHITQLYQGVKEQPSLLATIPGIGPETAIALEAYIGDVTRFAAAKKLVAYFGMNPTVNLSGIVTKRPGSLQKKGSAIVRHKLFMAVLSMISNHVEPFYSYYQRLVAAGKPKLVAIGATMRKLVVIVYTMLKKQQPFQAKKSLSS

SEQ ID NO: 376512 - protein, 326 aa, unidentified
MTAPKLGIDISKKTFDVALIRDPETMKVKQRQFSNTPDGFRALQTWLAKQGLGRVHAVMEATGAYGLDLAECLHGAGHLVSIVNPAQIKAFGQSELQRNKTDRADAALIARFGWRHNPAPWTPPEPEQQELQSLVRHLDDLIEQRTQVSNRLSEGRLTKLVRESWEEILQALNERIAEVKRQINQHFDDHPTLKRQRELLDSIPGIGPETAARLLAEMPQLGEFDSARAAAAHTGLTPKRHQSGTSINAPARISKIGNPRVRYALYMPAMAALRSSKEFKELAARLTERGKKKMQIIAAAMHKLVRIAHGVLKNQRPYDPNYAAAD

SEQ ID NO: 376513 - protein, 351 aa, unidentified
MYYAGLDLHRRYFTLCVLTSEGEVVCDHRRLPAELEPLTSLLRELGGPVTVTVEATLQWAWLHDRLTAAGFRVLVAHPKQVKLISHARCKTDPIDARKLAELSRVNLLPAIWVPSPEIRAWRQLVRGRAALVRWRTRAKNRIHGALAAENLRVGVTDLFGRAGREWLERAPVSPGTRREITVQLAVIAALEEQIRGYDAEVKRLARHPDAQRLQTIPGIGVFGAALLVGEIGAISRFPTAHEFTAYAGLVPSTRSSGDKTAHGGVGRESNHWLKWILIEAVQTLKQVPGPVRFHYERLLRAKGKPKATVAAARKLGTYIYWMWRQELSYPAWLELEAKRVGCPMQTLASSA

SEQ ID NO: 376514 - protein, 324 aa, unidentified
MTPAPPPSADSVAGIDVGKYGLDVFVDPSQLERRFANTPDGRRTLCDWLRELGARRVAVEPTGRYHRELHQCLCDDGVKVVLANPQRMRNFARSLGEQAKSDRIDAAMLARYARLDGIEGTAPKPEAQRALADLLALRRKLVEQRDGLRKHAAETGDAAASLLADLLEAFDAKVQTADDAIEAGIQADPAMRRRSEIIRSVPGCGPLTAASLCAELPELGSATPAEAAALAGLAPYVCDSGRQHGRRRIRGGRQHPRKLLYMAATSAIRWNPALRTVYTRLTARGKPHKVALVAVMRKLLVLLGALLRDDRLWTPAGPPARLPA

SEQ ID NO: 376515 - protein, 321 aa, unidentified
MTYVGIDVSKATFVAAYSSAKTSKTRTFKNTVKGIHEFVQTLSAAEHHCVLEATGNYSALLVYLLSEAGITVSLENPLKIKNFSRVMLTVTKTDEIDARLIALYGEKMQPAPYRLRSEPILILKQKRTVLRQLKKQLVATRNLKGSMEVLPFFDPKCKKTIEKTIAFLEKQIKGMEEELASLAQGEYRKQMDLLTSIKGIGVTLAAALIVATGGFTYFDNAKQLTRYLGLSPTYQQSGTSVNVKGHINRNGDSTLRSQLYVAAFSSLRCNSECKACFDRLRSNGKPGKVAVIAVANKLVRQAFAVVTHGKNYVDGFKSAKP

SEQ ID NO: 376516 - protein, 355 aa, unidentified
MNSEKYIGLDVHQATIVVAVTDSSGKLIMESILETEAATILQFFAGLRGTLAVTFEEGTWSAWLYDLLDPHVDKLVVCNPRKNALLKDGNKSDRIDARKLAELLRGNQLKPVYHGETGVRMLRELSRSYLTIVKDLSRVMNRLKAVYRSWAIPCAGRDVYYRRHRAQWLDKIREAGVRRRAERLYEQLDMLQKLRQQARRELLAEARKHAITAKLRQVPYLGPIRSALAVALIQTPHRFRTKRQLWAYSGLALETRISAEYRMVEGQVRRSKKLLCIRGLNKDHNHDLKGLFKGAATMASVRPGPFQDFYQAALAKGIKPTMARLTLARKIAAITLTLWKKGESFDAEKLKSQAA

SEQ ID NO: 376517 - protein, 403 aa, unidentified
MNSVGIDISKGRSTIAVMRPFGEVVISPFEVRHTDSELSELARQLKILDGETRVVMEATGNYHAPVAKLLHDAGLYVSVVNAKLVHDYGNNELRRVKTDRKDAVKLANYGLDRWLTLTRYVPEEDTRLLLKNCYRQYRQYSKVQTVLKNNLISLLDTVFPNVNRLFSSPAREDGSEKWVDFVAEFWHCRCVSEKSEKAFANKYQRWCRKYGYNFNEAKAHTIHAEASGHIGVMPMSETTKLLVEQAVAQLRATSTALAALKHEMQSLASQLPEYPAVMDMFGVGPTLGPQLIAEIGDVRRFYSKKALVAYAGLDAPPNDSGDVTGRHKSMSKIGASSLRRTLFLVMTVYLQNAPLDEPVYQFMDKKRAEGKPYRVYMMASANKFLRIYYATVKAYLESLEHTA

SEQ ID NO: 376518 - protein, 337 aa, unidentified
MGLYCGIDLHSNNHVLTVIDDADRRVYERRLPNELSRTIAALEPFRKELTAIAVESTFNWYWLVDGLMDAGYEVRLVNTAAVQQYSGLKHTDDEHDAFWLAHLMRLGILPTGYIYPRAARGLRDLARQRMRLVQHRSSHITSIQGQVWRSTGVRLKSATLKGEGRESWPELADPDVALSIQTGRAAIDALTVQIERLESVLLERMKLLPEFRLLQTVTGIGPILAMTIALEVGTIARFPGVGEFTSYCRCVDSQRLSNAKKKGEANRKNGNPYLAWAFMEAAHFAIRHLPAAKRFYDRKLRQRHKLIAVKALAHKIARACFYILRDQVPFAPERLFV

SEQ ID NO: 376519 - protein, 416 aa, unidentified
MSLLHWVGRAIGLDVHRDFCVIAICEDGVVRSAGRVPSTPEALQTLAESLLPSDRVALEVTGSCWEVARILEPHVNRVSVVSPDDTGITQARAKTDRLDARALAKLLWKGELEAVWKPDERCRVMRRRLARREQLVQARTRSKQEIHAVLHRRLQGKPPVSDLFGVKGREWLAGLKLPLEERESVDAGLRHVEFLEVEIAQVERLIAQQALAWPEIRRLMTVPGVSLICAASFMAAIGNANRFLTSRKLVAYLGLDPKVRQSGEAPARSGRISKRGSASARWVLVEAAWITVRQPGPLHAFYERTRARRGHGKAIVASARKLAVLFWCMLTRSEDYAHQQPSLTAKKLRQLELKAGPSKHTKAAAGVWSANRAVRHAERALAEQAEVSYKRMVQDQQAGAPARRVGASATLEHASK

SEQ ID NO: 376520 - protein, 354 aa, unidentified
MSKYSTKIFIGIDLGDVENQICILDHDGEIVKKAPIENTVSGINTFFDQFDSPRQVLVALETGTHSPWISQLLEARGFRVCVGNARKLRLIWDSANKNDDRDAEMLARIARFDPELLSPIRHRSRSAHMDLALLKGRDSLVRCRTSLINFVRGSCKTAGTRLPSCTAQAFSKAVIEHIPKDLLAATVPCINTIGELTQKIRQIDSQIEALCHQGYPETMALRQIAGVGPVTALAYVLTLEDPHRFKKSRDVGPYLGLIPKRDQSGSTDKPLSITKAGNKYLRRLLVNCAQYILGPFGPDCELRRYGMRIASRGGKVAKRKAAVAVARKLAVMMHHIWKNKTVYEPFYQSYLKAA

SEQ ID NO: 376521 - protein, 337 aa, unidentified
MKYSGIDLHSNNSVVVVSDEAGRVLVRRRVANDAAAILALLAAHRAELVGVVVESTYNWYWLVDALQEDGYRVHLANTSAIKRYEGLKHSGDEDDAAYLAQLLRLEILPSGYICPPAARAVRDLARKRMQLVRSRTAQVLSVENMLSRETGAGMRSRVVQRLTAQAVASFGFHQDVERALCANVAVIQTLNREIDKLEQRLRQCVGLRPEFRLLTSVPGIGPTLATLIMLEVGTIERFAAVGNFDSYARCVDSARISNGKKKGQGNVKNGNAYLAWAFVEAANFARRYCVEAQRFYERKKARTNGVVATKALAHKLARACYHMLKEQKPFDVKRCFA

SEQ ID NO: 376522 - protein, 371 aa, unidentified
MLTHEHGVAGIDPHKKSATIAVLDRRGGVVGSESFPISEEGIDRLLTFLLGTELTIDRIGVEGSAFLGRPLVLALTAAGYDVREVQANRTAERRKRRRRAKTDIEDAEAIARETLADPQLPPAGKHATPSPAWQTLTVLRDWRASLVLQRVRLLTEAEAVLVTLPITIRDTLPATSRVLPQLVALADGHTAPGRLAPADRLKLERLATSLLDITTLTKRIKELDQRIPAILTELGSTLTDLHGIGVVTAMDLLVEIGDPHRFTNEAQFARWCGIAPVPASSGEGHGPARRHRLDLGGNRAVNSILHIIHVTQARCHPPAKKYLARKISENKSKREARRCHKRQLANVIIRHMWHDAERHAQTTTIDRTAAA

SEQ ID NO: 376523 - protein, 369 aa, unidentified
MNYNTVYVGMDVHKESFTLCSCKYEDEKASHYQRTPASYKNVLRYLAFLRTIYGEDTRFVCGYEAGCLGYSLYHQLENFNVECVILAPTTMLEQRSKRRIKRDAEIIARSLAQHNYSPVHIPTETDNQTKEFIRMRDDHKAELKKIKQQILSFCLRQGYQYDGSGNWTAKHVKWLRSLKPAGLYKEILDEYLLTYTILTDKLNRLDQRIEELASKEEYTESVSKLTCFLGIKTHTALSVIVEVGDFQRFVSARKFAGYLGLVPGQHSSGDDRNGLGITKAGNTHVRRLLVESAQSYTRGKIGYKSRVLRSRQAGNSPQVINYADRANERLRRRYYKMVLKDGKKYNIAKTAIARELACFIWGMMTDNIY

SEQ ID NO: 376524 - protein, 364 aa, unidentified
MKEQKPTTRYVGIDLGKRTYEMAIVGKNGTVTRSNGKTYVDGRQALYKKLRQEDKVALEAGNMAFIMAKEIEAAVRCKVYVLNPSNLPLIYGTMKKTDREDSLKLAHILEDYREERLPVVPVPSDKEMNRRKLLGSYRRVQQTRNRDINQLHSLFVSQGITTKVKSNLATSVNREIAIEELTGIERKEADYLLKCLALCEERIAELEQAMKAEAEGDEEIERLQSIPGVGPKTSFAFVAHVAAERFENAGQVSNYLGLVPRVYMSGETVRYGRITKRGNGYVRALLVQASWALVLSKHGGKLKERYEYMTQEKAISKKKAIVAIARRLAEEMYTLLRDGTRHEFRPFTPEKSPAKKLAQLALSA

SEQ ID NO: 376525 - protein, 316 aa, unidentified
MSQECFVGIDVSKDTLHVATQPATRQRVFPNSEAGWAGLLAHLTTLQPALVVLEASGGYEMHVACFLAHEGLPVVIANPKHARDFAKSLGLLAKTDRLDAKMLARFAQAVRPEPRPLPDAETLALKALVARRSDLVAMRTAEENRLQAPLTEPVRDGIAEHIAWLDARIKDLDRELRERVRSNAAWHEKDQLLQSVPGIADTTSHKLLADLTELGDANRHEVANLVGVAPLNRDSGTLRGHQSTWGGRASVRCALYMATLSALRWNPDIRAFYQRLRAAGKPFKLAMTAAMRKLLLLLNSVLRRGTPWRPSSPQTA

SEQ ID NO: 376526 - protein, 359 aa, unidentified
MDKCSKTLSVGLDVHNDSIAVAYAPEDRGAGVVSRGAIGTRQGDIDTLIQRIESKGAPLVFAYEAGPRGSWLSRDLTGKGLACQVVALALIPRKAEDRVKTDRRDAMTLARVMRRGDLSAISVPGIEAEALRDLSRGRDNTMQDLKRRQRRLTSFLLRPDVRSEGPANWNPAHLRWPSQLVCPTPPQQIVCQESVRAVSEQQEPRQRLERELHEAVKGWRLSSVVEAIQALRGVELTGAVIVLAELGDPTRFDTPRQLMSYLGLTPSEYSSGERRRQGGITKAGSSHARRALVEGAWASRYPAKVSWHLHLRLEKLPAEVQAIGWKAQLRLCRRYRQLTARWKHVTQVLVSGFLFVRRT

SEQ ID NO: 376527 - protein, 423 aa, unidentified
MEVMYKRVAGLDVHKETVVACVRAMAGRQPTRECRTFATTTDGLLALLAWLTASRVTHVAMEATGVYWKPVWTILSDGPFVLMVANAAHIKNVPGRKTDLNDAMWIADLLACGLIKASFVPAADIQELRSLMRTRKQLVREQTRHVQRLEKTLEEANIKLGAVISDLMGVSGRRMIEAMIAGERNPHRLAALAERTVKASPKQLCDALHGRLREHHRFLLKLHLQQWDALDTAIQQIDRQVAGQIERMDAEAAASQPPFRDLILRLSAIPGVSSLSATTILAEIGRDMSRFPTAGHLVAWAGLCPGQNESAGKRKSARLRRGAPWLKTMLVQCAWAAKRAKDSYYRAQFFRLQSRRGPQKAVCAVAASILTAIYHMLKSGLPHRDLGADYFDRRSPEAKAKRLVAQLAKLGFGAQLQPLADAA

SEQ ID NO: 376528 - protein, 333 aa, unidentified
MVAGTIGSLDKAGATKMTQTNTLTAGIDTSKAKLDVAVHGSGECWQVANTPSGWRRLTAALLKIGVGRVGIEATGGYERGVVAHLRAAGITVLLLQPIQVRSYARMHLRRAKNDRLDALLIAACAAGMEPPRSEPDARLAELAPHLTFLEQIEEDIARFKVRLEHIKEGRLRRIVLADVVRLRRRRQAELACIVAALRSHDDLARRLDLVGSVPGIGERTAVAIVVRMPEIGRISREQAAALAGLAPFDHDSGTHEGQRRIEGGRARLRRSLFAAALPAAFRWNKALIALYARLTARGKAHNAALVACARKLIVYANTVVQRGTPWTERSAAT

SEQ ID NO: 376529 - protein, 312 aa, unidentified
MLTPSVYLGADVSKLTIDLGCPHFGVATSIANNPAGYRTLIKIVAKSPAPVHVVCEATGPYHRAFVAALHQADIRVSVVNPRLPRDFARSRGLLAKTDAIDALLLADFGRTLQPAPTPKPDPRMTLLDDLVTRRAQLVEDRAREKNRLQQTTCAEALASLKLHLRHLDGQIKKLLRCIAEIVESNPDLRAKVARLVEVQGVGALTASALLAALPELGTLSKNKVTALAGLAPFNRDSGAYRGTRSIRGGRFEVRIALYMAALSASRCNPILKAVYQRLRAAGKPHKVALTAVMRKLLVYLNALLKGLPSSQA

SEQ ID NO: 376530 - protein, 397 aa, unidentified
MYIVGIDIAKRKHEAAVIDGEGTVIIKPFSFTNNCSGYNRLLAMLAKAKLPLDEVSFAMEATGHYWLALFTRLQKEGFRVQVINPVQTNSIRSFYIRQAKTDPRDALLIAEVIRFGHFSESTLHPENIYELRELCRGRHAIVSMQADVKRKVVALLDQVFPEYETAFTNLFGDTSMAILQTCPTPKELSEMPFEELCHLIEVSSHKRFRMAKAQELQELARNSFGFAMAGDVFSTMIRLYAKHLDFLKQQVREMDRKIAEIMDTLDTPITTITGIGPTLGAYILSEIGDISRFSSAAKLAAYAGIDPTMRQSGEYNGVRNRMSKRGSPYLRHAIWLAASAAVLHDPALKLYFQKKRDEGKPYMASVGHACRKMVSIIYAVMRDNKAYTPCIPNEISA

SEQ ID NO: 376531 - protein, 338 aa, unidentified
MNISRVGLDLAKQVFQVHGVDSHERVVCRRQLKRAQMLDFFRQLAPCLVAMEACGSAHYWARELQGLGHEVRLIAPQFVKPYVKGDKHDAHDAEAICEAASRPSMRFVPVKSAQQQAGQSVHRIRSRLVRARTALCNEIRGLLGEFGLIASRRGRAATVELLETVTAAEPVPSPAPMGELLSGLKEELQALDARIERLERVIKRSAREDARIQRLLAVEGIGPLTASAVVAAVGDARQFRTARQFAAWLGLVPRQHSTGGQQRLGGITKRGDTYLRTLFTHGSRSVVRCCANKTDARSRWLQGLLQRCNANAVAVALANKNARIVWALLSRETTYQPA

SEQ ID NO: 376532 - protein, 354 aa, unidentified
MLYAGIDYHKRYSQVHVIDHMGRTRATARLANDGVTVEKFFKSLGESCAAVLEAGWNWGVMYDWLAAIDTVEQVELAHPFRVRAIAAAQVKTDAIDAHTLAQLLRSNLIPRAYVPGVETRRLREIVRQRVFLVRVRTMVKNRIHALLDRYHVPAPAVSDMFGKRGRDYLAKVELPAGAQELLRQDLALLEALTREVRATEQWLRDSVRGDHRVELLRTVPGLGDLLATVVALEIDCIERFASAAKLAAYAGLVPTTYSSGGHTFHGKLMPQTNRWLRWALVEAAWVAVRLDPYFRTHFANRRAHKPAQSAIIATARRLLEVVWHILKEDRPYQSRPPAGSQRRLKTSSAALATA

SEQ ID NO: 376533 - protein, 326 aa, unidentified
MEHELHYIGIDTAKEKLDVDVLRPDGRHRTKKFANTTKGHDELVSWLKGHKIDHAHICIEATGTHMKPVAECLYDAGYIVSVINPALGKAFAQSEGLRNKTDTVDARMLAEFCRQKRPAAWEAPHPLERALRALVVRHQALTDMHTQELNRTETAREVQRPSIDAHLLWLEAELKRLEKQIKDLTDDDPDMKHRRKLLESIPGIGEKTSAVLLAYIGLKDRFAHARQFAAFAGLTPRRYESGSSVKGASRMSKAGHVSLRRALYMPAMVATSKTEWGRAFRDRLAANGKKGKVILGAMMRKLAQVAYGVLKSGVPFDASRHNPVAA

SEQ ID NO: 376534 - protein, 354 aa, unidentified
MIIIGVDYHPEFQQTASVDTDTGEFQEKRLAHPEEAEKFYRAVAAQGVKVRVGMEASGHARWFERLLAELQIELWIGDAAEIRTKRVRKQKTDRQDAQLILQLLLENRFPKIWVPSWENRDLRQLLWHRHRTVQARTRIMNQLQAVALNEGLRCKKRLWREAGRKQLESFALAPWASRRRRDLLELLDRLNPTIAELTRAIENEAEKNPGVQRLRTHPGVGALTALAFVLIIGQAERFQCGKQVASYLGLVPLEDSSGKRRRLGHITKQGSSILRFLLVEAAQVTVRSLPQWRSKYFHLAMRRGRKIAKVAMARRLAVCLFWMMRKEWDYEQLKKFGSHAGQPEHRHGVPSNTE

SEQ ID NO: 376535 - protein, 333 aa, unidentified
MGKIVVGIDVGKERYNVSIFDGEKHLFQGSTPADPEAFLREVTPHLPGKKEEVLFVMEATSIYHLRLSLALFERDYKVSVVNPFVVKKYAEMLLRRTKTDPVDARTIAQFGFSTSPSLFAPKKEEGYHLQELQRAIEDYTARRTAIQNRLEALRHHPFPNLKLKRLYEEELRRVEETLRALEEEAKNLSMEYAPLEYKLLQTIPGVGKRLASAILGILFPLDRFQNAKELSSFVGLAPQIDQSGKRRERAWLSKRGNPLLRKLLYLAALSASRCNAQCRALYERLIARGKPKKVALIAVANKLLRQIFAILRSGVPYDPHYLEKKRNLALQGT

SEQ ID NO: 376536 - protein, 456 aa, unidentified
MNIYLGIDISKGYADFALIDEQRQPIVKNFQLDDTPDGHSSLGEFIRELFKQHPDLTLLATAESTGGYENNWLDCLKKLQRCYAIKVARLNPKGVHHHHQAKLNRAITDAISARLIADYTMSHQEIIRFDQPDETYSLRKQWTLIKLLSKQKTQLLNQLDNMVYQSNTELMVYCRSYWPAWLLQLLGIFPTAKDLAQANVDQLTKIPYLGTDKAQKILQQARQSVASATDLVSGEMIKTVIAEIIQREKVIATCKKTLTENCSLPDVELLASIIGIGKFSAVGLIIEIGTWLRFSSAAKMAAFFGLHPILRQSGDKTWVARMSKQGSSEVRALLFMCAMVAIRHNPIIKDLYAHSLAKGKSKMSAIGICMHKLLRIVYGVLKSGKTFDPAIDQANRTRKPDQRKPNKQETRRLQPVDENAPVSARQNKKRKEQNQSQGELVTICEIKAPALSHCST

SEQ ID NO: 376537 - protein, 404 aa, unidentified
MIFVGLDWAEDHHDVCVMDEAGEVLGKRRIADGVEGVAELHALVGTHAQEPNEVVVGIEIDRGLIVAALLSAGYEVYAINPLAASRYRDRHATSGAKSDPGEAKVLADLVRTDRHNHRQIAGDTELVEGVKIIARAHQNAVWGRQRQVNALRSSLREYYPGALAAFGTDLSSSDAISVLSIAPTPLLGRQLSRSKIISALRRGGRTRNVEKRAAEIQIALRAEYLEAPPGIGEAHGEVARSSLSLIEAYTKQIATLEVSLDERFEQHPDAKVVLSLPGLGTVLGARVLGEFGDDRTRYAGSKSRKNYGGTSPVTKASGRSRVVLARYARNRRLATALDRWAFCSLTHSDGARRYYDDLRARGKTHGQANRQLANRWVGILHHCLERDELYREDIAWPRGPELAA

SEQ ID NO: 376538 - protein, 387 aa, unidentified
MPQPNDLSRSLVALDQNSTMIAVVELSQSSWLVAGMLPGIERQPRKKLEPNPERLLGLLHRWQDEAVRAGRTIMRIAVAFEAGRDGFWLARWLAARGVEAHVIHASSVAVSREHRRAKTDRLDTELLKRGFLGWLRGERGHCSMARVPTIAEEDAKRPNRERDCLVGERTRIVNRIKSTLARLGIRNFKPTLRKAAERLATVRTPEGMPLPPNTLAELQRDMARLGFVVSQIREIEEARQKRLEQQHETGPHAMVRRLARIVGVGIETADLLVHELLSRPMRDRRAVARYAGLTGSPDESGARRREQGLARAGNARVRRAMIQLAWRFLMFQKESALALWYRARTADSRSGTRKTMIVALARKLIIALWRFVTTGEPLEGVVLRPAS

SEQ ID NO: 376539 - protein, 351 aa, unidentified
MVVVGTDVHKRTHTFVAVDEVGKKLGSCTVPATRAGHQKALLWALTDFGPISRWGVEDCRNMSAQLERDLLGAGQMVVRVPPKLMAEQRRTARTRGKSDPIDALATARVVVREPDLPLARHDEVSRELRLLVDRRETLVRQRTATINSLLWRVHELDCEYIIKSGALTMPTHQKALQVRLAERSGIVAELARDELSDIIDLTVAINALHKRINTRVRVVAPSLLTVVGCAGLTAAKLVGETADVTRFATEAQFARHAGVAPIPVWSGRNEGRVRMTRSGNRQLNAALHRIAITQIRCHNSLGRVYYDKKIAEGKTTREALRCLKRKLVPTVFKHLVADHHARTTPAEKAAA

SEQ ID NO: 376540 - protein, 376 aa, unidentified
MSGLHALIAKHLPAEWADLPPDEAASRVKIGIESDHGVWVQALVAAGYEVFAINPFSVGHYRTRHSTSGAKSDAADAHLLAEIVRVDRAHHRAVAADSDRAEAIKLAARTHQTMIWERSRHVLRPRSALVEFFPAALEAFPDLDAPDALELLARAPDPDAAARLSVAKIEVALRAARRRDAHTKARRIQQILGAGELRQTPAVQATYAAVVAAQLKLIVALGEQIDQLGVVVEQHFGRHPDADIYASQPGLGVILGARVLGEFGDATDRYADAKARKNYAGTSPITRASGKKRIVLARYARNRRMADALQQWAFCSLRGSPGARAYDDTMRARNIGHQAALRQLSNRLVGILHGCLKTRTAYNEQTAWSHPITAAA

SEQ ID NO: 376541 - protein, 425 aa, unidentified
MNVDSIDEPRFAAYVAIDWGDSKHVWSLQPADSDRREHGEIEHNPEAVAAWAAMLSARFGGQPVALAVEQSRGPLVFMLGKYEQLHVYPIHPRAAAQFRAALFPSGAKDDPSDAELLLDLLVHHRARLRQLKPDTEQTRLVQHLVEGRRKLVNERTRQTNRLTAQLKLYFPQMLDWFDAVDSPLVGALLKRWPTLEALQKARPDTVRSFFTAHNCRSQELIERRLDQIRSAIPAVRDKALIEAAQAMTKVLVELIATLREGIASFGCQIAQAVAAHPDFAIFNSFPGAGPALAPRLLAAFGSQRERYQSAADLQTFSGIAPVTERSGKSQWVHVRWACPRFLRQTFHEWAAHSIGFCDWARAYYQQQRGRGKDHHAAVRALAFKWIRIAFRCWKDALPYDDARYMQSLRRRGSPLIAALAKPQLP

SEQ ID NO: 376542 - protein, 437 aa, unidentified
MIPVTFSELVIRNQQRSIAVSKIKSQKIKSVNNQTMIVTLDIGKGSHYGYFRAPDGQDVEPFAFYNTYDSFHSYWKKLSRFKKVHGCSRVVVGFESTGPYAEPITHFLKQQPVTLVQINPMHSKRVRELTGNSPNKTDRKDPRVIADVIMLGHALRVVIPQGSSAHLRRLTQARERTIRDRTAIVNQLQHLVFVIFPEFLQVIKNISCKTGLYLLRHWPSPQAIAALGEQQLSRIIRRVSRAKMGQWHAEQLFQSAQASVGINEGQESIVEEIGHLVDKINRENDFIDRVECQMRSHLEQIPYSSCLLSLPGVGLITVAGLIGEVGDFRQYGTIAEITKLAGLDLFEVSSGKHKGQRRISKRGRPLMRKLLYFAAINAVKPTGVMHQPYTRMLERGMPKIKALVAISRRLLRVMYALARDQSMYMEKYDNHRYQFAA

SEQ ID NO: 376543 - protein, 348 aa, unidentified
MKRVYVGMDLGSKQCAAVAIDYRGKMVDSEVFRTSERNMIAFFEGLKGSAEVIVEEGELASWVARTIRPHVERVVISDPRRNAWVAKAGNKNDPLDAAKLAELLRLGSYSEVWHPEDEGLAEFKLVVQRYDECSKKLARTKIQIKALLRQQGVITSGKAVYGLKGRQAALSRIESEPVRQLIELEYDTHDFLVLAKARFLRILKQESRKYPVIRRLKKIPGVGPVLAARFVAYVGDPNRFNKRTLASYSCLGVIKRSSDGSPIGRERLSKAGNHTLKDLSRTAFERAKVTKRSNGITEFYAQSLARTNNRTNARLNTQRKILAIMLAMWRDGTEYCDEMVTGVAFTGS

SEQ ID NO: 376544 - protein, 325 aa, unidentified
MIDGILGIDVCKNTLDVSISSYTKVRTKSFTNSPDGWRHLLDWLIAQKIQRVHACLESTGRYSLGIACALYEADHVVSIINPAQIRDFVRTKLGRNKTDGVDASHIREYCELFKPSPWAPPSEAHRRLGELQTIRSGIIAGLTEWKNRKNSGIVDAEAQALADATISHFTSQLGAVDKAIALTIDNDCDLRSKRDLLLSISGVGETLAGVVLAELPGPDVLRSSAEVVAYAGLNPRRHQSGTCIDRATRISKIGNAVLRAALYMPALSAMRYNSATIVALVTRLKSRGRLKPKQIVVAAMRKLLVLCFGVLKTGRPFDAAIAMGG

SEQ ID NO: 376545 - protein, 344 aa, unidentified
MKLLKQVLGIDVAQKELVVTLGRMHNDLTIELYAYSVFKNTEIGFLKLTEWVNKLTDKEIKVRYVMEATGVYHQKFAYYLEAKKEDLSIVLPNKISNYMRTLDIKTITDKTCSEGIARFGLERKLDNWVKPKEVYSVLKQLTRERRQITDERTIVKNQLHAEQTEAIPHLSSIQRLKRRILFLNTLEKEIKNEIKIYIKEHKDLIADIDNICTIPGVSILTAATVIGETNGFELIRSKKQLTSYAGLDVKEKLSGTSVKGKPTISKKGNRYLRSCLHLPALSTIKWDDNFRDQYARIVVKHGIKMKGCVAVQRKLLELIYVLYKNKTVYDRDYEQKNSVLAQKA

SEQ ID NO: 376546 - protein, 336 aa, unidentified
MKKYIGLDAHSSTCNFCVMDGTGKVLDAVKITTNGRLLREYVKGISGEKKLTFEECELSSWLYEMFKNEDCELLVCNPVENRNYKKAKTDKIDARNLADLLRGNFLKPVYHDGSTREKFRDLMSGYQQLVDDAVKVKNRYKSLFRKGGKRHVGIKLYNDENLLEEFDRKDLKFVGVQTYELLREMEKRRKEYIIEIKKHSKKFKEIKVLKTLTGIGDIQAAKIVAQVVNPERFKNKYKYYSYCGLVRHRQISGDKAYGDKKIWGNRTLKCAYKMAAHSALKGNNVFRKYYDNLRSTGTNHKCASNAVSRKIAAISLVLWKNNVRFDPKMVTNSIIE

SEQ ID NO: 376547 - protein, 417 aa, unidentified
MQYAPVRLADLPVSGVMCGIDWARDDHAVAIIDRDAQVRYRGVAEHSARGLKDLIAILARHGVAEVAIERADGPLVEALLAAGLTVVVIHPHRIKSLRCRYGSAGNKDDRFDAFVLADTLRTDRARLRPLAPESPQTTALRTLCRARRDLVAHRVAVANQLRAHLDRVYPGPVGLFDALDSPISLTFLTRFDCQDRADWLSPTRLGAWLASVGYKGHTDPAVLYRRLTARPRGLSAAQGAAYTPITAALVATLKTLVPQIAELSSQISRALAAHPDAPIFTSLPRSGTVRAARLLAEIGDCRGRFPTADALACLAGVAPSTRQSGKMRSVGFRWACNRELRDALCDFANDSRHANPWAADLYNRARARGHDHPHATRILARAWIHVIWQCWQTNTPYNPSQHRALQTLLTPSEQAAS

SEQ ID NO: 376548 - protein, 456 aa, unidentified
MAKAAKTKKKSAGEWDEGLSALNRNAAGIDVGNADHYVAVPVGRDPEPVQTFGSFTSDLHRMAQWLKACGVETVVMQATGVYWIALFQILESYGFQVNVVNARHTKTLPGRKTDVLECQWLQKLHTFGLLNNSFRPPEEIQVLRTYLRQRENLVTAGSTCIQHMQKTLTQMNVQLANVISDISGVTGMAILRAIVAGERDTERLAAYKHNRVRASRDEIARSLEGNWREELLFVLEQSLQLYDLYVDKIAACDQQIERHLKTMSSKLAPVQQSDPIALSAPKQQPRFNLKDQLCRITGVDLTRVAGLEVQTVQTIISEVGVDMSRWKTEKQFASWLGLCPDNRISGGKVLKSGTRHVVNRAATALRLAAWSLIRSQSALGANFRRLRSKLGAPKAITAMAHKLARLVYRMMKYGADYVDKGMAAYESKYRQQQMKWLAKQAASLNLQLIPAQEVTG

SEQ ID NO: 376549 - protein, 355 aa, unidentified
MSQEKYIGMDVHQATISVAVMDASGKLIMECLLETKAATIVEFIQGLQGTLSLTFEEGTSAAWLHDLLTPHVSRLVVCDPRKAALLKEGNKSDRIDARKLAEMLRTNQLKSVYHGEHGLGTLKELGRSYLTITQDVTRSMNRIKALYRSWAIPCAGTSVYAPRHRAEWLAKIEQPGVRIRAERLYQQLDSLQPLRLQARCELLRESHQHAAVQLLRQIPSIGPIRSALLVALLQTPHRFRTKRQLWAYSGFAVETHDSGEYRSVRGKLQRNRERITVRGLNDNHNKDLKNLFKSAAISASTRPGPLQDFYVALVAKGIRPTMARLTLARKIAAITLTMWKKGVSFDAKQLHRQAA

SEQ ID NO: 376550 - protein, 422 aa, unidentified
MKNNAARKLRQVPAGYLVVGVDPHKKKHAAVAITQDLTIHDRFKVDNTREGLEFLLRRVNTVMVKSGCRGIMFAIETGGHYWRNIAYYLDERGVPFRFINQYTLKRRREGKDLNKRKNDYRDSEVAAQLLCTGEFVESGIPQGVYAELRTAHNAYRRLVKERTRITNLVKGLLDALFPEFVRVFKDPCGLTSLSVLSTCSTPGIIAEMTEEGFIALIEAAHHGRRLMRKKLGELRSVAKSSIGIEAGAHSVSVEIAFLIEKQKLIKGQIQTIERTLIKLVDASEEGKYLLSIRGIHYIAVAGLLAELGCFKSYRTAKQMIKMAGSNPTESESGGKRRSRTPMSKQGRPVLRYCAWTSVIPMLRLNPDFRAWAKERRERPAHANPLNGREVVGAALNRLLRLCFAMVKNKTYYRSPHLVQVSN

SEQ ID NO: 376551 - protein, 388 aa, unidentified
MNRIIKIGMDVHSTNYTLCAMEPTIGAEDRIFGQVQVAPDYKEVICFIESLKMKLGFFDHYSIECGYEAGCLGYTLYHQLMGAGIKCVILAPTTMLTPQGQRIKTDKRDAHLIAQCLCYGGYHPVYIPTGEDDAVKEYLRMRDDHKLALKKLKQQINAFVLRHGNLYAGTKWTIKHVTWLKKLELDSMYRETLDEYMVSYEEQEAKIERYDQRIEEIAAEARYKKNAEKLGCFLGISTHTALSLIVETGDFKRFAKGNTYAAFLGLVPGERSSSKNVNRLGISKAGNTHLRCLLIEAAKGICKGVIGHKSKKLRSRQSAQPADVIAYADKANTRLRSKYYKMIRHGKKKNVAVAAVARELSCFIWGMMTGNISITSGTGTSVPAVSQG

SEQ ID NO: 376552 - protein, 420 aa, unidentified
MQIIYRRCAGLDVHEKSVSACIRIVKGKQVETVEATFPTFTEDLEQLRDWLIRNRIQRVAMESTGVYWRPVWNILERQPAKLDLLLLNPQHVKALPGHKTDRVDAARIAELTQYGLVRASFVPPQEIRELRDLVRRRVHLQQDRSRVSSRIHRLLELQNIKISSVLKKMTSATARSILEGLATATTIKPEALALLATHKKVRGKREQLKKALRCHPTDHFRFLLRELLEELDRLTAKMKLMEERIGGRMAPYSELIERLCGIPGVKELTAWTLIAEIGVDMARFPTAGHLASWCGLCPGNAESGGKRRSGRTSKGNRYIRRALLQAAWGVERITSRRTFLTSFFFRVSRKAGRRKAAVAVAHKILTLAYVMIRDGSAYYEQGADYFDKVHPERTKKRLTARLEQLGFTVRLEPKLSPETS

SEQ ID NO: 376553 - protein, 454 aa, unidentified
MARPVLAVGIDPAKRVHHAAAVLYPDRLILDTAFANDRHAIQDFDAKVAALAIQHEAELIYGIEDHRGYGRAVTQTLHQAGRQIRVVNPLWTHRQKDFYGQDKDDRIDARSVAAVVLRRADKLPDAGDVSALSAAIREAERTLEDLGRQRTRALNRLHRHLSDVYLASYETFFDRLKRPWALRFFSRFPLPQDLHGQSTEDLARTLQELAGRHLGSARKSLGKRAHHILAATAALQTQPRDRSLALKAELIHQLCEEILANLERTRRLERLLHDQLLPATGQKLESVPGIGTLTAATILGEIGDVQRFPNRHAFAKYNGTAPASKSTGGRQRHTARRGCNHRLKRALWLIALTAVRHDPLARAYYQRRAEGGLSKVDAIKRVARRMSDIVYAMLRTGAAYDRKRLEQAIANRQVAASKAGGTSSKDRQDGSAVGPALPAFDDASLPKSRHGTNR

SEQ ID NO: 376554 - protein, 415 aa, unidentified
MALKIVYKICCGIDVHKTFVVACIASTNDKGVTSYESHRFSTYTSGLKTLLQWLIDRNCKDVCMESTGKYWIPVYNILEKGCSIVLAHPKYVKAIRGKKTDKKDAKWIADLFKHNLVAGSFMPPSDIRQLRDLMRYRFKLTCFKSSEKNRLQNCLTVSNIQLGNVVSDTFGKSAQAILDKILENPADTSFDLEPLVFKSLKKKLPELRDAIDGYITPEQAGKLKVIKTHYEDLESRKAELEELILALAAPYQQELAILQTSPGISSDFTAIGIISEIGTNMEAFPSAKHLCSWAGLTPTNNESAGKKKSVRVSKAGCYIKPLLVQCANAVIKSTKHPEMRNRYLRLKKRRGHKKAIIAIARMLLTALYHMLKNGENYNPELYRKTDLPPAGREITIEQALMLIRNQGYKIKSATA

SEQ ID NO: 376555 - protein, 356 aa, unidentified
MTKVKTNFGEQTIYVGLDVHKRSWNVALYLNDQYLRNIHQPPSPQALYKYLQSQYPGARYVCAYESGKFGYWIHRQLLEKDIECIVVNPADIPSAQKDDLQKTDPRDARGIAKALQKGLLKGIYIPCEQQEADRSLVRQRKKIWSDLVRCKNRIKNFLDYTGIELPDKFNNSSWSRNFIQWLKDLPFEHPGHRSTLNYMIREMELLRKELLSISNDIRKLMRSAFYKKRYYLLRTVTGIGPLTAALLLTEIWDMKRFASFYELNSFIGLMPMEHSRGERELKGRLTIRKHRQLRSDLVECAWTAKRTDPALQLYYHQQLKKGKEPKLIIVKIARKLLSRIRYVWLTEQPYQIAVVK

SEQ ID NO: 376556 - protein, 337 aa, unidentified
MQHLAIDLGGKESQICVRDSKEKILEERNYPTKRLGEYLAKQPPSRVILETSAEAFAVADLARHAGHDVRVVPATLAPSLGVGARGIKTDRRDAQVLSEVSCRVELRSVHIPSEQARAWRTLCNSRDALVSSRTKLTNTVKSQLRCRLVLTHRRRSGATPEQIRSLWTELAGSVPPHVERQLRVIEMLDAQIAEADKEIRQLVKPNETCRRLMTAPGVGPLTSMRFVATLDDVKRFATAHDVQAYLGLTPGEHSSSTRTRRTHLTKAGSPQMRWLLVQAAWTALRCAPTHPMCTWATQVAQRRGKRVAAVALARKLAGILFAMWRDGTTYSQKQGAD

SEQ ID NO: 376557 - protein, 384 aa, unidentified
MNKHSILFIGLDTHKEFNEVAYIEEHRGAKPVHLGRVSSSKVAVQKLVRQFESKYPGATLHFVYEAGPCGYWIYRLITSLGHCCYVVAPSLIPKKPGEKIKTDKRDALKLAKLLKSEDLTPIYVPEPEDEAVRDLSRAREVAMKDLKDAKYQLKALLLRNNINYRGTANWSQKHLRWLTELVLPHPAQHIVLQEFLHTINERISRLERLDNELTHHVHQWRYYPVVKAIQAMRGVRLLVATGVVADLGDLSRFDHPRKLMSYLGLVPSEHSSGGKRHIGAITKCGNGRARRLLVEGAHTYRYAANISTDMQKRQEGLPKDIIDIAWKAQLRLCKRYKKMIAKGKHYNLVVTAIAREMIAYIWAIAKEVVLTPVNTKLRLARVPA

SEQ ID NO: 376558 - protein, 421 aa, unidentified
MNHPVQQPFAALIGIDWANAKHDICLRAAGSEAIEHSVVKHSPEAIDAWVRELRHRFGPTPIAIALELDKGPLVYALQKYGGFVLFPINPTMLAKYRQAFVPSGAKDDPTDAQLALELLCRHPEALKGLKPQSPAMRSLVQLVHDRRRLVGDKVRITNRLSNALKNYFPQPLEWFEDTDTVLFCDFLTRWPTLKQLKRARRSALEAFFYEHNVRRRTVIEKRIDAIRSALPLTEDPAIIAPQSLLVAVLVAQLRTVLEALERFNTAIAATTEQLPDYAIFSSFPGAGPTFAPRLLAAFGEDRERYQRCEELQKYSGIAPVTERSGQKSWVHWRYRAPTFLRQTFVEWAGETVPRSFWAKAYYQQQRAKGLSRQAALRSLAFKWLRILFRCWQDRKPYDEATYLLALQRSGSPLLKNLTASS

SEQ ID NO: 376559 - protein, 368 aa, unidentified
MQELITGFVGLDAHAESTAIAVAELGREAPRFVGTVGARITELTKALGKLGQPQSLCVVYEAGPCGYALARELIRLGYRCEVAAPSKIPRCPGERIKTDRRDALKLAGLARAGELVPIRIPDERDEAIRDLSRARVDAVQARLKARQQLKALMLRHGRRYSGKTSWSAAHERYLSDVTFAHPAQDIAFIEYRQAVSEGEARVQRLSQSLTQEVEHWRMHSLVSAVMTLRGLDVVAATTVVAELGDLRRFAHPRELMGYLGLVPSEHTSGSKRGLGAITKTGNSHVRRVLIEAAWNYRYPARISRVLQLRQERQPAPIRAIAWRAQLRLNHRYRRLKARGLQHNKICVALARELAAFVWDIGRHVTPNP

SEQ ID NO: 376560 - protein, 365 aa, unidentified
MQKAELSCEADSENYLGGSSETMYYIGLDVHKRTISYCVKDAAGKIHQEGKVGSTRRELDAWIKTLPQPRTIAMEATIFTGWIYDHLLPHAEKVKVAHPLMLRAIAAAKRKNDKIDASKIADCLRCDFLPECHMASTEIRDRRRTLRYRGLLVKQMVQMKNRVSGLLMEKGVTHTKQRLHKVGYFAELMASNEEIDQSIRPLLKLSREHIVRAQKLDYALISSLERDPLLMERLKRLRTVPGVGPITALTWAVEIGDVARFRSIKQAISYCGLCGAEKSSADKMLRTPISKQRNKHIQHVLVEAAKLAPRHCHELALIYEKEMQRGNRNRATLAVARKIVAYLLAVERRQQDFVPAEGFGGTAAA

SEQ ID NO: 376561 - protein, 412 aa, unidentified
MRRVVGMDIHRTFGEVVIWKNGVLRHAGRVDMTRSALEGLGNRLAATDEVVIEATGNSMAVSRVLSRFVARVIIANPLQVKAIAHAHVKTDKIDAGTLASLHAAGYLPEIWTPDAITERKRRLATRRYQVVRHRTRLKNEVHSILHAHLIPKCPHADLFNARGRTWLARQPLPDDERSAIDRHVRELDRLADDLDILDREIAQGALDDQAIKRLMTITGVNLTVAAALMAAIGDIGRFKSPGKLVSYFGLNPRVRQSGLGAAHHGRISKIGRSHARAMLVESAWAAAKAAGPLHAFFVRIRARRGHQIAAVAVARKLAVLCWHLLTKNEDYLWARPALVANKTRAMELQAGKPQKKGNRRGPAYAYNVKALRDQEMQIAGQAERNYARFVARWKTRPSGEGVRERLNPARQE

SEQ ID NO: 376562 - protein, 345 aa, unidentified
MKIATIGLDLAKNVFQVHGVDPRGVPVLRKQLKRIQVLPFFATLEPCLVGMEACCGAHFWARKLQAYGHTVKLIAPQFVKPYVKSNKNDAADAEAICEAVSRPNMRFVPVKSVEQQAILALHRVRQGFVTARTAHANQIRSLLAEYGLVVPQGIHHLHQDVPDLLEDASNELPGVFRQLVMRQLDYLRELDHQVQLLEAQIKTWHRENEASRRLAQIPGVGPITATALVASVGDARCFASGRQLAAWIGLVPRQHSSGGKQVLLGIGKRGDAYLRCLLVHGARAVISAVRQKDGTSTSWLGRLLARRHTNIATVALANRNARIAWALLAHHREFCSDYGRAAPVV

SEQ ID NO: 376563 - protein, 343 aa, unidentified
MEAKRYIGIDLHRNCFTACLRLENGREYLKEWKLEDMGQFAAKLRPTDQVAVEVTGNTRLFHDAVAPHVERVVAVNASQFKVITHSVKKTDRNDARNLALYLAKDLLPEVRMKDKTQAQIASLTQTRDTMVKLRTALKNKVNNLCSAQGVNLNKESLASEKGLKTVLEMRFDLLVNLELKIIVEQIRSLNKSIAELEETIGQEGQKLEGHKNLTSIKGIGGLSSGILLSIIGDINDFADEGKLAAYFGIVPSISNSNETEHSGRITKRGTKLGRTTLIQCALIAQRYSPYLKTYYEKMKSRRGTGKAIVALARKFLGIIYRTLKNKWVFEDFPNFVLAEQATA

SEQ ID NO: 376564 - protein, 341 aa, unidentified
MQTIKYFIGFDISADDFTASCIISPDNPVFSTQKFSNNIDGANELIELFDKNNIKPSEAILCMEATGVYSEKLCYFLASKGFTVSVEAPHKIKNKIKDSPRKNDFIDALAIAEYAYRYTDKLPKWKPRNEILEQIQVLLSTREHLSVQMIANVNALKTLKHKYYQTPLANQIYQQTISKLKEHIKQIDQEIKSLIDKDDSFKNNVSLAKSVPGVGLLLAANLLVLSKGFTENLNYKHIASYTGICPYEQISGTSLHKPPRSRMCGPSKLRKLLYLAALSVRTHNKNFKKYFLRKVEEGKNKRLILNNIENKLLKIICAVINSGCAYTENYKSINPNRLNTA

SEQ ID NO: 376565 - protein, 383 aa, unidentified
MKSVCGLDVHKDSVYLCILSEFGELIEKVFGVLTYQLEEMRDLMLHHHVVEVSMESTSVYWIPIWRVLSPHFKLNLANPYFIKQLPGRKSDVKDAQWIAECTMKELIRGSFVPPETIQQLRQYDRRIFDLNEEIVRKLSKLDAVLQRCNIRLSNYVSNVDSKSYKAVVRAISQGITDPEELVKLIHGRIINHHGIDVITASLKGVVSLAEIDMISQLRDELDMAEAHKEKCQARMLEICEREFSEELKRLQTIPGIKERAATSLIAEIGTDMNKFETANHLASWSGLKPRNDESNKKIKSRSITHGNVYLRKTIIECAWAASRTKDCFFSRFSYHQTQVRKKNKMKVLVAVARKMLIAVWHVLHDNTIYIDFTTDRKTSRTKG

SEQ ID NO: 376566 - protein, 355 aa, unidentified
MTSTKYIGMDVHKESISIQVMNSVGKVVMECVIETKASTILQFIDGLRGDVRVTFEEGTWAAWLYDLLKPHVTEVVVCNPRKAALLKDGSKGDRIDAHKLAELLYMNKIKSVYHGEHGLRTMKELARSYLTITKDLTRVMNRLKALYRSWAIPCGGKEVYARRYRAEWLGKISEAGVRRRAEHYYQQLDVLRLLRQEVRRDLLVEAKKHKPWKLLRQIPGIGPIRAALLVALMQTPHRFRTKRQLWTYCGLGLETHDSAQYHAVEGQLQRSRKPATVRGLNKDHNHDLKDIFKGAATRVSGSRGPLHDFYEALLAKGRKPTMARLTLARKIAAITLIVWKKEVRFDANYLKPQAA

SEQ ID NO: 376567 - protein, 407 aa, unidentified
MEILHPRCAGLDVHKDVVVAAVRCVSMPTHQEVRSFGTTTKELQALSDWLESHGCTQVVMEATGVYWKPVWHLLEGNFELVLANAQHVKNVPGRKTDVGDASWLAELLAHGLVRGSFVPPAPIQELRDLTRSRKQLVRELSQHVLRIQKVLEDANLKLGSVLSDITGKSGRAMLAAIVQGETDPEKLASLAQGNARKKKAELIEALRGRVTPHHRKMLKLHLGLVDTLQTAIDEVDVSVGKALEPIQARATLLTTIPGVSDIVANVIVAEIGVDMSRFPSPGHLVSWAGLCPRSDESAGKRRTTRVRKSGTWLKTMLVTAAWSAVRVKDTYLRAQFLRIKSRRGAKKAILAVAASMLTAVYFMLRDDKLYADLGSQYFDRHDKGKTIGRLVRRLQDLGCEVEIKPAA

SEQ ID NO: 376568 - protein, 474 aa, unidentified
MARTRSRPASPPVPGDAGAEVTDEPVQVITRAAAIDVAKGSGMVCMRLPHESRAGRRTQKVWEVTAAFAAVVALMDHLVCQGVERLVLESTSDYWRIWCYLAEAAGLEVWLVNARDVKHLPGRSKSDRLDCVWLCKLNEWGMLRRSFVPPEPVRDLRALTRLRANLTHDRVRHQNRIEKILEDALLKVSSVISDLMGGSGRRFLQSLVDGERSPAALAALGDYRLHASKAELAEALTGRFRDIHGFEIGMLLELIDDLSAKITELDERIEAQLENVPGLGGVCTSCGQPGPDGPCTGCGEPVLGVIARLDEITGIGRGAAQVIVAELGTDMTQFPTPGHAASWAKLTPRAIQSGATSKAGRTGKGSPYLRGATGVAVMTAARTETFLGARYRRHARRRGKQKAIVAGCRTIIEIAWRIIADPGFRYIELGPDYHDQLDPRRKTRDKVRQLEKLNPGMTVTLTPRPEPGGQAPAA

SEQ ID NO: 376569 - protein, 312 aa, unidentified
MIDQCYGGIDVSKDCLDVMVLPERQSFSVDNNAAGCSELLNRLRGLSIVAVGIEPSGGYERSVIRALLAAGLSVRRINPNKLRQFARARGVLAKNDRLDARLIAEYVAIMPTRVVQRDPAAEQLAEVVTMRRQLCDEHVAVANQTAHLEDTMLRRLNKRRLARLEADILLLDRRMAEIVGGNASLARRYELLTSMRGVGPTLAFTLIALLPELGQMGRKQIAALVGLAPYDFDSGRLKGHRCIYGGRLPVRNVLYMAALSACRYNPTLKVFHRRLAGANKKPKVKIVAVMRKMIVILNAMLRDNVAWQPNFA

SEQ ID NO: 376570 - protein, 318 aa, unidentified
MKHPLASPVYLGVDMGAATFVAAQHGRSGTATYTNDAAGIRAYLKAITSWGTVALVVVESTGGYENLLVAALLSADIPVHRADPRRASLFLRSLRREKTDALDAVGLARYGAERDTDLRRTRRVSAGQEQLKALMRRYQDLTDLHAHELTRRQAPSLGDMPDTFTPILQVLKEQIAVIERAMDALIAQAPELTARFEALMAQSGIGAKTARALVALLPELGTLTRRQAAALTGLAPLARDSGKAHGYRATKGGRRDVRSALFMATLSAVRFHPTLKTFYERLVANGKRRIVALIAAARKFITILNAILRDNPLLQQSG

SEQ ID NO: 376571 - protein, 460 aa, unidentified
MNRKRSKSRIDRTLPMMHPNAAAIDVGATIHMAAVRADRAPQPVRSFGTFTTDLHRLVDWFTECGVETVVMESTSVYWIPIFELLDARGFTVFLVNARDAKHVPGRKTDVSDAQWLQRLHSYGLLRASFRPKGQIAELRAYVRQRERLLEYAASHIQHMQKALTEMNLQLHHVVADITGSTGLRIIRAILAGERDPEVLACLRHYSCHSSAETIAKALTGSYRTEHLFALEQALAFYDAYHEKASACDVRIEAVLKELCIHRGRGIGSVAPAPRRRHRTDQANALAFDVRAALFALLGKDITTIDGLGPYLSLKLVAECGDDLSSWPSAKHFTSWLGLAPSNKVSGGKMLSSRTRRSGGRAAALLRLAAVTVGRTDTALGAFYRRLSSRIGKAKAVTATARKVAVLFYNAVRHGMEYVDPGASSYETRYRTRVVNNLHRRAKAFGFVLQPLEPKAGAVVS

SEQ ID NO: 376572 - protein, 357 aa, unidentified
MRRGYQKEECLARKEDVYIGIDVHKEKWHVTARSAGEEVFHGSMLSEYQSLRKFLERFKGRRIKIAYEAGPCGFGLYDRLSGDGIETIVAPPSLIPVESGNKVKTDKRDSRKLAKLLESNMLKRVYVLSEEDRANRELLRTRRQLMEHRSDVMRQIKSKLLFHGIKPPFPQRQSWTQRYVKWLRELHCEHDAVKVSFDALLDLYDYLDSQVTRMSKKVIALSRRDKYSEKVKLLRSVPGIGILIGMELLVELADVERFKTADEIASFMGLTPSEHSTGQYVRHGRITRCGNTRARASLVESSWHLIVKDPFWRAKYMKLKYRRGAKRAIIAVARNLIIRIRRILLDNAPYVVNMAAA

SEQ ID NO: 376573 - protein, 348 aa, unidentified
MKHFIGLDAHSKSCTFVVQDETGKVTHRTIVKTSERALLGFLGTLPGEKILAVEESHVSQWVYVLLHEKVDKLIVCNPCYLAKHQGPKTDYRDALRLCNELRGNFLKPVYHDESKWIQLRVLVSGYLDLVSEIVRTKNRLKAIFRSEILDTSDAKFYKSKERAKELSHEHGRFVADSLFRQVEYLEERKLEFKAIFTKNMKTYRALKNLATIPGIDAVRANIIMAIVCMPHRFESKYKFWAYCMLVRYLQISDGKIYGNQKIRARFELKSLFMGAAENALQGENCLKEHYDQQRKKGVDHRGAKISVARLIAAAALSILKNNGKFDENYHKTHEERTQLRKTLNEVSI

SEQ ID NO: 376574 - protein, 378 aa, unidentified
MSDVISIAPADVRLWVSLDVHKFSIVAATLPPVSGTPEVCRIETIEKAIRRFIDRLGGPEGLAVCYEAGPGGFALWRLLTRLGVSCDVVAPSLVPVRAGDRVKTDRRDAKKLVSLYRAGLLRFVHPPTEELEGLRDLLRCRDDIRCARTAARHRVLKALLRHGRIFREGKTAWTKLHRAWLARQRLDDPLAQRALEQLLIHLDGIERQLDALDAELAQIASSERWAGQVAILIRFRGISTLSALGLIAEIGDFARFGNPRELASWLGITPSEYSSGDQQHRGHITKAGNHHARRLLVEAAWHYRHPPRRPTSGPDPDERAWQAQVRLHHRYRHLTEHGKRTTVTNIAIARELVGFLWAAMTDQPLRDTHDPHHKEVAA

SEQ ID NO: 376575 - protein, 416 aa, unidentified
MKLFVGIDVSSEKLDVCFLTDDDQLSILSEISVANDIEGASLTREMILKFNENYLFDQIVIGMESTSMYSFHPSMFFHEDEELRKLNVLVTIENPFRIKQFSRMFDEDKTDRNDALRIADFLRIQRFTTSPIKEEKYMALQRLTRTRYQLIKQLTRTKQHFLENLTYKCSTLAREMKDESTSLFSTTIISLMTEDFTLDELAAIPLEAFCDLLQKKGRGRFKQPEKIAKAIQRAIRSSYRLGAVAQESIEIVLGVLVCEMRTLEKNIKELDKAIEQLVIIIPEYQCLTSIPDVGKVYAAGLIAEIGQIERFEDQTKLAKYAGLSWKVKQSGNYQSQNTPLTKQGNRYFRYYLVEAANSVRKYLPEYQSFYQSKCKEVPKHQHKRALVLTARKFTRLVDTLLRNHQLYTPPRSVIDK

SEQ ID NO: 376576 - protein, 402 aa, unidentified
MQYLGIDIGKRAHEAALLDQDGNHLGKTVRFSNSHKGAEKLLDLINEHECLPDNTLIGMEATGHYWLSIHTFLKKLGFDIVVFNPIQSDSFRNFYIRKTKTDKVDAILIAQVIRMDVPNTSYISSEDTIKLKQLTRFRVSMVDQTSDIKRQIISCLDQVFPEYERLFSDMFGKTSRKLLLESPLPEDLLNIESTHLTKLLKEASKGRFTEEKSMLKVDEIKGLASDSFGISIASDVFKMQIQLLIQQIELLESQIKDVESKINELLEKDNHHLTTITGIGPITAATIIGEIGDIKCFERPNQLLAFAGLDVSIHQSGDFTGTNNRISKRGSPYLRRAIWQAAFVASNKDPALSEYYQSLRARGKHHGTAIGAVCRKLVNIIFAVWTNDKPYEVRHHSNKEQE

SEQ ID NO: 376577 - protein, 411 aa, unidentified
METVFERVGALDVHKAQVTACVRVPDSAGRRTPQVAEFAATVRGLLALRDWLAAHHVTHVAMEATGVYWQPVWHLLEDDFELTLCNARHVKNVPGRKTDVSDAQWLCQLMEAGLLRGSFVPPKPQRRLRTLTRYRKTQIAERQREANRLHKALEDTGIKLDCVATNILGLSGRAMLDALVAGTTDPEQLAELAKGRLRAKLPALREALEGRFQPHHALVIGAMLAHLDFLDEQIQRLTDAIATELGPTGQAGVTLAATITGLAARTAEVMVAEIGTDMRVFPTARHLASWAGRCPGNDQSAGKRRSGRTRNGCKWLGIALEEAALAAIRTRNSYLAAQYRRLKPRLGHGRALGAVKHSMLIAYWHMFTTGEAYHDLGGDYFQRRNPERHTKRLVAQLQALGHDVTLQPAAP

SEQ ID NO: 376578 - protein, 345 aa, unidentified
MQITTIGLDLAKNVFQVHGVDAEGTVVVRRKLRRTQVREFFVGLAPCLIGMEACGTAHFWARELIAMGHRVKIMPPSYVKAYVRRGKNDAADAAAICEAVMRPHMRFVPVKTEEQQAALMLHKTRELLVRQQTMLINAIRGHMAELGMIAPQGAAKVKDLIAVIQESEDQSIPALAQAALQPLVRQLHTLDEQVEILDREIKAWHKTNETGRRLATIPGVGILTASAIAATVPDPSFFKSGREFAAWLGLTPRQNSSGGKDRLGRISKKGNTYIRRLLVTGATSMLRYARAKTAAGADWVNGLLQRRPARLVTVAMANKTARIAWAVMVKGENFRVPVRPMTEAA

SEQ ID NO: 376579 - protein, 372 aa, unidentified
MSESSKILYVGLDVHKESIAVAYAPDDRGAEVGSLGAIGTRQSDIDKLIRKLQSKGAATLVFVYEAGPSGYGLYRYLTGKGFACHVVAPSLIPRKAGDRVKTDRRDAMTLARLMRSGDLSAIYVPGVEDEALRDLSRGRDDAMQDLKRSKRRLKSFLLRQDIRYEGRATWNAAHLRWLAEVVCPTPPQQIVFQEYLRAVTEQQVRRDRLERELHEAVKGWRLYPMVEAIQALRGVELTGAVILMTELGDITRFDNPRQLMSYLGLTPSEYSSGERRRQGGITKAGNSHARRALVEGAWAYRYPAKVSRHLQLRLEKLPTEVQAISWKAQVRLCKRYRQLTARGKHVNQVVVAIAREMAAFAWAIARRVPQAS

SEQ ID NO: 376580 - protein, 421 aa, unidentified
MLKIHRFNCAGLDVHKNLIVATIGITDKKTHVTEYIQKDFSSLNFDLYNLKNWLIEHECFDVCMESTGKYWFPVFNVLETEAKMNIVLVHPKYVKAIKGKKTDKKDSKWICDLFKHDLLKSSFIPPKDIRELRDLSRYRFKLICMRTSECNRYQNSMTVSNIGLASVVSDTFGKTAQAVMNEVLSTEVIDEDKITKLIHGKCKNKDKIVESLKSSKIEPDQRFKMAEIQSHMNELNQHIEAVEVEIIKRASRYFDDFLHITEIDGIQLMSAILIISEIGVDMTQFETDKQLCCWAGLSPANNESAGKKKSVRINKAGQYLKPVLVQCALAAIKNKNSYFGQKYTKIKKRRGHKKAIIAIARMMLVSIYHMILTGEKFNPSDYESFKNPKPQKEKNNYTVETALDFLKSQGFDVSTIQDIPK

SEQ ID NO: 376581 - protein, 353 aa, unidentified
MSKILAIDLGKNNSAVCIFDRSSMKCKYKALRTRKQVMHDLFVEYQDQIEIVLFETGSQMGWVADILWALNIPFKVANTNHQAWKWKNNPNKSDRKDAQRLAMMYHTGFFPTVHVPKREVRQKRSLINYRDDVVKRITKMKNSIRAILGREDIHLPSSKKGWTIKALSPIRNMAIPLKEIMDLEDLWKGQLHSELNQLDNAVEELKDMEFKLNALGEADEKIKQLRTIPGVGPRLSEAVVAIIDDPHRFKNGRHVSSYLGMVPRRWQSGQVDITGRISKCGNKLLRTLLVEVSWLGLREPWMREIFNKVKHGDKKRAKVAIVALARKLLVICWAMLKNGTTFDADYAKRFVKC

SEQ ID NO: 376582 - protein, 405 aa, unidentified
MDLLYSRCAGLDVHPRSVSACLRVVVDGRASQEVRTFGTSTRELTEMAEWLASAGCTQVAMESTGVYWKPVWHVLEGRFELVLANAMYVKNIPGRKSDVKDAVWISDLLAHGLLRGSFVPPERIQELRDLTRTRKQLVREIARHTQRIQKTLEDANVKLTEVITNVIGTSGRAILRALIAGETDLDRLVDLTSGRLKASRAALKDALQGRVTEHHRFMLKMHLDQLEHLEATVRDVEARADQQPFRAATELLKTIPGVSGVTARVIVAEIGDDMSRFPTAGNLVSWAGLCPRLDESAGKRRSNRTRHGAPWLKPVLVQAARSAANKRDSYPRAQYMRLKARRGPNKAVLAVAASLLTAAYHMLKHGVEYRDLGPNHFERDKQVQAHRLLRRLKALGLEVTIKPAA

SEQ ID NO: 376583 - protein, 415 aa, unidentified
MDRSPSSSSPVDPASFTYVVGIDIGSQTCSFCTLKPDKSQVIKPSEFANAPAGFAVLLDKLERLGVSPEQILIGLEATSRYGDNLYRFLQSRGYQLCLLHPRQTHQFAQQRGLRAKTDKLDATTIARVLLSGEARRGYVPTDLIATYRELARLQTQLTEDITRCRNEIHALLQVLFPEFTQVFADPCRPTALALLKLYPSAQAFVAAGVETLAAKLHELSPRNYGLQTAQQLVSLAQHTISSGVALSARSTSLKILCDQLEHTQANLLQLEKELENLMKTDTGAKGLQSVPEFAGKTIAVLRAELGDVERFACSSQAVAYAGLDIEVKQSGKSKGQAKLSKRGSGRIRRILYMAVVRCIRLTDSAFGAYYHHLVARALPRRAAMMAVVRKMLMVAYRLLKTKEAYDPTKVHNWPP

SEQ ID NO: 376584 - protein, 355 aa, unidentified
MSQEKYIGMDVHQATISVAVMDAEGKLIMECLLETKAATILELVQGLHGTLSLTFEEGTSAAWLHDLLKPHVSRLVVCDPRKAALLKEGNKSDRIDARKLAEMLRTNQLKPVYHEEHGIRTLKELGRSYLTITKDVTRGMNRIKALFRSWAIPCAGTSVYAPRHRTEWLAKLEQPGVRVRAEHLYQQLDGLQPLRLEARRELLRESQKHPAVKLLRQIPAIGPIRAALLVALLQTPHRFRTKRQLWAYSGFAVETHDSGEYRNVRGKLQRNRERITVRGLNDNHNKDLKNLFKSAAISASTRPGPLHDFYVARVEKGMRPTMARLTLARKMATITLTIWKKGVSFDPKHLPRQAA

SEQ ID NO: 376585 - protein, 340 aa, unidentified
MEVIIGIDPHKASHTAVALADTEVELARLQLSSSRSQIDRLLAWAKPFPQRRWAIEGAEGLGFLLAQQLVAADEVVVDVPATLAARTRLLGNGRTNKNDPNDALSVAVTALRHRELRTVTTAGYSELLRLLAKRHIDLSNQRTRLVARLHALATELSPGGIAKKLNSTDAAKFLATVTPTDAVAQLRWDLIAELADDIARLEAQTKQSERRLRDAVAASGSTVTNIYGIGPIIAAMLIGNTGDIARFANRDRYAAYNGTAPVEFSSSGRIVHRVSQRGNRTLNHALHLAAMCQLRQRHSDGRAYFERRVADGKTNKEAIRALKRQISNNVYRHLVADAAS

SEQ ID NO: 376586 - protein, 376 aa, unidentified
MSEITRAPIIARVGVDLAKQVIQVHAVDASGRQVVTRAFKRNQFFAWCAQLPVGCLVAMEACSSAHHWARKLRARGFDARLIAANFVTPYRMEGKNGKNDATDAAAICEAASRPCMRFVPVKTCEQQGVMSLHRVREGLKEERTACINQIRGVLTEFGLVFGRSPKVLRAALADVIEDASNELSTTARLVLQRAFVHWRELDEHLRWCDQQVGQHVRASPAAERAAKVIGIGELGASALTAGVGDFKQFTSGHQFGAWLGLVPRQDSSGGKTRLGRITKRGDDYLRTLLIQGAKAAVMTADKRDDPTSRWLAQLTARVGWQKACVAMANKNARILWAVMTREEGFDPKHVSFKPPAKQSAAQRAAAAPHSLATCAA

SEQ ID NO: 376587 - protein, 372 aa, unidentified
MEKANTVVSFVGMDVHKESIDVTVAEEGPSGEVRHVGTIGGDLEAVAKLVRKLRRKNGELRFVYEAGPCGFEICRFLREQSLACSLVSPSQIPRRAGDRIKTDRRDSEMLARLFRAGELSAIYVPEADDEAIRDLARARADILRARQKARQQLQALLLRSGKRYPRKCAWTLAHRRWLCDLRLDHPAQKIALEEYLAIIDEATHRIERVETALAEQTSTWRMAPVIEALQALKGVRLLTAITLVTELGDLSRFDKPRQLMAFLGLVPSENSSGERVRRGGITKAGNTHARKALIEAAWAYRHPARIGRRLQMRSETLPTSIRDIAWKAQLRLTSRYRKLSARMKPPTVVITALARELAGFVWAIARLRPIGS

SEQ ID NO: 376588 - protein, 335 aa, unidentified
METVYFLGIDMAKKTFEGSLTVDGKTFYQANSDNTEMAIKAFFKDVMKKFAISYGQLIVCMEHTGIYCHPLLDFLIKNHVKVCLESSTQIKRSQGMVRGKNDKIDAQRIGLYAYKNREALTFWTPQRQVIQKLKALLVTRDRLIRCKTELQVPIHECEEFIEKSIHNMIVKGCKNSIKILEKDIEKIEKMIQDLVKEDTQLNIKYQLATSVTGIGKITALNMIVSTGEFTRIQEAKKFACYSGVAPFEYTSGTSIRGKTRISKMANMTIKKLLHLAAMSAIQCDDEIKLYYNRKVAEGKNKMSVINAVRNKLISRVFACVKNNRPYKKIYKYELV

SEQ ID NO: 376589 - protein, 416 aa, unidentified
MKIVRPICCGMDVHKNIIVATIGITNKKPRITEYIQETFSTLNPDLLNLKQWLINHKCFDACMESTGKYWIPIFNILEDEINIYLTHPKYVKAIKGKKTDKKDSKWICDLFKHDLIKFSFIPPKEIRALREVSRYRYKLVGMRSSERNRYQNCMTVSNIGIGSVFSDPFGKSAQAIMKEVLESDIIEDEKILKCIHGSCKNKDKILDSIKHCNIETDQRFKMNESMTHMEELQVHINNCEIEMMKRAAPMFDRFMHITQLPGISTLSAILIISEIGVDMKQFESDKQLTCWAGLAPANNESANKKKSVRISKAGQYLKPLLVQCALGAIKDKEGYFGIKYSRIKKRRGHKKAIIAIARMMLVSIYHMILTGETFNPSDYESFRNPKPPIKQQVLTEESAIEFLKKSGFDVSKLTKP

SEQ ID NO: 376590 - protein, 395 aa, unidentified
MYVVRGRKMPPRWRGRPSPALVRKETVKSFRVAAPIFLQSESPNSCPGLQENEEPASARMGRLGRGRRARAMSPTTKVYAGVDVSKGRLDVFVRWGEAREEKGELFDVPNDDAGIDELLARLEKARPALVVLEATGGFERPVAAALAALGFAVAVVNPRQARNFARATGRLAKTDRIDAQSLARFAGAVRPMPRPVPDEEARVLGEILCRRRQVVGMLTAEKNRLLTATAKAVKKRIEAHVRWLEKELERTDRDLDGTIEESPAWRENEELLRSVPGVGPVLARTLLAELPELGTLAPKQLAALVGVAPLNRDSGVLRGKRAIWGGRSGVRAALYMGALAATRFNPAVKAFYGRLLATGKPKKVALVACMRKLLLILNAMLRNRTPWRSPHVLTP

SEQ ID NO: 376591 - protein, 531 aa, unidentified
MGDVREILHTPLKDQDNFSCVSGQTTSTGSGLSNPRMDDGESTAWRYHLEPHRGGTSMARRTKVLSDPQVLPMLPNESLYIGVDIGKFQNVAGFVSRTLLERHQHFENCPAFIFEQSREGFCAFIERIRAYCPPEHCFILMEQTGHYHRNLQQYLLEYDFPVYVMHVQSREFGMLKTDKRDALGLANHLYNQLALGVQVANKLQVVRRAVPPSAAAAQLKGLMRHRYELINESTQRKNKLTAICDELFPELTQVFKNPNLTVALDLREKFPTPHAVATATLPALREVRRKSHPSEADLILLQQLAAQSIGTKDLARQRGLLLEQALLIKELRLLQDHLERLEAEICQIVEQCREGKILLSLPPIYPLAAATMLAGIGHIANFEDAAHLKAYFGWAPKRAQTGVTFDRTSLTLGGSREMKRVMYLVAWNAIKGQTEWATLYKRLVPRLCTYDERLQVYKGRGKAIGHVIGRLITLIYALLRQDHETLSHLAPGTKPPEPVLYDPELHRFHRTGHYRPLRRTLPENRIVHVQL

SEQ ID NO: 376592 - protein, 316 aa, unidentified
MQTFPNIGVDVAKDAVVVACAAQSFPTHSVTNQRASLLAWLKSLPAGSRIGMESTGGYHELLADLAHTQGHTVYLLNPLDTRHYARAMGNRAKTDRVDAELIARLIAQEHARLRPYTPPTADQRKLDRMIRRRAKIVRIKSSLTLTMSNLGGFAAELKAVLSKLDTLIAKIDSAMTAIAAHSPQHKEAQQRLQTIAGAGPVVGMALANTLERVPFRNADAFVAFTGFDPRANDSGNKIGRRRLSKRGPAELRRLLFNAAMAAAKSKAWKPIYEHYRAKGWSTTAALVIIARKIARAAWSIHHYHSVVSGNFAKMVS

SEQ ID NO: 376593 - protein, 346 aa, unidentified
MTKTPIAVLGIDLGKTSCSLVGLNASGAVVLRRGVRRETIPGITAKLPRCVIAMEACCGAHHLGRLLARQGHVIRLMSPEYVRPYVKAQKNDDRDAEGIAEAATRPTMRFIDLKTEEQLDLQMLHRVRSRLVGMRTTLINQLRAILLERGSVFPKGRRKLEVGLTAFLADPGVSLAARIRTLIVEIRTEWASLDKRIETLDREFVEVAREDEAARRLITIPGVGPMTATALRAAIDDGSAFTRARDLPAWLGLVPKQHTTGGKPRLLGISRRGNAYLRQLFIHGARAAMPSLSKAENPTGAWLRGLLARAHPNVAVVALAAKLARFAWATLRRGTSFARQPELAAA

SEQ ID NO: 376594 - protein, 414 aa, unidentified
MDVIVERCAGLDVHRDSVVATVRVPGKGKSRRRRAQQTRTFATTIAQLEQLADWLEGFGVTLVGMEATGVYWKPVFYVLERRFECWLINAEHLHNVPGRKSDVIDSRWCCELLELGLVRPSFVPPPEIRRLRDLTRLRSTQVEERTRAIQRLEKVLQDAGIKLTSVASGTYSVSARAILEALLGGVSDPAALAQLAKGRLRAKIPQLEEALASRFDTAHHGVLVASLLAQIDALDHAVVTLDARIETATAAHTELVELVCTIPGVKLRTAQVLIAECGIDMSVFGSGERLVSWAAICPGTNQSGHRRRSGKTRHGNRWLRTALTQAAHAAARTKNTYLASHYWQIRGRRGDAKAIGATRHDILIAYYHIVSDRVPFRELGPDWLARRHSPEHRTRRLVKQLEALGHNVTLEAAA

SEQ ID NO: 376595 - protein, 346 aa, unidentified
MNQIIRIGMDTSKHFFQLHGVEAAERPVLRRKLRRNQVLAFFAKLPPTVVGMEACGAAHYWARELRKLGHEVKLMAPQHVKAYVKRNKNDGRDAEGLCEAMSRPTMQFVPVKTEEQQAALMLAGVRQQLITRRTQLSNAIRGYAAEFGLTAAKGLDKIELLLAQIAQDETVPEIARELFAFQGKDYARLQIDLKAIEVRLMAWHRADATSRRLVQVPGIGPIGATALVMKAPDPRLFRSGRHFAAWIGLTPKDHSTAGKTRLGKITRAGDEMLRSVLVAGATAVIQQARRGRGRPSPWLVALLARKPPKLAAVALANKIARIAWKLMMTGESYDGARMPGALAVAA

SEQ ID NO: 376596 - protein, 346 aa, unidentified
MMLIGCDFHPSWQQVSWLDVETGETGEQKLVHAGGEAKQFYEQLAAPVLIGMEATGNSQWFIELVEDLGHEIWIGDAAQIRASYVRKQKTDKRDAAHILKLLVEGRFPRLWTPDREQRDLRQLVLHRHKLVLIRSRVKNELQHLSLNKGMQRKRRLWSQAGQQLLRELPLKKWAACRREDLLGLLTMLDEQIGKLDGAVQHAAEENPQSKLLMTQPGVGPNTALAFVLTLGDVGRFPRGKQVASYLGLIPREESSGGRQKLGAITKQGNRMLRSLLVEAAQVAVQHDPGLRKQYRHRCHQKPKAVAKVAVARKLAVRLYWMLRTNVAYPEIVRIESSSGLPLVGAS

SEQ ID NO: 376597 - protein, 421 aa, unidentified
MARRKVTEEVEEIVYERCCGMDVHKEDVKACLNIHGKKEVKTFSTMTADLLEMSKWLKDNEVQMVAMESTGSYWKPVFNILECEGVPAILVNPQHIKNLSDPKTDVRDAKWISSLLRHGLLRASFVPAREMRELRELVKYRGSLSDDSTRTLNRIDKVLQGANIKLSNVISTTNTKTELSIIEALVNGQTDLDKLTELAKGTLKNKTPELKAALNGFMNDHQRMLLKSMHSHLKQIHKEMAVIEAEIDKRMEKDTELIERLDEIPGVGKLTAQAIIAEIGTDMDQFPDEKRLAAWAGVCPNQNESAGKRKSGKTKKGNSNIKKTLVQCANSASHTKGTYLGAQHKRIANRRGRKRANVAVAHTILTICYFMIKNGTRYKDLGPDFFDKRNKDGIVKRSIKRLEALGFVVSVKPIEPLPGTS

SEQ ID NO: 376598 - protein, 351 aa, unidentified
MPSLAEFADVVIGVDTHVDTHSAAVVDARTGAVLEELTVATTPAGYQELVDLANAHSPARVWAIEGTGSHGAGLTRYLRRGPEVIVELDRPERATRRHGAKSDPLDAVRAAREAMARPVLGTPREGDGDRQALSVLLAARRSAVDGARVAQQQLFSLIIAAPEVLRDKFRGATSAQRLRVAARLRVAAAWDTHTTTTASVLKTLARRAQALTAEANTLEKEIRRIVKAWRADLLDQFGVGPIVAATVLCAWSHPGRVRSEAAFAMLAGVAPIPANSGQVTTRYRLNRYGDRQLNRALHTIVLNRQRHQEPTKAYTAKRTAEGKNPREIRRCLKRYIIRDLYRLLENPPLPR

SEQ ID NO: 376599 - protein, 351 aa, unidentified
MKSSAKAVPTTIGLDIAKNFFQVHAVDAAGKVVLRRKLSRGEVLRFFEAQPKMLVGIEACGTGHYWAREIAALGHEVGLLPPTYVKPYVKRSKTDAADAEAICEAVTRPNMHFVPIKTAEQQAALMMHRPRELLVGQRTALVNALRGHLAELGIVTAKGVHRVADLLAELVGVDDRKIPPLARASLRCLAAQIEAVETQIDKLEALILEWHKGNEASQRLARIPGVGPITASAVVATIGDASSFTSARHLSAAWGLTPKQNSSGGKSRQGGISKAGNTYLRRLLFIGAIAVIRSRKAQEAGSWLARLLERRPAKVVAIALANRTARVIWAMLRSGEAYRPAKSPGTSAVAA

SEQ ID NO: 376600 - protein, 347 aa, unidentified
MKILALDLGKYKTVGCDYERETGKHRFKASLTTPAGLQQLVQEVKPDRVVIEVCNIAGWVSDLLRRMGIETQVANTNEDAWRWRKVKKKNDRRDALKAAQLSAVNQVKEVYIPPLEVRQWRSLITFRQQLVRRRGRMKNHIRDLLVSEGELLPRGQSCWTNAGIARLEALARPLSEVGLNEMWRGQLQIELQQLQAVQAEIAVVEKKLDAIAATDVRVKLLRTIPGVGPRLAEAIVALLDRPQRFHKASEVSAYVGLVPKELDSGETVRRGPITKQGSRLLRSLLVEVAWAGLRHNPWVRETYQQISGGKKSRKKIAIVAVARRLLVRCWAMLRDGTSWRAPVPAIS

SEQ ID NO: 376601 - protein, 382 aa, unidentified
MPSSRNPAPTSDGPDTVFLALELSGTSWLVALHAPDADKVERHRLASGQARDLLDLIARIRSRVQRRLGTVPRVSCCYEAGRDGFWLHRLLEREGIASHVMDPTSLQVDRRARRAKTDRLDAEALLRALMAWSRGERRVCSMVRPPSPEQEDARRPSREREALLKERIRRVNRIKGLCAAQGVYDYEPIQADRRERLAQLVTGDGRPLPPELAAEIGRQLEQLELVLRQLAEVEAVRDQRAAAARAEPGSKLGALLRLRGIGPELATVLQMEVFYRHFASRRDVAAYAGLAPSPFASGGRQREQGIAKAGNPRARKALVELAWLWLRHQPESALARWFHGRVGAAGGRVRRIAIVALARRLLVALWRYVETGVVPTEAQVKA

SEQ ID NO: 376602 - protein, 339 aa, unidentified
MDTIGLDLHKRESQLCVLTEAGEIVERRIVTSRERFTAVLGSQAPARILVEASTESEWVARHLESLGHEVIVADPNFAPMYATRRRGVKTDRRDARTLAEACRLGAYRPVHRASAPQRHVRAQLAVRDALIRTRTRYVSVVKALVRRDGLRLPPGNPVHTDAKLAALPLPVPLARELAPLRALFEPLNNEITAADERLAAVAAADPVVERLRTAPGIGPVTAVAFVATLDDVTRFASAHHVAAYLGLTPREYSSGEQQHRGRISKTGNARMRYLLVEAAWRVLRTKDPAAAVLRAWADGIAQRRGRSVAAVALARRLAGVLYAMWRDGTDYQAPPAAAP

SEQ ID NO: 376603 - protein, 418 aa, unidentified
MTKSFDSTFIQIIHPVCCGLDVHKDKISACLITLDDNGKEQYEIKEFSTFTKDLLKMKKWLIENDCPILAMESTGVYWHPICNIIGDIMKVILVNARHIKNVPGRKTDIGDSKWLAGLLRHGLFKGSFIPSENIREWRELTRLRKKYTESFADYKRRVHKLFITANIKIDSVVSDLFGLTGRNLINLLCNEADLTLENIEQCTKGSLKKKAPELYESLQGFFKEHHRFQLVGMMDIILKFEQRVAEINDRLVLLTKEYHDLLDRLDEILGIDKKSAQSIVSEVGVTLDEFKTMSALVSWAGLCPGNNESAGKRKNGRNSVRNHPLKTILIQVAWAAVKTKGSYYKAKYYKLKARRGAKKAIVAIAHRIAKAIYKIIKHGDTYRDLGEDYLSAPSKQKVLMNLNKRAKEMGFKLVPCDV

SEQ ID NO: 376604 - protein, 389 aa, unidentified
MFYVGIDISKFKHDCFIVTEAGEVVCDSFSIKNDSDGFTELLSVLDSLDPKENVRIGFESTGHYALNLKLFLEKAHYSFMEFNPVLLSKFNKSQSLRRTKTDAIDSISIARWLMTVDYKPYPIGFYHTYALKSLTRLRDSLVKQRSLYMVKITNVLDHVFPEFKPFFNNRFSKTALYLLENYGSAKSISKMNTRSYDALRSVSRGKFSMQKFLKLKELAKNTVGCDHELFTCQLNSVVSFYKQRANEVDSLEDQIESLIVEIDPKTLSIPGIGPLSAAIIYAEYGDLSKFNSPAQMLSFAGLEPGYYQSGTSEHGGGMVKRGSSHLRYTLMNLCIPLIQYNMTFAEYYHKKRNEGKSHRVACSHLVKKLIRVIFTLEKNGINFDPTKLR

SEQ ID NO: 376605 - protein, 324 aa, unidentified
MKTYIGIDVSKDTLAVAFPSTPDTWKVSSFANSPDGIRRLTSALPAEAHVVIEATGSYSVLLTYLLCQAKICLSVINPKQSHHFGKMQLSVTKTDESDSILLARYGQMTQPPLYEMDSEIMMCLRQKRTLLRQYKKQQRSLANLHHSFTPLPIKDDQVQVSLQQMLAYFQTAINILTDEIQALTKQHFPDQLRRLTSIVGISNTIATALIDVTGGFHQFHSAKALAKYIGVVPVIYQSGKSNQARGICKTGDPQLRAMLYVASWSAIQHNKPCREFYQRLKAAGKSSKLALIAVVNKLLRQAFAVVKFDEDFNPNYQPVLRKIA

SEQ ID NO: 376606 - protein, 376 aa, unidentified
MRETLRFLGLDVHAETIAVAVAEADGEVRSLGTIANREETIRKFIRKLGPPEQLRACYEAGPTGFVLYWQLTQLGVECDVVAPSLVPKKPGDRVKTDRRDALKLARSHRSDDLTAVWVPDDDSESLRDLVRQREAAKQDQLRARHRLTKFLLRTGQRSPQGVKAWTERYVEWVQQVHYAHPAREATLLDCLNEVQHMDERVKRLEESIVEVIQLAPAAMREVVRGLQALRGIAHISAVTIAVELGNITSRFENARALMGYSGVFPSEDSSGKRIRKGRITKAGNAHLRRVVVESAWSYRHRPAIGARLRKRQEGLPAEITEIAWKAQNRLHRRYMTLMARGKEQRKTMTAIARELLGFIWAIGIRAETACRQQMAT

SEQ ID NO: 376607 - protein, 340 aa, unidentified
MNRFIRYGVGIDMSKDNFHAYFAAIEEATGKFITCAQKKFKNSPAGFDLFNKWLQKNSKEEIELSLVMEVTGVYHEELLYFLYEKKYAVSLQQGHIVKSYLKSLGHKSKNDKLDGKGMSQMCCERKLKPWKPSCPNMLKIRTLLRHRKALEKTSTAFKNQLGAIKCSRLKEQEVIDSLTKWIDKIDEEVKDLEKRSITLAKEDESFFTKVKMIIDSTFGVSYLTILTLLSETNGMEEFRNQKQLESYAGYDIVENSSGKFTGKTKISKRGNARIRAAMYMSALSAAKQNSPFHDLYIRLISRNGGFKTKANVAVQRKMLVIIYTLWKKNEPFDINIYKAA

SEQ ID NO: 376608 - protein, 418 aa, unidentified
MEDENNWFVGVDWASQTHHVRLSDAKGAKIGERAFVHGGEGLKEMADWILKSTGAAPEAVMVAIEVPHGPVVESLMERGFQVYAINPKQLDRFRDRFSPAGAKDDSRDAEALADALRTDRRCFRLLAPLDPVVVELREWSRIADDLRVERNRLSNRVRELLWRYYPQFLELSDDFAADWFLDLWRLLPTPDKAKRVRETTVERLLKRHRIRRITAAEALERLKAPSIPVAAGTVSAATGHLEAVARRLALVNRQISEANCKIDRLTARLAGGEERAEGQREEQRDVTILRSLPGVGRIVLATLLAEAQDALHRRDYHALRCLSGVAPITKRSGKSKIVLMRQAAHVRLRNAVYHWARTAVQHDPRSRAKYAALRARGHGHGRALRSVADRLLAVACAMLESRTLFIASHSTKISSPSA

SEQ ID NO: 376609 - protein, 343 aa, unidentified
MHIASIGIDLGKTTFHLVALGERSKVLARKKFSRTQLLAHTANLSPSLIGLEACSGAHFLGSALREQGHDVRLIPAQFVKPYRKSNKNDFIDAEAIAEAVTKQNMRFVPIKTEEQLDVQAMHRVRDRLVQRRTALINEIRGFLLERGITFPVQPIHLRKNLPTVVEDAEQNLTPRLRWLRNRLWQEWKQTEIDIETVTDEIERISAEDERCRRLRQIPGFGPLVSTAMVAAIGNGAAFRRGRDFAAWVGVVPRQYSTGGKQKLFGISKRGNIYLRRMLIHGARAVLFRIKYDTAGLGQWVHRLRQRAPRNKVVVAIANKLARIAWAVLSSGKDYRHQTLQPAA

SEQ ID NO: 376610 - protein, 344 aa, unidentified
MNITTFGLDIAKNVMQVHWVDAQTGEVGRRALKRSQLAAFFARQAQCRIVLEACGSGHYWGRTLSALGHEVRLIHARHVRPFVRGNKNDAADAQAIWSAAQQPDMRWVPLKSEQQQAVLSLHRVRSQWIKVRTQTVNGLRGLLYEFGVLLPGGRQAGVKSITANRAEIDAKLPALMHGLIDGQMQMLRQIDERIAAIEAELQGLERQLDSARRVRQIPGVGLLGATALAAVLGEDAKGYRNGREFAACLGLVPCHRGTGGKVAVGHLSKRGDPYLRTLLMHGARAVIFHAKTKSAWLQRLLARRPLNVVVAALANKMARTAWALVAHGREYQAGGFAQATLSKI

SEQ ID NO: 376611 - protein, 405 aa, unidentified
MYYCGIDIAKYKHEATVIDKTGKALVDSISFPNSAEGCGKLLVLFERLSVAKDELLIGMEATGHYWLSVYGYLLENGFEVKVINPIQSEAFRKMYIRQTKNDSKDSFIIAQIMRFGQFSATSLSDELIVAMRQLSRYRLALVDNCGDCKRRVIALLDQVFPEYDSLFSDTFGVTSKEVLARYPTPEDMLAVSARKLTSLLKKASHGRFGSQKAEQLKSTAAGSFGVSFAKDAFAFQIRQLIEQLNFLETQIGELEEQIAVLLEQTGSYITTIPGIGDTLGSIILSEIGDIRRFSAPGKLVAFAGLDVRVSQSGEFTGTRQKISKRGSPYLRRAIWLAASRAAFCDPVLSEYYQGLRARGKHHLTAIGAVSRKLCNIIFAILSENRPYQTLPPNDKKPSASSFSLI

SEQ ID NO: 376612 - protein, 352 aa, unidentified
MMIIGCDFHPRFQQISFLLEETGECGQRRLMHTAEAVEYYRSLRGTKVRIGIEATGSYGWFRRLLYELGHELVVGDATQIRASNPRRQKTDKRDAEHILGLLAQDRFPAIWQPPAGNEHLRQLLLHRSRLVRLRTQVTNQLDGMAKNEGWVIPGGWSEKRRKAIEALPLPGWYGERRKDLLALLDRVEERIAPLNKAVGQAAASNAEACLLMTHPGVGPVVSLAYVLTIGNWQRFPRGKQVGSYLGLIPSEDSSSDKRRLGHISKQGNTLLRWLLVEAASTAQRYDPSWHRQYLRLSMTKHHGVAKVAIAHKLAVRLYWMLRSGEDYQHVRERGSHARQSECPGGRSRRPIE

SEQ ID NO: 376613 - protein, 430 aa, unidentified
MYNKNYISVGIDVGSAFSFMTIVAPDGSVIQKPFKITHNKPDSLEKAVSAIKKAEELHSLESRTFLESTGIYHFPLFCYLVDCGFHVSIINPIITHSANNTSIRKVKNDKVDSIGIAKLGLSGDIPVSQFPAKLVLEIRSLTRKYYDLTDERSAHINKLKGDLHTVFPQYLDIFCDVTGKTSTMILRQYGTPDKILRGHKKTMIEKISKASRKGLSKAAERYEKLCAAATAAKTFGCQIDSIYFNISLTLDLIEKLDSALDSILQRIHQLVTFNKSEKFIQQIKWLDTIKGVGFLTAVTIMCEIGDFSAFRNPKQLFAYFGLDPEVNQSGKFVGTEMHMTKRGSRIARRAVFAVALASIRTKRNGEGITPYLREYYEKKSGQKPKMVALGAVMHKVCNIIFAVLRDEKEFELRSPEEHCRQYQRPALQAA

SEQ ID NO: 376614 - protein, 312 aa, unidentified
MENKVYVGIDVSKDKVDVALRPGEETWTVTQDEASLEELVMTIKDIKPELVVLEATGGYETRVAAMIAVAGIPVSVVNPRQVRDFAKSTGKLAKTDRLDAQAIAHFAEAIKPEVRYLADEESREIAAMMSRRRQLVEMMVAEKNRLHTCHPNLTAEIKEHLEWMEQRLKALEEEIQKRIQKTDIWHKKDDLLRTVPGIGKVVSSTLLAELPELGKVNRKKIAALVGVAPLNRDSGKYKGRRGVWGGRAAVRSALYMATLSAIRFNPVIKTYYEKLLERGKLKSVALTACMHKLLTIINTMIAQSKPWSPIMS

SEQ ID NO: 376615 - protein, 326 aa, unidentified
MTLSHLTDNIFVGIDVGGAGLDVAWHRGDSAHYANRPDAIATLVERLRTGPEVTRIVLEPTGGYEKPLVKALRQAQLPVEVIHTTRFNAYRALVGVKAKSDTSDARLLASYAAAPDEVRGRKAGYVELPEDAIREELSELASRRDQLKHMIHAETCRLGTVRLAGLRQMITAHLETLRAEDKQVHRMMLELVRQRIDLRRDQRLLKTIKGIGVKSALVLLASVPELGRIDNKAAAALIGVAPFVRKSGTMTAPAKIHGGRAAVRSILYMAAVTASRHNPVLSPFYERLIAKGKPPKVALIAVLRRLVVFANAVLRSGQPWSGALTS

SEQ ID NO: 376616 - protein, 336 aa, unidentified
MEKKWFVGIDVSKKTIDVVYYDRKRRKICEEIHRQFPNDQSGFKLMRKWFKECGMKSAELVIGLENTGIYSLDLCLSLESAGIDYCCFNPLHLKRSFGLTRGKNDKVDAWRIAYYCYLYREELAYCKMSAGTIIRLQELSSERRRHVKHMAEYKAYLTDRKARVGDNTLKRTAKVLEYEQVLVEEIEKEMENIIKNEPALKRNYDLLLSVKGVGTVNAIAMIIHTNNFESFENARKYACYVGVAPFGSTSGTSIKGKPHVCSIGARILKSDLSMAAGSARIHDPQMKEYFERKTAQGKEFGVVMNAIKYKLIQRMFAVVKRGTAFVQLQTYKIIVR

SEQ ID NO: 376617 - protein, 338 aa, unidentified
MKLYGAIDLHSTNNVTVVINEHDQVVYQKRLPNDLSLIAQQLSTYRTSLQGIVVESTYNWYWLVDGLMEKGHRLHLANTAAIQQYNGLKYTDDHSDARWLAHLLRLGVLPEGYIYPKEERAVRDLLRKRGQLVHQRTANLLSIQSLISRTTGNMISAKYIKALNIQRVDGVLPNPDLVLALKANLAVMNSADAQIEILEKAVQDRVKLRPQFKFLKTVPGIGPILALTIMLETGEIERFASVGNYASYCRCVGSQKISNGKRKGSGNTKNGNKYLAWAFVEAANFAIRFNSRIKSFYQKKKSKSHAIVAIKAVAHKLCRACYYIMKNQVAFDITKAFA

SEQ ID NO: 376618 - protein, 427 aa, unidentified
MAYKIAGIDVHKRMLAVVIADVEREGEWVFERRRWGSAPSEVRALAEWLLAEQVEEVVMESTAQYWRPVWGILEREWTPRARQRAEAPAPAGTLHLAQAQSNRGRPGRKRDFPDAERLVKRLVAQELVLSFVPAPEHRLWRTLTRTKYQLTRNRVQLRNRLEALLEQAHLKLSMLVSDLLGASARRMLQALADGETNPDALAALADTRLRASPEQLRDALGACADLHGVYRRLVKMALDDLTLLERQIQQLDQEIAALLRPSQDAVGRLAEVPGLGVDSAHQIIAEVGPTAATFPSASNLASWVGSCPGTEESAEENQNRRPPKGNRQMRRLLNQAANAAVHCKGSIFQLLYRRYAPRLGHNQTISVIAHRLCRLVWKILHEGVTYEERGPAVNEQAHQRRTARMIRTLRNLGYHVEFGHTQPPVTA

SEQ ID NO: 376619 - protein, 355 aa, unidentified
MNSVRYVGLDVHRDTISAAVLNESGRMIQQSILATRAAAILDFIGGMRGTLHVTFEEGTHSAWLYDLLQRRVATLVVCNPRMNSLLKSGNKSDAIDARKLAELLRADMLSPVYHGEKSAMEVQHLARSYALLTEDTTRVMARIKAIFRGQAISCAGQKLYGHKHRDEYLAQLGACALRRRAELLYEELEAVRQLRRQAKREMIVECRKYPETKLLCSVPFLGPVRAAVLIGRVQTPHRFRTKRQFWAYCGLALEMRDSGEYRVVDGQVERRKKPAQIRGLNWNHNHELKNLFKAAATTASFSNGVFREFYLGLLKKNMQPEMARLTLARKIAAITLKIWKKGEAFDAELMKLQAA

SEQ ID NO: 376620 - protein, 314 aa, unidentified
MTKKIEKCYMGIDVSKETLDVFFLNQHQQFENSSSGFKKIIKKLKTFADVLVVMESTGGYERPLAQSFAKSNIPVAIINPRQIRDFAKSLGILAKTDSLDSKVIALFAEKIQPKANVAYDESQNRLTELNSRRRQLVDMITAEKSRKDKVSPEMQKSIKRIIKQLEIELKKVNDSIDRLVKQNSEYARKAELLQTITGVGAVTANCMIAELPELGKASAKEISALAGVAPLNRDSGKMRGKRMIFGGRATVRNSLYMATMVATRFNTKIKSFYQYLCTKGKAKKIALIACMHKLLIIMNAMIRNDTAYGQKMAN

SEQ ID NO: 376621 - protein, 387 aa, unidentified
MAQVNDLSRSLTAFDPISTSVVVVEMSKASWLVSGAVPGVERQPLKKLEPDATALLRLIERWRNEAMRSGRPISRIALAYEAGRDGFWLARWLIARGIEAHVIHSASVAVSRERKRAKTDRLDAAMLMRVFLGWLRGERGHCGMVVIPTMEEEAARRPSRERESLVNERSRITNRMKSALARLGIRGFKPHLRKAPERLSGLRTAEGTGLPANVIEEFRRDMARLALVREQISSIEKTRAERLERAPDTGPHAMVRLLARVIGIGIETADMLVREILSRKLRDRRAVARYAGLTGSPDESGLKRREKGLAKAGNARVRRGLIQLAWRFLMFQKDSALARWYRTRTEGPSGARKTTMIVALARKLLIALWRLVTTGEVPDGVELRPAA

SEQ ID NO: 376622 - protein, 340 aa, unidentified
MQAPRHIGIDLHRNQFTCCVRLENGRNYLTDWKLEDLPRFVKKLRPSDQIAVEVTGNTRLFHDAVAPYVKRVVAVDPNQFQVISHSVKKTDPNDARNLALYLEKDLLPEVRMKDKTQAQLASLTQTRDTLVKLRTALKNKINNILSAHGHNLAKEALSSEKKLNEILGMQFDAMVKIELEVMVEEIRSLNQRIARLEKTIADEGSKLEGHKNLTSIKGIGPLTGSILLSVIGDIQDFQDEGKLAAYFGIVPRVSKSNETEHTGRITKRGSKLGRTALVQCALIAQRYSPYLKRYYERLKARRGTGKAIIALARKLLGIIYRTLKNKWVFEDFPNFVLAEA

SEQ ID NO: 376623 - protein, 445 aa, unidentified
MSKSDSPLLPVLNPQAAGIDIGSRKHTVCVGPHADSDVREFDTFTADLNLLVDWLIERGITTVALEATGVYWVPVFEILAARGLQAILVDPRQTHRPGRPKSDRLDCQWIRRLHACGLLQAAFRPDDCICELRSYLRLASTLIRDGGRCIQHMQKALELMNVKLTEVVNDITGKTGFAILHAIVKGERDPQRLARFRDPHCKESEETIAKALQGNWRGEHLFALEQAMQTWDFFQKQLRACERQIAACLQRLPKKQPDKVLAPRSQPRQLRHNTPHFDARALLAPILGVDLTAIEGIDDSSALIITSEIGVHVNDFPTEKHFGSWLGLAPKVKASGQRRKNRITPGAHRIAQALRLAATSLHKSQTALGAFLRRLKGRLGAPKATTATAYKLARLIWRMLKHGTDYVLKGMAEYEAKFRERTVNALQRKAKHFGYQLVPLPVPTT

SEQ ID NO: 376624 - protein, 408 aa, unidentified
MSGRICVGIDVGLKSNVAAFIDQDGNDLLPKPIEFENSLEGLKSFLKTLSSISSKTPHDLLEIGMEATGLYWWHLREALSNSPQLKDIPHNIYVLNPSIVRGFKKAFTVKPKTDIVDSKIIAERVRFGKLHPITDDDLKLQPLVRLTRLRCHLVWASISEKKRALELLFLKFPEYRGVAGKRLFSKASTSLLEEFTPDEILDTPVEELAQFLVANGNARLKEPESFARAIQAAARRSYRLNPKMESAVDIALSMTLENIDFLKKQIKKLDKVIESEVKAIPNPLITIRGIGLVTSAGIISEIGNVPKFTSHKALARFCGLTWHRYQSCSFDAEETSLTKAGNRYLRYYFVEAANSLRLHNKEYAAYYKRKYNEVPKHKHKRALVLTARKFVRLAFALLSKGQIYRERG

SEQ ID NO: 376625 - protein, 343 aa, unidentified
MKLTRVGVDLAKNVFQLHGVDRAERPVWCKRLKRNRWVEEIERNVEPGVEIGMEACGGAHHWARLLQSKGYRVRLIAPQFVKPYVKSNKTDATDAQAVCEAMSRPSMRYVAVKSIEQQDIQSVHRVRASLISERGAKANQLRALAYEYGLVAPREIAALRLAVPAWLEDASNGLTVRLRALLSGLYADLRALDERVRELDKEIRAIGQENEAVGRLQQMRGIGPLIASALVAMIGDARQFKNGRHVAVALGLTPRLHSSGSKERILGISKRGDSYVRTLLIHGARSALRTAPGKNDRMSRWALALAKRSHVNVAVTALANKMARVAWAMLRHGTTYEPNGLAA

SEQ ID NO: 376626 - protein, 349 aa, unidentified
MQAETALALEAEMKYCGIDLHSNNSVIVVIDDEDRVVARKRLPNELARIVEFVASWRDELAGVVVESTYNWYWLVDGLQAAGFEAPLANTAAIKQYDGLKHSGDEADARHLAHLLRLGILPTGTILPRDERAVRDLARKRMQLVRGRTTHILAIENIMARQFGGRMTSNQIKRLSADDIDRMPIAADVGLAMNANLAVIGALDAQIEVLERRLRERVKPRPEYAFLTSVPGIGQALSTTILLETGPIDRFASVGNYASYARCVDSVHTSNRKKKGEGNVKNGNKYLAWAFVEAANFARRYCPEAKRFHERKKAKTNNIVATKALAHKLARACYHILREGRPFDVTRCFA

SEQ ID NO: 376627 - protein, 336 aa, unidentified
MSLYCGIDLHSNNHVVVVTDEEDNKLMDKRIINDLDVTVSLLSPFKNELKAVAVESTFNWYWLVDGLIEHGFKVELVNTTAVKQYDGLKYSGDHQDAFHLAQLMRLGVLPTGYIYPPEYRAIRDLLRRRRQLVRHASTHVISIQNQIWRSLGYKMTCNAIRRKGFTLPFEKDGFLYHSANSNLVLMRALDIQIKNIEQQVLDAVSLKNEFTLLRSMTGVGPILGLTIMLETGDIQRFDSPDNYASYCRCVNSIRESNGKKKGTGNRKAGNKYLSWAFSEAAHYMVRFDNQAKRFYERKRQKRNGIVAIRAVAHKLSRAVFHMLKNKEAFDIDRVFH

SEQ ID NO: 376628 - protein, 319 aa, unidentified
MIAATNVIGIDVSRDWLDGFRLPGLQRFRLANSPEGHEELISMICQMSELVQVGFEATGGQEWALWAALVEAGVDARQLPPAQIKYFAMSRGTRAKTDRIDAELIAHFMVFRPEAGRTLPSDNLRVLRALTTRRAQIVEMRKRLTAQISARKKQGIPADIEDLDAELKAMLDAQISDLEQRINRAISSEETSATKAHLLRSIPGIGPVSAAMLIAEMPELGRMTAGEAAAMAGLAPVPHDSGAMRGRRAIAGGRRALRHVLFQAALAAACHNPLLKTVAKRMKEHRKPHKVVIIAIARRLITIANAILKTGENWRYQAG

SEQ ID NO: 376629 - protein, 342 aa, unidentified
MRNVRFIGLDVHAETIAVAAAEPGGEVRSMGVIPNRIESIRKLVKKLGPVQQLRVCYEAGPTGYVVYWQLTALGVKCDVVAPTLVPVRAGDRVKTDRRDALKLARSYRAGDLTPVWVPDAAHEALRDLVRAREAAKKDQLRARHRLGKFLLRQGRRPPTAMKAWTHAHLTWVKSSVHFDHAAHEATLLDYLHEVDHVAARIARLESAIDAAVQTAPARMRAVIEALQALRGIASVTAVTIAVEVGELSRFAKPRQLMGYSGAVASEDSSGQRTRRGGITKAGNAHLRRVIVEAAWAYRYRPAVGAALRKRQATVNAEVKEIAWKAQHRLHGRYRALTARGKM

SEQ ID NO: 376630 - protein, 414 aa, unidentified
MDVVHPRCAGVDISKRDAKVCVRIASSGRAKAKSTVTTWGAVTNQVLALRDHLVDEQVTLVVMEATSDYWKPFYYLLEDGPFEVMLVNARHVKNLPGRKTDVSDAAWLAQLGAHGLVRGSFVPPEPIRQLRDLTRTRTTLVRARAKEIQRLEKLLEDAGIKLSSVATDITGVSGRAMLEALIDGQRDPEVLADLAKRRLRSKIPELTEALTGRFSEHHGFLAQLHLDLIDNHTRAIDEVTGRIEVVVEPFRHVRDLLVTIPGISTLVADVIIAETGGDMSRFPTAGHLASWAGTCPGSNESAGRIKSTQTRPGNPYLKGALGIAAMSAARSKDTYLAAKFRRIASRRGPIKAIVALEHAMLVAIWHMLTTGTAYSDPGGDYFTRLNPDKAKHRALDQLHKMGYSVTLEPLAVAG

SEQ ID NO: 376631 - protein, 421 aa, unidentified
MTEDIEWFVGFDWASQIHVACLLDRNGRVVGERELKHAGAELAEFCDWLIAKTAAPPARIGVAIETPHGPVVEMLLERGFAVFAINPKQLDRFRDRFTVAGAKDDRRDAHVLGDSLRTDRRAFRRLAVDDPTVIELREWSRIADELTQERTRLANRIRQQLWRYYPQMLEVGGELTAENFLALWECAPSPAKAAQIDEARVAEVLKAHNVRRIGPAETLRILRQKPLHVAAGATEAAMAHIKIAAERVRLINRQSKEADHKLDALCARLEQPNDGERESEPGQKSEQRDVTILRSLPGVGRTGLATLLVEAPEPLRRRDYQVLRVLSGVAPVTRRSGKTSLVFRRRACNERLREAVYHWARVAMQVDPSSKERYAALRRRGKSHGHALRILGDRLLAMACAMLKSQTPFDPNHRTAPPAAA

SEQ ID NO: 376632 - protein, 451 aa, unidentified
MKTDVPHSKMGIADRQVGEIKILEGYVMNDTLNKKIEQVTDKTLIVGVDIGSEIHYARAILVRGYEVSKKPYRFENTDEGFSGFITWAFNLAVENNLTKIMIAVEPTGHYWFNFAEYLKKYDVQLVLVAPQHVKHSKEMDDNTQEKNDRKDPLVIAKLVPEGRYLIPYIPEGIYADLRTAFNRRCELVDAQVRNSNRMNRWFDVYFPEYKTVYDRIDAISGLAVLKRAPLPADILALKEDGIYQIWREERIRSVGINRARKIIAAAESSVGVKGGVAARWEFWQLMEEHDLIVRQLHDIMLLIEEYLRQIPGADRLLKVPGAGIVTVAGFLAEVGDIKRFTDPKQIQKLAGLAVVENSSGKRKGMPGISRRGRGRLRWILFQLARTMVKFNKEMRTYHLYYTTRKENPLKKMQSIMAIAARIARIFYGILKNGTEYDPAIVMRDLNKVVSA

SEQ ID NO: 376633 - protein, 326 aa, unidentified
MTNANELIFVGIDVSKATLEVALDDNSKTRTLSNDDKGLKALLDELKAVAARVAVVLLEATGGLERAAAAALCANGFDVMVVNPRQAHDFAKALGYLAKTDSTDARALSHFARTLYHSEKRETLLHKLPTPEQELLLAMVTRRSQLVGMRVAESNRLDNAHPSQRKSIQAMLKQLDRQIGQIDDDADRHLRQHFKDKLDLLKGLKGVGPGTQAMLMAALPELGRLGQREIAKLVGVAPLNCDSGKFKGKRTTWGGRANVRSALYMAALSAVRFDPCLKAFYERLLQAGKPKKVALTACMHKLLTIINAVIKSGKPWQAGYPQSANA

SEQ ID NO: 376634 - protein, 353 aa, unidentified
MQKEKVIKQSVGIDCGKVELVVAFGVMQEGFEEKIISNTAFKNNAEGFKKLQKWASKLTDPAVELVYVIEATGVYHEKVSLYLYNEGCKICVMLPNKVKSFSQTLTVKTVNDKTSSQAIAYLGLEKRLDAWQPPHPVYRELKQLTREREQLIEERTLCKNQLHAEESGAWPNTGSVKRIKQRVKLLNKQMTEIDAEIVAIVSKHEWLKKKLEYVCSIKGVALLSAVIIVAETNGFNLVRNKKQLVSYAGLDVVEKESGISVKGKTKISRKGNKYLRKALHFPALVAIRHNEQMKAVYNRLVSRHGIKMKAAVAVQKKILELVYVLWKKEEMFDQQYLKNKGQQLEVATLCELA

SEQ ID NO: 376635 - protein, 383 aa, unidentified
MDHKQRTLDLEKSTPVSVLYIAFELANSNWKMACSDGSKLRLVTVTAGDLAQVQRAIIGAKRHFVMGNEVQTVSCYEAGRDGFWLHRYLQSCGIDNVVVDSASLEVNRRLRRAKTDRIDAGKLMSMLVRYHGGEKHLWRVVRVPSREDENARHLHRELEALKRERTRYRNRIHGILIQQGLRINNPSKKKFVKELELLRTWDGQELPSEMKVRLVRVHERLRMVEEQISSLVKEKTQRLKEENARMAQVAQLLRLPGIGPVSSRTFVMEFFGWRRFRNRREVAGLAGLTPTPYDSGRRLREQGISKAGNRRVRTLSIEIAWAWLRFQPRSKLSRWFLKRFADGGSRMRRIGIVALARRLLIDLWRFLEYGVVPEGAQIRPLAV

SEQ ID NO: 376636 - protein, 442 aa, unidentified
MPIMRPHAAGMDIGAEEIYVAVSSDHSEEPVRCFSTFTCDLHALADWLQQCGIDTVAMESTGVYWIPIFQILESRGLEVFLVNAHYLKSVPGRKSDVSDCQWIQYLHSVGLLQGSFRPPDKICAVRTLWRHRQSVLQMAAEHILHMQKALSLMNVQIHHVLSDITGLSGLAILDAILAGERDCLKLAQLCHPSIKSPRDKIAQALEGDYRQEHLFVLKQSLAGYRYYQDRIVELDREIQTLMKEVGDPTRCEEALPTRTKRTKYQRQVNDPAFDLRHELYRIAGVDLTDIPGVSTLTAQVILTEIGPDVSRFRNASAFASWLGLCPEKRVSGGKILSCKTRKVKSRAAIALRLGAHSLCRAKDYFGEFFRRLRARLGAPQATTATAHKLARIIYHVLRTKTPYNESIFYECDEQARQRNESRLRKKAAEMGFHLVPNATQAS

SEQ ID NO: 376637 - protein, 313 aa, unidentified
MIFSPDYVGVDVSKKHLDLAITGSSRLRASNNPAGMARLVQKISSLTRPHLVCEATGSYTRLMARSLSQHGIALSTINPRRVRDLARADGLLAKTDAIDAAAILRFAHLMHPDPDPLYDPNAVEMADLVRRRRQMVDMLAMEKQRREHPEAALAQASIDAHIGFLSSQIGEMDRAITRQIDSDATLRRRAELLTTIPGIGQTTAAVLLAEMPELGGIGNKQAAALAGVAPFNRDSGEMRGQAHIAGGRLSVRCALYMATLSAIRANPPIRDFYKRLRAQGKPGKLAIVAAMRKLITTANAVLANNTPWHTNTA

SEQ ID NO: 376638 - protein, 339 aa, unidentified
MSRYLGVDLHKNRFTVSFYDADSKKHRVKSFELKEVSSFRKELRRDDVLGVESICNTRYFVEQIIDCVAEVKVINPSQFAVVAKSVKKTDKNDAKTIAEFLSKGMVPEARLKEKAASQICSLAGTRDKFVKLRTVFKNKIHNLLNSHGINTAKEEFSSDKSLRIVQKYELDAVVKIELAALVREIKSLNRNIKDLDKALEEWGKKLDGYENITSIKGIGKNSGVILLSVIGKIDDFESEKKLAAYFGIVPRVHQSNEKEWQGHITKRGSKLGRTTLVQCTLVAIKYSPYLRAFYDKIKIKKGSGKAIIAAAKKLLGIIYYTLKNRLIYKDFPMFVIKET

SEQ ID NO: 376639 - protein, 335 aa, unidentified
MNKRAWLGIDVAKETFHAAVAAEDAVPKDWNKLSHVDFSHSADGMKQLARWVEKQGVALDGVCMEATGRLSQHWMELAHGRFGEVSMINPAYGVAYGKSLGIRSKSDRIDACILALYGKQNRPAPVRLASPEHRELREHSRALQDLQAQYQANQQRLGDGPGSKYVAAALRRVQKTLKKEMEHLREEMESLVARTPTFAQDARRIKTIKGIGMTTAILLLAEFGDLRTYNRDELVALAGLYPREHTSGSSVHKKSRLAKTNKTSVRSALYMCAMSALRYNSQIKTFGERLTKNRKEPMEVLGAIMRKLLLIAHALVVTGKDYDPNYGVGVKCSTT

SEQ ID NO: 376640 - protein, 314 aa, unidentified
MILPLRCVGIDVSKRMLDIFDDGIGTVERIANAPQPITEQVARWRCGNVFVVFEATGVYDRELAEALHQAGIRFARINPARARDFARAGGQLAKTDAIDARMLAAFARQMAPAADPPPEPARNTLALIAKRRDQPVQMRAQEKNRRSEARDRAMKESIARVLSYLDGEVEAIEAEIKALIKSEPEISEQARLIRSAPGIGPVACMQLIAQMPELGQVGPKQVAALAGLAPLNVDSGSYRGKRAIGGGRKRVRDALYMAALNAVRRDGSFKNFYQRLRAAGKPAKLALIAVARKLLTILNAMLRDRKIFLQPKPS

SEQ ID NO: 376641 - protein, 420 aa, unidentified
MPKRTTGDRPELNPVNVGAAAIDIGSKMHMAAVDPACTETPVRAFGTFTQDLHDLADWFKACGVTSVAMESTGVYWIPAYEVLEQHGFEVILVNARYAKNVPGRKTDVSDAAWLRQLHSYGLLRGSFRPDAVIATLRAYLRQRERLVEYAAAHIQHMQKALMEMNLQLHHVVSDITGATGMRIIRAIVAGERNPDVLATFRDVRCRSSIETIRAALVGNDRDEHIFALTQSLELYDTYQAKMLDCDHKLESSIAALTDKGAKPVGKLSRPRVKTKQVNTPSFDVRSALYGVLGVDLTEIHGLGPSLALKLIGECGTDLKAWPTAKHFTSWLCLAPGNKISGGKVLSSRTRRSSSRAAALLRLAATTIGRSDTALGAFYRRLSSRAGKGKGCDGDRPQDRCPVLQYPKARHGLQGSGCRSL

SEQ ID NO: 376642 - protein, 449 aa, unidentified
MKTLPVLNPNAAAIDVGSEHLHLSIAGDAPVVFGTFTDEVYRLRDYLKAQGGTSVAMEATGVYWLYAYAVLEAAGLEVVVVNGRHVRNLPGRKTDMADCQWLATLHAHGLLRGGFVPPAAIRRLQDYQRLRADHIIGAGSQVQKMQQALERMNIKFHDVISDLDGVSGLKVVRAILAGEREPQALLLLCDPQIQKKKGDRVLRSLKGTWAPEHLFALGQGLAAWEFYQKLLGECDQQVEGVLRELAGPEPPAPGPDVPASPPGKKAGKNAPQIEHLHRLLLRVCGGRDVTAIAGIGDNLLLQLLAETGPDLKAWPSEKHFAAWLGLAPGSRQSGKRKGSVKAQRNRAGRLFCAGARSLVPSVDKALGGFYRRLAARKGGLVALKALARKLAGLYSRVLRYGLAYAEHGLRVYEQKYAESQRRLLAKLAAKQGFKLVSLQLEAHPTGVGV

SEQ ID NO: 376643 - protein, 340 aa, unidentified
MEGLYAGSDLHGNSNFLGIIDAQGKRVFKRKMPNELALIRQALGPFRGELVGIAVESTYNWYWLVDGLMEEGYRVHLANPSAIQQYSGLKHSDDRHDAFWLAEMLRLGILPEGYIYPRQERPVRDLLRKRGHLMRLRTSLMVSLQNILSRNLGHKVNGNEVKGLGEDRVTRLLGESEDLAMAGRISKETIDFLTYQIDQIERRVAQQARLKGAYRFLQTLPGVGKILALTIMLETGPISRFETVGDYVSYCRKVPSQWMSNGKWKGSGNRRNGNRYLAWAYAEASDFARRYYPGPRAYYQCKRQQTNAVVAHSALAHKLARAAYYVMRDQVAFDPEKLFR

SEQ ID NO: 376644 - protein, 387 aa, unidentified
MDVLYQSCAGIDVHQANIVVCILHGPLTSTRPKREMATFDTTTKGLRACHDFLSQFHVEAVGMESTGVYWRPVWHALCDDFKLILAQPAHMKAIPGQKTDKKDAHWIAKLTRIGLLPRSFVPDEAIQELRELTRQRKHYVESRNRETNRIHKILQSGGIKLTTYIEDIMGLSGRNLLQLLVDGTPITPRIVHQSVYTSLKKKVPQLLEALDGYFSDHHRFMLKQSLEIYDFYQKQIELLEERMNVYLSQYENHVEILDSIPGIDVITASVIISEVGVDMSQFPTAGHLASWAGLCPGNNESAGKKRSTKIRHGNSYLKKCLCQAAFAIKKQKGSPLADRFYQIQSRRGSQKATIALAHQLLKIAYILLKEQMTYPEFLAQKRLLGTS

SEQ ID NO: 376645 - protein, 317 aa, unidentified
MICATIERCAGIDVGKTFLAVCLMTGPLEGEPRVERRRFGTVTAELEKLRDWLQREGITHVVMESTGSYWKPVFNVLETAVKVYLASPQEVKNRKGHKTDDEDGWWLAHLLRHAMIHPSFIPPRAIRQLRDLTRRRRRMIGNATAEKNRIQKVLEDANVKLGNVLSDVFGVSGQLLLEALLQGKAKLQEIAEFAQRRARQKIPQIIESLNDHRMSTHHRRMIRYSLKHLRFLEEQIGKLDEDIVAEIREAGLVEQWQLVQTVPGMQEASAPNVLAETGGDMKQFPSSKHLSSWAGVCPGNNRSADKNKNSRTTGGNP

SEQ ID NO: 376646 - protein, 362 aa, unidentified
MMTDDNPTPRVIGGVDTHKDVHVAAVLDELGRLLATATFATTTVGYRDLYRWLCRHGEVLAVGVEGTGSWGAGLSRHLRARGVNVIEVNRTNRQTRRRKGKSDTVDAEAAARAVLAGDATVIPKSGDGPVEAVRQLRLARNGAMKARTAAANQLHSLTDTAPDELRAKLRTLTTLQRAKTCARLRLDEIATPAGAAKRALRSVASRWLGLHLEVRELDKAIKHVLDEIAAPLLQRHGVGYETVGALLCAAGDNPERLDTEAGFAALCGTSPVRVSSGKTNRHRLNRAGDRHANSALWTIVMVRIRSKHAPTINYIERRTTDGLSKREAMRCLKRYVAREIYNDIRAITSTTTTTNEETNIAA

SEQ ID NO: 376647 - protein, 421 aa, unidentified
MGKLIERCAGIDMGKRFLVCCVMTGAAHEEPGSETRRFDTTVPGLKRLWNWLNEERVTDVVMESTGSYWIPVFNLLEGHVRVVLANPEEVKNRKGHKTDRKDAGHLADLLRHNHVKSSYIPAEPVRQLRDLTRRRVQLTQDATRERNRVQKLLEQVNVKIGSVLRDVFGVSGLHMLWALLDGRAAPEEIAGLARGSAKRKTPQLIEAIEGNRMSDHVRCLIRGCLRHLACLEEEVEELDTEILRRMQLSRFQKACTLLQTIPGVGQLSAATILAETGPDLDSFPTIEPMASWAGLCPGNRESAGIQKGPQTTHGNPYLCTALVQCAWAATRKRDSVFRSRFQRLAPRRGEKRAIIAVAHHMLIILYCMLKRGVPFLGAEHAPKQRRRERRAHHHLRCLRRLGFSVEIRLSSESTPPDTISR

SEQ ID NO: 376648 - protein, 379 aa, unidentified
MTIVADTPTHVDLEVTVGIDTHADTHVAAVIDPLGRDLGQASFDTTVAGFKALLAWAAEFGTIILAGVEGTGAYGAGLARFLTAEGVTVVEVDRPDRKTRRDQGKSDPIDAYAAARAAASGRASATPKARTGGVESVRVLRVARTGAVRARAKALTQLKALITTAPDELRAQLRSLDGSRLVARCARLRPDRDEAPTPSVHAKRAPRPGRLIDPNAATKRSLASIAGRVQLLDREIAELDDDLHALLTPLVPTLLAIMGVGLDSAGQLVVTAGDNADRITTEAKFAHLTGVAPIPASSGKTAGKHRLNRGGDRAANAALYRIVMCRLRHDPATLAYVEKRTKEGKSKKDIIRCLKRFVAREVYAAIQADLNPRNPQTAP

SEQ ID NO: 376649 - protein, 341 aa, unidentified
MDKELYFGVDVSKKTLDLAYYDGEAIDWKNAHIKVSNDDAGFKKIGSWIAKVGKDFGTFLFCMEYTGLYNQNFRLWLESKKYIYGMVEPRKMHHFEPDLDDDQRSLDRIKTDELDAFRIAIYCEQNHKKILRNPSKLPSPVYFKLKRLLAERKQNTKQSTLYKQQLHDICTYDTDLSVERKKLQLKNMQENQKAIDREIDSYMNEDASISKNYDLLTSIPGIGRIIALETIVLTENFTAISNPRKYACYIGIAPFKKESGISVRKRTSVSKKGFSEAKADLSIAVLSAIKNNPSIRDYWIRKRKEKCGGIVLNAVKFKLVLRMFAVIKRGTPYVETDAYKN

SEQ ID NO: 376650 - protein, 371 aa, unidentified
MTITTHVGLDVHKNSIFVAVRSQDELKAHSLGQVPHDLTRLLRKLEKFGPPESVQLCYEAGPTGYGLCRELRARGYDCQVVAPAKTPSIGANRVKTDRRDALKLADFLATGHLTFIRTPTPEEEALRDLVRAREDLKIKETNSKRQLNSMMLRHGRVFSKQNGGGKAHWTLLHLEWIDRQTFEHEASNVAKETYITEVRHLTERVAALDRRIAEVAETMERADLIRAFQAFKGIKVLTAATIVAEVGDLRRFPSAKKFASFLGLTPSEQSSGETRNRGSITKAGNRRLRRMLVEAAWAYWRSPHISRELKKRSDGTSEAVRAITWKAQSRLHKRLRALQHRHVPAKKALIAVTRELACAIWAVGQEERLAA

SEQ ID NO: 376651 - protein, 314 aa, unidentified
MSPLIFVGIDVSQTRLDIAIRPGSSCSIAHDESAITTLVEQLCALSPTLIVLEATGGMEIPLTSALATAGLPVVVVNPRQVRDFAKASGHLAKTDTLDAQMLAQFAEVMRPQPRPIPDAEARALAALLTRRRQLVAMLTAEKNRLLTTPSPIRKRLRTHIAWLERELQATNTTLAEAIRQSPVWREKDELLRSVPGVGPVLISTLLASLPELGTLTHKQIAALVGVAPLNRDSGTLRGRRTVWGGRAQVRAVLYMNAIVAARFNPVIRAFYQRLQRMGKAKKVALTACMRKLLTILNAMLKHRTPWRHEEAQHA

SEQ ID NO: 376652 - protein, 372 aa, unidentified
MEKSSRTLYVGLDVHKDSIAVAYAPEDRGADIISLGTIGTRQCDIDKLIRKLQSKGPAQLVFVYEAGPCGYWLYRYLTRKGLACHVVAPSLIPRKPGDRVKTDRRDAITLARLMRSGDLTSIYVPQVQDEAIRDLSRAREDAVEDLKAAKHRLKAFLLRQDIRYEGRATWTAAHLRWLAEVVCPTPAQQIVFQEYLRAVTEQHERRGRLESELHEQVKSWRLYPVVEAIQALRGVERTGAVILIAELGDLTRFDHPSPLMNYLGLTPSEHTTGERRRQGGITKAGNTHARRALVEGAWAYRYPAKVSRHLQLRLEKLPAEVQAIAWKAQVRLCKRYRQMTARGKHVNQVVVAIAREMAAFAWAIARIVPLAH

SEQ ID NO: 376653 - protein, 332 aa, unidentified
MENFYFIGVDVSKKKLDFCVMFEGKVVHEEETANHQGAIMSFLHHLEKDYGIASGQMLVCAEHTGQHTFPLACACKAVECKLWLENAAEIKYSSGVQRGKNDKVDAKRIAIYARRFQDKVRYYERPTEEIERLKQLESERTLYVTDLAKYKGQMKDQKDYMPKSLYERKMKRLCALMDDLEEAIQAITDEMDEVIASCPVLFRQRELLMSIDGVGCVVATNMIITTEAFTRFDDPRKFNCYAGVAPFSYSSGSSLHSKAKVSHRADKVMKRLLHLAAVAVTHRIDGELKKYYERKVAEGKNKMSVINVLRAKIVTRMFAVIKRNEKYKPILS

SEQ ID NO: 376654 - protein, 364 aa, unidentified
MKRSLKYVGLDVHQATTVTSVREESGRVIAQTVLPTDGRMLVEYFRGMRGSIHVAFEEGTQAQWLHDLLQPVVAQVVVCDRRGTTARGNKGDQLDADALSELLRRGALRPVYHGSGERATLKEVARTYRNLVEDTTRVMLRLKALFRARGITTAGRSVYRADERADWLAQLDAAAGPGASRVVHFRAATLYAELAVLQALRPTARRALIVEAKRDPAWAVLRSIPFLGPIRVALLLATLQTPWRFRTKRQLWGYAGLAVVTRTTAEWALVDGRAVRRRRPPMTRGLNRNHNRVVKEVFKSAATAAATRSGPLQDWYQEMLKRGMREELARVTLARKLAAITLHLWQTGARYDPSHLMPSTVPAR

SEQ ID NO: 376655 - protein, 412 aa, unidentified
MNPVIGLDVSKGESQVQAFLDKGKPYRKSFSIKHNTDGLGSLLEFLHEVESSAGGHQPTVVLESTGHYHFPVIQFFEEQNYVYIVVNPLISYRAKSSSLRKVKTDAIDAYHLCELFYKEELEPYKKRGIQLLNLRNLTRQQESLAEISAQTKIQLHTLLDQVFPEYSGVFGSLYSKVSLLTLLAFPTSEVVLSVSEREITEKIASLCMSRSDAWANERAKKLREAALRNPFQNNLYQSNIFNLELLVKIVLQYQEHLSKIAVEIDALAKEIEEYHILQSIPGIGEKIAATIISEIGEIDRFNDAKKLVAFAGVDPSVFSSGKFTASVNRITKRGSSRLRHALYMAVQSGIRDARKKKTTDEIIARNKRLREFYDKKREEGKPFRVAVIACVNKLLHWIFALLKSRTTFQDTA

SEQ ID NO: 376656 - protein, 391 aa, unidentified
MIYVGIDVAKDKHDCFITNSDGEVLFKPFTITNNLDGFNELYQKIESVTEDATKVKVGLEATGHYSYNLLGYLIDKGLAAYVINPLHTNLYRKSLSLRQTKTDKVDARTIASMLMSDVNLKSYSDTSYHNEELKSLTRYRFDKVKERAKLKSSVSRLVCILFPELEKLVPTLHMASVYSMLSEFPGAKHVASAHLTRLTNLLSEASKGRYSKDTAITFREAARASIGSNMPAKSLELKHTIKLIQELDSEIDEIENEIKVIMDEINSPILSIPGINYRMGAMIIAEIGDFSRFDSPDKILAYAGFSPSTYQSGQLDGAYAHMEKRGSRYLRYALYNAAKYVCHWDPTFAGYLAKKRAEGKHYNVAISHAVKKLVRVIYHLEKTKQQYIKVA

SEQ ID NO: 376657 - protein, 353 aa, unidentified
MVKTTDSALTLTSVGLDIGKDVFHIVGFGEDGKIVLRRKIKRFGMVSAFEKLPSCVVGMEACLSAHFVSRTLRKLGFEPRIIPAFYVKPFVKGQKNDYNDAEAIAEAALRPNLRLVQEKTQDQLDLQALHRVRSRLVSRRTATINQIRAFLIEQGITVRSGAHSLRASLFAILQNCADEISPRMNDLIVGLYEDWLWLDERIETITSEIEEISKSEVNCQRLMSVPGIGPIISTAMVAAIGTGEAFERGRDFGAWLGLVPRQYSTGGKSILGRISKRGNKYLRTLFIQAAHVILMRPHNWEKFSFGPWLTEAATRLHRNKLATALANKLARIAWSVLRHEKSFDGHRRQPVTV

SEQ ID NO: 376658 - protein, 426 aa, unidentified
MNPVAALAGGEGQGEVGLSTRRRCGAALLTLTLSSLQATGFTHRARSFHSPCNLDAAGSAKERGAVADGIPTSLRAPKPVAELGNPSVVPLNPDSRLGRLASPFLQGRDVMERYVGIDVSKAALDVHVLPEGEALRVTRNAAGIDELVKWLRARQPRVIALEATGGFERVVAAELDAAGLPIVVVNPARVRDFASAVGRRAKTDAIDAAVIARFAEATRPAVRPLPDEQTRGLADLVARRRQIVEMLGAERAREQRAASRRLARSCQRLIKALERELADVDDEIDQAVQASAEWRSKQALLQSVPGVGPKISVQLIAELPELGTLDRRGIAALCGLAPWTRQSGKWHGKSFTGGGRSSVRSGLFMGAMVAARHNRVFADFYKRLLASGKPKMVALIAVARKLLVVLNALLRNGELWNEGKHVQPSI

SEQ ID NO: 376659 - protein, 369 aa, unidentified
MKGYNAYVGLDVHKETIAVAIADARSNDVRFYGGIKNTPDAVAAMIKKLGERHKRLRFVYEAGPCGYGLYRQINAAGHLCEVISPAHTPRRAGDRVKTDRRDAIMLARLSRAGELTAVWVPDETHEAMRDLIRAREVAVKDIRHARQRIQGFLLRHGRRYVGAVWKKSHRAWLDNQSFAHPAQQIAFQTYLNAMDQAIDRKTVIDRQIAELVPAWSLGPVVEALQALRGVALAVAAGLVAEVGDLRRFEKPRQLMAYLGLVPGEHSSGESRRLTSITKAGSTVARRLIIEAAWAYRMPARIGQAMRRRQEALPTTIRDIAWKAQTRLCARYRRMLARRKKAPVVITAVARELVGFIWAIAQVTPKQVAA

SEQ ID NO: 376660 - protein, 409 aa, unidentified
MQVMHPRCAGVDLGKDVLVACARVQEAADVGRECRSFGTATRELLELSEWLVSLGITHVVMEATGSYWKSVWHVLEGQFDLTLANPAQIRNLPGRKSDVNDATWMADLLAHGLVRGSFVPPAPIEELRELTRTRKQFVREIGRHTQRIQKILDVSGYKLTGTITDVLGVSGRAIVKALIAGEKKPERLADLAHPRLKVSRERLVEVLYGRLTARRRGLLGMHLTLIETIEDSIAQLDQEIEKAVQPFRSLVIRLKGVPGLSDVAVPALLAEIGVDMDRFRTHRHLLSWARVCPRLHESAGKVHSTRTLKGAVWLKTLLVQAAWAGVRSKNSYLRAQFLRLRARRGSQKAIVAVAASILTAVYFMIRDGSEYRDLGFHYFEQTDNTRAAGRLVARLQNLGFNVAITKAVA

SEQ ID NO: 376661 - protein, 338 aa, unidentified
MNILSFWVGLDYHEDAIRVCVMNAEGITLANRNCPNDVESVGELVWNYGEPSGIAVEACGGAAAFAHALQQRYQWRVRLAHPGYVNRLKQSPDKSDHDDAEILADLLRVDYLPEVWLPPVEILQLRRLVRYRQGQAAERKNIKQRIRALLREERMPRPNCNPWTKAWFQWVREDAPLLEQARWVMDQLLQDLKRVEERIGITEERMRSATEHDATTLALLEQKGVGLVTAVTLRAEIGEFSRFRSGKQLARFCTVTPLNSSSGKHQVEGGLVRQGNRELRRVVLEAAQRLARYEPKWRELKQRLKCQGKPGAVAVAAVANRWVRWLYHQMIETPVLAA

SEQ ID NO: 376662 - protein, 387 aa, unidentified
MRSTPPKTTAQPESAIHSDIAMLCVSLELSSTTWLVTSLAPGSDKMSKHKIEGGDSCGLLELLRRLQSKAAKRLGAPVRIVTIYEAGFDGFWLDRLLQAEGIESHVVDPASVAVPRRRRRAKTDKIDGELLLRTLLAWLRGEPRVCSMVVPPSPAEEDRRWLSRERDILVDERTAHTNRIAGLLATQGIRGYRPLRRDCRARLEDLKTGDGRPLPRRLKAEIGRELDRLELVKQQIAEVEAARDALLVAEDRSPGKLLLQLKSIGPAFASVLWLEGLYRSFDNRRQLAAFSGLAPSPWRSGNIDHDQGIAKSGNAKLRSTMIELSWLWLRYQPDSELSRWFRERVRGNKTRRYRKITIVAMARKLLIALWRYVTEGVVPEGAVMKAA

SEQ ID NO: 376663 - protein, 400 aa, unidentified
MLLFFEVITMIFVGIDVAKDTHYAAVSDDSGVVLVKPFAFQNNAEGFCLLLKKLSEFDRSKLLIGLESTGIYSENLICFLYESGFRLAVINPIQTATLRKTAIRKTKTDKVDTMLIIKSLMVNSYRLYSQRDADSLKLKTLCRFRQNLKKSKARLKIQLAGYVNLVFPEFGKFFKSGIHIAASYALLKKYSSPKEIAALRTSTLCTLLSKASHGRFGKDTAEALKSLALSSVGVKNPYISIQIAQTIAQIELLEQQINDLNSAIEEAMESLNSVLMTVPGIGAVNAACILGEIGDIKRFSKPCKLLAYAGLDPTVRQSGQFTAKSTRMSKRGSALLRFALINSAWQLTLNDTTFKAYYDLKRSQGLNHYGALGHVAHKLTRVIFKLLTSDTPFNPAKLVA

SEQ ID NO: 376664 - protein, 416 aa, unidentified
MKKGQNTRGYERYMALDIHREYLLVGAQNEEQDWVLTPRRVSIEKFSEWAKKNIRSGDIVVLETTTNVWTIYDIVAPLASRTLVANAAEVKEIANARVKTDKEDIKKLLKLLIGGIVPEVWVPPMHVRELRAFISYRGRLVKTSAMIRNRLQSLLHKHNLKMSETGLLDQAWWEAQKDISPLEKMQIRQELVLLQEVEKLKVAVDEELQRQSTGPIWGKAALQLMQLPGVGYIVAMTVLSAIGDISRFESAKKLVGYAGIGAGVHDSGKTHKDKKITKKGRRELRWAMVEAAWRAVGMSPFWKAEYEKYLSRLRKKNQAIVVIARKLLVAIWHVLSKEETDVHASEEDLAYKMLLLSWSLKEDTRMGLTYKQFAKYALMQLGVETDITRFVRRDVPRRLAPKEEVLARMTELGLTA

SEQ ID NO: 376665 - protein, 451 aa, unidentified
MSASRKAQLQAESLKRVNPNAAGLDIGSQEIWACVPQDRDAQPVGQFDTFTPDLYALADWLAACQVDRVAMESTGVYWIPIYEILEERGFQVQVVNARHLKNVPGRKSDVQDCQWIQRLHTYGLLEGSFRPEGEMCALRAYLRHRGMLLEHRAAHIQHMQKALLQMNVQLTQVLSDITGTTGQAIIRAIVAGERDPVQLARFRDGRCKSSRGEIAKALTGNYRGEHLFALKQALALYDSYTEQLGECDGEIERQFQAIKPVWPEELPPLDHEDKKGSHSKNAPAYDARTLLYQVTGVDLVAITGLNAITVQTIVSEIGTDMSKWPSQKHFCSWLGLAPHHDISGGKVLRRGTLKTRNRAGQAFRLAAQGVSRSHSGFGAFYRRLRAKVGPKAAIVATAHKLARTFYHMLKHRTPFHDLSAEEYEQRAREREIANLRKKASKLGMALVESPA

SEQ ID NO: 376666 - protein, 345 aa, unidentified
MVVLGADLHKRSHTIVVIDGTGRQLAEKTIAATDAGHLELRRWAAQWPDRTWGLEDCRHLSRRLDAELVRAGESVVRVSPKLMAGARRSNREPGKSDPIDALAVARAVLREPDLPVATLDGPDRQMRLLIDHREDLVGERTRHEQRLRWFLVELAIPEPAPRSLGRAVVQATLSSALVGRTEPVARFARDLLARIVELSTTIRALEHEIAILVRVMAPTLLALAGCGELTAAKIVGEAAGISRFRSKAAFARHNGSAPVPVWSGNVVRHRLNRGGNRQLNVALHRIAITQIRLGDEGKAYLDHRLSSGDTRTEAIRALRRRLSDEVFRRLRADEAARSTGLAAAA

SEQ ID NO: 376667 - protein, 356 aa, unidentified
MRYYKDIKRFVKGKAVFVGIDVHIKSWDLCFFSDGEVLEKVNIHANYPILLNLLKASYGDSRIIHLVYEAGFSGFWLYRRLRQDGYDCIVTSPNRIPKSDNKIKTDKRDAEKLARFLASGHLKAIAIPSSKIESQRRLLRQRGRLVKKQTRQKNEIKSFLFLHDISKPSDIRNCWTKAYILWLSELSFEFDSDTFVMAQMLEHLAYIRHELAQLLRCLKELSQHASYKDSYLRITHIKGVGLITAMTFLLELFDLERFKSTKHFSSYLGLTPSQHSSGEHVHLGHIAREGNIHIRRVLIESAWTVIKHDPHLRDKYNRIRAKGTNGNKAIVAVARSLAVRLRRCLLDKQAYLAGAC

SEQ ID NO: 376668 - protein, 404 aa, unidentified
MYNAVGIDVSKGKSTVAVLQPGGTVIRKPFDVSHTSQNLNELADYLSSLDGTTKIVMECTGRYHEPMVKALSEAGLFVSIVNPHLIKNFGNNSLRKVKSDPADARKIARYTLDNWTELRQYSGMDNTRTQLKTLNSQFSFFMKQKIAAKANLISLLDNTYPGVNKLFDSPTREDGSEKWVDYAYSFWHADCVRKIGLKAFTERYKSFCKKHHYIFQQDKPEKLFNASKELVAVFPKEKTYKLLIQQSIQQLNLASEHVERLRREMNELASTLPEYSTVMGIYGVGKTYGPQLIAEIGDVSRFTHREALTAFAGVDPGVDESGQHKSKCNRVGKVGYARLRKTLFQIMTTLLQNAPEADPVYRFLDKKRSQGKPYYVYMTAGANKFLRIYYGKVKECLRNLEQTE

SEQ ID NO: 376669 - protein, 320 aa, unidentified
MKWLGVDIAKRKFDLAVLDNGKIRRKVFDNTPAGYDALLAWLAARGYAHEELHVCMEATSSYYEKLATFLHDAGIRVSVVNPLQIKAFGESLLSRQKTDRADAALIARFAEQHSPMLWRPAPREIRELQRLLARLEVVQQMSVQEQNRQHEAEGESLASVQRMLTQLKAEEEKLRRMIRDHIDQNPNLREQHALLTSIPGVGDQVSSHFMAWLRPERFDDARQAVAFVGLSPRHRESGDSVRGKSRLCKVGHARLRKILYCPAMSAIRYNTAAKALAERLKASHKNGKVVVGAVMRKMIHWMFGVLKSGQAFDPALALAK

SEQ ID NO: 376670 - protein, 372 aa, unidentified
MQGTTFVGLDVHKPWINVAVLLPGHNTPLEWRIANEAQAIRKMLKRVAGLAPGDVRYCYEAGPCGYALQRQIISWSDASCMLVAPSLIPRKPGERIKTDRRDARKLAQLFRAGLLSEVQPLTEQDEAARDLSRAREDLREDLVRARHRLGKFLLRRAITFTPGKRAWTLAHRRWLESLRFDNPADSVVAADYLLAIDQIEQRIKSLLVHLERLALDPRYAKAVATLRCFRSFDTISSVGLAVELHNFERFTAARRLMSFVGLIPSEHSSGEKRRQGAITKTGNSHVRRLLIEAAWNYRHRPHVGAALRNRRKGQPPRTIALADRAMQRLHRRYQQMTLRGVLPQKAVVAMARELAGFVWAALSPLAQQTPTH

SEQ ID NO: 376671 - protein, 359 aa, unidentified
MMVLGIDPHKKTHTVVALEAATGELVAELTVAADQRGHERLLAWARSLGPERRFALEDCRHVSGRLERFLIAAGERCVRVPPKLMAQMRRSARSRGKSDAIDAAAIARAALREPGLPEARLEGPERELRLLADHRADLVAERTRIQSRLRWHLHDLALDLAVPPRALDRACWLARLEEALAPLEGVQVRIARILTERCRSLTREIAALGREIAGRAAALAPELLALPGCGALSAACLLGETAGAERFASAPRFAMHAGVAPLPVSSGQTSRHRLNRRGNRRLNAALHRIAITQMRCHEPAQLYMARKRAEGKSTRERLRCLKRHLARTVWQAMRSAEARRQTAPSDACPAPQPALALAS

SEQ ID NO: 376672 - protein, 402 aa, unidentified
MYSSFVGIDIGKWNHQAAFLEVSGKETARSLAFQNTSEGFQSLSESLAPFDKGQTVIGLEATGHYWLALFSFLVDNGWTVKVINPMQSDALRNMNIRKAKTDRKDCVVIADVLRFGRYTETVLPDEDLLQLRELSRCRVAHVELLGDLKRRALGILDRIFPEFASCFSTVFGAAPTELLQECTDPEELADYDVDKLIKLLEKESRGRHSREKAEELKAKASRSVGTRFGRDALKFELKMLLEQLDFIKGQVKEFDKFLKKLMKNHELIYTIPGISVTLGSAILGEIGDVKRFGTPQQLQAFAGMDPSVTQSGNFQGTQGKMSKRGSPYLRRAVYLAANAARRFDPVFKEFYDRMIARGKHPKQALAAVGTKLLRVIHAVMTSQKPYNPQKLLTPAAISQLNP

SEQ ID NO: 376673 - protein, 372 aa, unidentified
MNYNTVYVGMDVHKESFTLCAYTIDAEKGSHFQRTEADYKNVLKYLEFLRTVYGNDANFICGYEAGCLGYTLYHQLTEHDVNCVILAPTTMLEQRSKRRIKTDRRDAEIIGKCLAQHNYSPVHIPTATDEETKEFLRMRDDHKLALKKVKQQILAFCLRHNYRYDGNSHWTAAHIKWLKSLNPEALYKEILDEYLLTYTALSDKLERLDKRIEELASKDEYKESVKKLCCFIGVKTHTALSVLVEVGDFQRFASAQNFASYLGLVPGEDSSGDGQTRLGITKAGNRHVRMLLTEASQCYARGQIGFKSKELKSRQAGISPQVIAYADKANERLRRRYYKMVLGKSKKHNVAKTAIARELACFMWGMMTEHIA

SEQ ID NO: 376674 - protein, 355 aa, unidentified
MIIVGCDYHPSFQQIAFVDTETGELNEQRLEHRESAEAFYRELASRGEKVRVGMEASGHSRWFERLLAELGIELWLGDAAVIRAKRGRRKPKTDRQDAQHILHLLLKDDFPKIWVPSWENRDLRQLLWHRHRMVQARTRIMNQLQAVALNEGLRCKKRLWREKGRKQLEAIPLAPWASRRRENLLQLLDGLNPTIAELSAALDREVDKSAEAGRLMTHPGVGPLTSLAFVLIIGSAERFQCGKQIAAYLGLVPLEDSSGERRRLGHITKQGNSLLRFLLVESAQVAARSIPQWRNQYFHLAMRRGRKIAKVAMARKLAIRLFWMMRQGWDYEQMKKFGSHAGQPGNRDGVQQSIE

SEQ ID NO: 376675 - protein, 314 aa, unidentified
MTEGYVYVGIDVSKAWLDVAVEPAGQNWRTENDPRGINQLVGRLGELAPKIIVVEATGGYEANLVEHLCEAQLPVARVNPGRVRRFAQGLNWLAKTDKIDARLLACFGEKANPRLTKLPSEHQRRLAALVKRRKQVLEMLVGEHNRLENADGEVSPYIQDMMTMLQKQLDELERAIGSLIEDTPDLKGRHDVLLTVPGVGQVTASTLTSQLPELGSCDRKEIAALVGLAPFSHDSGKKRGQRAIKGGRPAIRSVLYMATLSSIRFNPVIKKFYDRLRGYGKETKVAIVACMRKLLTILNAMIRHNQPWRPDFAS

SEQ ID NO: 376676 - protein, 343 aa, unidentified
MGEGITIGLDIAKSVFQVHGVDGAGAVVLRKRVSRGKVLEFFADLSPCLVGIEACPTAHHWSRELQSLGHTVKLMPPSYVKAYLKRAKNDANDAAAICEAVTRPSMRFVATKGKEQQGALMLHRTRQLFVRQRTMLSNAIRGHLAEFGIIAPVGRLGFARLLELMDGPEELGVPKTAWVCLMGLAEQHQRIHREIGKLDQCIQALHRSSELSRRLEEIPGVGPIVATALVGTITDPHVFASGRHMAAWIGLVPQQNSTGGKDRLGGITKQGNRYLRWLLVAGAMAVIRYAQKHGTAKRPWLARLIERKPTKVAAVALANKIARIAWVIMARGERYRAPALLAA

SEQ ID NO: 376677 - protein, 343 aa, unidentified
MEHYAGIDVSLKESSVCVVDANGKIVREAKVASEPEALCDLIAELGFSVSRIGMEAGPLSQWLREGLADAGFEVVLLETRHVKAALSAMTVKTDRKDARGIAQLLRMGWYRPVHAKSAACQEVRALLVGRKLLQAKLLDVELSIRGILRGFGLKVGEVSRGRFEARVRELADGHAMLETVIGAMLQARAALWNEFIRLHREMLKIARTDHVCRRLMSAPGVGALVAITYRSAVDDPERFTRSKTVGAYFGLTPKKYQSGETDIDGGVSRVGDAMVRTALFEAAHIMLTRAMRFSALKRWALGVAKRRGMKRAKVALARKLAVVLHRMWVDATEFRWSKDASAA

SEQ ID NO: 376678 - protein, 341 aa, unidentified
MEEYVGLDVSMKETSVSIRRAGERIWRGKCASAPRIIAELIRKRAPAVRRVVFETGPLSIWFYHSLRTEGLPAICIDARHAKAALDMATNKTDANDADGLAQLAEVGFFREVRVKGFDSMLTRTLVGARTRLVRITTELSNQIRGVMKTFGLLVPAGKGSIFEKNVRSLLTDQDGLASIVLPMLEAWRGIRIRAAELGRQLVRDARQNEACRILMSIPGIGAITATAFTTAIERPDNFKKSRSVGAWIGLTTRRYQSGEVDYDGHISRRGDAHLRGLLYEAAAVILTRSSTDSTLRTWGLKLRERIGFKRAAVAVARKLAVIMHTMLKTGELFNPNAGAIA

SEQ ID NO: 376679 - protein, 343 aa, unidentified
MKLSRVGIDLAKNIYQLHGVDRSGKTMLKRRLKRHQWLKVLLDNTEPGCVIGMEACASAHHWGRELQSRGYTVKLIPPQFVKPYVKSNKNDARDAEAICEAMSRPNMRFVTVKTVEQQDIQATHRIRAELITQRTAKANQIRGLVAEYGLVAPKHLSSLRAAIPCWLEDAENGLTGDFRRLLQGVWNDLLILDDRVGEMDKAIKQLADKHEECVRLQQLCGVGPMIATAMIATVGDARQYRTSRQMAAAIGITPKQHSSGDRDRLLGISKRGDVYLRTLMIHGARSAVAAAKHKDDRLSRWVTNIANTKHPNVAAVALANKTARMAWAMLRHETDYDPDYAIS

SEQ ID NO: 376680 - protein, 605 aa, unidentified
MLPHSGSPSQLSTPPADTGGSPNPTRIGVGIDTARYGHYAVFLRADLQPAAADLAFAESGAGYAELRTRLEQIAQRHAAVAWHVRIDAAGQYADNLQHFLHFLAAAAPSDRSTFTLSLGDPQRNKNYRAAIYGSKKSDPTEAAAAARFALTERPAGVPPMSTELRTLRQVAGRLQATVRQRTRLINQFHKLLALVFPELALLTKDVAAGWVLELVHRFPTARRLAAATPDQLQDIPYLAHDRIDTLLTHARTSVASLHDAALQELIRDQVRQLRDVHARQKRLENTLIAVYRRLPQPNHLDTIPGIGPVTAAVLTAFILDIDRFETPGKLVAYFGILPIEAASGIDRDGKPRGPKRYVMSKRGNDLVRRYLWMAGLCAVGHNPAVRPLYARVVARHPQHKAIAIGHAMRKLLHLAFAVWKSGKPFDPEHYPWGAASAASDEAAAEDARLRVPKSNPNDMPLSPKQPAAGLTLSAEPAQTEVTAAGNANGSPTPPRREPLIDFDHLKKQLPMTRLLDHLGLTSRLKGAGLQKRCTCPIHRGDARGRTFSVHLGQNVFQCFDKACRHKGDVIDLWAALHGLSLRQAAVDLIETFQLEAAPPTEKRNG

SEQ ID NO: 376681 - protein, 341 aa, unidentified
MKNISILSIDLAKNVFQLHGQNKQGKQVLKKRLRREELRNTIANLPPCLIAMEACIGAHAWARQFMKMGHQVKLLAPQYVKPFVRVNKNDQRDAAAIALAASLPSIPSVSVKSEEQLDLQAIHRVRERLVRERVATGNEIRGLLADMGVVIPTGEAAIKSLLPVLLEDAEQPITHRGRLLLDDLRLQWLEKEAHVKRYDRILKEYSKGSEECQKLMEIPGLGIINASLLWCYIGDAKRFGSGRHVAASLGLVPKQASSGEKEKHKGISKQGNKYLRKQLVHGARAAYRVLQKDGATGRLAEWVKRMKSSGKHTNKIVVALANKLARIAWSLLSKANSHYQS

SEQ ID NO: 376682 - protein, 325 aa, unidentified
MAHIGVDVSKKKLDVCWLREPDTGKVKTRVFSNDRQQFAALLDWLLQHTGAEREQLHVYLEATGIYHEPLAHWLHEAGACVYVLNPAQVRFHARSEGQRGKNDRKDSRVLAEYGAQKRLQPWQPEPAEVRELHHLLTRLDTVCADIQREYNRREKAAFTHEPYVLDSIDQVLHALRDEQRRLRKQIDDHIQRHPPLRQDQRLLKTIPGIGDETSKHLLVAMRGRGFTSARNAAAFFGLVPLDWQSGSSVKAQPRLAKTGQAHVRQKLYMAAVTAIQHNPAIRAQYERLRKAGKAPMSALGAAMRKLVHIAFGVWRTQTEFRTQPA

SEQ ID NO: 376683 - protein, 345 aa, unidentified
MKITTIGVDLAKNVIQIHGVDERGKMVLRKQLKRAQVASFFATLEPCLIGMEACGSAHHWARKLQGFGHTVRLMAPQFVKPYVKTNKNDVADAEAICEAVSRPNMRFVPLKTTEQQSVLALHRARQGFVKARTAQVNAIRGLLGEFGIVIAQGMSSLAQRVPEILEDGENGLSGSFRQLLHRLMDHLKELDRQVGELEREIQVWHRENEASRKLAKVPGIGPITASALVASVGDAKNFANGRQMAAWLGLVPRQHSSGGKPRLLGISKRGDCYLRTLLVHGARSVVRYAEGKTDPASGWLKSLLSRRNTNVAVVALANKNTRIAWALLAHDREFRADYVPARAKA

SEQ ID NO: 376684 - protein, 348 aa, unidentified
MIIIGCDFHPSWQQICWLDKDTGETAEQKLVHGSGEAQKFYQQLVAPALIGMEATGNCQWFVEMVKAAGHEVWIGDAAQIRASDVRQQKHDRRDAALLLQLLLEGRFPRIWTPSSEQRDLRQLLIHRYKLVRLRAQAKNGLQHLALNQGLQKKRRLWSEGGQKLLRALPLKPWASRRREDLLGVMELLDQKIASLDQAVQEAAEKDPNARLLMTQPGVGPVTSLAFVLTMGDVTRFARGKQVASYLGLIPREYSSGGHQRLGSISKQGNRFMRMLLVEAAQVAVRCDPQMRQEYLHRCHQKPKGVAKVAAARKLALRLYWMLRTQKRYPEIVSIESSSRVPLVVRHGG

SEQ ID NO: 376685 - protein, 408 aa, unidentified
MEVLHQRCAGLDVHKDSVVACVRIASGGAVRHEVRTFGTTATPLEQLAAWLHAEGCTHAAMEATGVYWKPVWHALEGELELVLANAAHIKNVPGRKTDVNDATWIADLLAHGLIRGSFVPEASIQDLRSLTRTRKQFVREKVGHVQRLQKTLEDANLKIASVATDIMGVSGRAIVEALIRGETNPDKLADLTRGRLKASRATIVESLRGRVTANHRFLLKLHFDQVKAIEQAIALVDKEVDALIEPFRAAAERLTTIPGVSDVVAEVIVSEIGVDMSRFPTPAHLISWAGLCPRNDESAGKRRSTRVRKGAPWLKTALVQAAWSATRVKKSYLSAQYHRIKSRRGSRKANLAVAASMLTAIYFMLRDGAEFRDLGHDYFDRVNKAKAAERMVRRLNDLGFQVQLTPAA

SEQ ID NO: 376686 - protein, 338 aa, unidentified
MTILMGFDQHRAQITAEWVDTSTGEISRGRVTPADRAGVRRFVERFRDQELEVALEATTGWRFVVEELRAIGAQVHLAEPAETAARRGTKRRPKSDRADARHLRELLMIGRLPESWIPPDHILDLRARVRLRHTLSAQRGEWQQRIQSVLYHHGCPQRGDLMNTDGLAWLAAQPLPACVRDQVTIALAVIDALDTQLAPLDNELRAYARRQPGCKALLAHYGVGPLTAVTILAELGDPNRFSSSREAVRYSGLDITVHQSDQRRAPGHLSRQGPPALRWALFEAAQCARRRTSPDHQYYLEAAARLGGNRACLAVARKLLKRSYHTLRDLGEEALQPA

SEQ ID NO: 376687 - protein, 388 aa, unidentified
MQVVADRAAAPTAIQTDLRAIFISLELSRSTWLITSLSPGGGEKMSKHSVQAGDIAGLLRRFAQLKEKARARTGRDFPIITIQEAGLDGFWIHRVLQSEGIESHVVDPASIATSRRRRRAKTDKIDGETLVRTLLAYKRGEPRVCAMVKVPTPEEEDSRRLCRERKVLTAERVLHVNRIKGMLFCQGISGYEPLRRDRHERLEELRTGDGRPLPPHLKAQVNRELDRLELLLKQIKAVEAERDALLVAAHTPAAVPASMLLNIKGIGPEFAAVLWSEGLFRHFDNRRQVAAYAGLAPTPWQSGAVDREQGVSKAGNPRLRTTLIQLAWLWLRNQPHSALTLWFHERVNRNGGRLRKATIVALARKLLVALWKYVNAGVVIEGAAMTTA

SEQ ID NO: 376688 - protein, 393 aa, unidentified
MIGGIDSHKDTIHVAVITGLGVDVVDREFTTTQAGYHEAIDWLRTQDCLDVVGVEGTSSYGLGVTTALREAGARVIEVNRTRAAERRRKGKSDRLDAYRAARGVLSGEASTIAKSDTIEALRAVHNARKSAVKAKRVAWQQISATLINAPAPLRDRYRGLAEDKAVQQLIAARPARGTEPAVAGIMVALKVLARRHRALSAEIDELGDHLAETTTAINPGLAALQGVGPVVAAQLLITAGDNSDRLRSEASFAALCGTAPVQVSSGRVTRHRLSRGGDRQANAALHHIVTNRLRHDPRTRDYRDARLAKGGTKAAAMRALKRAVAREVFRALRGRCPVPDYSDLRPARQARHLTLAAVAAELKVWPSALSQLELGQRVDNDLVARYRNWLTAA

SEQ ID NO: 376689 - protein, 339 aa, unidentified
MEVSMIGLDLAKRVFQVHGVDGACREVLSKRLRRGQVLAFFASLPPSVIGMEACATAHYWARELGSLGHEVRLVPPSYVKKYVRRNKTDAADARAICEAMRAPDMHFVPIKSMTQQSVLVLHRTRELLVRQRTMTANALRAHLAEFGMIAPQGGTGLASLLAQVRDPTPGLPEEARAGLMLLASQWDALKDKIRALERRIIVWHKADDTSRRLATIPGIGPLGASALAASVGDARVFKTGRHFAAWLGLTPREWSSGLRRRQGRITKRGDDYLRRLLVLGAHTVLRHNGAAGHRPDRWLTALQARRGTGRAAVALANKRARIAWAIMARGEVYRGAMAV

SEQ ID NO: 376690 - protein, 331 aa, unidentified
MEVKETIGIDISKLDFDVRIHCNQMYAHFVNSNSGFGKMVKWVYKNSPFSKDNILFVFEHTGLYSYRLSVFLSENNIPFIMVPGLAIKRSLGISRGKEDKMDATKIALYGYRLKDEIIPDKIPSNKIMALKSLLSLRERLVKQRAGYKASLKEQKRVLIKKDNRVLLGAQEKMVVYFSKQINNVEKEMASIIKEDDKLNEIYDLIVTVKGVGPQTALFLIVYTNAFTKFKNARKFASYCGIAPFPNSSGTSIRGRTKVSHLANKRIKSLLDLCAKSSIQFNPEMKRYYDKRVEKGKNKMSTINIIRNKILARIFAVVERKTPYVNFMKYAA

SEQ ID NO: 376691 - protein, 382 aa, unidentified
MDTLSNTVAAIDSEQQTATLFVALELGQATWVVALHSPIADKISIYRIEGGDTDQLMALIEKKRVQAARRLGGVAQIVSCYEAGRDGFWLHRFLIRRGIDNRVLDSASILVDRRARRAKTDRLDARALLRVLMALVRGEEQVCRVVRVPSIAQEDERRLSRERERLLHERNSHIARIKGLLILHGVRDYRFIERDWKERLDAVRTTEGQALPARAKTEIERECRRLWLAKQMLAEVEREIEQMIAHDGAVAGKLIQVRGIGPTFASVLTHEVYYRSFDNRRQVGSYLGLVSIPWQSGSVRRDQGITRSGNARARRCAIELAWLWLRHQPGSALACWYRTRVGTMTGRMRRIALVALARKLIVALWRYLQNGIVPEGAVLKAA

SEQ ID NO: 376692 - protein, 387 aa, unidentified
MSQAFDASRSLTALEQDSTIIAVIEMSQAKWLVAGIVPGVERQPLKRLAADEAALLKLLHRWRNEAGQAGRQIKRIVVAYEAGRDGFWLARWLRVRGVEAYIIHPASIAVSREHRRAKTDRLDTELLMRAFLGWLRGEKRHCSMVAIPTVEEEDARRPNRERGNLVTEQTRIVNQIKAVLTRFGIRTFRPTLRKAEEQLEGLRTAEGAPLLENTRAELRRYLARLRVVREQIRTIEQSRLGKLATTPEKGPHAMVRLIARVLGVGVETADMLVNEVFSRHWRDRKAIARYAGLTGSPDESGRRRRERGLARGGNTRVRCGMIQFAWRFLRFQKDSALAQWFAARTADRRASTRKTMIVALARKLLIALWRLATSGEVSDGIVLRPAS

SEQ ID NO: 376693 - protein, 341 aa, unidentified
MSSVALVGIDLGKHSFHLHGQDNVGREVLRRKATRQQMMRLLGNLPRCTVAMEACAGSHFLARQLVAFGHEVKLISPQFVRPFVKGNKNDFIDAEAICEAASRPTMRFVTPKTEAQQTLSVLHRMRESLVRDRTKTANQAHGFLLEFGISLPKGLSLVRRLPTTLNEHELPPHLVGLLSRLHEHFCYLDEQIKSLDKEMTGQLAEDELGSRLLSIPCVGPITASLLCAEMGDGKQYGGSRDFAASVGLVPRQYSTGGRANLLGISKRGDKNLRRLLVQCARVYLQRLEYQQGALADWVRSLRERRHSNVVVCALANKLARIAWAIAANHSEFEAGPSALAA

SEQ ID NO: 376694 - protein, 317 aa, unidentified
MQRTIIGIDVSQDMLDAHSRPANLRRRFANTAAGIADLVAWAGDATPERLVFESTGPYHKAAVGALLAGGLPAVVVNARQVRDFAKGLGQLAKTDAVDAAVIAHFGEVVPTTVRPLPPPELGELRDLYDRRGQLVRMLAAEKNHRHAAAGSSPKVLKNIDKHIDYLERQIHDLEGRMDRIVETSEAFRAQDAILQSITGIGPQVSRTLLAYLPELGQRTRQSIAALVGLAPFNDDSGQHTGLRHIRGGRSKVRIGLYQAAVAAIRHCPQMKAFYAALKARGKASKVAIVAVARKLLVLANALLRDMTPYIAPANSVC

SEQ ID NO: 376695 - protein, 345 aa, unidentified
MEPMYYIGLDVHKRKISYCVKDSSGKVFAEGSLPATRFDLDLWMKTLPQPWSAAMEATMFTGWIYDHLRPHAAALKVAHPLMLRAIAAAKKKNDRIDAGKICDCLRCDFLPECYMASTAIRERRRTLRYRNLLVRQMVQMKIKISALLMETGVSYNKQRLHKAGYFRELLATNPDIDEGLCSLLRLCRETVVRLGKTESALVRSLERDSLLVERVERLMTIPAVGPITALTWALEVGDVQRFSSIKKAISYCGLCGAEKSSGNTVQRTPLSKQRNKHLQTTLIEAAKMAPRNSPELAMLYDKEKQKGNANRATLAVARKLVAYLMAVDRGQRNFQIAETSSNIAA

SEQ ID NO: 376696 - protein, 347 aa, unidentified
MEIISRVGVDLAKNVFQLHGADRKGKTVWKRKLSRDKWLTVLFATVKPGAVIGMEACAGSHHWSRILISKGYEVKIIPPQFVKPFVKSNKNDANDAQAICEAMVRPDMHPVKVKTIEQQDIQAIHRIRNEIKSHRIAKGNQIRGLVAEYGLVAPKELSSLSRAIPEWLEDASNDLTMFFRQLLQSLYEDLCSMDKRMTELDKQIAVIAQQNPIAKRLQQLPGVGPLIATALVATMGDGKQYRKGRDMAAAIGLTPRQHSSGGKDRLLGISKRGDAYLRCLLVHGARSAMRTAKDKDDRLSRWITSLQDRRHANVAACAMANKMVRMAWAMMTRGVDYDPNFNVVSAN

SEQ ID NO: 376697 - protein, 328 aa, unidentified
MAIVMGLDQHRAQITAEWIDTDTGELGRARISPALRGDVRRFVKRFAGQPLEVALEATTGWRFVVEELHAVGAEVHLAEPAETAARRGNKKRAKTDRADARHLRELLMIGRLPESWIPPEHLLDLRARVRLRHTLVDQRGEWQQRIQAVLYHHGFPQRNGLLTGENRAWLEALALSPSAREQVRIALQIIDSLDAQSAPITRELRLYARRQLGCRALMKHYGIGELTAVTILAELGDARRFSSSRHAVRYAGLDITVHQSDQRRAAGHLSRQGPPALRWALFEAAEAARRPGSPDRGYYDQAAERLGGNRACLALARKLLKRSFHTLR

SEQ ID NO: 376698 - protein, 334 aa, unidentified
MKNYKNYLGFDVSKNTLDYCLLIPERDTVKRGSVANEKKSLQTLFAAFSKEGLMMEDTLVVFEHTGIYSTILAVFLCGNGWNYAEVPAIEIKRSRGLSRGKSDTIDAQEIAKYAMRNEDKIQLSEVPEIIYQQLNLMNAEREKLIAAIKSFERTSEGEKFLEKEVYRSVKSANRKTVTFLKSQLKTLELAISKLVRSDEDLNAKQELLRSIPGVGEIGTLYLLLTTKGFLRFRNARKYACYCGIAPFGRTSGTSIRGKSRVSPFADKKMKSILHLLSLTAIKYDHELKLYYERKQAEGKPKMLALNNVKFKLVNRIFAVIGRGTPYVKTQQFAA

SEQ ID NO: 376699 - protein, 343 aa, unidentified
MEAYVGKQFVGIDLHRRRTVIVRTTEAGEVLEAVRIVNDVQRLASVMARAGDCPEVVLEATYGWYWAVDALQVGGANVHLAHPLGVKAFEYRRVKNDFRDAQDLADLLRMGRLPEAWIAPSPTRELRELVRHRAKLVGLRSHCKAEVHAVLAKCGVQVLMSDLFGLAGTELLDRLDLPAPYAARIASLRRVMDDLDFEINLFAGIIRGRLAHEPGYTAVQKIPGIGPTLGAVLVAEIGDITRFASASKLTCWAGLTPKHHESDTHVRRGRITKQGSRLVRWAAIESVKTVSKDSEVGVLRERVADRRGRNIGSVAAARLQLEFVFYALRDGHVRALEHLPRVA

SEQ ID NO: 376700 - protein, 418 aa, unidentified
MAHESEWYVGFDWASEKHRVCLLDRAGRVVGERDVAHDGAALTDLCEWLIDKSCAEPARIAIAIEMPHGPIVEMLLERGFAVYAINPKQMDRFRDRFTVAGAKDDSRDSRVLGDSLRTDRRAFRRLCPDEPLVVELREWSRMADDLKQERNRLANRVREQLWRYYPQMLKLADDLAADWFLALWECVPTPAKAAEARGAAIARILKAHRIRRFNAAEVLRILREKPLAVAPGAVEAATAHIGAVAERIELVNRQLNTAQRQLDELCARLEQPSEGEPGQKSEQRDVAILRSFPGIGRINLATLLAEAWQPLQRREYSVLRAMSGTAPVTRRSGKACIVLRRLACNKRLERAVYHWARVAVQHDPRSRAKYAELRRRGHSHGRALRSVGDRLLFLACTLLQRQILFDPGYKRADVAAAA

SEQ ID NO: 376701 - protein, 412 aa, unidentified
MDVIVERPAALDVHNATVMACVRVPGEGRRRAEHVAEFQTTVQGLLALRDWLEAHEVVQVAMEATGVYWKPVWAVLEDRFSCLLVNARHVKQVPGRKTDVQDAQWLCQLLEAGLLKPSLVPPKPVRTLRNLSRYRKSQIRDRQREMNRLHKIMQDTGIKLDCVATDMMGKSGRAMLDALVSGTTDPVVLADLARGQLRKKIPALRAALEGRFDTEHSLIVGRILSHIDYLDEAIDELSGAIEQQLGPFAPAVELLCTIPGVGRRAAEVIIAETGGDMTVFPTAKHLASWAGMCPGNDQSAGKRRSGKTRKGSKWLSQTLVECAKTANRSKDTYLAAQYTRLRPRRGANKATIAVCHSILTAAWHMLQSGETYTDPGGDFFARRDPERTRKRLVGQLERLGYSVKLQEGAALA

SEQ ID NO: 376702 - protein, 356 aa, unidentified
MSHEVKYIGMDVHKEATVIAVLNGSGKLVMESIVETKASSILQFIHGLRGELHVTWEEGTWANWLYDLLQPQVAQVLVCDPRRNALLKEGSKSDKIDARKLADLLRTGMLRPVYHGEHGLRTLRELGRSYRTLSQDLNRVMNRIKALYRGWSIPCAGTQVYAPRYREEWLHKIEHVGVRRRAELLYQQLDGLQALRRTLRSELLAESRKHKASKLLRQIPCIGPIRAARLIALMQTPHRFRSKRQLWTYSGLGIETRDSAQYRYVQGQLQRAKKPQQIRGLNRNHNHEMKEIFKGAATRASCGVGPLRDFYAALLAKGMKPEMARLTLARKIAAIALTLWKKEERFDAQQLKPQAA

SEQ ID NO: 376703 - protein, 305 aa, unidentified
MKHSNTKLFVGLDVHKDSIAVAYAPEQRGAEIISLGNFGTRQCDIDKLLKKLLAHGQDLVFAYEAGPCGYWLHRYLSKKDHTSLVVAPSLIPKRPVDRVKTDRRDAIMLARTLRAGDLTTVYVPNVEDEAIRDLSRARESGKRDLRAAKLRLKSFLLRLDIRFEGTANWGPKYLRWLGNVACETPAQQFVFQEYIHAITERNERVERIEAELHNQIDAWRLKPVVVAIQSMRGIQFVTAATLIAELGDVTRFAHPKELMNFVGLTASEHSSGRKRKLGGITKAGNSHARRVLVRHVSSLMRHSVS

SEQ ID NO: 376704 - protein, 343 aa, unidentified
MQTVTTVGLDIAKSVFQVHCVDGVGQVVIRRQLKRRYVLAFFQKLPPCLIGIEACASSHYWSRELQALGHTVRLMPAAYVKPYVKRQKNDATDAEAICEAVTRANMRFVETKTPEQQSCLMLHRTRHLLIRQQTAVINAIRAHLAEFGIVAPLGRLGVEALLGVVADPQDKRVPEVARACLVALGAQLRVLKKQILEFDRMINAWHRSNATSKRLDKIPGVGPALATALVASVANPRAFRSGRDFSAWIGLVPRQHSSGGKDKLGSISKQGDRYLRGLFTAGALAVIRYAKIHGTKHRPWLAALLARRPTKVAAIALANKLARMAWAMMAKGQCYKEPVALAA

SEQ ID NO: 376705 - protein, 362 aa, unidentified
MRMKSHPQYFISKRRRSSKVGITIGIDLGDIWSHYCTLNEDGEVVDRGRFRTNPSGVDKRFRDLERARVAMETGTHSIWVSEQIQELGHEVIVANVRELRAISHRDRKSDKVDAEKIARYARLDPEILRPIAHRTVAQQETLTLIRAREVLVRLRTGAVNSVRGLAKPCGYRLPASSTLTFAKRCLAVLPSGLAQALAPLLHQIADMTVKIKQYDREIQKLTETTYPETQALIKIYGVGHLTALTFVLTLGNKQRFQRSRDVGCYLGLRPRRSQSGDSDPQLGITKAGNGYLRQLLVECANHVIGPHGKASALREWGLSLGARGGSHARRRAVVAVARKLAVLLHRIWITQEVYVPFYEVAA

SEQ ID NO: 376706 - protein, 316 aa, unidentified
MDDKRVIGVDIGKSWLDVAWEDAGRVQRYSNDAAGIAALIEKLDPARDIVVFERCGGWERNLEQALSQKTIGWAIVHPQRVKAFRAAQGIKAKTDRIDARLLRDYGRDRLNAGKLRLGRLEDLTLDGLVARQRQLKAMLHAENCRLATAALQAVRASIERMITHLEEELAAIEAELVRYEREHVEPAFKEEVLCRQIGVAKATARSLLAELPELGRLDRKEITSLGGMAPRVHESGSIRKRRGLAHGRAAIKVIMFNPARTAMRWDPQIKEFCSRLRARGKPGKVIMVAVMRKMLVRLNALLRDAMLQAPTAAAAG

SEQ ID NO: 376707 - protein, 357 aa, unidentified
MATQLTAQPKLYIGMDIHKKSWSIHMRTDLSDHKSITIPAKADILLNYVESNFSDYQVSLVYEAGCCGFGSARYFLSQGWEVTVVNPADVPTMDKQHYQKTDKIDCHNLSKQLKAGHLTGIYIPDKEQDLLKSLVRQKAEAARQLRNVKSQIKSLLLYHNYEVPLNIDNSNWTKEFIQWIKDLDWEFPSGKECMESKLRILDLFHHEALHIANQLRAYCRKHYKKDYYLLKSIPGIGGYLASAILAEIGDLRRFNTEAEFASYVGIIPTMRNSGGTTNVSGVTPRCRALLRTYIIESAWVAYRLDPQMQQYYRKHIGKNPKSIIVKIARKLLNRMLSVIKNDTPYKLNTTVQNHEMK

SEQ ID NO: 376708 - protein, 338 aa, unidentified
MELYAGIDLHSNNSVVTVLDEQDRTVFAKRLANDLTAIIAALRSCAGTVRGVAVESTYNWYWLVDGLQDAGFTVHLVNTAAVKQYDGLKHGGDFSDARHLAHLLRLGILPTGYIYPREQRAVRDLLRKRSQLVRQRSTQILSIGNLVARNLGTHAGGNEVKRWQREHVDAMPLLDEQKQALMANLAVMRCLDSQIDALERSILAKAKLREDYQALKTVSGIGEVLALTIALETGEVGRFDSPGHFASYARTVDSRRESNGKKKGEGNAKCGNKHLAWAFIEAAHFAVRYDAAIKRWYQKKCANGLAVVAIKAVAHKLARACWHVMKDGKPFDVARAFG

SEQ ID NO: 376709 - protein, 441 aa, unidentified
MPPFGPNPIRVVVREQRGTSVPGKRVTKVWQVRSTTRALVELGDHLRCQGIQRVVVESTSDYWRPFYYLLEAAGLTVWLVNAAQAKNVPGRPKTDKIDAVWLAKLAERSMVSPSLVPTEPMRHVRDLARARFDLVEDRTRVKQRIEKLLEDALIKISCVLTDIHGVSGRAMIEALIAGRRSPQTLAELAKGRARARREALTEALEGCFTDHHARLARMLLEQLDDLTARIVEVTALLDAAITALPDGSPSTDPAAGTHPHNGADPEDTQPPGPTASYTSAIARLCSIPGAGPDTVRAVIGEIGLDMTVFGRHQRLCSWAKVSPRTVQSGRKNGRARTGKGNPYLKAALAQMATGAAKTDTFLGERYRRLIKRMPKAKALVALQRSILIIIFHLLADPTAEFTDLGPDYYTRRIDLARRTHHLTCQLQALGYNVELTPTKTA

SEQ ID NO: 376710 - protein, 411 aa, unidentified
MRLFAGDDWAEDHHDIEVMDETGKVLAKRRLPEGVAGMTQLHELIGRFAPEDADEVEVVIGIETDRGPWVAALVAAGYTVFPVNPLQASRYRERHGVSGAKSDQGDSHVLADMVRTDSHQLRPAAGDSPDAGGVKVVARMHKTLIWDRTRQVQRLRHQLREYFPAALEAFEDLDAPDALELLGKAPDPARAARLTRAQVAAALKRARRRNITDKTTAILAALRGEQLALPPELTAAYAATVRSLAAVIAALNEQVKVLEGQVGDHFGRHPDAEIYQSQPGLGTVLGARVLGEFGDDPHRYASAKARKNYGSTSPITRASGKKKVVAARFIHNDRLLDALMSWAFSSLNASPGARAFYDQQRAKGLEHNDALRRLANRLVGILHGCLKTRTRYDEATAWAHRKNLPQSSAAA

SEQ ID NO: 376711 - protein, 343 aa, unidentified
MQTVTTVGLDIAKSVFQVHYVDAAGQVVIRRQLKRRYVLAFFQKLPPCLIGIEACASSHHWSRELQALGHTVRLMPPAYVKPYVKRQKNDATDAEAICEAVTRANMRFVPTKTPEQQSGLMLHRTRHLFIRQQTSVINAIRAHLAEFGIVAPVGRKGVEELLHVVADRNDKRVPAVARACVAALGSQLLGLKKQILTFDRMIMDWYRSNETSKRLHYIPGVGPLLATALAASVADPKVFRSGRNFSAWIGLVPKQYSSGGKDRLGSISKKGDRYLRSLFVAGALSVIRYAKIHGTKHRPWLTALLARRPTKVAAIALANKLARMAWAMMARGERYRNPVALAA

SEQ ID NO: 376712 - protein, 416 aa, unidentified
MAVTRWVGRAVGLDVHREFCELAICEDGRVRSGGRVASTPEGLGVLARSLLPSDRVALEVTGSCWEVARILEPRVNRVVVVSPDDTGIASARAKTDRLDARQLASLLWKGELEAVWVPDERCRILRRRLARRGQLMRARTRSKNEIHASLQRRLQAKPPCSDLFGVKGRAWLAALQLPAEERESVDAAMRHIEFLDQELAAVDRLIAQQALSWPEIRRLMTVPGVNLICAASFIAAVGNANRFLTSRKLVAYLGLDPRVKQSGEGPARSGRISKRGSPSARWALVETCWSVVLQPGPMRAFYQRTKARRGHGKAIVATARKLAVLCWCMLTRGEDYAHQQPSLTRKKLRRLEITAGAPKYTRRAVGSWSTNLLMRQAERELALQAEASYKRMVQDQRAGAPARKSGASVTPERAQV

SEQ ID NO: 376713 - protein, 380 aa, unidentified
MPEAVIGLDVGKSSHWACVATRDGEVLLSAPVANREDDLDSLFGRFPDALVVVDQSRNIGALALARARAAGMSAAYLPGLAAHGAARLFAGDAKTDERDAMVIAKTALGIPDALLPVGDPGPTIAAARALAAQRNFLTCENTRNKNRLRSILLESCPAFEALVDLSDGPQLRLMASLGGAWSVADAGPRRAAALTRGAARGKIEALVRSTASSTRPDASVVAAEDRAVKLLARRISENSAEIEAITAEISALLEGDDTYRCLLTVPGIGPKTASELAISIDIEDFPSHDRLASYCGLAPRNRQSGTSISSVTASRQGNKRLKNLLIFSCNCLTRTEGRWGDYYTRCRERGMSHGKALKALARKRLKVIYAVMRDRVPYAA

SEQ ID NO: 376714 - protein, 376 aa, unidentified
MGKGIRFVGLDVHKETIAVAVAEAGGEVESLGTVPNTAESVARLVKKLRANGGELCVCYEAGPTGYVLYWQLTALGVQCEVIAPSLVPVKPGDRVKTDRRDAVKLARLYRAGELTAVWVPTPEHEALRDLVRAREAAKKDQRRARNRVQKFLLRHGRRSPEKVRAWSGAYRTWVASQTFAHAAQTATLADLLAEVDHETRRIEGLDKHLDAAIAAAPVTMRAVIEALQGMRGVSKITAASVVAEVGKFSRFSHPRELMGYSGVVPSEHSSGESTRRGAITKTGNAHVRRVVGEAAWQYRHRPRVIGSLKKRQEGLGAETIDLAWKAQQRLHKRYVGLLARGKCKQKVVTAVAREMLGFMWDIATRVERAHADAKAA

SEQ ID NO: 376715 - protein, 336 aa, unidentified
MGSYVGIDLHRRRSVVVVLNEDGHRVSWSRIDNTPANLAAEITAAGGPAAEVAMEATWGWYWAADVIAECGATLHLAHPLGIAGYENRRVKNDIRDATLLADLLRMGRLPEAWIAPPEVRELREAVRYRAKLSRLRAGLKAQVHQTLGKEGVIPELNSIWKAGGQQWLDDLRLGDEYGNRIESLRDLIEGYDREIRDCDVRIHRRLKGHPGYEAVQGLRGVGPILAAVFVAEVGDVSRFANPDRLCSWAGLTPRHRESDNHVARGRITKQGSRLLRWAAVEAVSGAVRDPQIASVKARVGARRGRNIGRVAAARHLLTLVYYGLRDGEIRCLANAA

SEQ ID NO: 376716 - protein, 316 aa, unidentified
MDDYIGIDISKSSLDVYDGKKSYKFPNNHDGFEKIVALCSDIHNTVFIFEPTGIYSYALTEFCATNAIRIVMVGPKESREFSRSLKVRSKTDKIDAKVLYKYQSHIEQGMAQVPVVNTNAIQLQEMLNVYEGIQASKQRFKNQREAVSDKSSELIRTLNGIIENLDKEASVLLDKIEAILLDDDETKQRYDAMTSIPSVGKKSALYLLVFFMKYPMANAKKITALAGLDPVVRDSGIFQGRQKISKQGGEQLRNLLYLPTLSAIQHNERIKIFYNRLVSNAKTRKLAVLAAMRKLVLMAFSLYRSKESYKPLSIAN

SEQ ID NO: 376717 - protein, 400 aa, unidentified
MKTVLSVDVAKNKSMIMLMNNEGEILIDTKEIKHNLGEFEKVKEEIEKINPENLTVFMESTGTYHLPVERYFKENGFNTLVINSLTTKNNFDTIRKTKTDKKDCYRLAKLFFVNEVEYHEISKKDLYANLKAMTRQYFYLTQVNIRCKNRYKRLINICFPEFEGFFARNRIYEDTALNFIKAFPHAYIVREKRIDALYNNLRKVDARHDYYYKRLARQLKDTAMDSFPGVDKDHADVKNLSDMASILQENNRLIDEIRKNMIELAKQSPYFEIVNSFYGIGEVLAAELLGELGDITRFDNHKQLIAFCGLDPAIVQSGKSINVHGAISKRGDKYARWILFNISQMVVKLGHQYPSHPVYNYYLIKKAEGKHYYESLTACSTKILRMLYSMCKNNKRFLEE

SEQ ID NO: 376718 - protein, 416 aa, unidentified
MRESSLSNSDNSAAGGYAIWCGVDVGKSEHHACALDRNGKRVYDRPLPNDEAALVAVLTGLQQHGKVLMVVDQPAAIGALAIAAARSLKIDVGYLPGLAMRRIADLYPGEGKTDARDAFIIADAARTMPHTLRRVGTDDETLAGLSVLAGYDDDLAAQTTRLTNRLRECLLHIHPALERLLGKHIDRLGVLDLLAAAPTPAALRDLSPEAMTELMRARSPRLATSLPAKILTALDTQTLTVPGTTDFGRVITGVAAALRDTHLERAALAADLEARLEAHPLFTVLTSMPGVGFRTALKILTIVGDGSAFPTPGHLAAYAGLAPVTRKSGTSIKGETRSQRGNHALKSALFLSAFASLGDPASRAYYDRKRAGGKRHNAAIICLARRRVDVLFAMLRDRQPYHHPALPTTNTATPAA

SEQ ID NO: 376719 - protein, 449 aa, unidentified
MTSIATNELAAFIGLDWADAKHDICLQVAGSDKREVKVLEHRPEVIEAWATALLQRFEGGPIAIALELNKGPIVEALRKYDGFVLFHINPMMLAKYREAFTPSRAKDDPTDAELQLDLLLRHRDKLTPLAPQSPEMRALAQLVEHRRRLVGDRVRMTNRLTSTLKNYFPQVLKWFPNKETILFCDFVTQWPTLKAAQLARRSTLERFLRQHHVGGAQRRHERLEAIKSATALTTDEGVIIPHALMAQSLVTQLRMTLEAIEKFDHAIAERAQSHPDFALFEALPGAGPVLAPRLLVAFGEQRERYGSAGELQQYAGIAPVLERSGKQCWVHWRCQCPKFLRQTFVEWAAESIRFSFWAGAYYEQQRDKGASHQAAVRTLAFKWIRIVFRCWQTGTPYDESVYLAALQRRGSSLISNLAQSSEKGEKEQKTPRQTTSGHVSQQEFLIHRA

SEQ ID NO: 376720 - protein, 367 aa, unidentified
MIVNEVAKNVEKIISIDTAKNSFQVLVVNQKTGKKKNTKVQRSKFVEYILKHGPCLIFMESCSASQHWARLFESFGFTVKLIAAQHVKAFLRNRRVKNDERDAEAIYTCGIQPDTKFVRIKTVEEQTVALLHTLRKAAVSQRVELSNRIRGILAEFGIVVARGKGSFNSEIEALFNECEKIHDVYLRAAISSLFEDYHRLEQREKELSEKIESLNKDNELVKIALTCPGVGPLTASAIVAEVGDASQFRNGREMAAWNGVVPSQHSTGGRSTLGGITKTGNRYLRTLLAQCACAVIQKASRHLEQGKDTHLDRFALRLKLNGKPAKKIMIAVANKIIRILWAMLTQRKTFKNKADETSDISAELQLA

SEQ ID NO: 376721 - protein, 379 aa, unidentified
MVENITHVALDDHKKRHQVAVLLPGIDREEAVTWRIENTRAGIRKMVRKVLKMAPGDVRFCYEAGPNGYVLLRQISEFDRVSCVVVAPSKTPRRSGDRIKTDRRDAKKLVGLFRAGELKSIVPPLKEEEAVRDLCRCRKAAQKRVTASRHQVDKFLMRNGYVYRDGKNWTRRYREWLRSLKFDDWRRERTFQAYLFGIEQDEDRVKRLDVEIVRVAEEEPYRTLVGFVRCFRGLDTLSAMILTSELYAIGRFTTAPSLMGFVGMVPSEDTTGWDPHRGPITKAGNEHVRRILVEAAKHYRHPARVSKALTQRRKGQPDWVIAIADKAQTRLHQKYWRLVMGKGKHPNVAAIAVARELVGFIWAVLIQAATTTNVEELVA

SEQ ID NO: 376722 - protein, 314 aa, unidentified
MTMHCTVIGIDVAKDSLSLYHADQDQAGTLANEPRAIAAWLRGLPRECSLAIEATNTYHVAVAVLAHKRGHRVYMIDGYRLSNYRKGIGGRVKNDLCDARLLARYLSHEQHQLQPWSPPGRAYRKLQALLHRRATLVRNMTALRLSFAQDRQMKATLDTVLQSMGELERKLDQALQETLDEAGLAAQARRCQAIEGIGPISAAALSLAFLRGTFRSSDSFIAFLGLDVRVRESGRYIGRRKLTKQGDPEIRRLLYTAAMAASRTVAWKDCYQGYLQRGLKRTEALVILARKLARIAFAVMRSQKPYRPRVATAN

SEQ ID NO: 376723 - protein, 346 aa, unidentified
MDKVLYAGVDAHRTATHITIVDDAGKVLTRKRVSSSSDGLRSIFGNYNEPIKAVVEATYNWGPVYDWLDEIAVEVILAHPTKVRAIAEARVKNDKIDSETLAHLLRADLIPVAYAPSKETRAVKRVLRQRTFFVRVQTMVKNRVHALLTQHAITRPDVADLYGKAGLAWLQQLPLPEPDSQLWRDDLSLLATLRERIIATDRLIAQLAQGDEIVTWLASLPGIGPFLAVLVRYEVDDMTRFRSAKKFTCYTGLIPSTYASNTRVYHGSLTKQGNRWLRWAFIEAVGPALRASSALRRYYDQIKARRGAHDARVCTARKLAELAWIVWTERRCYEERPVQATEKAAS

SEQ ID NO: 376724 - protein, 327 aa, unidentified
MEQRVLGIDVAKDTLDVALSDGVRLNYGQFSNTQKGHEELERWLRKHSAQSIHVCLEATGQYGDGVSEYLFTQGFSVSVVNPARIKHYANSKLRRNKTDKADAQLIAEYCIRENPAIWTPPPASFKELQTLVRHLDDLQGAFQQESNRLQSGVHTAFVVNSLSSICNFLEEQIKQTKKAIQEHIDQHEELKRMQDLIVTIPGIGKLTAAKLLGEIRNILDFQSARQLAAYAGLTPRNFLSGTSVHKKTRLSKTGNANLRKSLYMPAIVSIKCNPVIHSFCERLTRSGLLPMEVIGAAMRKLLHLVYGVLKTGRPFDPNYLASLQVPS

SEQ ID NO: 376725 - protein, 465 aa, unidentified
MSKLRKRNRARSSQGETRPFEGMRQVHPHAAGVDIGAHEIVACVPDGDDQQIVRTFGTDTVDLQTLADWFVDRGIQTVAMASTGVSWIPLVEEREARGLPCCLISAQSIKRVLGRKSDVLDCQWIQTLHSYGLRAASCRPAADLVALRTLLRHRAQLLEHRAPHVLHMQQALLQMHSPLSHALRDITGATGQRLIRAMVAGARAPQHWAALRNDRCKKDAHEIAMALTGTWREEHLFVLTQALALFDFSTTQLSACDAQVEHAFAVITPHFESTAAASVPARAAVPPRRKPHSPSKNAPEGNTRAHILRITGVDLVAVHGMSDSLAPTIVAEIGTDMSQWPDDTHFCSWLGLAPNNDISGGKVLKSRTMKNRNRAAQAFRMAAQSVIRSHCAFGAFYRRLTGRLGPAQALVATAHKIARTVYHMLKHRVPYYDIGAAEYNKRFREREMHSLQKQAAKLGYKLSPG

SEQ ID NO: 376726 - protein, 345 aa, unidentified
MKQYAGIDVSLEYSSVCVVDADGRIVREAKLLSEPDALTAWFAEHGVAMERIGLEAGPLSQWLYAGMAKTGLAVELIETRHVRAAFKTMPVKTDKKDARGIAQLMRLGWFRPVHCKSLAAQEVRALLTARKLIQGKLHDIEMSIRGILRGFGLKVGPTTRRTYAARICELIEGHPTLEAIAASLLKARDALADEFACFERKLRVIARQDDKARRLMTTPGVGVLVALTFAAAVDAPERFRTSRAVGPHFGLTPKKYQSGETDYSGRISKIGDVGVRTALYEAANVILTRPVKGSDLKTSALAVARRAGPRKARVALARKLAVVLHRMLRDGTNFLPRKAAPAMAG

SEQ ID NO: 376727 - protein, 405 aa, unidentified
MAYDWFLGMDCGATAHAGCLLDANGRVVLARVVAHNAAAITAFFAEILQVTHAEASRIAVGLEVPRGAVIDALFERGFAVFAINPKQLDRCRDRYTAAGAKDDRRDAWVLADVLRTTPNAFRRAIVDDAWVVEVRELSRLAEELEADVRRLANRLREQIHRVAPALLALCPAADEPWLWSLWDRAPTAATRRRLTVSRLITLLQRHHVRRVTASELRTVLMTADFPLPAGLETAVGARIAALLPQLRAAADQRHQTHRRLKRLLAVDDEQGEHPDVRIVRSLPGVGTLVAAAVLGEASEPLRARNYHTLRTLTGAAPVTKQSGKMRLVHMRYCCNPRLRQALYHWARCSIQRDDGARAYYARLRQRGISHGAALRRLSDRWLRILIAMLRQQSVYDATRWCASAA

SEQ ID NO: 376728 - protein, 328 aa, unidentified
MKLQHIIGADLSKESIDLFSHEFQAHLKIENSFKGFRQMLKWLRDQKISCSNVMIVMEHTGLYSYHMEAFLHKRQISFTKVSALAIKRSLGLVRGKNDKIDARRIARYGFEKKDVLVVTSKPDKAIERLRMLHSTRNRLVRHRASLICAIKEYKNILKQSDLIIKSQLSLVKSFTGQIKKIEAEISQLITKEQLVNQNFQLLKTIKGVGKVVATAAIIKTRNFTQFSNARKFACYCGTAPFEHSSGKTIRRKTRISHLADKEMKTLLDQSAKSAIQYDKELKSFYQRRIAIGKSKKSTINIVRNKILYRMFAVIKRQTPFIENYLKTA

SEQ ID NO: 376729 - protein, 390 aa, unidentified
MTATRLTDSIQITSASLYLAFELGWNEWKLAFTTGLGQAPRMRSAPARDCQAVLAEIARAKERFGLPPDAPVHSCYEAGRDGFWLHRWLLAEGIDNLICDSASIEVNRRQRRAKNDRLDAAKLVTMLCRYHGGDTKVWSVVTAPTAAAEDLRQLHRELLSLKEERTAHVNRIKGLLASQGLAVVVIDADFPEVLPGLRLWDGSPLGPDLTARLVREFERWQFVDRQIRDLESDRRRRIRCDETPQVDKVRLLLGLRGVGLAGAWMLVMELFGTRANLNRKQLGALVGMTPTPYQSGATAREQGISKAGNRRLRTLMVELAWCWVRHQPDSDLTRWFHRRFGVGKRSRKVGIVALTRKLLVAFGRYLDRGEVPKGAKLCSWRTKINGRTAA

SEQ ID NO: 376730 - protein, 429 aa, unidentified
MNYTQNEKIEQVTDSTLVIGIDIGSQTHYARAFDNRGRELTRKVFSFGNDIEGFNTFNQWAENIKTEKNKTKVMIGCEPTGHYWFAFAKYVGEHDKTLVMVNPFSVKKIKELDDNSPKKTDAKDPKTIAKLVIDGRYSIPYMPEGIYAEIRDLVYSRDRIVKQHNISANRIQRWLAIHFPEYLGIYTRFDAASGLAVLEKAPLPKDVIALGVSGIRKIWHDKKMRGRGVTEDRAKTLVEAAHNSVGLDGGAGTRSELYMLLEEHRLWISQLEAVEKAIVQTVLKVDHVEKLLAIKGVGVITIAGFIAEVGDIRRFKSPKQIQKYAGLELVENSSGKHKGRSRISKRGRRKLRRILYQVMIPLLASNKEFRGIYDYYVTRVKNPLKRRQAMIAVSCKLIRVFYAVLTKGMDYDRFKMMSDIHRNSELIAA

SEQ ID NO: 376731 - protein, 315 aa, unidentified
MQKLLNIGVDVAKDAVVVGCNEQGSAVRSIPNRRTALTVWLASLPKPSRIGMEATGCYHELLADLAYQSGHTVFVLNPKDTRHYAQAVGLRAKTDRVDALLIARLIAHEHARLHPYHPATCAQRQLGRLLRRRAQLVKLKGALRQSMKGMTGLARDTSALVAQMDALIAKLEQGMDTLIASMPGPQEDRRKLETINGVGAVVSAALIEPLTRLPFRSSDAFVAFTGLDPRPRDSGRKVGKRRLSKRGPAELRRLLFNAAMAATRTDVWKPIYEHYRAHGLPATAALVIIARKIARIAWSIHRYHTSFDPQRLKTP

SEQ ID NO: 376732 - protein, 413 aa, unidentified
MSGKVAGIDVHKKVLMVVVLDRARVDAKPERRRFSTLPGELQRLRVWLGEQEVAEAVMESTAQYWRSVWLELEAHMSLHLAQAFSNRAPRGRKHDFKDAERLGRRFIAQELILSFVPEGEQRVWRNLTRMKLQMVRDRVRLHGQIECLLEEMRIKLSVVVTDLFGASGLRILHALAQGETDAKSLASLGDERLRCSEDQLIEALTGRSHPLHRQMLALQLQRLGQLDEQITTVNTLIAQAMKSHQDAVIRLAEVPGFGVDSAQQVIAEVGPTAATFPSAAEFSSWVGTCPGKEESAAENRSSRSAKGNKYMRRILNQAAHAAAKAKGTSFQAVFRRLLPRLGYQSAIWAIAHRLCRLVWKILHQGVSYLEKGTALEPKLLIHRAKYLARQLRKFGYDLNVTATYSASTITLTS

SEQ ID NO: 376733 - protein, 412 aa, unidentified
MEVLHPRCAGLDVHKETVVACVRIASGGEVSRAVRTFETTTARLIELAEWLEANGCTHAAMEATGVYWKPVWQVLAAGGFELVLANAAHVKNVPGRKTDVNDATWLAELLAPGLIRASFVPGPEIQELRGLLRTRKQLVREKASHVQRLQKTLEEANIKLESVLSDVMGRSGRAMIQALIAGETDPAKLAALAHPKVRAPQARLREALRGRVKRHHRFLLDLHLQQIDALDAGIAAIDREVDAGLASFRDAVKQLSTIPGVSQLSAQVILSEIGIDMSRFATAAHLRSWAGLCPRNDESAGKRRSTRLRTGAPWLKATLVQCGWAAARTKATYLNAQFVRLRTRRGPKKAVCAVAASILTAAYHMLKDGTFYQDLGATHFDRRRPDAQARRLIKRLADLGFSVQLKPVVAVS

SEQ ID NO: 376734 - protein, 407 aa, unidentified
MEVLYPRCAGLDVHAATVVACVRIASGATVTYEHRTVSTNTRGLLDLVDWLTAQGVTHVAMEATGVYWKPVWHVLEGHVTLVLANAMHIRNIPGRKSDKNDATWISDLLALGLIRSSFVPPAPIQELRDLTRTRKQLVRESARHTQRLQKTLEDANVKLTEVISDILGTSGRAILTALVAGETDPERLAGLTSGRLKATRAELVEALDGRVTAHHRFMLNLHLTQIAALDTAVAAVEARIREALAPFRAAVSLLKTMPGVSDTAAAVIVAEIGDDMSLFPSAGHLLSWAGLCPRLDESAGKRRSTRTRHGAPWLKTTLVQIAWPAARKRHSYFQAQFLRLKTRRGPKKAIVAVAASMLTDVYYMLRDGVEFHDLGDQHFTQQDKARLTTRLLKRLRDLGVEVEVKAA

SEQ ID NO: 376735 - protein, 352 aa, unidentified
MQHFIGCDVHTRNQVVAWIDEETGEIKKRRLEHAGEEVRKFYAPFPRGTVVGIEATFPAYWFERLMGELGHELWVGDAARIRASDVRYQKTDDRDAEDILDLLRTGRFPRIWVPSLEERDLRQLLVHRMKQVRARTQVKNQLHALAISQGVCRKRRLWSAKGRKELESLALLPWAARRRKELLETLDRLDEQIRELDRAVEEAGRGRPEVALLRTHPGVGMVVSLAFVLTLGPVERFANSRKLVSYWGLNPSEDSTGGRQRLGSISKQGNTMMRWLLVEAAQTAARLDPQLRRTYQRLKRQRNSGVAKVAVARRLAVRLFWMLRTRHNYTQLVHMSGSPSSAVVPPQGGPNL

SEQ ID NO: 376736 - protein, 427 aa, unidentified
MNHTQNEKIKQVTNDTMVIGIDIGSEKHWARAFDNRGMELSKKAFGFNNTAEGFTSFETWYENQRRAAGLKRIIVGLEPTGHYWFNLNQFLSENGVRVVLVAPQHVKHSKELDDNTQRKDDLKDPRVIAKLVTEGRYFLPYRPSGVYADLRDGFNRRCGIVESMTRAKNRLHRWFSINFPEYMHAYGSVTAKTGLMVLKKAPLPKDIVALGVEGIEKIWRDAKVRGAGKKRATTLVALAEQSIGEKTANEAARLELWQLLEDYEHFAHQFEVIEEMLMRKVHEIPNADKLLQIPGIGYFTVIGFFAEVGPIERFDDPKQIQKLAGLSVVENSSGKRKGLSGISKRGRDKLRWVLYQAAMSAVKNNQEFKEIHLYFTTRKDNPLKKMQSIMAVAAKIIRVFYGMVRTGSDYDVERLMRDIRRPEKAAA

SEQ ID NO: 376737 - protein, 387 aa, unidentified
MAQQLDDLSRSPTPLDQDSTIIAVIEMSQATWLVAGIVPGIERHPLKKIEPNEVELLCLLMRWRAEAMKKGRTITRIVVAFEAGRDGFWLARWLRVRDIESYVIHPTSVAVSREHRRAKTDRLDTGLLKRVFIGWLRGEPDHCHMAAIPTLAEEDAKRPNREREGLVRERTRLVNRMKSCLVRFGVRTFKPTLRNAPDRLATLHTPEGVPLPPNTLLELRRDMARLRFVMDQIKEVEAARAQGLKQAPQEKTHAMVNLLARILGIGIDTADMLVHEVLARNLRDRRAVARYAGLTGSPDESGSRRREKGLAKAGSARVRRGMIQLAWRFLLFQKESALAQWYRARTADARGGTRKTMIVALARKLLIALWRMLTTGEVPAGVVLRAA

SEQ ID NO: 376738 - protein, 450 aa, unidentified
MSPLALDVVTKTDKTPVLGRMLSKYVGRKTSSIENGITKARNHSRQRGNIMRVVFGIDVSKASSEVAILVNGEKVHGYTIPNDAIGFNRLLGDLKTVHEPEIIFEATGVYSRRLQAFFEDNSYAYTRLNPLESKKQLDSLRVRKTDKIDAEKLAASQFILNRKPSYVQEALYQELRDLSRFYQNLTEDIVCAKNRLHKVLQVTFPELENILSAPTGEQYWNLVMTFPCNSFVLESDDATLTAIIRQSTAKRISEKRVTYLVDKLTKLANQSYCAVKKTSPVIEEVKYYAGELLRLSEHRQGVLEEMVTLAQSLPEYEILLSIPGIAETTATSIIGELGDIRRFHSANQINAFIGIDLRHYESGNFLAKEHITKRGNPYARKILFKCIHNIASASHTNPCHIADFYEKRKRQSQVTSTKPHTIASIHRLIRTMYYLITHNKLYDYTSTQNR

SEQ ID NO: 376739 - protein, 312 aa, unidentified
MEATTVEFEQVVSLGCGIDVHKKMVVATINGKGLKQETREFATFTSSLTELKEWLLEKGITHVAMESTGVYWKPVYHVLEPSGIKIWIVNARHIKYVPGHKTDKKDSKWICKLLLAGLLKPSYIPPKEQRELRDLTRYRKKMVQQVASEKNRIVRILEDCNVKLSSVLSDTSGVVSTKLINILCEGKKVTMQEIDQVYHKKLQCTKEDLYEACNGVITEHSIYLLQMVQDNIATTQKCIEKLNQRIKALLSPYDNVLELLKGVPGLSTKSVEDLVAEIGLDMSVFPSEKHLASWAGISPGNNESAGKKKVDE

SEQ ID NO: 376740 - protein, 364 aa, unidentified
MHYVNNTELSSHEETRSQFNGGRGAIKLGIDVHQDFYVVVEQVGGSNPKPPQRFQKEAFLHWAARLKRKSGAEVHAVYEACGFGFALQRKLSALGIRCYVVCPQKLDEHNRRVKTDGLDAKALCLRLDRFVQGNRAALAIVRVPTEEEEQLRAIHRQREQLVKARKQLEAQGRSLLVNHGLEPVQSWWKPRTFAALQVSDWIKELLQNSQPILIALQEKISTLTAQLQSAATPDQPRGLGKMTSVIIDREIGDWKRFSNRRQIASYTGLCPGEYSSGNSRLQSCVTKHGNPRLRAALVELAWRLVRFQPNYKPIRKWNATLRKGALDTGAARKKAIVAVARQLAVDLWRIKTGRLRAEELGLIN

SEQ ID NO: 376741 - protein, 387 aa, unidentified
MIYFIGIDISKYKHDFCIISNTGEVIVENSSFENNQKGFQTLIHLLEPYNKQSVRIAFEATGHYSLNLELFLTNQGYSFMKMNPLVVHNYLKARSLRRTKTDKADSKTIANYLMSVQYIPNSTLLYHTYTLKQLCRSREALIKERSKIAVLLTNQLDLTFPELKVFFNNNFSTTLLYILEKYKNSSHIALMKDYESLRKVSHGRFSYAKFTKLKELAKNTVGYHDENTDLLISTYISLYNELSNKIDPIDKQISTIIKELNPRILSIPGIGVISAATIFSEYGDINNFSSPAKMLAYAGLEPSINESGTLQSNGKMVKHGSGHLRYALMNIAMIILRHSPCFYDYYLKKRSEGKCHRVALSHVCKKLIRVIYSLEKYNHIFDPSLLK

SEQ ID NO: 376742 - protein, 333 aa, unidentified
MPQSRTRSVGLDVHKDSLAVADAAQDHGAAVVALGNLGTRQRDLDQLVRRRQSQSPPLVLVSEAGPCGYWLSRSLTTKGHACWVVAPSLRPKKAGARVTTHRRDALKLARLMRSGALTPVSVPAVEDAAMRDLCRARDDVIRALQAATFRRQAFLLRPALRSTGPATWGPAHRRWLREVAWPTPAPQSVLQEDGPAVTAPTARLERLELALHDPVQPGRLAPVVDALHGLRGVQCTIAVTTVAARGDLTRFEHPRPRMRYLGLTPAAYSSGARRRQGGMTQTGHSQARRALREGAWASRSPAKVRRHRQLRLAKLPKPIQASRGQAQGRLGNR

SEQ ID NO: 376743 - protein, 335 aa, unidentified
MATLVLGVDMSKASFAAAVWQEQQAQELAEYANESAGFVQFQEQVTTVAQRQGASTVHLIVEPTGGYELPLVGFAYAQGWQVSLPNPRQVRDWAKGSGKRAKTDRMDAKVLAQFGAEKHPPAQPPLATEVRELDNLLARRQDLGQMLRQEQNRLGELKGRPGVPTSVHQNLQQVIEALMQALREIEQAIAQHLQQHSYLQQAAERLQALPGIGPKTVLPLLVLLARWDTLTGGQGTAKGLTALVGLDPQPHESGRSVRKASTISHMGNAELRRLLYMGALGGVRGDNPLRLFYQRLVGRGKPKKLALVAASRKVLTWAIFSTNTDWNPALLATCC

SEQ ID NO: 376744 - protein, 366 aa, unidentified
MKIIHWIGIDDHADKWTIAQYKGNDEKPAKEFELVPDETGYRKLIKFLKELDGEVRIVYEAGPCGYELYRRLKKAKLQCDVAAPSLTPRKPGERIKTNRRDAAKLGKYLRSGMLTLIAVPDERRESLRDLVRARHAVQKDVVSIRNQIVKFLLRYGHRYRQGKTGWTERFWAWVGQIKLEGEHGQFVLDEMIRTHTQRLERRKRYDEAIEAASKQPEYAPYVTALSVLRGIDRLSAMTILSELGDLRRFPTAPQLMGAIGLVPSESSTGDTTSRFSITKTGNAHVRHIAVEAAWQYQRRITTGPTIKRRRKDQPKALVDIAEKCDLRLNRKFHRMTSRGKRSTVAAVAVARELMGFIWAIGQIIHP

SEQ ID NO: 376745 - protein, 346 aa, unidentified
MNSVGIDLHRNRSQIAVIDSNGELSLSRRIVNDRATFLELLGGLVGESRVAVEATYGWEWLAELLEDAGYEIHLAHPLRTRAIAAARVKTDAVDARTLAHLLRADLLPEAYVAPRELRDLRELLRHRIALTGMRSALRNHVHAILAKHGIARQHSDLFGPGGRRFLAELQLREAPRRRLDSLIALIDDFDREIAQTTAEIEQRAKADDRVDVLTQIRGVGRYTAMLIIAEVGEIGRFPDARHLCAWAGLTPTVRSSDGKARLGRISRQGSPALRWALVEAAQKSTTGGGPLRESFERIAKRRGRKIAKVAVARQILTLSYYGLRDGEIRCLARRSRASAKEKLAAA

SEQ ID NO: 376746 - protein, 347 aa, unidentified
MVTLGTDSHKQSHTLVAVDENGRQLGELRVAATSAGHREALGWARQWRERGWAMENCRQLSRGLERDLLVAGEQVLQVSPKLMGTSRRSGRQLGKSDPIDAMAVARVALREPNLPVARLEGKSRELKLLVDHREDLVGERTRIQNRLLWHLHELEPGLQIAGGGLTRRVVLKEVGRRLQAHQGVVSEIAGDLVERLAELTMSVNRLQRRIEVLAGELAPSLVSLPGCAGLTAAKLMAETADVRRFHSSAAFAMHNGTAPIPVWSGNQQRHRLNRGGNRQLNVALHRIAITQIRLGGEAGAYVARRMSLGNSKTEAIRSLRRQLSDEVYRRLRLDRLERLAVPTTAAA

SEQ ID NO: 376747 - protein, 314 aa, unidentified
MEAPVAGIDVSKDKLIMYFQGKLYEFPNDRQGFEEIRKILPKGCKVGIESTGVYHVNLAKYLNNEYDVRIINPFILKKFKDFRGKKSDKNDAKKLAELVVSMGSGFTTSDARELTSQWDFVTRSIARVKNRLRRDLVLLGYRDSLSKKNLEEVLRGGDSVVLSEVRFLLEELERLKTRKREIEKELENVVSKDSLIFTIPGIGKTLGCIILARVGDVRRFSDKKRFVAYCGLVVESSGKSVVSRGISKKGDAVLRRAFYLAALTAIKVNPVIKRFYEEHKGRLKGKKLITACARKLAVITWAVLYYNKPFDASE

SEQ ID NO: 376748 - protein, 459 aa, unidentified
MSKLSQLNPSLSQARPFASMSRVNPHAAGVDLGAHEIMVCVPGDQSTQLVRSFGNYTADLQAIAAWLKAHHIETVAMESTGIYWIPLFETLEAEGFRCHLISARSLRRIPGRKSDVLDCQWIQTLHSYGLLESSFRPEADLVALRTLLRHRAQLLEHRAPHVLHMQKALLQMNVQLSQVLSDVTGQTGQTIIRAIVAGERDPHKLAALRNYRCHKDEDEIAKALTGTWREEHLFVLKQSLEMFDFYTRQIEACDAEIERVYHTIRPKGDGSDDDDPPHIPEHKRKSHSKNAPKGGAIRQHLKRICGVDVTAIHGLGEVLAQEIVMETGTDMSKFPNEKHFCSWLGLAPKNEISGGKVLRSATLKTRNRAGQAFRKAAAAVMRSDCVFGVFYRRMKARIGPAQAAVATAHLIARVYYRMLKDKVEYQPLSVEEYETRYRQQQVRYLQKKAARLGFQLTPA

SEQ ID NO: 376749 - protein, 450 aa, unidentified
MSRPQVIDDTEHERIHDKVAAIDVAKDSGVVCTRIPHPSRPGTRQSRIWTVKARMGTVRALGRQLKRDGIEKVTLESTSDYWRIWFFVLEAAGLAVQLVNAAQAKSLPGRPKTDKLDAQWLARLTELGLLRASFVPPKPIRDLRDYTRARTRLVQERTRCFQRLEKLLEGALVKLSSVASKLTTVSAQDMIKAMIAGQRDPEVLAGLARTAMKARHDDLVAALDGMFDDHHGELAALLLDQIAGLDARITQLDDRIRQAVTAMPAAWGVDADGTTGPGAGTGPDAAALPAVTRLARIPGVSPDLARAIIAETGLDMTRFPDAAHLVSWAGLCPTARQSGPRTRAGTKGQGNTWLRGHLGQAATGAARTTTFLGERYHRIARRRGKTKAQVAVARSILVIIWHLLADPAARYTDLGPGYYQARTDKDRRIKNHIRQIEALLGHPITITKAG

SEQ ID NO: 376750 - protein, 342 aa, unidentified
MSEYVGFDVSEEETSFCVKDVSGKILARGKVATDPVALFEVLRAHCVCPERIVLETGTLSGWLSRELGKLGIAVEVIDARQAHAVMKLQHNKTDANDAALLAEIARTGFCRPVCVKSEAAQADRILLKARAHLVGQRRATQNTIRGLLGSLGIRFAKGSGKLAGLVREALEGRDELRATIDPLLRAAAALEREIARLDKAVSGRAKDDPAVRLLMTVPGIGPVTALAFAATIGDAERFAKSRTVGAYIGLTSRRWQSGEMDYSGRTSKYGDAMLRALLYEAANSLLTVVRKAHLLKDWARRIRKRTSHKKACVALARKLAVILHRMMITGEPFRWPQKEAAA

SEQ ID NO: 376751 - protein, 423 aa, unidentified
MFKIFRKNCCGLDVHKTWIYACIGITDENGRTSYHRARFSSFSKGLRELADWLAKYDCTEVCMESSGKYWIPVFNILEKTCIVTLSHPKYTKPLKGKKTDRKDAKWICDLFMCNMVEPSFIPPPDIRHLRDLVRYRFKLTNIITGEKNRALNCLTVSNLKLDDVFSDVFGKSSMSITKHILDHPGEQFNVAPFVNRHCKHPIEEIQAAVEGSISQEQAVKLREILSHMDQLEVHKQNIESEMLRIAEPYIHQLDLVSSAPGFSANPMTAIAIISEIGVDMSVFPTAKNLSSWAGCCPRNDQSGSKRKSTRISRAGVYLKPLLVQVANAIVKSDKYPEFRDRYRRIKSRRGHKKAIIAICRMILTAIWNILSKGEPYSPQGYLVDRFIPKGDFWLTRAQALNYMRAKGVFIFDDKDDSTSEAPA

SEQ ID NO: 376752 - protein, 397 aa, unidentified
MACVRKPGPSGKRRAQEVREFRTWTASLRELRDWLAAEGVSQVAMEATGVYWKPVWHVLVELDAGLMLCNAHHVKNLPGRKTDVADAVWLCQLLECGLLRGSFVPPTEIAELRDLTRYRTKLVQDRARETQRLQKLLEDANIKLDSVATDVLGKGARRMIEALIAGERDVETMADMAMTRMRPKIVDLRLALEGRFTGHHALMATLHLRHVDELTELIDQIEEEVDRRTAPFADEARRLQTIPGIGKRTAEVIIAEIGVDMSRFPTAGHLASWAGLCPGNHESAGKRRSGRARKGNAALRTALCEAAWSAARTRNTYLAALFRRFSRRFGKKGEGKAIFAVAHTMLVIVWHVLHDEVDYDELGADYFDRFTDNEAHARRLVRQLEQLGHRVTLEPAA

SEQ ID NO: 376753 - protein, 346 aa, unidentified
MNQIIRIGMDTSKHFFQLHGVDAAERPVLRRKLRRHQVLAFLAKLPPTVIGMEACGAAHYWARELRKLGHEVKLMAPQHVKAYVKRNKNDGRDAEGLCEAMSRPTMQFVPVKTEEQQAALMLAGVRQQLITRRTQLSNAIRGYAAEFGLTVAKGLDKIELLLAQVAQDETVPEIARELFAFHGKDYARLQIDLKTIEAKLMAWHRADATSRRLAQIPGIGPIGATALVMKVPDPRLFRSGRHFAAWIGLTPKDHSTAGKTRLGKITRAGDEMLRSVLVAGATAVIQQARRGRGRPSPWLVALLARKPPKLAAVALANKIARIAWKLMTTGESYDGMRMPGASAFAA

SEQ ID NO: 376754 - protein, 387 aa, unidentified
MARKRTLSTLDTSIAYEAVGLDLAKEDTAIAAFGPDHEGPYLIDRMPYDKLYELLADMAPTLVAMEPCSGAHQIAEQIQELGHEVMMISGRHVQAWVKDHCNGQKTDLNDAFAILNLAYDRWLTPIRGKTREECRLLALQASYRQLKGQRTKTMVHVKATLHAWGFPIRAGSFNQKVLHELIDANREAFGDEVAETLHLMINRVRDLDHDIATVLKLLTEATKRDPRASLLRSIPGFGVLTTSRWCAVIGDIARFDFPKQTMAFIGLVPNNRITGHHTETSSGREARGQGRMSKRGDKMLRSLCIMGAGSLCLMVRNDRLPDCPFVASIKERLASPRPWFKVLVYVAAKLVRIATALLKYGETFSFEKAGISKAVLKQWELEQAKAA

SEQ ID NO: 376755 - protein, 347 aa, unidentified
MKQVSTIGLDLAKHIFQVHGAGADGSPVFNRRLRRSEVLHFFSKQPACLVGIEACGSAHYWAREIATLGHEVRLIPPAYVKPFVKRGKTDAADAEAISEAVTRKTMRFVPIKTAEQQAGMMVLKSRALLVKQQTQTINALRSHLAELGIIAAAGRTKVEALVAIVRDVADIRLPAAARFALTAIADQIEAQADQIDKLERAIVAAARTDKDMRRLTTIPGIGAITAATIKALVPDPGGFKSARHFAAWLGLTPRQHSSGGKERMGRISKMGNPELRSLLVLGATSVLRIARKADRAPPWLKSLLARRPYKVAAVALANKTARIAWALLNRGGIYRHPETLATTTAAA

SEQ ID NO: 376756 - protein, 411 aa, unidentified
MRYYLGVDWADQTHAVWVMEERGTKITARTVPHTAEGLSEWGRELDEWRAQGIERWAAIERPDGRVVDFLLDHGVVVYPVNPKALDRARDRFRQSGAKSDPFDARVLADFLRTDHAHLRALQPSSEAAQELTRLTEDYQRQVRQQTRLVTQLTATLKAYYPRALEGAELTTVLAREFLQAYPTPDAVAALTARQWRRWARAHRLSEARTQELWAILQPPQRPVPAHVVRAKARLMRTLVIQLGPVVAAVEDYRKAVEDFFASLPAAQWARTLPIGDHGITAPTLWARLGDAPERWASFQHLQAHAGAVPVTKRSGKQQRVVHFRFACDTAFRYVVDPVAFLSLRSSEWARAYYDQQRARGHSHHQALRALGAKWLKIIFVLWERQVPYDEQYHLATMTRQQLRQQRQKKIA

SEQ ID NO: 376757 - protein, 347 aa, unidentified
MNYYAGIDVSLEASSVCVMDASGKIIREAKVLSEPENLIGWFRDLGLEMTRIGLEAGPLSQWLYAAMKEEGLAVELLETRHVHDAFKAMPVKSDRNDARGIAQLMRLGWFRPVHCKSMPAQEVRALLTARKLVQSKLFDIEMSLRGILRGFGLKIGRTTPNRFGLRVEELVAGHPTLEIIGKALLAAHEVLLREFNGFEKRVRQQARQDKRVRLVMSAPGVGPIVGLTYVAAIDDPARFKSSKQVGPHFGLTPKTYQSGETDYSGRVSKIGDASVRTALYEAANVILTKPLKGATALKSWGMKLAKRAGMAKAKVALARKLGVILHRMWVDGRKFADKGISPMPVTA

SEQ ID NO: 376758 - protein, 365 aa, unidentified
MTEITRAPVARVGVDLSKRVYQVHAVDRAGRVMLVKAMPPQRFFEWCAQLPAGCVVAMETCGGSHHVARRLQGLGLDVRLIAGHFVTPYRMAGKSGKNDANDAAAICEAASRPHMRFVPIKTAQQQGQLALHRLREGYKEERTALINRVRGLLAEFGLVFPKSPEALRRVLADVVEDAANELPGLARLAIQRTHEHWIDIELQIAWCDDRIAEHVRADERAKKAAALLGVGLVTASAIAASVGDFKQFANARQFGAWLGLVPSQNSTGGKASLGRITKRGDDYLRTLLIQGAKSAVMTAHKRSDRISQWLVQLKERTSWQKAVVALANKNARILWAVLTRDAAFDPDHVPPVPAARISPKLQPAG

SEQ ID NO: 376759 - protein, 370 aa, unidentified
MKKRITFVGLDTHKNSIEAALADDGRNTEVRLYGTIGGDLASLDKMIRKLQTTGVELRFVYEAGPCGYEIYRHLRAHGLHCDVVAPSMVPKRSGDRIKTDRRDARNLARLYRAGELTAIYVPQEDDEAMRDLIRGRQDAIHAQRKARQQLGGFLLRHGFRYSGKCAWTLAHRRWMAEIKMPHPSQQIILEDYIHSVEECTQRVHRLTEQILQLMPDWRMHPLVTALQALRGVAPVVAATAVAEIGPMGRFERPRQLMAYLGLVPSESSSGGSVRRGAITKTGNGHARRALIEAAQAYSHPARISRVMLKRQEAVPEPIRQIAWKAQLRLCARFRKLTARGKSRNRVVTAIARELSGFMWAIAKQVPVPQD

SEQ ID NO: 376760 - protein, 371 aa, unidentified
MSKDSKKPVAGTGRYVGIDLGDKKSRVCILDEHGQVVSQEWVVTTPEAFSKRFLGHSKLRIAMEVGTHSRWASDLLERCGHDVRVADARQLSLITKSNAKSDQRDARMLAQLVRADPRLLSPIEHRAEQLQMDLTLIRMRDNLIETRTRMVSSVRGVVKSTGARLPNGETASFPQQVAELIPEPLRPALGPMLKVIDQLNEEIYGYDCQLEHWAQTRYVESSRLMQVKGVGTLTALMFMLTAGDKERFSRSRDIGPFLGLRPKLGQSGDNDPQLRITKAGDGLLRKTLVECAQYMLGTFGQDSDLRRWGLKMIESGNGSKRARQRAVVGVARRLAVLLMSLWKSGQTYDALRHSRGQERSTAQESRPEVAA

SEQ ID NO: 376761 - protein, 391 aa, unidentified
MSMYFIGIDISKYKHDCCIISAADQKVVSKVTIKNNKAGFNELLTIIHSLANPADIRIGFESTAHYALNLELFLENSLLTFMEVNPVLISEYKKSKTLRRTKTDSVDCESIARWLMTVEYKPHSKGFYHAYSLKSLTRLRDKLIRQRSFYLVKITNVLDHTFPEFKPFFNERLSKTALYLLENYGSAEKMARMNSASYEKLRSVSRGKFSPQQFLRLKELASNTVGVNNSIFDVELNSLLSLYKSLVKEINTIEKEINKLIEEVHPHYMSVPGIGPLSAAVIYSEYGDISNFTNPGQMLAFAGIEPGINESGTESHGGKMVKRGSSQLRYTLINCCLPLIRFDMTFATYYAKKRGEGKPHRVAITHVAKKLIRVIYALERQDIDFNAQKLR

SEQ ID NO: 376762 - protein, 375 aa, unidentified
MQGKIRFLGMDVHAETIAVAIAEPDGEVRSLGTIANRAESIRKLVKKLGSVEQLRACYEAGPTGYVLYWQLTELGIECEVIAPTLVPVKSGDRVKTDRRDAERLARSHRAGDLTAVWVPDEGSEALRDLVRAREAAKQDQLRARHRLSKFLLRTGRRPERKIKAWTGVHMTWVRQLRFEQPAQESTRLDYLHEVEHMEERVLRLEQAITEAIQLASPGMQKVIQGLQALRGIAEISAVTIVAELGQLSRFESARQLMGYSGAVPSENSSGKRTQRGGITKAGNAHLRRIVVEAAWSYRLRPGIGPRLRKRQENVPEEIKEIAWKAQIRLTKRYARLAAAGKDQRKIVTAVGRELLGFIWAIGVKAEAASKQRMAA

SEQ ID NO: 376763 - protein, 430 aa, unidentified
MKSNTQNAKIEAITEKTLVLGIDVGSEMHYARAFDYRGIEYSKKPFKFSNTEAGFVTFKEWILDLKERHEKDKVVPGMEPTGHYWFNLGKFLQDNEMKPVLVNPHHVKKSKELDDNNPTKNDRKDPKVIAGLVREGRYMIPYLPDGVYADLRTASNIRFQLQAELTRIQNRISRWFNIYFPEYKTVYGKPDAKSGMLILKAAPLPEDILTLGIDGVNQIWRDAKLRAVGKARAKTLIEAAEHSIGSKEGTMSARMEIRMLLEDYESKNMRLQEVMVLIEELVKEIPMAEKLLEIKGVGIRTVSGFLAEVGDISRFNNPKELQKLAGLAVVENSSGKHKGKTTISRRGRKRLRYLLFEVAMSLVAKNPEFRELHNYYTTRRLNPLKKMQSLMAIAAKLIRVFYAMLTKGVDYDPKKMISDIKRPTVYLQAA

SEQ ID NO: 376764 - protein, 339 aa, unidentified
MNYIGIDHHKQYSHMTIMDEAGKVLKAGNVLNIRNEVEDFLEGKAEETKAVIEAGRSSYVMVDLLKDFGVDIRIANPSDVKAIAKAKIKTDKRDSKILAHLLRTDLIPEVYARSEENRRSQRVLRHRAFYVGTMTRVKNKIRVLLSQQKLELQEEVSRVKNIFSKNGLIALGGLDLPSTDKNLLEGLLKIYGHLEERIKDSDGLVEKLYSELREAQLISTVPGFGYFFSVLVATEIADVRRFESVEKLHSYAGVIPSTHSSGERSYHGKIIKGGNVWIRWAAVEAVYPACRKDFNIRLFYDKRARRKGANTAKVATARRLLTIIYRVLKDERHYIPYRR

SEQ ID NO: 376765 - protein, 341 aa, unidentified
MNVKTIGIDLAKNVFQIHGVDEHGKRLFNKQLRRAQMASFFANIPSCLIGMEACASAHFWANKLISMGHNVKLMAPQFVKPYVKTNMHDAADAEAICEAVTRPNMRFVPVKTAEQQAVLALHRSRQSFVKQRTAQANQIRGLLAEFGIVVPRGIQQLQRRLPELVEDADNPLPVLFRTQLSLLQHHMAYLFDVIATLDKQIEQCYRQNALCQRIGKIPGIGPVTASALIATIGKANNFENGRQLAAWLGLVPRQHSSGGKQVLLGISKRGDTYLRTLLIHGARAVLQSAKHKQDAVSSWANQLMARRNNNIASVALANKNARTVWALLAKEREYCAPIISA

SEQ ID NO: 376766 - protein, 339 aa, unidentified
MTVVGLDISKHVFQIHAVDGAGGVVIQKRLRRSEVLRFFEQLSPCLVGIEACGTSHHWARELTALGHEVKLMPPTYVKPYVRGNKNDAADAEAICEAVTRPTMRFVPIKSVEQQAVLVMHRVRSVLVRQRTMMANALRGHMAEFGIIAPQGLRAVRELGRLLEDPQICVPDAARVTLRTLIGQMADLETSIREIEARLVAWHRADETSRRLATIPGVGPITASAISATVSDAQQFRSGREFAAWLGLVPRQKASGMKNVLSGISKRGDKYIRRLLISGAVATVRYSRAKPTPERIWINALLERKPAKVAAVALANKTARIAWALMVKKESYQLVPSKAA

SEQ ID NO: 376767 - protein, 381 aa, unidentified
MITAATHHEQRNTTEATLFVAFELSEKTWQLGFTTGHGQKPRERTVTARHQERVLAEIAQAKRRLGLPDTAPVVSCYEAGREGFWLHRFLQGQEITNHVVDSSSIEVNRRRRRAKSDGLDVRKLLSMLMRYAQGERQVWQVVKVPSVAAEDQRHLHRDLETLKQERASTATRIQGLLSSQGLRVTSLTKLPEPLDALRLWDGSPIPPGLRRRVLRVYAHHTFLSEQIAEVEAERRAQLQASTDTNIDKVRQLMLLKGIGINGAWLLVMEFFGWRAFKNRREVGGLAGFTPTPYQSGESAREQGITKAGNRHVRWMTTELAWSWLRFQPDSALSCWFRERFGSGGKRLRRIGIVAVARKLLIALWRFLETGVFPAGAVLKEG

SEQ ID NO: 376768 - protein, 400 aa, unidentified
MKGPIVSIDVSNGNSHFQCFTQRGTKMGKVHRISHTVEGFNFLKSKIEELEKKTNEEVVAVYEATGVYTKPLERFLEKNEIKQYSISPLQSAKQRKTEIHNKKTDKKDPESIAEVYYIKELREDEKEADLYHELRTANRVYEDCLVHLRKYKVTFQSHLSIVFPGYMKLFQDGYSQISLQLLEMYPHPDRLKNKQPEKVAKKLNKQTDHSFEVCLKTAEKAIEFANKTYPGCDKEDAWVAVLVDDIHHLQDTMEEAEAKLDKIIELAKATPYYSIILSIDGIGPNLASRIIAEFGDISKFKTRGAMVAYVGNDPNRAESGDIEGYHLSISKKGNKRLRCILYLAVTCSIRSRKENPINAFYQKKRQQSTPLKSKAAKVACITKLIRTIHGMCKTGTVFTS

SEQ ID NO: 376769 - protein, 340 aa, unidentified
MKEVITTIGLDLGKKVFQVHGVDVAGGVRVRRSLRRSQVLEWFGKQQACLVGMEACATAHYWGRELSRLGHEVRLIAPAYAKAYVRRNKNDAADAAAICEAVSRPGMRFVAIKTAAQQAAGGLHRVRDLLQKQRTMLINQLRGLMAEFGIVVAGGPQHVKDLLAVLADPADARVPELLRGPLLGLAQVLGDLERRVATLERQIVAWGRGNATYRHLITVPGYGPILAGAFAAFVVEPSALRSGRDFAASLGLVPRQEGTGGKLRLGSISKRGNGYLRRLLVNGAMSVLNTRRARQDPWIARLLASKPRKLVAVALANKMARIGWAMMVRQEDFRPRSAAA

SEQ ID NO: 376770 - protein, 425 aa, unidentified
MNLLILKGVPMSLKIVYKICCGIDVHKTFVVACIASTNDKGITSYESHRFSTYTSGLKTLLQWLLNRNCKDVCMESTGKYWIPVYNILENDCSIVLAHPKYVKAIRGKKTDKKDAKWIADLFKHDLVAGSFMPPADIRQLRDLMRYRFKLTCFQSSEKNRLQNCLTVSNIQLGNVVSDTFGKSAQAILDKLLENPADTSFDLEPLVYKSLKKKLPQLRDAIDGYITPEQAGKLKVIKSHYENLESRKAELEELILALAAPYQQELAILQTAPGIRSDFTAIGIISEIGTNMEAFPSAKHLCSWAGLTPTNNESAGKKKSVRVSKAGCYIKPLLVQCANAVVTSKKHPEIRNRYLRLKKRRGHKKAIIAIARMLLTALYHMLKNGENYNAELYRKSYLPPVDREITVEQAVIIARNQGYKIKSATA

SEQ ID NO: 376771 - protein, 319 aa, unidentified
MAKLIGAGVDVAKDTLEAAWGDGQHLQVMNDASGWDALIAAFREAQVDVVAVEATGGYESKLAYALQAAGLSVAVLNALQARRFAQSLGYLAKTDRVDARMLAEFAAFLGQHPQRARYVKVLPDERRQCMAHLVMRRRQLSDMLTAERNRLGLSQARAKKSIQNVIRTLEREINRIDEDMDDHVRTHFKDLAKLLDSVTGVGKVLIATTLGMLRELGTVSRTEISALAGVAPFNGDSAKHRGKRRIYGGRTELRNVLYMATLSAIRHNPVIRAFHDRLIGKGKLPKVAIVACMRKLLVILNAMVRDNAPWDPSKHQKTA

SEQ ID NO: 376772 - protein, 361 aa, unidentified
MKKPMHPLIAEVPRSVTKAGMTIGIDLGDVWSHYCTLNEDGEVVDRGRFRTTLSGVEKWFTDVPRARVAMEAGTHSIWVSEQLRELGHEVIVAKVRELRAISHSDRKSDTVDAEKIARYARLDPEILRPISHRTVAQQEALTLIRARNLIVRLRTAAVNSVRGLAKPCGYRLPASSTLCFAKRCMAVLPPGLAVALGPVLEQIAAMTVKIQQYDRTIKRLTETEYPETQALLRVYGVGQLTALTYVLTLGSKERFKRSRDVGCYLGLRPRRSQSGDRDPQLGITKAGNIYLRSLLVECANHVLGPRGRDSTLRQWGLHLASRGGKQSHNRAIVAVARKLAVLLHRIWITQEPYVPFYAVAA

SEQ ID NO: 376773 - protein, 377 aa, unidentified
MKKVRFVGLDVHADTIAVAVAEPGGEVRSLGQIPNRPESIRKLMKKLGPADSVRACYEAGPTGYVIYWQLTTLGVRCDVVAPTLVPVKAGDRVKTDRRDAEKLARSYRAGDLTPVWVPDAAHEALRDLVRAREAAKKDQLRARHRLGKFLLRHGRRPPTGMTSWTQRYLAWIKTAVRFEQPAQETTLVDYLHEVEHVAGRIEGLERAIDEAVRTVPARMRAVIDALQALRGIALVSAVTIVAEVGELSRFTRAPQVMGYTGLGTREDSSGPRTRRGGITKTGNAHLRRIVIEAAWAYRHRPAVGGALRKRQATLSEEVKAIAWKAQHRLHGRYRKLLGRGKCQQQVVTAVGRELLGFIWAIGVTVETEQRTRQANAA

SEQ ID NO: 376774 - protein, 355 aa, unidentified
MSQEKYIGMDVHQATISVAVTDSRGKLIMESIVETKAATILEFLQGLHGSLSVTFEEGTSAAWLHDLLKPHVTRLVVCDPRKNALLKDGSKSDRIDARKLAELLRGNQLTSVYHGEHGMRTLKELGRSYLTITTDLTRVMSRIKALYRSWAIPCSGTSVYAPRHRAEWLDKIPEPGVRLRAERLYQQLDLLQPVRQQARRDLLTESRKHHAVKLLRQIPSIGPIRAALLVAQLQTPHRFRTKRQLWAYSGFALETHDSGEYRYVRGKLQRNRERMTVRGLSNNHNPEVKNLFKGAAISASTHPGPLYDFYVALLEKGMRPTMARLTLARKIASITLTIWKKGADFDATQLHRQEA

SEQ ID NO: 376775 - protein, 401 aa, unidentified
METVRDNATRVKRFRELKATLRTDRTRLLVGLDIAQAEHVVHLRHAHTRVVTPALTIPNTTRGFTQLWAAITRAQRATGCREVVCGLEPTGTYHQAVATFLETQGADVVFLSSSVAYWNRRTQDGTWDKHDRKDAANCADLLEQGKVLFYSQPTGPLAELRHLVKCLRRARTELASCKARWRTTLRPALAPMGEPLPQRLWAELPPVLQAWERAAPGRPAVPKGRLPLGLATACADLGTQVTAVQTRIAVLEAACTPVAERLPAYPLLRTIPGVGPTVGAILLAEIGDIGWYTKFSQLRKLAGLDIVRVQSGQYAGQARISKCGRSLLRWALYHTAIGAARTVAGRARLAALKAKRRGDRFAGFKAVVELAAKQLRVIWGVWRSGTPYDPRRAGGLQRQAR

SEQ ID NO: 376776 - protein, 357 aa, unidentified
MSCKLEAAIATVIGIDIGKNSFHVVGQDRRGAIVLRQKWSRGQIEARLANLPACLIGMEAGVGAHHLSRKLKTLGHDARLMPAKYVRPYSKGQKNDFRDAEAIAEAVQRPTMKFVATKTADQLDLQALHRVRERLVSQRTGIINQIRAFLLERGVAVRQGLRFLRGELPGILATRTDVLSPRMLRVIEDLAGDWRRLDARVEGLSSEIEALARQDRHCKRLMTVPGIGPIISSAMVAAIGTGDAFSKGRDFGAWLGLVPKQISTGDRTILGSISRRGNRYLRTLFVQAAWVVLVKLGPRQWERYGLRSWLEAAKKRLHHNVLAVALANKLARIAWAVLHKERVFQCVKMDDIAPRSA

SEQ ID NO: 376777 - protein, 461 aa, unidentified
MQGDPLQASAWQGLKIVHPNAAGLDISSTEVWAAVSPERNREPLRRFGTYTPDLHELADWLQASGVDSIAMEATGVYWIPVYEVLEARGFEVYVVNARHIKNVPGRKSDIQDCQWIQGLHSVGLLRASFRPEAEIATLRAYLRHRAGLIEHRAAHILHMQKALGQMNVQLTQAVKDITGVTGLAIIRAIVAGERDARKLAALRQPGVKKNEQEIAKALTGNYRPEHLFALKQALALYDAYSEQLRECDTEIERQFANLKPTVPPDDLPPLDASDKRESNSKNGPSYDARTLLYRWVGVDLVAIAGLNASTVQTILAETGIDLRAWPTEKHFCSWLGLAPHNDISGGKVLRSRTLKTHNRAGQAFRMAAQSVSRSPNSVFGAFYRRIRTRLGSRQAIVATAHKIARTFYYMLKHRTPFHDLGGEEYERRARERELHNLQRRAAKLGLALIAAPVAPTALAVS

SEQ ID NO: 376778 - protein, 420 aa, unidentified
MGMLNQVGETMHYQEKFIYVGVDLHKDTHTAVIINCWHQKLGEIQFANKPSAFPELIEAVKKHSKRLTPVYGLEDVGGHGRSLAVYLTEQNQKVKEVNAALAHSLRVSRPTVHKSDSWDAECIARTLMEYLDTLPDASPDDLYWTISQLVLRRRALVKAMSALTNQLHGQLTCAYPSYKQFFSEVDGKTALLFWERYPSPHHLDQVSQEELTAFLRECSNNACSSSKAQQILELIKKDGDTKRGYQNSRDFLVRSIVRDIQFKKQEIALVEAELKTVMSELDYKLETMPGISTVTAAELVTEIGDIRRFSNHDKLARHAGIAPVSFGSGGKSKTIKSKQGNKELHSIIYFLAVRQIGVDRTTKKPRNEAFYSYYTKKVAEGKTKGQALICVMRRLVNIIYGMMKNKTEYMLPAIPEKEAV

SEQ ID NO: 376779 - protein, 347 aa, unidentified
MEQITRIGMDTSKNVFQLHGVDAAEKPVLRKKLTRREMVRFFGKLPPTVVAIEACGSSHHWARLLGSLGHDVRLIAPQLAKPYVKRGKNDAADAEALCEAVSRPTMRFVPVKTAEQQAALMLVGVRERLIQKRTQLVNAIRGYGAEFGITAATGACRVVPLLERIAADETIPELARELFALQGKEYAQLQCEIERIDAKLMEWHRSDECSQRLAKIPGVGPIGATLLMMKTPDPHLFKSGRDFAAWMGLTPKDHSTAGKTRPGVITRAGDELLRSTLVVGATAVVQHARNGRGRNLTPWLLGLIGRKSPKLVAVAVANKAARIAWKLMVSGERYLCVAPPALTAVAA

SEQ ID NO: 376780 - protein, 345 aa, unidentified
MSYYAGIDVSLERSSVCVLDGEGKIIREAKVASEPEALIAWFGSLGLAMTRIGLEAGPLSQWLFAAMKQAGLPVELLETRHVRNAFKTMPVKTDRKDARGIAELMRMGWFRPVHCKSISAQETRAILTTRTLIEAKLRDVEMSLRGVLRGFGLKVGKTTPTNFAERIKQLVSEHSNLQVIADALLAVREVLLREFRSFEKRVRTMARHDERARLLMTTTGVGAVISLTYAAAIDDPARFKNSKQVGAHYGITPKRYQSGEIDYTGRISKIGDKSVRTALYQAAHIILTRPVKASALKSWAMQLAKRIGMAKAKVALARKLAVILHRMLVEGKPFDHKLPNQVAAA

SEQ ID NO: 376781 - protein, 388 aa, unidentified
MRPISQTTTQKLSHCRPDDATLYASLELSQATWLVTSLVPGSEKMSKYSTLGGDGAALLGLLRRLQARAERLAGGPVDIAVIQEAGLDGFWVHRLLSANGIQSHVVDPASIAVPRRRRRAKTDAIDGETLLRTLLAWQRGEPRVCAMVVPPTPEQEDRRRTSRERAILLQERVRHVNRIKGLLASQGITDYEPLHKDRRARLVALKTGDGQPLPMRLKAELLREIELVELLIRQIAEVEVERDTAVELDVEGRQSPVALLARLKAIGPQIAAVLYLEGLYRSFANRREVAAYAGLVPTPWRSGTIDREQGISKAGNRRLRHIMIELAWLWVRHQPTSALSRWFRARVGTERGRIRRIAIVALARKLLIALWRYVTHGEVPEGAMLKAA

SEQ ID NO: 376782 - protein, 336 aa, unidentified
MWHVGVDLHRKTVVIAAVNDSGEVRPPVRCQNTETERIKETFHSFGSFRAVVEATGTYRWFYKLVAPMGTVLLAHPGKLRIMVQRRCKTDKLDSQLLANLLRINQIPLAYIPPDEYQLLRDITRHRARLVRGQGSVKNSLRALLARYNMQPIFKFPWGPRGLCWLSKQQFGLVDNAVRDELIARFRHYKLEIEAVNNRLEGLRPLYPQVDALTELRGIALYTAMVVIGELGDVKRFRRAKQVASYAGLTARVNQSGEHCYHGHISKQGSPWLRWLLIEAAMKLVQQDVALANFYQRIRKRSSAKIARVAAARKLAEICWKRLMAWDRQHNPEMAVA

SEQ ID NO: 376783 - protein, 346 aa, unidentified
MQQITTIGLDLAKQVFQVHGAEADGSPVVSRKLRRADVLDFFKDLSLCLVGMEACGEAHYWAREIAKFGHDVRLVPPSYVKPFVKRGKTDAADAEAICEAVIRKTMRFVPVKSADQQAAAMVLKTRELLVRQRTQAINALRAHLSELGIIAGTGPAKIATLIEIVRDDEDVRLPPAARFALSELANQIEWTKMRIDKLERAIVIEAKRDEDMRRLVTIPGVGAIIAASIKALVPDPQGFKSGRHFAAWLGLTPRPHSSGGKERLGRISKMGNSTLRSLLILGATAVLGHVRHKTDVSKWLAAIRARRPFKVVATALANKMARIIWALLTKGGIYRKSGLAISAANA

SEQ ID NO: 376784 - protein, 361 aa, unidentified
MTQAKTWVGLDVHVSGTVAAVLDCDSGELRRRRLSGRGEEIAAFVAELPGPVRATYEAGPTGFVLARRLVAAGVDCLVCAPGLIPRGPSDRVKTDQRDAERLVRLLVAGELHRVTVPTIEEEALRDLVRAREDLRGDLMRARHRLAKLLLRHDIRFDGPQRNWTQAHLHWLTSVRFDQPGSQRAFEDYLGAVEALLVRRGQLEREIAELLPVSPWAQTARRLMCLRGLDTLSAAGLCAEIGDFARFRHPEQVMSYLGVTPSERSSGTQRRLGPITKSGSQHARRLLVEAAWHYRRAPGVSTNLRRRQASADPKVVALSWKAQRRLHHVWSRMEQRGKRRTVIAVAAARELAGFCWAVATTD

SEQ ID NO: 376785 - protein, 513 aa, unidentified
MHKLAERPAPARRHSSSRKLVNNCAAGDNFAGGRPAPARTRSRVCNPKRIDGRLPVEPEALAPTSNRKTPQEGHHISLVDSRAKRRKNQRQQRHTMNDSQQWKQYPGFGAVDWASEKHSVIVVDQAGKVIEDFEIEHSALGWKKFREKLQAYGSIPFAIETSQGAAVEQLLEAGMIVYPLNPKSAQAYRDRKAPSGVKDDRLDAWSFADALRVDGQGWKALRPEEPLIKELRLVCRDEVSLIEQRTALILQLRHALAEYYPAALEAFKDWTSVSAWMFVQRFPSPELLAKAGKRQWQKFLHSRRLWGSDQGPRRMEIFAHATELSGSAPTANAKSLLALSLVQMLFVLEKQLAVYRQRIEALFARHPDHDLFGSLPGAGSKIAPRLLAEIGDERDRFEGDAQNLQCLGGTAPVTMHSGKYRHCHRRWACNKHLRHAIHLFAEKSLSRCAWAQIYYEYHRKKNRSHSDALRRLGHRWLKIIYKMWVDRTPYDPELHHRNQLQHGSWIFQLKACE

SEQ ID NO: 376786 - protein, 400 aa, unidentified
MLSIGIDVSKGKSTVCGMKPGGEIVYTPFEVQHTREGMSELVSLLRGSGEEVRAVLESTGSYHCPVVAALLENGIFVSVVNSLRMKRFCSQSIRKVKTDRIDAMQIALYGLAYWQELQPTKLPEDTYRELQLLARQYYQMTSLLIKAKVDFNAICDQVLPGMQELMSDHAGRHKLSDFVLRYHHTTHILEMGETRFRKDYCKWAEKKGYRNCERMAALIFATAQNGIPVLPNAPSTQIVITEAIRVLHTVEASRDAILTQMQALAKTLPEYSLVREMPCIGDTLAPRLIAEIGDVRRFHSKRALIAYAGIDAPPYQSGKFCANNRHISKRGNRYLRKTGYEVMQSYVMHKPANDPIFTFIEKKRGEGKSGKLAMVAGLNKFLRVYYGKVTELYRSLPAIE

SEQ ID NO: 376787 - protein, 339 aa, unidentified
MEVTTVGLDLGKDVFQAHGITSDGTVVFNRTIGRIQLLKFFEKLPSCLVGIEACGSAHHWARELTAIGHDVRLMPAAYVKPYVKRGKTDALDAEAICEAVTRPTMRFVAVKSKEQQALLTIHRVRQLIVRQKTQMLNVIRGLLREFGHVVGNGPVAAMRFIKTFQTDDSLDMPDVAKSMLKTLCEQVIALDERVTFYDKLIEYHARIDERAKRIRTVPGVGPITASAIVATIGDGKQFKNGREFAAWLGLTPLNRSSGGKERLGRISKKGDRYLRRLLVIGMTSQVQRARGYPERVHPWIMQLLERKPVRLATIAMANKAARIIWAILTKETYYRQTAA

SEQ ID NO: 376788 - protein, 343 aa, unidentified
MSNDSRIAVDIAKAVFEIAISDRPGHVRHRERPARADFLNVLAQQPAATVVMEACGSAHYWGRRIEQLGHRVVLLPPHHVRPYIRRNKTDRTDAKGILEASRNEDIHPVPVKTVAQQTLSSLHRFRSAWVHERTARLNTVRGLLRELGVFIPVGSREVVPAVWGLIEDADSELPDALRAVFAEACREIRDIEARIKQVERQLGAMADQLPVVERLLTIPGIGLLTATALFAFIGDVRRFPSGRHLASWLGLTPREYSSGLKRHLGRISKRGDGYLRTLLIHGARSTLLHARKQQPDRLREWAHKLAQTHVHNKAAVAVANKVARIVWAVWSRGETYGPDQRAA

SEQ ID NO: 376789 - protein, 341 aa, unidentified
MNIVTVGIDLAKNVFALHGVDQSGKAVFIKPKVARSQLLEMIAHLPPCLIGMEACSGAHYWAREFSRFGHTVKLMAPKFVAPYRMSGKRGKNDAADAAAICEAVIRPNMRFVPIKDVDQQAILCLHRTRQGFVEERTALYNRLRGLISEFGIVLPQKVERLRREIGAHLEALPGWANRCVGDLLAHADRLNERIEEYDKAIAQAARLDARSRQLMQLPGIGPTTASALVASLGGGHDFKNGRQLAAWAGLVPGQYSSGGKARLGRITKAGDAYLRSLLVMGARSVLAGLGDKQDRFSRWARNLVERRGYWKAAVAIAAKNLRLAWAVLHYGDDFRRIEETA

SEQ ID NO: 376790 - protein, 456 aa, unidentified
MSKQSKSTIPAVHAKPTQRKHAAGIDIGATSIYVAVPVDRDPQPVRSFQTFTEDLHRLADWLQRCRIKTVAMESTGVFWVPLFQILEQRGFEVCLVNAHHVKNVPGRKTDVADCQWLQYLHSVGLLQASFRPAHQVCALRSLLRHRDSLVQTASTYAQRIQKALDQMNLQLHHVISDITGVSGITILDAILDGERDPFKLASLRDYRIKATEETVAKSLVGDYRPEHLFTLRQSLDAWRYHRKLVAECDDEVQRHLVQFASKVDPKQKPLPRPKKVSSSKVYSSHPDYDLRTEHYRILGVDLTEVPGINTLLVHTLLAEVGPDLSKFRSAAAFASWLGLCPDNRISGGKILSVRTRHVQNRAALALRIAAHTLHHNQSVLGYYYRRMRAKLGAPKAITATAHKLARILYHLLTTGQPYQESIFEERETQHQQRTIFSLYARARALGYQLLPLAPAT

SEQ ID NO: 376791 - protein, 353 aa, unidentified
MSIVAERYAFVIGVDTHAATHSLALVSAANGAVADQAEFPNTPAGMDRAHSWITRKSADQPALVVIEGVGSYGAGLTQRMTGGGLQVVEPPAMTAAARRGVGKTDAIDAVRIARSVLGVDTGRLRWPRATGERVVLRVLTVAREEMTAERTRAINALTALLRTIDLGVDARKALPHSRFKMIAAWRERREDHVIATCRREAIRLAKRIVSLDGELADNRKALDAAVEHLAPELCELPGVGSVVAACVLTAWSHPGRVRSEAAFASLAGTCPIPASSGNTVRHRLNRGGDRRLNRALTTVVIVRMRIHGPTRAYVARRRAEGRTTKEIMRALKRYITRQIYRTLAAAHPVAATP

SEQ ID NO: 376792 - protein, 338 aa, unidentified
MRWYSGIDLHSNNSVVVVIDEADRVVYRRRLPNELAKVLEALEPYRAELAGVAVESTYNWYWLVDGLQAAGYKVHLANPARMKRYDGLKHSGDDTDALQLAHLLRLGILPTGYIYPAADRALRDLGRRRLQLVRHRTMHVLAVENVQARETGARMSGDRVKRLSAQQVDALGFGEDVTLGMQANVAVIGTLNAEIAKLERRLLQCLKPRPEYALLSTVPGIGRVLGPIILLETGSIERFAAVGNYASYGRCVGSVRLSNNKKKGEGNVRNGNKYLAWAFIEAANMAKRWCPEAKRFHDQKRARTNAIVATKALAHKLARACYHVLKSGEPFNMQRCFS

SEQ ID NO: 376793 - protein, 357 aa, unidentified
MGKSIRNLSTVTRVGLDLAKRVFQVHAVDAKGEIVVARKLTRSQLIPFFAELPPCVVAMEACSSAHHWGRALIELGHEVRLIPPAHVKPYVRRNKSDQIDAAAIYEAMSRPGQRFVPVRSIDNQAELMRHRARELLAGQRTAALNALRGHLAEIGLIAPQGAHHAYGLKRMVADGFNENGEIVVPDCVRGALRSLVGQIDALDEAIGAIDRELAASVKADATAKRLMTIPGVGPVTASAIVATIQDASAFASGREFAAFLGLTPRQNSTGGKTRLGRITKMGDRYLRKLLVIGACATLRHRRGHNDALRLWASGMLERKTVKYKFNLTAVALANKVARIVFVLMTRGGQYDDRPVAA

SEQ ID NO: 376794 - protein, 424 aa, unidentified
MNLTQNDRLKQVTSDILIVGVDVGSQTHFCRAFDWRGFELSRRVFKFSNTGMGFLTFLRWTEELMNKTEMKKVIVGCEPTGCYWLTFQKFLQDHDIQLVTVNPFTVNRSMELDDNSPEKSDLKDPKTIALLVKDGRFSTSYLPSGVYAEIREASVCRDQIMKQHVRLSNQIQGWIQKFFPEYLECYVDWDSTSGLMLLREAPLPQDILKIGAGGINQIWRDAKVRAAGIKRAQTLVEAAQNSVGLEAGEAARLEIWVLVNDYILKAEQLKRLDEYLEEKVKEVPNVEKLLAIKGVGMSTVIGFIAEVGDIGRFTDPKQIQKLAGLEIVKKSSGKKKGQPRISKRGRRKLRRTMYESARVLMIWNPVFQDVFLYYRNRTKNPLGGMQAKIAVACKAIRIFYVVLQTGCDFDEEKFRKDIIRPEAA

SEQ ID NO: 376795 - protein, 433 aa, unidentified
MIKINYMSTLFVGIDVSSKSNVVCAMDFEQNRYISSSFRNNQPGADELAETVVRCMEKHPDLNTIVAVLESTSVYSIHIANFLATSELLMPYKPYVYCVNPKMTANYRKSYIGMDKTDPLDAYLIADFARVGRTKKLEPWRGSQFIALKRLTRHRLHLAECITREKTYMVSNLYLKFSELQILEGEEQPFSNIYGATASAVLTEFMTLQDIVDAKEEDLLAFLAEKSRNRITDIQKTSELLKKAARDSYRLDKCMYEPLNVSLASSFNCIQAYQKEIRLIDQAIEKCINGMNPNAFTILRSIPGIGPVWAAGILSEIGDIAVFHSSDALAKYAGLTWKRNDSGDFVSEDNYVTKAGNVYLRYYLGEGANSVRRYIPEYRDFYNKKYAEVTKHQHKRALALTSRKFVRLVFGLLARNQLYTGEKLDVESNIESN

SEQ ID NO: 376796 - protein, 426 aa, unidentified
MNYTQNEKILQITNETLIIGVDVASETHYARAFDLRGIELGKLLRFTNDAEGFNILKAWLKELSARHEKKHVMVGMEPTGHYWFNFAQYLKNHSMQIVLVNPFHVKRSKELDDNNPTKNDRKDPKTIAMLIKDGRYMVPYIPEGVYSELRTAMQTRWQIVKQLNAIRNRVKRWLNIYFPEFTTVFASWEGKAALIALNEFATPAKVMQKGAGGIVASWKKAKIRAVGQKRATLLIRAAQASVGIREGLKAAENDLLMLLEDYEMKMQQHERVLALVEQLTCQIPGMQEIMKIKGVGLITAAGFMAEVGDIARFKHPKQLQKLAGLSLKENSSGKHKGKTTISKRGRKRLRALLFQGIMPLVAKNEEFIKLHQYYTTRAENPLKKKQSLILLCCKLMRIFFALLTKQVAYDPNKMMNDIRRPVVAAA

SEQ ID NO: 376797 - protein, 347 aa, unidentified
MEKASQAEVQVFAGIDVSARELSVAVQCGIKEGIAITTFRNQAAGHKALLAYLLRAKGRARVCLEASGNYSLDLALTLQAHPQVEISVVNPRRARRFAESLGERSKTDPVDARVLCEFALRMPWVPWVPPSLTALRLRSITRAIEDLVAMQAQEKNRQHALLASEALPTLLIRELEQHLRYLRLRITRLRREALRLIARNPELNRRFHLMLTTPGLGETSSLQILGELAVLPETLDARQWVAFSGLDPQQFSSGTSVEKKPRISRGGNRHLRRALYMPALVATRHEPFLRDFYQRLLRRGKAPLQGVVAVMRKLLHALFAMFRRDEAYDGSKLCPAEFARHTAVVCV

SEQ ID NO: 376798 - protein, 487 aa, unidentified
MTETLNSEVILIEHETGEILNFSDGAKIQFLKQYGVGIDCHARMLQISVLVRREQSIYEYRRQFDTDWDSVVKARDWVLSVLETCASPPADVSEGLHYTIESTGSYHVVCCKAWGGKPSVINPSLAKAGKKKTDVLDALQLARADLSGIWPESFIPSSEIDELRVLLAERNNFNRLATRISNRINNMLLRFGYTNGRDGSVTKIHKIREIVENELSDNPVEMEGVCPLGIPNDMKPLFKEEYRQYDMYKELVKKYDKKILKKIRSMEWETSSGTIDGKKMMKLLCTVPGIGEQTAVVWMARIVTPNRFRNEKALAAYCGLDPSLKVSAGKVTSTVRRGGCKDLHSMLCQAASGLVRKHNEPFGRWGYNIAMRSGRWKKGISAVARKLAVSMYFMSLRGEEFSYEKHRIMNEPDVIDIPIERLAELDPDYKRYVRILIANKIKTTKKMVHEYYICNLTNIKGLGKKFYGILTEFIENQSHYRKLLEES

SEQ ID NO: 376799 - protein, 400 aa, unidentified
MQESSVVAGIDWAAELHAVCVLGPDGKVIERFDVTHESQALHVVVSKFRKVGVTKVAIERGDGPVVQVLIDAGIAVFVVPSRQIKALRTRYGSAGNKDDRLDAYVLADTLRTDGHRWRPLREDHPETKALRAMCRACKDLVETRVQVMNQLRANLELAFPGALGLFSRPDSPITLAFLRRFPTAAKAAWLSPARLDRWLRSAGYSGGIAAQTLYRHLERAAPGLDGVEAEARGQITTGLVTTIETLTTEITRIEAQIRKLFDAHPDQKIFASLPRSGMVRAATLLAEIGDCRERFPTDDALAALAGASPSTRQSGKHEQTVFRWSCNKKLRGAVMDFANGSRFGDPWATQVYQRAIARGCRHPHAIRILARAWIRIIWRCWHDEIPFSPQLHESRKLAAA

SEQ ID NO: 376800 - protein, 401 aa, unidentified
MNAVGIDVSKGKSMVCVMRSFGEVVLEPFEVLHTAQNLNDLARKLKALDGETRVVLEATGNYHKPVAFVLHDAGLFVSVVNPVLIHDYDNNSLRRVKTDKKDAVKIANYTLDKWTRLRQYLPEDDTRLALKNCYRQYQQAVAVRTMLKNNLISSLDLTFPDANKLFSSPVKNNGCEKWVDFIGDFWHSECVSSLSANAFAKKYLKWCQKHGYVFTRSKSDEIYACAVNSASLPKSPTSKLLIQQQVAQLKAVSQSVAAFRQEMLRLSQQLPEFDTVMEMYGVGPSLGPQLMAEIGDVRRFSSKKSLIAFAGIEPQPNDSGKVVGNDKGISKVGSAVLRRTLFLIMTVILQTQPQDEPVFQFMNKKRSEGKPYKVYMMASANKFLRIYYAKVKAVMDSERSQ

SEQ ID NO: 376801 - protein, 316 aa, unidentified
MISYFVGLDVSKATLDVGFLPESIPQFQVRNDSEGFAQLIACLNELEVERVLLEATGGYERAVFKALRLEGLNVVRVNPRRCRDYASAMGKIAKTDKIDAQMLARFARDFEDLPQIEPNQDRDGLGELIKLRGNLVQHRDDDKRRMKQTTSATAITVYTEHVAYLNDQIKALDKAIERASNVLDRTTAMRLRSVKGIGVISCGTFMAYLPELGSVTGREIAALAGLAPYNKDSGKKSGPRKIEGGRYRVRKAAYMSIWSMIQHVPEVRTRYEALIARGKRAKVAAVACMRVLLVRLNAMLRDGTEWKELKPQVPAP

SEQ ID NO: 376802 - protein, 456 aa, unidentified
MAHRRKKIPAQIVEDEEYQLRHEKVAGIDIAKGSAVVCTRLPPARGGGRRRSRVEEVAATAAAIMALAAAWLAEGVELVSMESTSDYWRIWYYTLEAAGLRVQLVKSSQARQLAGRPKTDNLDAQWIARLTEMGLLRPSFVPPAEIRALRDWTRTRLQLVRDRTAEWQRLEKLLEGALVKVSSVVSSLAGNMTARAIIEALIDGQRDPRALADLARSRLRGRRGDLEQALQGMAFGAHHAWLARMHLDRIDALDRQVAAIEDEIEACLAAIPASWGVTADGVPAPDPGPGAAVLAAAGRLAEIPGISPDLAMAIIAETGPDMSVFPTAGHLVSWAGLAPVASQSGPRQRKGKKGQGNSYLRRYCTQAANGAASTDTFLGERLRRLAKRKGGTRARCAVGRSILVIIWHLLKDPGARYADLGADWHARKTDKDKKTRNLIRQLNALGLDVTVTPRAA

SEQ ID NO: 376803 - protein, 348 aa, unidentified
MDKVAVIGMDMGDKNHKVVALAADGQVVERVEIACTPEAVREYLQRSPGAVLAIETGTHCRWVSALGAETGHEVLVGNARKLRSIWQSSRKNDWHDAEQLARLVRADRALFHVVKLRSEEAQALLRMVKARDILVRSRSGIVNMIRGFTKAEGERLPSGSSEAFDKQEFEVPVCLRKTTKPLFAILREMTKKIAVYDKLLADALKQEPILEDANLLSSVPGVGPITTAAYLATIGNARTFGDARDAGAYFGLVPKQSQSGETDKQLRISKEGNVLVRRLLVTSAHYIMGPFGPDTELRRHGLRLAQRGGKNARKRAAVAVARKLAVVMLAMLKNRTEYRPLRVVESVA

SEQ ID NO: 376804 - protein, 482 aa, unidentified
MARRKRSTFERLQSGRLNRQQRREWGQRIAAADPSLAVVHPDAAGIDIGNASHFVAIPPDRDPVPIREFGSWTAALQEMARWLTVHGIRTVALQSTGVYWIAVQEVLEQAGLEVYLVNARGTKSLPGRKSDVQECEWLRKLHTYGLLRSSFRPPAEVRAVRTIWRQRDRWVQEAGRAVQHMQKALTTMNVQLANTISDLSGVTGQAILRAIVAGTRDPWALAKLRDPRIAASEDEIAHSLQGHWREEVLFELRQALEAYDCSQHQLAACARELAQDTAAVASRELPPPPPVPAGAAPLPPAKPARRAHARRKHPPGVDLAAELHRTMGVDLTRIDGIDVLTAQVVFSEIGPACSAFPTEDHFASWLTLAPRHDIPGGKVIRRIPAAGRNRVANALRMAAQSLSRSHSYLGARYRRLRARLDGPVAVKAMARYLACLIYRLVTKGQAYVDRGAAHYERQRQERERLALERRASHLGLKLVPAT

SEQ ID NO: 376805 - protein, 457 aa, unidentified
MAASNQANTMAKRRNKNKTKHLLAQNIHTNAAGIDIGAEELVAAIPQERDDRPVRSFGTFTEDIHSLCKWLLSAGITTVAMESTGTYWISPYEILEDAGIEVCLVNAQHVKGVPGKKTDVCDAQWLQQLHTAGLLKASFRPTREVVSVRQLVRHRSNLFKDTSRHLLHMQKALTEMNLKIHHVFSDLDGASAMRIIEAILDGQRDPEVLWKLRDIRCRTSRTTFFKAIQGDWQTSQLFILKQCHQAWKQTREAITQCDDTIQELMTEVPSETQEQVPKIPRSRTKNHMCFDVYQEAYRFYGVDLSSIDGISAGVLPVIMSELGNSQDILSNFRSGKALASWLGLCPDNRISGGKVLGSKTRRVSNRIANALRMAAQSLTHANSALGEHCRRMKARLGKTEGTTAVAHKLARLIYALIKSKEPYDESKAFQTTGKVRERRLKKLKKLAESMEMKLIPA

SEQ ID NO: 376806 - protein, 289 aa, unidentified
MDTHADTHVAAALDPVGGLLGVGEFPATVAGYAGLLSWLGGFGSVALVGIEGTVSYGAGLARHVAAAGIRVVEVDRADRQDRYRNGKSDPLDAVSAARAAQSGRAAGAPKGRDGAVEAIRALMVAKRSARNERTQANGQARSLLITGPDDLRARFARHPAAALAEAIAALRLRPGDAAEYAVRVALRELGRRVEFLDGQLERLDELIVPLVTARAPSLLSLHGVGPDTAALLLVAAGDHPERLRSEAAWAHLCGVAPIPASSGKVRRHGSIPAGTVRPIMPCGGSSSPG

SEQ ID NO: 376807 - protein, 398 aa, unidentified
MGKSAVRLADKAGACEASEASRAGTSRRREFGRVQVFKAVTEREPRRHRGTSPNSRLNRPSVFLSKTKAGASSHLQVREKTMSEPVYVGIDVAKETFHVATCPNILKTQLPNTHQGHRQLSQSLKNHTIALIVLEATGGYERPLTAELLSDSLPVVVVNPRQVRDFARGMGQWAKTDPIDAQVLAKFAQIVKPAPKTHSTPQTAELSELVRRRRQLNDLRTQESNRLLMIHHPKVKKSIQKMLKTLNFQIDEIDRLIREYIDADDNFKNKDRILRSTPGVGPQTSAMLIANLPELGSLNRQEIAALAGLAPWDRSSGKSDGKAHIWGGRKDVRSVLYMAAFTACRFNPVIRALAERLKQKGKAYKVVITACMRKLLIILNTMVRNQTLWTPEKSVKNT

SEQ ID NO: 376808 - protein, 340 aa, unidentified
MEVDVLGIDLAKRVFQLHGATRTGVVVHRSKVSRPSFLESIRRLSPKLVVMEACSSAHYWARVLLRQGTDVRLISPQYVSPFVKTNKNDRNDAEAIVEAASRPAMRFVAIKTIEQQDLQALHRLRQLLVHQRTAIINQVRGVLAERGIVVAQTPAAFHRAMPDVLAGQDEDLSQFCRGLLVELLEHLRSVEEKINSCDARVKAFMSSSLACKRISAIDGVGPLTATAIVAAVGDASEFKNGRHLAAWLGLVPRQYSSGGKSKLYGISKRGDKYLRTLLIHGARAVLRYVAGKTDAQSKWLQQLIERRGYNRAAVAVANKNARVIQALLSSDREYVRPATA

SEQ ID NO: 376809 - protein, 368 aa, unidentified
MNKISMFFVGLDLGDKLSYITIVDQEGELIEESRLPTTKASFQRRFSTLQPCRIAMEVGAHSRWASHLLTELGHDVLVANAHKLRAIYHNPRKGDRADAEILARLARLDPALLSPIHHRSPEAQADLAVLRSRDAIVRSRTLLINHARSIVTPALAGGARESTGARLPTCSADSFASKAAPAIPEGLQPALLLIFDTIATLTQQIREYDRQIEQLCQDQYPETKLLRKVSGVGPLTALGYILTLENPDRFRASREVGPALGLVPRRDQSGDQDPQLRITKTGDAYLRRLLVGSAQYILGPFGPDCDLRRWGLKLAERGGKNAKKRAVVGVARKLAIVLHHLWKTGEVYDPFYQSKSEVTESVSLPAAA

SEQ ID NO: 376810 - protein, 409 aa, unidentified
MELAVLYKRVIGLDIHQAQVTACALIEAADGCMHIEQRQFGGFKRDRRELADWVASLRPEEVVMESTGIYWKSPYAALEAVGVRAKVVNARHVKNVPGRKTDVADAQWLATLARAGLLRGSFVPPARLRELRLIGRQRQKLVGQLASEKNRLHKVLTDSGVRLGVVVSDLYGKSARAMVKAIIAGWTPQEVLVLASSRLKASCEEILDALQGDLTASHRFVLGELMQHIEEIEARIARFDAHLLAGLKSEENTLALLQTIPGVDRIGAAMLLIEIGTDMDAFGSADRLASWVGICPGNNESAGKRKSGHLRKGNSYVRRLLCEFAHAASRTKSVLRSKFQSLLVRRGYKRAIIAIGHRLLRTIFFMLKRREHYRDSATDYEALSVKRNAPRWIKALIKFGFIKHDPARA

SEQ ID NO: 376811 - protein, 321 aa, unidentified
MAIWVGIDVSQDTLDFGFIEDGRKFHKQVPNTRKGFAEILSEAPAAAHFVMEATGTYYLNLALHLHEKGRYVSVVNPFRIKNHMKSDMRRTKSDKADAYAIAQFGKEKEPPAWTPVKRETFQIQQLQGLYDRFTNQITQLKNEIHAFKRSEISSTLAIRESLTAIKDLRKRRAVVMHEMETLAESVLAREIQLLETIEGIGRKTAIRVASAIGDFNRFETSRKLVSFAGLSPMTAQSGTSIHSKGHISRMGGTRIRGALYMCAIVARQYNPQCKAMWDRLKAEKKHGKIIIVAIMCKLLRQMYALVTKNVAYDPNFFAKAA

SEQ ID NO: 376812 - protein, 383 aa, unidentified
MARATRNNECIIDGPGTPQVLYLAFELGVEEWKLAFTKDLGDKPWVRVTPARDLKRLAREIAAAKKQFALSKLTSVRSCYEAGRDGFWLHRHLVVAGIDNRVVDSSSIEVNRRQRRAKSDGLDARKLLAMLIRYHAGESKVWSVVRIPTVEEEDRRQLHRELRTLKKERTRVKNRIQGLLANQGLRLPKGRDFNTRLAEMRLWDGSPLPAGLQARLQREWAHAQFLHATILELERDRQKALKHDRGPAIEKVRQLLRLRGLGPNGAWVYVNEFFGWRQFRNRKEVGAAAGLTPTPYQSGDLSRDQGISKAGSRHIRAVAIEMAWCWLRYQPGSRLSRWYQERFARGGIRARKVGIVALARKLLIDLWRFLEHGVIPEGAVLKS

SEQ ID NO: 376813 - protein, 349 aa, unidentified
MKIIGCDFHPSYQQVVVWDQASGEVVEKALSHERKEEVRAFYGGLKGPVRVGIEASGQSQWFEQMLRELGHEVCIGDAAKIRAATDRKQKTDRRDAQLLVKLLEEGRFPQIWVPTPAERDVRQLLLHRHKLVRMRTQVKNQLQALALNQGLQRKWKLWSAAGRKQLEALPLLPWASRRRAELLQLLDQLEKSLEELDRATTEQANTRMEVRRLMTHPGVGPVTALAFALTLGPAKRFCRGKQVASYFGLIPSEYSSGEGKQRLGHISKQGSSFVRGLLVEAAQSAVRHEPQMRREYQRLAQRRCRALAKVAMARKLAVRLYWMLREEVDYAQLIQGSRAGQPESFRGRG

SEQ ID NO: 376814 - protein, 395 aa, unidentified
MIVIGTDTHKGQHALAAVDEGTGRVRGQRQIDADEPGHLAAVRWARELDEERVWAIEDCRHVSRRLEQALLAAGERVVRVPPHRMGDSRKGEREPGKSDQIDALAVARAVVKDGVESFAVAFLDERAMEIRLVLDHRGQLVAERTRTINRLRWHLLQLCPELERQLKRRAFNNARGLGRVDRQLRKVQAHARVRIAREQLAQIRRLNRDIDRLKSELHELVMAHRPKLLAEQGCGALVAAILIGHTAGVQRFGSEASFALLSGTAPIPCSSGKRTGHRLNRGGDRQLNHALHIIATTRAQHDPATKEYLARKEAEGKTTKGALRCLKRYLARCFHQLLAEPPADQRPAAEPERTPEPQAPVDGRLPEIPKRPESDGDTIAVQGGPYIMPCLSMAQ

SEQ ID NO: 376815 - protein, 340 aa, unidentified
MGVFVGIDVSLENSAVCAVDSHGKVLKEAKVVSEPGALNCWIRGVSGDIEAVGLEAGPLSQWLHKALTEAGLPVVLMETRQVNAALKAAPVKTDRRDAAGLARLLQMGWFRPVHCKSLSAQEIRVFLGARRSVQKAAIDMEMSIRGMLRNFGLRLGRVGKVSFESRVRELVDGNALIEVSMEAMLRARLALRTELARLDRLARDIARDDPVCRLMMTMPGIGAVVALTVQSAIDDPARFRRSKDIGPWVGLTPGRYQSGETDIVGGITKAGDVSMRSALYQAAKVVMHRSKKPTWLRTWADRIARRRGSKRAAIALARRMGVILHRMWVDNREFQAAEPA

SEQ ID NO: 376816 - protein, 327 aa, unidentified
MTTLHTIGIDVSKDKLSLYSTNDSAFVELPNDALSLEKYIAQHTVLSKTHKVGLESTGDYHLTALRFFVERGFDTVLINPIITRKYTRASIRGTKTDRRDAELITEMVEHGEGTQVQEKDLPQGKKTLLRVEHSLTSMQTQLKLLRQSLTLKAKNGIDVSGALEEVEHLIIEVSESAKRITKSVTVTQTRQEAVIDSIPGCGAKLSAIIAAEAGDITRFVSPRQLIAYAGFDPRVYQSGNKNVHGKMTKRGNPHLRRALYLAANVARIYDPELKQFFEQKKSVERKHHVHVTCIIARKLCERIWAVVTQDRMYEVRLPEEMSMGVCG

SEQ ID NO: 376817 - protein, 353 aa, unidentified
MEYIAFDAHKHYTLASVARPDGQLIREQRIAHERGALQQFLERCERGSPVAVETVGNWYWIVDEIEAAGCVPRLVHARKAKLMMGQINKTDKLDVRGLNQLQRNGTLPTVWIPPGELRDQRDLPRTRMVLVRQRTQLKNRIHATLAKYALHDLEVSDLFGARGRGLLRQRLELLPPCTAYTTQHLLEQVERLDHQVREFEQRLRALFKPTPPIQRLLTLPGVGLTLAVVIALEVGDVARFPTAEKLAAYAGTTPRVHASGGKTRFGPSRPDVNRYLKWAFVEAANAICLNRGRAPHRHVTRLYERVARRKGHQKAIGAVARHLAEATYWVLTKQAFYREPQPTTVSSTGDKRG

SEQ ID NO: 376818 - protein, 310 aa, unidentified
MKKIESITRINQRHNKDYIKDIGNNENKRETNAHYYVSIDIGKKNCVVCISDKDGLIIEETKYGNTFSEACFFAQHIDRQYDSSNCIAVVESTANMWIKTYKALEQAGIQTKLANPFKTRVIAEARIKTDKLDARILCHLLRSNLIPESYVAPDSIREDRSILRLRINLVQDRTRVVNRVHSLLDKYDMDQACNHLVGKKGLNWLKSLKLEGNNDQFQLNNHINNIEFLNNEIMQIDKKVSSQVVKNKDVKILMSMTGIDYFSAMLITSEIGDITRFSDPSKLVSWAGGAMSNHTSIRKHVIHGKDERWK

SEQ ID NO: 376819 - protein, 393 aa, unidentified
MVCVGIDVAKDKHDCFIISSEGEILADVFTIRNNAEGFDTLLQAIRRSTRPEDKIKVGLEATGHYSYNILGFLLDKGLPTYVINPLHTNLYRKSLSLRKTKTDRVDARTIAAMLMSDVDLKSYTDTVYHNEELKSLTRYRFDKVRERAKLKQSVSRLVTILFPELEKLVSSLHSASVYALLSEFPGTKQISSTHMTHLKAVLKNASQGRYGQEMAETIRNAARSSVGSVMPAKSLELQHTIRLIRELDAEIEDIETAIQAIVDEMQSPITTIPGMGVRMGAVILAEIGDFSRFDSPDKILAYAGMSPSTYQSGQLSLSGAYSHMEKRGSRYLRYALYNATKHVCHWDPTFAAYLAKKRAEGKHYNVALSHAAKKLVRLIFAMEKSQRPYCAAA

SEQ ID NO: 376820 - protein, 344 aa, unidentified
MDHFAGLDVSVKDTSVCIVDDAGKIVREVKVASEPEALLAVLKSPAYCFKRIGLEAGPLSQWLFSALAEAEIPVICVETRHMQAVLKAQINKTDRNDARGIAQMMRVGLYRPVHVKTLRSQKLRMLLTHRKLLQSKAIAVDNDLRGTLRNFGLKVGMVGTVKFETRIRELVENLPDLAVLVEPLLVVRRVLREQFGILHRRLLAIVRDDEVCRRLMTVPGVGPVVALTYRATVDVPARFRKSKAVGAVFGLTCSKYQSGEIDRSGRISRCGDEMMRVMLYEAAQSMLRSKKWSWLKAWAMQIARRRGMKKAIVALARRLAVVMHRIWVDGTEFRWTRQQAAAAA

SEQ ID NO: 376821 - protein, 514 aa, unidentified
MSEGTAQPPFSRLCPRLLRKHSAWLIRHIPLTQKFHPQPLAPARMADWVHAHYARVRSPYAAQDKPFASGFTNPYRNGGDIMLKINYMSTLFVGIDVSSKTNSVYAMDFEENKYLSTSFGNNQPGADELVNRIAACMQKHKNLDTLLIVLESTSVYSVHISNFLASSEVLMPYKPYVFCVNPKTTANYRKSYIGMEKTDPTDAYLIADFARVGRTKKLEPWRGGQFIALKRLTRHRMHLSECITREKTYMVSNLYLKFSELQLLEGDDKPFGNLYGATSSAVLTEFLSPQEIIDMPEEDLLAFLAQKSRNRISDLSKTSELLRKAARDSYRLDKCMYEPLNISLASSFNCIQAYQKEIRLIEQAIEKCIKGMNPNALIILQSIPGIGPVWASGILSEIGDITAFHSSDALAKYAGLYWPKGDSGDFISEDNQMSKAGNPYLRYYLGEAANSVRKHIPEYADFYARKYAEVSKHQHKRALALTSRKFVRLVFGLLAKNQLYTGEKLDAEYNIEPN

SEQ ID NO: 376822 - protein, 387 aa, unidentified
MYYVGIDIAKLNHFASVVSSDGEVLVKPFKFTNDNDGFCTLLSALASYDRGSLIIGLESTAHYADNLVEFLVSKRYQVCVINPIQTSTMRKNNIRKTKTDKVDTLVIARTLIAQPHRFFSQEDIDLMHLKNLGRFRQKNIKERTRLKIQLTAYVDRVFPELQYFFKSGLHQKTIYALLKEAPTPELVASMHLTHLAHLLEVSSHGHFNKEQAKELRILAQKSVGSSDRALSLQVTQSVEQIELLDRQITDVESEMTEIMLGLDSVIMTIPGIGYINGGMILGEIGDIHRFSKPCQLLAFAGLDPSIYQSGNFNASHTRMSKRGSRVLRYALINAAHNVVKNSNTFKAYYDAKMAEGRNHYNALGHCAGKLVRILFKMLTDDVAFNLE

SEQ ID NO: 376823 - protein, 344 aa, unidentified
MNYYAGIDVSLESSSVCVVDGAGKILRETKVESEPEALIAWFRSLGLTLERIGLEAGPLSQWLYAALREAGFAVELLETRHVRDAFKAMPVKSDRNDARGIAQLMRLGWFRPVHCKSMEAQETRAVLTARKLLQSKLRDIENSLRGVLRGFGLKVGKTTECTFSERIRELVAGHPGLELVAKALLEAHAVLRREFNGLDKRTQKLARSHPQARLLMTTPSVGPIVALTYASAIDDPNRFRSSKATGAHFGLTPKKYQSGQTDYTGRISKIGDASVREALYQAAHVMLTKPIKGCSALKSWAMRISKRAGMRKAKVALARKLAVILHRMLADAKPFNPTAKAAAT

SEQ ID NO: 376824 - protein, 449 aa, unidentified
MSSRASRQKRKPSAMERINVDAAGIDIGASSHFVAVPEDRDERPVREFAAYTADLYQLADWLKACGIKTVAMESTGVYWIPLFQVLEERGFEVRLVDARRVKNVSGRKTDVSDCQWLQQLHTYGLLSSAFRPDDDTCVLRSYMRQRDGLVIQAGQHIQHMQKALELMNVKLTEVLADVSGQTGMAIIDDILAGQRDPMVLAKHRHTRCKHDEATIARALTGHYRAEHLFALRQAVALYRQCQDLLRECDTEIESFLEERGPKDDGTPTPPERTSARSKNALGFDAHGHLFRLVGVDLTAIPGLSTASVLALLAETGPTMDRWRNSKAFASWLGLCPNNRVSGGKVLASKSKQCVNRAARIFRMAAYGLHHAKSALGAFYRRMRSKLGAPKAITATAHKLARLFYSMLKTKKSFADIGQDAYDRTYNQRRIKGLTKVAEQLGFKLVPSTG

SEQ ID NO: 376825 - protein, 366 aa, unidentified
MREQDEGNRITIGLDLGDRRHRFCALDGKGQVVEEGTLSNKRESLSELSRRYRRALVVMEAGCHSPWISRHLEGAGCEVVVSNPRKTRAIYQHERKSDRRDALMLARIARMEPALLYPVQHGSAQAQQDLLRIKLRDSLVRARVGVINSLRFTLKSLGYAIANPSTERFHKVIQEQVPESVGSVIAPSVQALKELSLRIKLLDREIITLARSKYPETTWLEQIPGVGPITALYFVLKIQDPGRFERVRDVGAFIGLCPRRDQSGENDPQLRISKRGDAYLRRLLVSAAQYILGPFGPPSALRQYGLALASGGTPRAKKRAIVAVARKLAVLLLTLWKNKSLYQAFPLSRDGEKMRTSDLERLRCIA

SEQ ID NO: 376826 - protein, 390 aa, unidentified
MTTLMKYSVGVDVSKDTLHACICEIDSQQQVKIKTSHRFLNSKKDYTALMQWFTKHRKQDVPLVICMEATGIYYEKVALELYQKGYSVSVLLPSKAKRYMQSLGLKTKNDKIDASGLAQMGAEQSLALWQPLGDYFYKLGQLTRHHEQLQQSRTVFLSQLHAIQHSMIEVKEVVKHQKKVLELIEKQLQETLKAIAGHIKANVDVNRKVKQICQIKGVGLLSAATVIAETNGFALFNSIGQLVSYAGYDVIENQSGNQHGKTRISKKGNSHIRRIMHMPAFVAIQHHQQPFKSLYNRVYDRTQIKMKGYVAVQKKLLALMYTLWKNDCAFDPEYKGKSGNDEPKPLFLLGSEGATAEQDEIKIVPIKTGTTQDELPYNESPEALFLLDQK

SEQ ID NO: 376827 - protein, 340 aa, unidentified
MNATMIGLDIAKTVFQVYGEDAHGQPVLSKRLGRGAVEPFFAKLPPATIGIEACGSSHHWARRLQALGHAVRLIPAAYVRPFVKRNKTDARDAVAICVAMQRPDMRFVPIKSIEQQAARGIETARELLVRQRTQLMNAMRGLSAEFGIVVAQGSTGFAALCARIAAGDPAIPAALLPSLRLMRQQWQALNDAVDAQQAQLVARAKADPVMRLLMGVPGIGPLTAHAIVAAIGDGRQFGSARDFAAWAGLTPREQQSANKRRLGHISRQGDPGVRRLLTLGASAVLRQVRAEPRRGTAWLRGILTRRPVKVAVVAQAAKTARIAWAMLRSGEAYRVAAPAI

SEQ ID NO: 376828 - protein, 350 aa, unidentified
MRTKPIPETAAFGIDIGKKVFHVAALNAAGAVIQRAKFSRDTLMAFFDAAPKVLIGMEACPGSQWLARQLAAIGHDARIIPARFVKPYVKSNKTDTVDAAAIAEAVTRPTMRFVEVRTPEQVDLQALHRIRDRLVGQRTALMNQARAFCLEYGLAMRVGAGGFHADIRRHLANAQNDLTPAMRVLLEELLDDLAYVEGRIKAVNAKVEAYASEHEAVSRLVTIPGIGALGATALVAAAGDGRQFRKARDMAAWLGLVPAEHSTGGKQTLLGISKRGNRYVRRLIIHGARSCLLHLNRANHALGGWLSALEARTHRNKAVVALANKLTRIVWAILTRPGTVYLQSKGAAAS

SEQ ID NO: 376829 - protein, 339 aa, unidentified
MREVSTIGVDLAKKVFQVHGVDAAGETVVRRVLRRARVLAYFAQLPPCLIGMEACATAYYWARELGKLGHRVKLIPPAYAKAYVRRNKNDAADAAAICEAVSRPSMRFVEIKSEAQQAAAGIHKVRDMLMKQRTMLINALRGLMAEFGIVVGAGTRHVGELTAILADPEEHRIPALLKDGLRRMAEMLRGLERQLEGIDKQIVEWGRGNQTCRHLITAPGYGPILSSAMAAIVVNPAAFRSGRDFSASLGLVPRQDGTGGKVKLGPISKRGNGYLRRLLVNGAMSVLNSKRAKQDPWLVKLLANKERKVAAVALANKMARIGWALMMRQEDFRATSAAA

SEQ ID NO: 376830 - protein, 308 aa, unidentified
MNYSTIGVDISKHFLDICMLPTGEICRYPNDKNGFEELLGLLNKHSFERILMEDTGCYHKAFYKFLIQYFDNVFIINPKRIRDFARSSGRLAKTDQLDAYIIAMYGERMNIISKITRSPAAEKLRAYVVRRRQLISLRKQEYNHIETCLDDDFKSSIYKIIKFIDDEIKQIEKAIKDLIKLDDRFKSIYDRLNQIKGVGDVLITTLMSDLPELGYLNKRQIASLAGLAPMNCDSGKMRGSRHIQGGRASVRHALYMAALSATKTNDVIKIYYTHLREQGKPGKVALTACMHKLLIYINSVFNKEFCSI

SEQ ID NO: 376831 - protein, 405 aa, unidentified
MEIFVGIDWAEAHHDICVLDETGTVLAKRRITEGLEGVGQLHALLADHAAEPNQVMIGIETDGGLLVGALLAAGYEVYAINPLAASRYRERHVTSGAKSDPGDAKVLADLVRTDRHNHRPVAGDSELAASLQVLARAHQNLIWSRQRLVNQLRNNLREYYPAALAAFGTELAHPVALGVLDAAPTPTGGRTLSQSKLAAILRRAGRERGVEEKAAAIQAQLRAPQLAAPALVSEAYGKTVASTVRLLREMNAELSHLEAELAPSFEKHPDAEIYRSLPGLGIVLGARVLSEFGDDRTRFAHPKARKNYAGSSPITKTSGKSRVVLARLARNRRLADACHQWAFCALTGSAGARDYYHRLRQRGKTHHQALRALANRLVGILHGCLDHRQIYREDIAWPRSLTVAA

SEQ ID NO: 376832 - protein, 394 aa, unidentified
MILVGIDIGKNQHTFSIVDMNTGEILSNPSLFNNNQEGFLFLIKKLNMYSKSDLLIGMEDTGHYHFALLKYLLDIRYTVALINPTTTDLTRKLQGGITKNAPLDSLTICDVIGSNQRKKPYRVTKVNRFDLYEQKQLTRHHHNLKEELNTYKNRLQKCIDIVFPEFNSLFRSKYGIVYMNVLKTFSSAQKIANSDIRTIRKCFEYDGRGKRITLSADQLKAAAKTSIGIPSVAEEIQIRHLVCQIEMIEEQLSEIDKKIEEFSLQNNSPILSIPGISHFSGTSILAELGNICNYTKASQIIKFAGVAPYHYESSQFTAQHTAITKKGSRYLRKTLYQIILPVINHNTVFTAYYNKKLAEGKGHRCAQGHCIRKLLRIIYHLLSTEQTFDPALLI

SEQ ID NO: 376833 - protein, 416 aa, unidentified
MVERCAGLDVHRDDVVATVRVPGTGRRRWDQQTRTFKSTLAGLAELAAWLAEVGVTLVGMEATGIYWKTVFQALEERFECWLLNAHHLRNVPGRKTDVKDSEWICQLVQHGLVRPSFVPPPEIRRLRDLTRLRRAQTNERGRSIQRLEKVLQDAGIKLSSVASHTYSKSARAMLEALLSGVSDPEQLAELAKARMRLKIPQLREALASRFTIEHHGVMVAQLLAHIDTLDAAIENLNQRIELVLAPHAKIIELLCTIPGVQVHAAQVLIAECGLDMSVFPTVGHFASWAGACPGHHQSAGRRKSGRSRPGPSWLTAQLTECARAAARAKGTYLAAHFAQLRGRRGEPKAIGALRHDLLVAYYHIVRDQVPFKELGPDWQRKRYSPEHRARRLQRQLEALGYTVTIEATEPTEEQAA

SEQ ID NO: 376834 - protein, 343 aa, unidentified
MVVIGVDAHKRTHTMVAVDELGRTLGERTVAATSDGHLQAVQWAARWPGARFALEDCRHLTRRLEGDLLRAGFAVVRVHTRLMAAARRGGRARGKSDPIDALAVAHAALREPDLPVACLDGPARTVKLLSDHRQDLVAERTRLCNRLRWHLHELDPGLDVPSRGLRRYHVLDGLAARLAVMDGVVARIAAGLVARCRELTSQVNALERELGTLVRQLAPALLAIPGCGVLSAAVIIGETATASRFRSRDAYARFTGTAPIPVWSGNTVRVRLNRGGNRAVNCALHMIAVTQARGIGPGKDYIAKQLAAGKTTTEALRLLRRQLSDTVFRALLADEHRQAHRTA

SEQ ID NO: 376835 - protein, 349 aa, unidentified
MTEAICFAGLDVHARKTAAAAVQLGSGEVFKAQLPGSSTAAIEWLRSLPGEVHAVYEAGPTGFELARAARAAGVELMVCAPGAIPRQPGDRIKTDTRDALKLARLHAAGQLRPVLVPAPELEALRDLIRAREDLRGDLMSTRHRIGKLLLRHGLIWAEPGETWAQRHLQWLSKVRFEQPLLEVVFGEYLAHHEVLLARRKRLDALILEQSVQGPWAPSVARLRCLRGIDTLSAVGLLAEVGDFGAFSHPKQLASYLGLVPSEHSSGEKRRQGSIYQSRLRPCPQAASRGGLALPAGAQHVADAETPPGESASRGDRGCLARPVAAAPPLDTPRRHARQEAHHRRCRGRP

SEQ ID NO: 376836 - protein, 429 aa, unidentified
MNYTQNEKLLQVGEKNLIIGIDIGSQKHYARAFDWRGIEYSKKAYAFSNDVEGFAGFLEWVSDILEKTGKETVIPGMEPTGHYWFNLALFLRDNGIQPVLVNPLHVKRSKELDDHLPSKNDMKDPKTIAKLVIEGRYVNPYLPEGIYAEIRNASNMRFQIEAELTRNKNRIQRWFAIYFPEYTEVYGSFDAISSMMILRQAALPCDIINLGAERINQIWRDAKLRAVGKKRAQTLVDAAQRSIGYTEGLDTARFEMTLLLEDYDRLQNRLKQITELIEKLVRKVPYTEKLLQIKGIGMKTVSGFIAEVGDISRFTDAKQIQKLAGQAIVENSSGKHNGKSRISKRGRKRLRYLLFEAALSLAATNPEFREIHRYYTSRKTNPLKKMQSLTALSNKLIRVFFTILKHGVDYDPKKLLSDIRRPEEMPQAA

SEQ ID NO: 376837 - protein, 344 aa, unidentified
MVAEELDFVIGVDTHADSHTLAVVAAPSGGLLDQQTIATTARGYGEALRLAHERAPGRRVWALEGSGCYGVGLARFLAEQGERVLEVERPSRQQRRRGKSDGIDALAAARCALGQKRWAQPRAGGQRAALAALVSTREGAMQARRAALCQLRALLLALPPERRERLADLTRTRLLERLAARRPRAGAGLEGLELCLRSLARRVRALDREERALKAQISVLVDELAAWLPAEPGIGPITAAQLLIPWSHHGRLWSESAFARLAGAAPIPASSGKLVRHRLDRGGDRQLNRALHAIVVSRRKHHPPTIAYIARRSAEGKSEREAIRCLKRFLARSLFRKLEAMPAA

SEQ ID NO: 376838 - protein, 350 aa, unidentified
MGEISRIGVDTSKAVFTLHGVDASGRGVLRLNLRRSQLLAFFSRLPPMEVALEACGSSHHWGRQLAALSHRVRLIPPQYVKPYVKRGKNDRVDAEAICEAASRPDMRFVAVKSVAQQAEGLVPKLRETLMCQRTQLINTLRGHAAEFGVTAAKGTAHVSGLLAAITADPTIPDVAKEMLALLGQQIDQLNSRITALEARLHAMHKASATSRRLATIPGIGPLIALSLTLEVDPAAFRSGRHLSAWLGLTPKDHSSGGRQRLGGITRAGNERLRALLVSGAMAVIRHANRPASKTATDWLRQLLQRRPRKLAAVALANKIARIAWAVMTSGQDYRPPARPTSACPAAMVSA

SEQ ID NO: 376839 - protein, 402 aa, unidentified
MNAVGIDISKGKSMVAIMRPYGEIVSAPFEVKHTSSAINSLVALINSVEGESRIVMEHTGRYYEALAHQLSQANLFVSAINPKLIKDFDNDSLRKVKSDKADTVKIARYALDKWQNLKQYSVMDELRNQLKTMNRQFGFYMKHRTAMKNNLIGILDQTYPGVNTYFDSPARSDGRQKWVDFASTYWHVDCVRKMSRNAFIGHYQNWCKRKKYNFSQLKAEEIYGKAKELVPVLPKDDITKIIIKQAVDQLNSASTTVESLRTLMNEIAAKLPEYSIVMAMKGVGTLLGPQLMAEIGDVSRFTHKGAITAFAGVDPGVNESGTYVQKSVSTSKRGSSSLRKTLFQVMDVLIKTHPQDDPVYQFLDKKRAQGKPYYVYMTAGANKFLRIYYGRVKEYLASLPES

SEQ ID NO: 376840 - protein, 352 aa, unidentified
MRGYTKGDVKGKDIFAGIDLHRKAWHVTVLCEGEDVFKGSIPGRWEALRHLLERYKGSRIKAAYEAGYFGFWLYDHLIEYGAECIVTPPSLLPIEYGNKVKTDRRDSKKLALLLAKGMLKNVWVPDKEGRHHREVSRRRRQLIVDRVRTQCRIKAALRLYGIDIPEPSGKWSKTYLENIGRFRFGDRWMDGSFRLLLEQYEFLNAAIKEQTELLKGLSETERYKEKVEILRSVPGIGLIVAMEILLELGDVSRFKKADQLAAYVGLTPSQYSSADKVRMGRITRAGKNGLRGTLIESAWRIITKDGAMRECYERIKNRSGSKRAIVAIARRLLLSTRRMLLENRPYMSGLAA

SEQ ID NO: 376841 - protein, 326 aa, unidentified
MTLSRLTDNIFIGIDVGGAGLDVAWHRGDSAHYANRPDAIAALVERLRAGPEVTRIVLEPTGGYEKPLVKALRQAQLPVEVIHTTRFSAYRALVGIKAKSDTSDSRLLASYAAAPDEVRGRKTGHVELPEDAIRDELSALASRRDQLKHMIHAETCRLGTVQMAELRQMITTHLKALRAEDKQVHRMMLELVHQRTDLRRDQRLLKTIKGIGVKSALSLLASVPELGRVDNKAAAALIGVAPFVRQSGTMKAPARIHGGRAAVRSILYMAAVTASRHNPVLRPFYERLIAKGKPPKVALIAVLRRLVVFANAVLRSGQPWKGAITA

SEQ ID NO: 376842 - protein, 428 aa, unidentified
MLKHNTEPDPVQDVAAFLALDWADEKHAFRLQVVGQSKIETGTLEQKPEVLGPWVAKLRERFGGRPIAVGLEQSRGALIHGLMAYDFLVLYPIHPTTVAKYREAFKSSGAKNDPLDAGQILEILTKHQDRLHRLNPDTVETRLLGRLVEDRRKAVELRTTHVQALGANLKEYYPQALELTHGNLSSRLAGDLLLKWPTFADFQQAKPSTLKRFYYGHNVRSPELLERVLALAEKSQALTTDPAIVESGRRLSRMYVGLIQALNPVIADYEQRIQRVFDAHPEAKLFRGLPGAGPALAPRLLAFFGTDRSRYAAALNVQSFTGIAPVTKSSGKSKVVYARAACPKFDRQTFHEFSRLSVSKCQWARNYVDYYTDKGKKYHTIIRALAYKWIRILFKCWQERTPYNEDKYMETLKLRGSIFATWHLQKTS

SEQ ID NO: 376843 - protein, 344 aa, unidentified
MKIVGCDFHPNFQQVAILDICTGEVVELKLMHGSGEAERFYRALESPVLVGMESMGNSLWFERLMERLGHELWIGDAAQIRASYVRRQKTDKRDAAHILQLLIEKRFPRIWVPSNVERDQRQLLLHRHRLVQMRTRVKTELQHLALNQGLQKQRALWSVRGRADLEKLPLEGWTRRRRMDLLKVLDMLETQVGELDEAVGKVAFANAGARLLMTQPGVGPITALAFVVTIGDWSRFRRGKQVASYLGLIPSERSSGQKRRLGAISKQGNVFLRTMLVEAAQSAVRHDQKFKKEYAHRCHQKPKGVAKVAAARKLAVRLYWMLRTQTPYPHAVHNEGSPSHPVVG

SEQ ID NO: 376844 - protein, 358 aa, unidentified
MEPKLIKEGSMYYIGVDYHKKYSYMVVKDQEGNLKDKGTVNNLQEEVEEFLYPYRCGKAVIEATRNWGVMYNWLEELLEDVALAHPLKVKAIASARIKTDKISADVLCDLLRTNLLPQSYVPKKETREAKNILRQRMFLVRLQTMVKNRIYDMLDRHPEITSQAPNVSDLFGPTGMKWLNQVELPGSDNSLLSSELELLRVVRQLISKTNGLIKDLAKDDKRITLLRSIPGLGPFFAVLVAMEIDDITRFCDEKKLCSYAGLVPSSYASGGKVFHGRITKTGNKWLRWAIVEAVAPAVNCDSDIKAYYYRLKTRKGANAAKVATGRRLLTIIYRVLTQERFYRKNIVPDPVPVALMSS

SEQ ID NO: 376845 - protein, 343 aa, unidentified
MVIHYIGADVHCNNTELCIERNGRIVARHSLKTTAEAIRRVLDGLGGQKHLTFEEGPLASWLYRSLKDQVDTLIVCDPRQNKLIAAGGDKDDRIDAAKLARLLRGGYLHPVYHSDDLERITLKRWVALYHDRVKEATRSINKVRACCRLYGDRVPRRALRDPAVRAAWLAGLESDLADQVRLLWMDYDSHARQVRQARAQLVRRAQAYPIIGYWSALPGVGLIRATTLFAYLDTPWRFQRKNQIWKYCGLGLQRCSSGQDRHGRARPARLQLVWPRNARLKNVVVGMALSAIRSRDNLFRQTYERRLRDGALASNARHTAARQMLTVMWGMWKSQRPFESPGW

SEQ ID NO: 376846 - protein, 411 aa, unidentified
MELLVARCAGLDVAKDEVVACVRLPDGRGGRAQEVRTFQTFTSGLEALADWLTAEGVVQVVMEATGQYWKPVWYVLEEAGFELLLVNARHVKILPGRKTDVCDAAWLAELLEHGLLRGSFVPPAPIRELRDLTRYRKRLIQAHASEGQRIQKTLEDAGIKLDSVATDVLGVSGRAMLSALVAGERDPQVLAELARGRLRAKLPQLRQALRGRFGAHHALLIRLGVAHLEQLEASIAELDTQVDRVLAPFAVARDRLDTITGVGKRAAECMIAEIGVDMSVFPTAAHLASWAGRCPGNNLTGGKRRSGKPTKGNRWLGEVLIECAWAAARSRDTYLSAQYWRLARRIGKKKAAVAVGHSILVIAWYLLTDNCDYRDLGGDYFVRRDTDRQRQRAVAQLQALGYRVVLEPLAA

SEQ ID NO: 376847 - protein, 423 aa, unidentified
MENTAARKRKQVPEGYLIIGVDPHKKRHAAVAITQDFTTRDKFKFDNTREGLETMLRRARMEMVKSGCWGVMFAIETGGHYWRNVAYFLDEQDILFRFINQFTLKRRREGKDLNRRKNDYRDSEVAAQLLCTGEFTESKVPQGVYAELRTAHNAYRRLVKERTRITNLVKGLLDALFPEFTHVFKDPCALTALSVLSTCIIPKVIAGMTEDEFVATIEAQHQGRLMRKKLRALHYIARTSIGIAAGAQSVATEISFLVEKLELIRRHIRIIEGTLVRLVDETEEGKYLLSIRGLNYIAVAGLLAELGCFKAYRSAKQMIKMAGSNPTESESAGKRGTHTPMSKQGRPVLRYCAWTSVIPMLRLNPDFRAWAKQRRERPAHANPLNGREVVGAALNRLLRLAFAMVKNQTYYQASKPELTLVAV

SEQ ID NO: 376848 - protein, 343 aa, unidentified
MKHQNIVGVDLAKNVIYVSVVSPSQKLLLSKELTRKKLKEFLAKQKPSLVAFEACATAHYWSRFAKSQGHVTKILPALSVAPFRQGHKTDKNDALAVAEAATRPNIKEAPFKTIDQQAIQSIQRSRELLVGDRTALSNHIRGIMLEFGIVIRQGFSALHQRVPEILEDGDNELPDSYRPTLNLLYGRLCDLRDDIKFMDDQIAALVKQNPACSELTKLEGVGPISAVLLFASLGTGEAFKNGREYSAYLGLTPKQYSSGGKTKMVGISKHIANKRLRAILIQGARAYVHRAKVGDSKKDKWLLALIARAGSGKASVALANKNVRTAWALLTRGTTYRKAMLPA

SEQ ID NO: 376849 - protein, 420 aa, unidentified
MSDDRCRLGSDDVVIGLDLASAEHQAVVLTAAGQRLTRFRIPHTRAGLEELLRRTTPAALGRAGGARVFAFEATGHLWEAVAYVLRARGERYVVVNPLATFRVREARQLSREKTDLTDAEQIAQLCRTGLVTRTQLEARPYLALRRAWGEYARLREERARLKVLVAHQLYGLFPEFLRVWADLLQPGALAVLRTGLTPAAMAALSLTEFVAQVRAHCAGHRIWHYKLAQVHREAAQTIACPDGLDVLAREVQRAVARMDMLTAHMTAVTAEIDVVLAELEEVPYLRTIPGLGWASVAGLLAHVGAITKYHHGRQLIKLAGTNPSRRDSGQTVGRGQRMSHRGRAGLREVLYLATLSCLQHNPPIRAHYDRLIQRADRPLPKMQALGACMNKLLLYAFAVMHRREAFQLDHDWQRTMSRVA

SEQ ID NO: 376850 - protein, 343 aa, unidentified
MEKIGIDVHKVSTQVCVLTEDGEYAEWRIRTDRDALTKAFAQRSKARILLEASTESEWVARHLESLGHEVIVADPNFAPMYASRSRKVKTDKRDARTLCQACHLGAYRLAHRSSDASRLLRKHLRARQALVQARTRMISVCRALLRQEGLRAPSCGAASFAHRVRALELADQLREALEPLLQIHDQLCTQIDATDKKVERNVEADDRVQRLLTVPSVGPVTAATFIAVVDDISRFESADKLQSYLGLVPREYSSGEKQQRGHITKAGNSRLRSLLVECAWGILRRRNPKSEALEQWAARIALRRGKRIAVVALARKLAAILFAMTKHARDFEPPHLKSTAAVA

SEQ ID NO: 376851 - protein, 350 aa, unidentified
MKKVVKQVVGIDVAQDELVCCFGKVYEDFTLDLVTRYTFQNKPTGFKKLIEWLEPIVNKEVQLRFVLEATGVYHQSFAYFLHDQSYAVSIILPNKISNFKRTLDVKTITDKTMADAIAQFGLERNLDNWQPPKGIYRVLQQLTRERSQLIDEKVVIKNQLHAENAEAKPNKKSIERCNKRLALIEKQVKEIVQEINDLIKTDEEVKKIMLLVCSITGIGILTAATVLGETNGFELIRNKRQLTSYAGLDVKEKQSGTSVKGKPSISKKGNKHLRKAMHLPALSAIKHDERFKAIYTRIVSKHGIKMKAAVAVQRKLLEMIYTIYKTKVTYDKAYFKKHNEIIEAVECEIV

SEQ ID NO: 376852 - protein, 367 aa, unidentified
MTTTTMPATSANPQSEIVLGVDTHRDQHVAAVLNAIGAVIATSAFATTASGYTDLLDWARSFGMLRRAGVECTGSYGAALSRRLQVAGVEVTDVNQTDRADRRKRGKTDTLDAEAAARAVISGRAATVAKTGDGHVEAIRVMRLARNSAVNAKVKAINQLKAIIVGADPALRDSLAGLGPATLIRRCAELPDTPGSATVAETSVVFTLRLLAERIIALKKEAYTLHVRIRELISTLVPELLEQNGVGPDSGAALLIAAGDNPQRFANEASFAALCGVSPVEASSGMTSRQRLNRGGDRQANAALYRITLSRLRWHPETIDYMNRRLAEGKTRREIIRCLKRYIARQLFAIIRQPGHETAALEPAMAA

SEQ ID NO: 376853 - protein, 374 aa, unidentified
MGNVIYVGVDVHKDTNSVCLFDQQDGTILNERKLDAGFPFLDKYLKKMKKDGIVKEEAEYFIGYEAGPTGFGLCRSLQKEGYDCVVMAPTTIRKASGEKVKTDRKDARLLAATLAADAYKGVYLPDDEDEATKEFTRTRNALQGHLKKSKQQLLGFLLRMGRPYPESGNYWTEKFWEWVKTVRFKHVKLQRSLEIFILQVKDLQDKIDAMDNDIEEIADSERYKEKVGKLVCFTGIETHTALSLVCEIGDFSRFSTAEQFSSYLGLCPGQDSSGKKVQYNAITKSGNTRLRLLLIEATKGVKRSNPYNKSKRIKARQSGQSPLVIAYADKGTKRIKSKMTALESRKGKNVNVSTVAGARELSCFVWGMMTNHID

SEQ ID NO: 376854 - protein, 341 aa, unidentified
MDHYAGIDVSLECSSICVVDASGKIVREDKVASEPEALIGWFRSLGLSLGRVGLEAGPLSQWLYAAMREAGLAVELLETRHVRHALDTMPVKSDRNDARGMAQLMRLGWFRAVHCKSMGAQETRAVLTARKLMQKKLGDVEASLRGTLRGFGLKVGKTTPKRFAGRVKDLVVGHASLEAIAEALLAVHAVLLREFNGFERRVRTMARHDAKARLLMSTPGVGAIVGLTVASAIDDPARFKSSKRVGAHFGMTPKKYQSGETDYTGRISKNGDKGVRTALFEAAHVIMTKPVKGSALKSWAMRLAKRAGMKKAKVALARKLAVIMHRMLVDGTTFDFAAAAA

SEQ ID NO: 376855 - protein, 361 aa, unidentified
MTGIVTWAGLDVHARSTHGAAVNPVTGELVRVRFGPGVEEPVAWLRGLPGPVRACYEAGPTGFGLYRAASAAGVSVEVIAPGKTPRGPSERVKTDRKDAELLARLLLAGSLTSVVVPPIEIEAARELMRSHDACRRDLMTARHRVSKMLLRHGRVYPQPTTWTVAHRRWLARQQFQEPVSDLVFADLIAAVDGLTARKAAIAERLSRLAQDEQWWPTVARLRSFRGVDTLTAFALHLELGGDWQRFARPSALSAWLGLVPSLHQSGESSHQGSITKTGSGFARRLLVESAWHYGRDPRIGVTLQNRQQGQPAHVLQIANRAQQRLHRVYHRMRSRGKPHNVIVVACARELACFLWAAATAD

SEQ ID NO: 376856 - protein, 430 aa, unidentified
MEEVDEQELHVERLAALDLGKAVLEACVRVPHASKPGRRMQEVRTYPTTTAALLQMADWFRCWSVTRVVMESTGDYWKGVYYLLESEGFECWLVNARDVKNVPGRAKTDKLDVVWQAKVAERGMCRPSLVQPRPIRELRNLTRYRRSLTRDRTREMQRVEKLLEDAQIKLSSVVSRLFGVTGRLILDALVAGQRDPKVLAQLAKGRLRPRIGQLQEALRGFFTNHHGAILAMMLTNIDRLTAQITTLDTMIEQAIAPFTHQVQQLAQITGAGPTAAQEIIAEVGVDMGRFPSAAHLVSWAKFCPQTHESAGKRKNKGRAKGNPWLAATLGNIAAANARTGAGFLGARHRRIARRRGPQKAIVATGNAILVIVYHLLSDPAAQFRDLGADYFTTRIDTNRRARNLAAALQAVTGQKITIRDGQAVIEAQAA

SEQ ID NO: 376857 - protein, 432 aa, unidentified
MEKIREKAAGIDIGAKKVFVAIEGQEVRYFFTFTEDFEKLRDYLLEHKIETVAMEATGVYWNILYEILEEAGIDVWLVDGRQTRQVPGRKTDVKDCQWIQQLHSYGLLNRCFVAEADIKELRAYQRLREDHIRSASMHINHMQKALTEMNIRLTEVLSQIHGVSGMAIIGAILKGERNKETLLKMCDRKIIKHKKEDVLKSLNGRYTRPGIFALKQAFDSYMFYQHQIEQCDQMLSEVIEKIGKGKPDQYPQGPRKPIRHNKPDINNLGISLLKIFDGKDATALSGITDYSWMQLMSETGTNLSRWPSEKAYASWLGLAPGQHTSGKMRRTKRKNGHPKAGQIFRQIAQSIITSKHIALGAFGRRLRARKGSQIAIKSVARKLAILYWRIMVKGMTFVEEGIKKYEQQLLLQKHKSLERLAKDLNIQIAYNV

SEQ ID NO: 376858 - protein, 415 aa, unidentified
MAALARWVGRAVGLDVHRDFCVVAICEDGRVRSAGRVPSTPEGVRALAESLLPSDRVALEVTGSCWEVARILEPHVNRVVVVSPDDTGISSARAKTDRLDARTLASLLWKGELEAVWMPDERCRILRRRLARREQLMRARTRVKTEIHATLQRRLQERPPCSDLFGVKGRQWLAGLELPLEERESVDAGIRQIEFLDAEIAAVERLIAQQALSWPEVRRLMTVPGVNLVCAATFIAAVGNANRFLTSRKLVAYLGLDPKVRQSGEAPARSGRISKRGSASARWALVEAAWTAVLQPGPLHAFYERTKARRGHGKAIVATARKLAILFWCMLNRSEDYAHQQPSLTRKKLRRLEITAGAPKNAPRSADVWSTNQLMRTAERELAEQAEASYKRMVQDQQAGAPAKRVGASATLERA

SEQ ID NO: 376859 - protein, 472 aa, unidentified
MSKGSGNGTTRGDRRRNARRERLRELLPRDGAVIGIDLAEDKQALAVVDHDVRVLARKTVTVKAFRLGEALDWAVAQARVKGFKQVAVACEPTGPRWMQVQRLCAERGLPLVCIQPLVSHIAREQQDYTTHKTDESDCVLIARLAAELHCYIPEELDETWAHLRHLGRRRAQLITAATASVQRIGDFLSVAWPTVTETCAQPFESKTWLAAMQLVTSRCGGQPARLAAMGEEAFTAAVRAAVRDWGGQKAWGPISRRIFTALTDTEGVVAWSRRGLLRRVADELGDLQRIRAQLRATEADMISVLAELGLSRLADIPGLTAVGAAAILAETGDPRRYDGSSSLVKHAGMSPSDNASGAFAGQAHISRRGRPGLRLTVWRAVWPMLQFNPVMAAKYQAMTRAADAAAADAGPQHGTAAQTAARARRAKARVACAASLLRWIYCMVVHGTSWDPEVASGAASCHDAPQHQAEAA

SEQ ID NO: 376860 - protein, 373 aa, unidentified
MSETTYAQIARVGVDLAKQVIQVHAVDVAGRRVVARMLKRDQFFAWCVELPVGCMVAMEACSSAHHWARKLRALGIDARLIAAHFVSPYRMEGRSGKNDATDAAAICEAASRPSMRFVPIKTCDQQGVMSLHRVREGLKEERTACINQIRGVLTEFGLVFGKCPKALRANLADTIEDASNDLTALARWVVQRAFEHWRELDEHLRWCDRQVGQHVRASPAAQRAAKIIGIGELGASALTAGVGDFKQFKSGHQFGAWLGMVPRQDSSGGKPRLGGITKRGDDYLRTLMIQGAKAAVITASKRDDPISRWLTQLTARVGWQKACVAMANKNARILWAVMTREEGFDPRHVSIKPQTLSPRIVDALASETMACPA

SEQ ID NO: 376861 - protein, 402 aa, unidentified
MNCVGIDVSKGKSMIAVMRPFGEVVVSPFEVCHTVNELSELARQLKSLDGETRVVMESTGNYHAPVAWLLHGAGFYVSVVNAMLVHDYGNNSLRRGKTDKKDAVKLANYGLDHWLTLPRYVPEEDTRLMLKTCYRQYQQYSKVQTMLKNNLISLLDTAFPDANRLFTSPPRADGSEKWVDFVATFWHCECVCGLSKKAFTAKYQKWCRKHGYNFSQDKALDIYASACGRFGVMPKTNTAKLLVEQAISQLQTTSAALAALKQEMQSLAASLPEYPVVMEMFGVGPTLGPQLIAEIGDVRRFHSKKALVAFAGIDAPPYQSGQIDVRSRSISKRGSASLRRTLFLVMGVLLQCAPMDEPVYQFMNKKRSEGKPYRVYMMASANKFLRIYYASVKAYLDSLEHD

SEQ ID NO: 376862 - protein, 366 aa, unidentified
MGDVITYVGIDAHKKDLQVAVLTGDATTPITWTVANEPRAIERLRRKLERESAGPVRCCYEAGPCGYALRRQLHRGRVDCQVIAPALIPRKAGDRIKTDRRDARKLAELWRAGLLTEVHPPTPADEAARDLVRARDDAREDLQRCRHRLGKLLLRRSLHYPGKNWTQAHRRWLGTLVWEHAAERRVVEDYQLAIDQLVARLLELDAALQDLAASEPYRDAVGWLRCFRGIDTLTAILILAELHDFRRFLTPRALMAYLGLVPGEHSSGEQTRRGRITKTGNALVRRALVEVAWHYQHRAGVAPALKRRREGQPPQVIAIADKAQQRLCRRFRRLAAEHKPTPKVAVAVARELAGFLWAALQVPVAA

SEQ ID NO: 376863 - protein, 341 aa, unidentified
MSLFAGLDISVKTTAICVLDANGRVLLETMVDSAPEAIAGRLHEFGQPFERIGLEAGPLSQWIYAGLVDVGLAAICVETRHMHAALSARINKTDRNDARGIAQMMRVGLFKAVHVKTPASQHRRLLLTSRKLLQRKIYDIENDLRGSLRNFGLKVGVVGKIKFEDRIRELVADHSFVAAIVAPLLEARAALRAQFAKLHRMLLDLVQVDPVCRRLMSAPGVGPIVALTFRTCVDNPARFSRSKCVGAHYGLTPRIYQSGEISRTGRISRSGDVMLRSSLYEAALVVLTGPGRWNPLKAWGIAVARRRGMQKAMVAVARKLAVILHRMWRDDTDFRWSAATT

SEQ ID NO: 376864 - protein, 417 aa, unidentified
MAEGAEWFVGIDWASQSHQVCLIDAHGQCLGERAVAHGGPGIEELCDWLIARAGATPEIIAVAIEMTQGPVVEALLERGFCVYGINPKQLDRFRDRFTVAGAKDDRRDAHVLADSLRTDRHAFRRLSNDEPVIVKLREWSRMADDLQQERTRLASRMREQLWRYYPQMLELADDLVADWFLDLWNQAPTPAKAARLRQTTIERFVKAHRLRRWQAPEVLRILKQKPLSVAPGVVEAASDHIRTLTVRIRLVNQQLKAAHRKLDELCAQLIPSEENEPGQQCEQRDVVILRSMPGLGRIILAVLLGEVWQPLRRRDYHALRSLSGVAPVTRRSGKTCVVVRRYACNKRLANALYHWARLATQHDALSRRRYAALRQRGHSHGRALRTVADRLLSVACTLLEQQTVFDPTYKVHEAADA

SEQ ID NO: 376865 - protein, 403 aa, unidentified
MGCVRTPAPDGGRAKQTRTFPSFTGDIEAMADWFAAEGVTEVVMEATGSYWKPVWYVLEDRDAFELKLVNAAHVKILPGRKSDVLDAEWLAELLEHGLLRSSFVPPPVIRELRDLTRYRKRLVQAHTAETQRIHKTMEDAGIKLDSVASDSLGVSGRLMLRALVAGERDPEALAELAKGRLRKKVPELRRALRGRFRDHHALLVGMCLDHIDHLEAAMATLDARVEGLFAANQSEAGIPFERARDHLGTIPGVGQRAAECIIAEIGVDMSRFPTARHLASWAGMAPGNNITGGKRRSARTTKGDVWLRDMLTQCAWSASRSRDTYLSAQFWRLARRIGKKKAAVAVGHSILVICWHLLSEDCDYTDLGGDWFSRRANLDRHRDHLIGQLQALGYGVTLNKLAA

SEQ ID NO: 376866 - protein, 391 aa, unidentified
MIYVGIDVAKDKHDCFITNSDGEVLFKAFTIANNLTGFTELYQKIESVMEDVSKVKVGLEATGHYSYNLLGFLLDNGLPTFVINPLHTNLYRKSLSLRKTKTDKVDSHTIASMIMSDVNLKSYSDTSYHNEKLKSLTRYRFDKVKERAKLKSSVSRLVCILFPELEKLVPQLHIASVYALLSEFPSAHAVASAHLTRLTHLLSESSKGRYGKDMAIIFREAARNSIGSNMPAKSLELKHTIKLIRELTSEIDEIEIEIKSIMDEINSPILTIPGISYRMGAMIIAEIGDFNRFNSADKILAYAGMSPSTYQSGQLDNCYSHMEKRGSRYLRYALYNATKYVCHWDSTFAEYLAKKRAEGKHYNVAISHAIKKLVRVIYHLEKTNQQYIKAD

SEQ ID NO: 376867 - protein, 344 aa, unidentified
MITIGIDPHKSSHTAVALDPTGRVVGELRVLATKTTLERLLRWADRWPDRIWAVEGAAGLGHLLAQRLVASEETVLDVPATLAARARLLARGHGRKTDGIDAASVARVAQSQPDLRRVGPEDHSTMLRLLSDRRDELAQERRRVVNRLHRLLRDLLPGGAPTELSTEAAARLLNRIRPKTAVDLERKVMARALVADLRRADRALAANRARCVAAIAASGTTLTTVFGISDVLAAKILGHVGDVGRFASADRFASYAGTAPIEVSSGEVTRHRLSRSGNRALNNALHLAARVQVMHPGPGRDHYDRKLAGHKSSREALRSLKRQLAKVVYRHLVVDQAHRRALAS

SEQ ID NO: 376868 - protein, 337 aa, unidentified
MLIKVLGIDLGKTSFHLIGHDHAGREVYRKKCNRAQLLKILLQLDKTTVAMESCAGSHWLARKCQSFGHNTKLIPPQYVKPYVKTNKNDYIDADAIAEASTRPSMRFVSVKTEESQILSAVQRIRSGFIKEQTATMCRIGALLLEFGITFPRGHAAMGKLFQWLADKNHTLPPLLLQELAVLYEHYQYLHQKIAEQDKKIKAVLKESEMGELLQTIPGIGPMIASACLSEVPSPKDFKNGRHLAAWMGLVPRQYSTGGKSTLLGISKRGNKSLRTLFIHGARALISRPKIAEAIFGDWIPELLKRKPFNVAVVALANKLARIAWSVMVTGLPFRKMN

SEQ ID NO: 376869 - protein, 388 aa, unidentified
MFQTIDQSKKCLNAFEQDSTLVAVVELSQKSWLVAGIVPGVDRHPLKKFDADENRLLALIQRWKQEAIKAGREVKRIVVAFEAGRDGFWLARWLQARGIEACVIHPTSVSVPREQRRAKTDRLDTELLKRATLGWLRGEPDHCRMVAIPTLEEEDAKRSNREHQYLVGERTRLINRLKAALARLGVRNFNPKLRKASERLRALVTPEGKPLPPNTLAEMERDMQRLQFVKQQIKAIEQTRFERLKKAPKTRLNMMVLLVARVFGMGIETADMLVHEVLSRDLRDRRAVARYAGLTGAPDESGARRREKGLARAGNARVRRGMIEFAWRFVRFQKNSTLAQWFRARTADARGPTRKTMIVALARKLLIALWRLVATGEIPTSLTLRPAA

SEQ ID NO: 376870 - protein, 365 aa, unidentified
MSTSLPHRGVVHLGLDVSKDWIGGVLRPDEVVPDTEKVFHDEESVRRLIARLGPPAGLRACYEAGPTGYELHRLLTSLGVRCDVIAPSMIPRAPGDKVKTDKRDCRRLARLHRAGELTAIRVPTPAEEGVRDVCRARQVAVEDLARARHRLGSFLLRHSVVWRGGTSWSLRHRQWVANRTFADAATRSAFGFYLAEVTTREASLDAMDAELTGWCGNELFADAVGRLGAYRGIDALGALTIAVEVCDFRRFATARSFMGFCGLVPREYSSGTSTWRGQITKAGNVHVRTQLVESAWAYRFQPNLSANLRRRQQGIDPAVAARAWAAQLRLCRRFRHLAAHKQSQSTVNAAVARELAGFVWAELTT

SEQ ID NO: 376871 - protein, 353 aa, unidentified
MKYVGLDWAYRVAQWCALSPGGEIAGEGRIAADRDGLARLVLELGDEVKACLEMMSGALWVRDELVACGWQVEVADARKVKTVAPLAAKTDKVDARLLAELSRRELVPALWLPSLDERALRERLRRRMHLVRLRTSAKGRIFGLQTQWGIRISLRRLRRADGITLLERAGMPAVWRRSISECLVLIDFLDKRIAPLDAELRPFAKADPRAVLLDTIPGVAELLALTIAVEVGEISRFGGPEKLVSYGRLAPRVHQSGDGRPHTGPLSKSGSRLLGWAAVEAAQQAWRESNPWHQLYLDVAGRSHNHNSAKAAVARKILIAAWHMLSRNEPFKPAPRSTADTSVPASSRFALAA

SEQ ID NO: 376872 - protein, 412 aa, unidentified
MRLCVGDDWAQDHHDIEVMDEAGTVLARRRLPEGVVGIGQLHELIGRFMPVAAGDSVTAEVQVGIETDRGPWVRALIAAGYVVFAVNPLQASRFRSRHGVSGAKSDGGDAHMLADVVRTDAHQLRPAASDSPAAEAVKVLTRTHKTLIWERAAMVLRLRAQLLEYFPAAVAAFEDLDAPDTLELLGKAPDPSRAAKLTRAQIAAALKRAGRYKITERTEMILTALRSPQLGQPPALTAAYAATVRSLIAVIATLNQQVSRLQGQVEAHFGQHPDAEIYLSQPGLGEITGARVLSEFGDDPRHYASGKARRNYAGTSPITRASGKKKIVTARFVRNDRLIDALTIQAFAALRGSPGARAFYDQQRAKGLEHNDALRRLAGRLVGILHGCLKTRTCYNETTAWGHRVTQPGVAA

SEQ ID NO: 376873 - protein, 420 aa, unidentified
MNRNRSKSRVDRTMPMVHPNAAAIDIGATMHMAAVRADRAPEPVRSFGTFTADLHRLVDWFTECGVETVVMESTSVYWIPIFELLDARGFAVFLVNARDAKHVPGRKTDVSDAQWLQRLHSFGLLRASFRPKGQIAELRAYVRQRERLLEYAASHIQHMQKALTEMNLQLHHVVADITGATGLRIIRAILAGERDPEALAGLRHYSCQSSAETIAKALTGSYRTEHLFALEQALSLYDAYHEKASACDVRIESVLKELIIHRGHDHGSAPPVSRRRNRTDQANALAFDVRAALFGLLGKDVTMIDGLGPYLSLKLIAECGDDLTSWPSAKHFTSWLGLAPSNKVSGGKMLSSRTRRSGGRAAALLRLAAVTVGRTDAALGAFYRRLSSRIGKAKAVTATARNQAQGGGIGRRPLSIRNAR

SEQ ID NO: 376874 - protein, 376 aa, unidentified
MTKLRFLGLDVHAETIAVAVAESGEEVRSLGTIPNRLESIRKMIGKLGPVKELRACYEAGPTGYVLYWQLTTLGVECQVVAPTLVPTKAGDRVKTDRRDAEKLARCHRAGDLTAVWVPDEAHEALRDLVRAREAGKKDQLRARHRLSKFLLRHGCRQPDGMKAWTKTYLAWVKSHVHFDQPALEAALQDYFHEVEHAAARLERLEKSLDEAISKAPEQIRAVIEALQALRGVAQLTAATIVSEIGSFSRFEPRRLMGYSGLVASEHSSGNRLKRGAITKTGNAHLRRVIVEAAWAYQRRPWIGGYLLRRQRDLKLTEEVKEIAWKAQHRLHKRYVKLTAGGKNKNQTVTAVGRELLGFIWDIAVRTERAGEPTRAA

SEQ ID NO: 376875 - protein, 460 aa, unidentified
MGRTMKNEDSGRESESVRYVEESSGRGVERQLAERKDGRSFTDSMNRIYMGIDVGKKSHHATVLGCTGQVEEQFQFANTRRGFDGMVSRIQVYQGRGFRVLVGMDATGCYWYSLYSFLSRHLDGESVKVVNPLQLGRYRKLLIRKTKTDEKDSELIARLLIMNLVPQTELLAGDTLKLRQLAKHRFRLADEVGNKKKRLRSVLAYLFPEFEQVFRTITSKGALHILSRYPDPAALSRVSERGREDLVKDLARISRTPASNAAHKLDALMDAARRSIGVSFLAEPASLAIRQTVTQLEILEQQIGEVDHAMNRVLENNYLWPVLQKRPGIGPVIAGTIIGMIGDPSRFAGRSQVVAYAGMDLAVYQSGSRSVTRKLTKRGSPLLRRVLYLAAARAATCDQRCKDYLQKKLGEGKHYKSAVTALARRMIEWIYSDMVQAQKQAQKQAQRATKPVTERPEPST

SEQ ID NO: 376876 - protein, 369 aa, unidentified
MKKNNMYIGMDTDKNSIDVAIGEEGRNKEVRHYGRIENNLSSIDKLVGKLETLGHTLHFVYEAGPCGYTIYRHLRAKGIDCAVVAPSQIPKRSGDRVKTNKRDAINLARLHRAGELHRVYVPLPEDEAMRDLSRAREDAKRAEVKTKQQLSAFLLRNGFKFTGKTPWSNPHRRWLNEIRLPHPAQQITFQEYRDAVDEAHNRVERISEQIRTLLPNWRLKPVVEALQAMRGVSLIVAVITIAELGDLTRFTNPKQLMKYLGLVPSEYSTGDNRRQGSITKTGNGSARRALTEAAWSYNRPARVSRAIDERQKNLPKVIKEIAWKAQLRLCARYRRLVNKGKNKQVVITAIARELAAFIWAIACQVKINA

SEQ ID NO: 376877 - protein, 413 aa, unidentified
MDVVHARCCGVDVHKATVVACLIVPGAQGRPTKEVRTFGTMTVDLLQLVDWLVAAGCTHVAMESTGSYWKPIYNLLEGVIDEVVVVNAAHIKQVPGRKTDVKDAEWIADLLRHGLLRASFIPDRPQRELRELTRYRTALVRERSAEVSRVQKVLEGANIKLAVVAKDITGVSGRDMLAALLAGSTDAATMAQFARGRMREKIPQLEKALVGRFAAHQRFLVAQQLAHIDFLDDLIARVSAEVAERVGPFEELIALLDTITGIGRLTAEVVVAEIGVDMTRFPSAAHLCSWAGVVPGNNESAGKRRGGKIRKGSPWLRAVLVEAAHAAGRTKTSYLGAQYRRLVARKGRKRAAVAVAHSILTIIYHVLSDRKPYADLGVDYFDRRDQQALERRLVSRLEALGYDVALQPKETAA

SEQ ID NO: 376878 - protein, 403 aa, unidentified
MSQELSIDIFLGLDVGKSEHHACALDRDGNKVFDKPLPQLESELASVFHQLQEHGTVLVVVDQPNTIGALPIAVARACGCEVGYLPGLAMRKAADLYPGRAKTDKRDAFIIADTARTMPHTLRAVDRSNEVLSALKMLSGFDDDIARDCTRTVNRLRSILTQIYPSLERVFAGSTLTRTPVLDLLIHYKGPQGLKRAGYHRVLNWMIKHTRKDPTPLVDEIFAALKAQTVTVPGSDAAELVIPQLAANIKALKEQRNTIAEQVEGMLDDFPLCEVLMSIPGVGIKTAAQILLAIGDGSDFDSAGHLAAYAGIAPVTRRSGSSIRGEFPARSGNKRLKNALFYSAFAAIRSHEPSRQYYERKRAEGKRHNAAVICLARRRCNVIYAILKNKEFFREIPPRPAAA

SEQ ID NO: 376879 - protein, 426 aa, unidentified
MTNAHSIPDNAVLVAIDIAKARNDVLIEIAGQKRRRRMVVQNTRAEHDRFIDLLRSFERPVVAGFEATGNYHRAVAWRLLDAGFETRLISSMALARTREAIHNGWDKNDPKDAQVILHMLRTGLSQYYQDPLAAGISDIQELSKTHEMVSKAKTETLHRILTHYLPLYFPEIERFRQNSRSEWFFAFLEQFPTPASIVALDKEAFVSAAWDVVGRKVSKARLIADIYETARESIALPIPIDSQAVVMFRMVLAEIRSLIRQRDAIEAKAEDLLGGQRDYEALKQVPGIGPINALTILAEAGDLRRFGHHRQFLKFCGLDLSTHQSGAFRGQTKLSKFGNARLRRTLWMAAQVAIRQKENSFREKYERYVAKDRNNADLKRKAFTAVTAKMARVVHAVIKSGNQYRPFFEGSAPSGRTPLCKGRGGA

SEQ ID NO: 376880 - protein, 349 aa, unidentified
MDRYVGLDVHLRSTTIAVISASGKRIKTLVVETHGQALVEAIRLIPGRLHICLEEGTQSAWLVELLRPFSERVVVSLPDRIRGAKSDKRDAWKLAEELRTDAVRISVYKAPTHLAALQCAVRGDLMTAQDLVRVRNRLKAVFRSRGIATDASVYNPELRPKWIAELPRAQQQLAELLGRELDILEPLREQAQRWLFAEAKTHPIVRILSTAPGLGRTRTAQLVAVVATPFRFRTRRQFWSYCGMGVITRSSADWRQRNGSLFHAPVQQTRGLNRRRNALLKAVFKGAATTVIRQLPEDPLHAHYLRMLDSGIKPPLAKLTLARRIAATVLSMWKHEEVYEPTRHAGVTD

SEQ ID NO: 376881 - protein, 339 aa, unidentified
MTAPATAATTAVEPIAPSRVLGCDVGKSAVVVFDSLTGRITEIANDAGALATLTADLARNAPSACLVVCEATGGYESALLAAVAAAGIPAHRADARKVKAFIRSLGRLGKTDAIDARALARYGQERHAGLSRWQPAPRVGEDLSTLTRLRTRLVKQRVALTNQLRAPGGAVVKHRLQAICDAVSDQVTAIEAEMRGLVENDPATAAAVALIEEIPGCGHRTAVTLAALMPELGTLSRRRAASLAGLAPHPRQSGQHDGYRRVRGGRPEVKRALFMAAMAARNHNPDLKTVYDRLIANGKKPLVALTALMRKLITIINARIRDARKPTPPDAQPAAAELS

SEQ ID NO: 376882 - protein, 346 aa, unidentified
MLSAGLDLSRQRLDVHVLDEDGQTIEVTAVRPDVDALRTLAAHVRRRGQEVTAAIESMTGARFVHDTLERYGWDVAIADAAKVKGIAPLAAKTDKIDAWVLAELARRDLVPEIWLPTPDVRAERERARFRLHLVHHRTALKNRIHATLMTFGHPVSVADLFGLAGRELLAGLALPEPWTTTLSTSLCMVDRLGAEIDACERDLRRLGADHPSILLLLTVPGVGWVLAYTIVSEIGDIGWFSSPKKLTGYTGLCPLVRQSGNRDVRGPLAKNGPKYLRWALIEAATHAARDAHYRERYERTKGRLGRQRGAKVARVDIARKLAEAIWHILTKNEPFAPAGPAIVLVA

SEQ ID NO: 376883 - protein, 306 aa, unidentified
MQNITLIGIDLGKHSFHIHCQDKSGKVLLRKKFTRTKLIEFLAGCASSTVVMEACAGAHFMARRIADLGHEAKLISPQFVRPFVKSNKNYFVDAEAICEAASRPSMRFVQPRTEAQQAMRALHRVRESLVSDKVKMTNQMHAFLLEFGISMPTGVAVVKRLSTVLAENELPPYLAQLLMRLHAHYIYLVGQITELEIALEQELSRDEVGQRLQTIPGIGPITASVLSSQLGDGKQYSCSRDFAASTGLVPRQYSTSGKNTLLGISKRGDKNLRRLLVQCARSFIQRISQEGWRIGSGRCWQENTPA

SEQ ID NO: 376884 - protein, 341 aa, unidentified
MWIIGCDFHPSVQQIAVVNQATGEFRKLRLEHKAGEAERFYRSLAGQQVRVGMEATGSSRWFERLMDELGFELWLGDPGKIRAAAARKPKNDDRDAFLLLTLLLERRFPRIWIPSPEQRDARQLVLHRHRMVQTRTRAKNQLYALASSEGLHPKRRAWTQAGQAELMALPLPPWASTRRRDWQHLLSALNERIQPLDQALQQEAKSRPEVQLLMTHPGVGPVVAMAFVLTICEPARFENSGQVAAYLGLVPMEDSSGKGRQRLGHITKQGNSMLRGLLVEAAHVAARYDAQWRRKYVRLAMKKNRSIAAVAIARNLAVRLWWMWKLGLDYGQMNESRSHAE

SEQ ID NO: 376885 - protein, 430 aa, unidentified
MKSNTQNAKIEAITEKTLVLGIDVGSETHYARAFDYRGIEYSKKPFKFSNTEAGFVTFKEWILDLKERHEKDKVVPGMEPTGHYWFNLGKFLHDNEMKPVLVNPHHVKKSKELDDNNPTKNDRKDPKVIAGLVREGRYMIPYLPDGVYADLRTASNIRFQLQAELTRIQNRISRWFNIYFPEYKTVYGKPDAKSGILILKAAPLPEDILTLGIDGVNQIWRDAKLRAVGKARAKTLIEAAEHSVGSKEGAVAARMEIRMLLEDYESRSIRLQEVMTLIEGLVKQIPMAEKLLEIKGVGIRTVSGFLAEVGDISRFNNPKELQKLAGLALVENSSGKHKGETTISRRGRKRLRYLLFEVAMSLVAKNPEFRELHNYYTTRRLNPLKKMQSLMAIAAKLIRVFYVMLTKGVNYDPKKMVNDIKRPAVYLQTA

SEQ ID NO: 376886 - protein, 473 aa, unidentified
MKAPRPPRKGPAKSGSRKATTRPKGSASPAGLDPLTHPDAAGIDVGAEEFVAAVPPGRCTEPVRTFPSFTSGVEALRDWLLQCGITTAAIESTGNYWITLYDTLSASGIDVYLVNARHVKGVPGKKTDVQDAQWLQQLHAAGLLKKSFRPAPDIVPLRFLMRHRREMVADSARHLQLMQKSLTEMNLKLQHVFSDIDGTSALAIIDAILAGERDPDALARLRDRRCRSSLSDIKEALRGDYRPEYLFVLQQSRAAWAHLQQAIAACDEQIGLLAAGVSTPVDTPAPTPAPGTPALKKANKNSPRFPIREEAWRFYGVDLSLVPGVGSGLLSSLMSELGTRDQILENFRSAAALASWLGLCPDNRISGGRILKAKTRKVKSPLAHAMRLAVFGLQNSDNRLGDYFRRMKARLGKAEGLVATAHKLIRILYGMIQKQQPYDETEAFHITPQNLARRLRNLEKQATALGKQIVEAA

SEQ ID NO: 376887 - protein, 656 aa, unidentified
MSRSCQNRRRAPARTATSQDAGCTPHAAAAPTPVSVPDTTDPKASRSAAAPDDTPLAIGVGIDTSRYGHHATFLGADLQPAASDLKFGESAQGYQQLQERLAALRKKHGSVHFHFRLDVAGRYADNLLAFLHGLPEPRTISCGDPQRNKNYRAALFGHKKSDAVESTAAARYALTEKPKPLPLAPPAVHQLCQIASRLESQTRQGTRLINQLHNLLARAFPELALLVKDLSAGWVLALLDRYPTAAKLAAARAASLEKIPYLPQEHIAALLEQARTSVASLTGPVAEELVRDLVGQLQEAHVRHKALEKLLVSAYRQLPEPNHLDSIIGFGEVTAAILTAKMVSPSRFVEPGKLVGYFGIFPVEASSGIDREGQPRAPKRLVMSPRGNALVRRYLYMAALSAVQHNPAVRPLYQRLRAKHPDKPGLALGHAMRKLLHLALAVWQTGKPFDPSHYDWDKPAHRQPQADLPAAKAPETHPEHTQESAQAAGHKNPVTTPVRSVVTAACATLSVTEAAPGGKDSVAAGRAAAASVDRSAQTNPHPRTADPAPWIDFAHLKSQLPLQRVLEHLNLLASLRGRSSQRKGPCPVHAPRGEGRTFSVNLDKNLFQCFDPPCGCKGDVIDLWAALHQLPLRDAAVDLIQTFNLEPAPRTEKRHG

SEQ ID NO: 376888 - protein, 341 aa, unidentified
MKKFIRIGVDLAKNYFQVHALESENGRAVTRKLKRSKMHEFFSQIEPCLIGMEACGSAHYWGRELKAMGHEVLLMPPAYTKPYVKRGKNDAVDADAICEAMSRPGMRFVPIKSPEQQATLMLHKTRELLVKQRTMSVNALRGHLSEFGIVAAKGIGRVDELLDLAESDATLPNAARASVKVLAQALEGLDKAIDDLEKEISSAHAQNEMSRLLDKVPGIGKLIASVIAASVPDPSVFKSGRDFAAFLGLTPRQNSSGGKQTLGGITKQGNRYIRKMLVLGATSLLNVLGKRKGALRDWIVGLLAKKPARLVTVALANKLARILWAMMKTGECFRTEMFAKA

SEQ ID NO: 376889 - protein, 482 aa, unidentified
MKATPKEPAPKATGQSTQPNWHQMNRKQRRDMERKIQRADLSLQLVHPNAAGVDIGNESHYVAVPPDRDSQPVRHFGCTTAELRTMADGLKPCGIRTVAMQSTGVYWIPVYDLLEQAGLEVYLVNARETKNLPGRKSDVQESQWLMKLHTYGLLRNSFRPSQQIRRMRTYWRQRKDLIESAGRHIQRMQKTLTQMNIQVANVLSDVSGVTGQAIIKSILAGERNPQKLAAFRDPRVKASEKEIARSLEGNWQEDLLFVLKQEQAGYEFCQKQMAECDRQLEQYLRQLEDRSQGATLPEEMRKDRLQKRKGNKPKFDLRQQLFRMAGTDLTQIDGIDVMTAATILSEAGWDMIKWQDEDHFVSWLRLSPDNRISGDRIIGKGRLPTTNRVTVALKLAASNLRTSQSYLGAPFRRFRARLDTPVAIKAMAAKLARLVYRMLRYGTKYVDRGAQCYEVQQRTRQIKHLKQKAAKLRFHLVQAPAA

SEQ ID NO: 376890 - protein, 402 aa, unidentified
MTNNSNRFIGLDIHKEYFVAIGVNAQREVVLGPHKISNYDLEKWIPKWLTREDAIVLEMTTNAYQFYDTLLPHVQSVTVVHPPLVALVTNVQVKTDKKAALTLAQLHAVGLLTSVWIPPHPVRDLRSLVAHRDKMTRLSTIAKNRLHALLQRKHLILPEKPFAPEQRTWWESLPLSATEQFLVRSDLDTLEFAKKQLAQVEECLKRESIQDERVALLIQLPGVAMLSAITILAAIGDISRFPDAKHLVGYAGLGARIHDSGMSHTSGRITKTGRKDLRRTMVNIANHAVEANDHWKKEFTRLEPHLGRSKAIVAIARKLLVVIWHVLSQEIADRFAEPDKVASSFFRYAYKVGTKNLPEGRSATSFVRAQLDRLGIGMELTEVPWGSRHPKLPPSSLAASPK

SEQ ID NO: 376891 - protein, 348 aa, unidentified
MSQSKQYVGLDVSLKETSICVIDDVGKIVWRGRTESTPEAIASAVKQHAPHAVRIGLESGQLSSWLFHGLKVAGLPVICIDARHAKAALSLKVNKTDANDAFGLAQIMRVGWYREVTVKGLDCQAVRALLVARAQIVSQITTTKNCVRGILKTFGRVLPKGLRSQFPGRVRAAIDGDPILGAIIEPTLRVLEAMRAQLLVYNKAVIQRARGDDTARQLMSAPGVGTVVALAYMTGVEDPARFKRSSSVAAYFGMTPRRYQSGEVDHAGRISKCGDAMVRGLLFESAKVLLSRSARPSALKTWGEALGKRIGPKKATMAVARKLAVILHRMWTTGTTFQWNAEAASPAA

SEQ ID NO: 376892 - protein, 361 aa, unidentified
MKDQSTALDFSGEDIYVGMDVHLNSWTVSIYTAHLEHKTFRQDPLPEVLMRYLRRHFPGALYHGVYEAGYCGFWIYEALKEAGMEMMVINAADVPTTDRERTYKHDAVDSRKLARSLRSGELRPIYVPSPEAVADRQLVRTRGRLISKQTRVKNQIKAMVRHFGITFPEEFARRHWSAPFIAWLQELAGQGMQHRSASLALGLLLDELLSLRLQILEVTRAIRTLSRSDHYRDHVDHLLTIEGIGIVSAMVLMTELVDMNRFRTFDSLASFVGLVPGKHASGDSDPSQSLTNRRCAQLRYILIESAWVAARRDTRLTQDFERLVKRMKKTNAIIRIARKQLSRIRYVLKNDLPYVPQPLAA

SEQ ID NO: 376893 - protein, 425 aa, unidentified
MNPPTTYAAFVGLDWADRSHQICLRAAEGPRDEQSKLAHDPLALHTWAHELRARFPEGKIAVALEQTKGPLVYALSMHAHLELFPINPAMLAKYREAAKAASGTKNDPLDAALLGELMRVHRDWLRPLPAVPAAVRGLQMLLEARRGLVDQRTGLCNQLTAALKGYYPQALVLVGHDVGAPLTCAFLRRWPTLSAVQRARPETLRRFYHAHQVRSEERIAERLALVRAAVALTDDAAVLATLPVQVAVLVAQLEVLAPAIADYDRRIADAFAMQADAALFESLPGAGEQLAPRLLVAFGPDRTRYPSALQLQQYSGIAPVQQQSGNTKITHWRWHCPKFLRQSFHEFAGCSVPQSRWAKAYYDEPIERGKPRHRVLRALAYKWQRILFRCWQNHEPYDEERYLAALRRHHSPLIARIDSTCADAA

SEQ ID NO: 376894 - protein, 333 aa, unidentified
MSRFWVGIDVAKRKLDVALLDEAGKVKSKVLANEPAGFAALMTWLKERGADVASTHVCLESTGVYSEGCATAFADAGWKVSVVNPALPKDFGKSELKRNKTDATDAGLLARYCSKMAPAAWQPPPLEYRKLRSLVERLQALKDMHQQEANRFEASVEDMAQASITEHLAWLEARIAELEKDIDDHIDGNKETLGKDAALLASIPGIGRTTAAKVLGLLGDLRRFDSGKALAAFIGVTPRRHESGDSVRGRTSISRAGHASIRHALFMPTLVATRHNPKIKTFRDRLVAAGKSKKSAVLASMNKLVNVMHAVVRQGVGFDPRFGHLALDVQDGI

SEQ ID NO: 376895 - protein, 307 aa, unidentified
MFVGIDVAKDRLDVHVRPAGEAFTVARDGEGIEDLAKRLSAVAPTLVVLEATGGFETIVAAGLVAAGLPVAVVNPRQIRDFARATARLAKTDTLDAAVIAHFAEAINPPPRPLADAQSRLLGELMARRRQLIEMIGAESNRRRMLTIRRTLKSVDRVLATLKAQLDEIDHDIDIAVRGTPAWREAEDLLISVPGIGPRIARTLIAELPELGRLDRREIASLTGVAPFNRDSGTLRGRRTITGGRPVVRAALYMSVLVSIRCKLPLAETYHRLRASGKPAKVAIVACMRKLVTILNAILRDKKPWATA

SEQ ID NO: 376896 - protein, 377 aa, unidentified
MKNCTRYLGLDVHAETITGAIAEGRDQIRNLGKFPNRPEAVRKLLEKLGGGGNLKVCYEAGPTGYALYWQLTKLGIDCEVIAPSLIPKKPGDKVKTDRRDAEKLARSYQNGDLTPVWVPTPEHEALRDLVRQRAAAKHDESRAKHRLITLLLRHASREPNGSRAWTHPWWRWVQALKFEHEARQVVLADCIAEVLHMGERLARVDQAIDRMVESAPAHMRAVIAALQALRGVAKLTAVTVVTEVGTFQRFHRPTQMMGYTGLVPCEHSSGARQAQGGITHTGNAHLRSVLVEAAWHARHRPWLNRRLKQLLPTLPADVAAVAWKAQERLHRKFGKMIYSRKHAGVVAAAVARELVGFIWAIGTMVEAKQTNTVARAA

SEQ ID NO: 376897 - protein, 436 aa, unidentified
MDEVTDEPLYRDRVCGIDIGKAAMVATIRVPSDNNPARRAQETRSFGTTKREVLALADWLRSWQVPALVMESTGDYWKGPFYRLEAEGFECVLADAKQVKHLPGRPKRDPSDSRWLAACFERGAITSCFVATPEFRIIRLHTRYRRDLTEERTREKQRAEKLLESAAIKLSSVVTDLHGVTGRDIMGHLIAGETSPKVLAQLARGRARRKIAELEAALEGAEFFTRHHAALLTAMLERIDQLNTEITRLTEVIEQLLAPWEEQLAQAESMPGWGRRSAQDTLAETGPDMSRFPTGAHLASWAGRTPLDNSSGKRKGRSKSKKGNRYLAAITGETAVAAGKTATREGARYRRLARRRGTAKAQVALGNTQLKVYHALLSSPGTRYEDLGPDYYDRQRDIRRQIAHHVGKLGALGFEVTLARLPSPDPDPAETSNQAA

SEQ ID NO: 376898 - protein, 359 aa, unidentified
MTNGSTELKEAAGLTVGLDVSDIYTSFCMVDKEGNVIEEGRVRTTEPALARRFSVVAPCRIVLEVGTHSPWMSRLLAGLGHEVIVANPRRVRLIAESDHKRDRTDAELLARLGRIDPGLLRPVQHRGPEAQRDLALLRARDALVRARTNLINHARGAVKATGGWLPACSATTFHRKAEAHLPEALRPLLTPMVTMIAELTARIRDYDHQVESAAERYPGVRSMRQVAGVGPLTSLGFLLVIENPARFRKSREAAPFVGLTPRQRQSGERDPQLSITKAGDPLLRRLLVQSAHYILGPFGPDTDLRRWGLRLAASGSSRAKKRAVVAVARKLAVLLHRLWVTGEVYKPLLAEEETPARAG

SEQ ID NO: 376899 - protein, 414 aa, unidentified
MRIVCALDVHRRQITYAIVDVRSGEMSRGRITPATRESVREWLARFDGVDEVGFALEGTTGWRFVVEEVERAGHRAHLADPAETAAKRGRKRRAKTDRADCDLLLRLLSARELPESWIPPAQILELRTRVRLRKTLIDERTAWQQRLQAQLFHQGVPRGLRPRTRAGREALAKVELSPAGLELVALALRMIETIDDELAPLDRALSLYARHQPGCRALIARLYGVGPVTATAIVAELGDARRFGCSDDAVRHCGLDVTVHQSDRKRAPGHLSHEGPELLRWAVRGGAAGVSARLTRLRLLPSGGAADRPQPRLSVGRAQALPPRLPHPARARRRGPRTDRARAAWRGGDARRSLISTHPARLPLVTTMVCGRLPNGACRQPPAGRPLKTERPQNHITGATPDRSSRRRTPRPRT

SEQ ID NO: 376900 - protein, 352 aa, unidentified
MERYIGVDAHARSCTLGVMSASGQRLKSLVVETNGKALVEAVRGIAGRVHVCLEEGTQSAWLYELLKPHAAEVVVAMAPERKGPKDQERDAWARANELRTGSIETRVYKAPEHLAGLRNAVRAYGFAVTDVVRAKNRLKAVFLSRGMSADASVYDTKKRPEWLRKLPSPHRELAEWLGKQLDQLEPLRDEAQRWLLTEAKRHPIMRKLATAPGMGPIRTAQVVAIVATPERFRTRRQFWSYCGLGIVTRSSADWARDKGQKWVRTQVTQTRGLSRKRHPRLKSVFKGAATTVIAQLGDDPLHGDYERMLQSGIKPPLAKLTVARKIAAMVLSMWKHQEVYDPKRHSLSPDQA

SEQ ID NO: 376901 - protein, 375 aa, unidentified
MSPNSITWVGMDAHKNSIKVAAWLPEQAEPVEWTEDTTAEAIRRLGRRLRRLAPGEVRACYEAGPTGYGLQRLLGVEGVICEVVAPSLTPVKPGVRIKTDRRDARKLGELLRAGLLTEVHAPSETDEALRDLCRCRDDVRVDLLRARHRLSKFLLRRHLIYRQTKHHWGTRHMQWLEELRFDDAMSQATFDSYFLAVQQLEERQRQLDQRLAEFGAQEPYREPVAALRCFKGIDTVTAVCLVAELHDFRRFRSPRQLAAYVGLVPSENSSGEREQRGPITKSGNRHVRRLLVEASWHHRHRPALSRPLRARREGQPARVLAIADRAQERLAARFRRMSEAGKVHPKTIVAMARELCGYLWAVLHPSASATRPKSA

SEQ ID NO: 376902 - protein, 444 aa, unidentified
MRNDVTIYVGIDFSKEKFNACLLMEQGVMGESEFPNSKTGYLKLTKWVKNTSELGRSFDSSLVLFCGEHTGTCSIGLCEYLYAKGMKIWLESALKIKYGSGLKRIKDDKADAEMIAYYAKRFYEPGSCALFEPDSADLKTLRTLYQFRNRVVCDRVAIGNRISSGAFDCSTLVRNRMVKHHKEAQKDEKDIEKEMVKLMETSEELASNYQILISFKGIGPITAAALIIYTSNFKKFDNPRKFACYCGIAPFGKQSGTSINTKPHVSLFAHIGIKAAMVQACKSAMQHNAVIKAYAQRLYAKGKHEGIVMNNVKNKVMHIIFKMIQTQTLWEQEYQQKHMKECKAIPGKNGIGATEAAPIINATLKTSSSVVECTFLEEHSFQKNCKKTSSFSCVRLSGLHSTVTSEKFVLKLFFTALIMREKSSGGSNDGVPPPKNTVLTTALS

SEQ ID NO: 376903 - protein, 344 aa, unidentified
MKKSNVIGIDLAKNVLQVCKVSKHGELVLNKAVNPSRLKELLANSTPSIVAMEGSGSCHYWGRLAESFGHEVRVINPKKVKAFLQGQKTDANDALAIAMAATQFGVRFSQVKSEEQQTLQTLETSRKFLDRELTALNNHIRAYLYEYGITMRRGRKSLRETIALVLDDVNARLPECLKNTLLLLWERYQLTLAQLKETSQAKASLVKQVEPCKRLLALESVGEVCAAMLYANIGDGKEFKNGRAASACIGLTPKQHSSGGKTHMMGINKKGGNKELRTALFQGALSVISRLPSEPKTVKQAWLIELVQRVGVKRACIALANKTVRTAWALLATGESYKPVLLSR

SEQ ID NO: 376904 - protein, 320 aa, unidentified
MSFKILKSNCCGLDVHKTWIYACVGITDSNNRTEYKQARFSSFTKGLNELCDWLAKYNCNDVCMESTGKYWIPVFNILEQHEIRVTLSHPKYTKSMKGNKTDRKDAKWICDLYMCGMVKPSFIPPADIRELRDLVRYRFKLTCMITGEKNRAQNCLTVSNLKLDDVFSDVFGKSSRSITEQILQHPGEKIDVAPFVHGRCKTPVEEIQAAVDGAVSKEQAVKLRQCLDHIDELQKHISEIEQEILRLSDKYEAALNLIRTVPGFNKNPMTAIQVLSEIGGDMSVFPTAKHLVSWAGCCPRNDKFGMFRLTIFLKNVIIIA

SEQ ID NO: 376905 - protein, 353 aa, unidentified
MAMTTIADQAGGVTVGIDTHGEVHVAAVLDERGRLLGTESFTTDSTGHRRLERWACQFGAIDAVGIEGTGAWGAGVARHFTASGHRVVEVDRPDRKTRRQRGKSDTIDAEAAARAVQAGTAAGTPKARTGRIEAIRALRVARRSAIKARSQAALQLHCLVSTAPDELRDQLRTLPLADLVAVTARFRPGNPADPTQATKAALRSIAHRYQQLTTELENLDAILAPLVAETAPNLVALNGVGTDVAGQLLVTAGDNPDRLHNDAAFSHLCGASPIPASSGRTNRHRLNRGGDRAANAALYRIVLCRLRWDPRTRHYVERRTKEGLTKPEIIRCLKRYIAREIYQELNHLPVDHP

SEQ ID NO: 376906 - protein, 412 aa, unidentified
MDLLVQRCAGVDIGKDEVVACVRTPGEAGQRHKETRTFSSFTAQLEAMADWFTAEGVTEVVMEATGSYWKSPWYVLEERGFELKLVNARHVKILPGRKSDVADAEWLAELLEHGLLRGSFVPPPAIRELRDLTRYRKRLVQTHTAECQRIHKTLEDAGIKLDSVASDVLGVSGRAMLAALVAGERDPDVLAELAKGRLRSKIPQLRQALRGRFRAHHALLIGLCLDHTAHLEAAIASLDGRVDAVMAPFERARDHLDTITGVGKRAAETIIAEIGTDMSVFPTAGHLASWAGMAPGNNITGGKRHSGKTTKGDVWLADMLTQCAWSAARSRDTYLSSQFWRLARRIGKKKAAVAVGHSILVICWHLLTNDADYDDLGGDYFVRRGNTARHQDRLVEQLQQLGYHVTLRKAAA

SEQ ID NO: 376907 - protein, 401 aa, unidentified
METVRDNATRVKRFRELKATLRTDRTRLLVGLDIAQAEHVVHLRHAHTRVVTPALTIPNTTRGFTQLWAAITRAQRATGCREVVCGLEPTGTYHQAVATFLETQGADVVFLSSSVAYWNRRTQDGTWDKHDRKDAANCADLLEQGKVLFYSQPTGSLAELRQLVRCLRRARTELASCKARWRTTLRPALAPMGEPLPQRLWAELPPVLQAWERAAPGRPAVPKGRLPLGLATACADLGTQVTAVQTRIAVLEAACTPVAERLPAYPLLRTIPGVGPTVGAILLAEIGDIGWYTKFSQLRKLAGLDIVRVQSGQYAGQARISKCGRSLLRWALYHTAIGAARTVAGRARLAALKAKRRGDRFAGFKAVVELAAKQLRVIWGVWRSGTPYDPRRAGGLQRQAR

SEQ ID NO: 376908 - protein, 355 aa, unidentified
MNTTLIGVDLAKRSFSVCEVNATGRVLRRRDLNRSDFACYLAQLPKGTPVAMEACASSNHWGRRCHELGLTPLVMAAQFVSPFRKSQSAKNDRNDAEAIATAARQGNMRFVPVKDTDQQARLSWHRVRDGHKQAKTAIGNRIRGLLAEFGIVMAKGDKPLQRVLADLDAFDLPADFKALIQQEGRYWQEENTAIDACSAHITARVRQDERCQRLVAICGVGDITADAMVASVGKARSFKNGRQLAAWIGLVPKQFTTGGHVKLGRISRAGNTYLRTLLVQGARSTHRIALSTPPDKATPEQRWIQQLDQRMSFGKAVVVIANKQPRQIWAMMAYRVDYDPCATVTRMPQSKEVAA

SEQ ID NO: 376909 - protein, 344 aa, unidentified
MHIVSVGIDLGKTTFHLVALGVAGKVLVRKKFTQRQLLTYTANMQTSLIGLEACSGAHFLGRSLRKQGHDVRLIAAQFVKPFVKSNKNDFVDAEAIAEAVERKNMRFVPIKTDDQLDLQAIHRVRDRLISRRTAVINQLRAFLLERGLVFAKTPAKLRTALPDILENANLDLTTQMRNLIDLLWNEWKTVEAQIEGLSLQLERISAADPGCTRIRQIPGIGPIVATAIVAAIGNGAAFRKGRDFAAWLGVVPRQYSTGGKARLLGISKRGNVYLRKILIHGARAAVLRIKRDRAPIGAWLDALDARAAKNVVVVAMANKLARIAWAVLSSGEDYRPDSNMVTAS

SEQ ID NO: 376910 - protein, 372 aa, unidentified
MQYCIGKMTSQQTKGDLIMGNIKEQQEISNENSYSEREYDHYIAVDWSMKIMAIARMTNKTSKVRMIERPSDVKELKSYLVALRGTKILTIEETTSAQWLYVELHDVVDRIVVCDPYRNRLLSDGPKTDKIDAGKLCLLLKAGLLKEVYHTLENDYRLRNLVSSYEDVIKAGVRLQNQRAALYRGEGMNRRRQKLIEPTLKFIVENIDEGLHWYHQTVTSYETQFRKLSHKDKRIRRQTAIPGIGLKGAVKIIATVLNAYRFADKGHYLAYCGLVNHAKDSGGRNYGYRRPRFERTLKSVYKTAALVALKGDNELREYYDYLLAQGVSEHKARHAVARKIATISYGILKNQSVYQPKHRKEHTSQNQNKLAA

SEQ ID NO: 376911 - protein, 422 aa, unidentified
MPTNLEIAAFIGLDWADQQHVIRLRVAGSETVEAQRLDQKPETLRTWIGQLRQRFGARPVAIALEQSRGSLLYALMNVDFLLLYPVNPQSLAQYRKAFYPSGAKDDPQDALLLLEMLEKHRDRLRVWVPDDADTRCLRLLAENRRKLVNRRTALTNQLTSLLKESFPQALDWAGSLDSEWACDFLQNWPNLHLLQTTSTCRLRRFYRDHTRLDSQAIQQRLQQISQAQPLTSDPAVLAAAELIIPALARQLRCLLESIQQFDQQLKDRFQLHDDYTLFHSFPGAGPALGPRLLSAFGSNRNRFQCAAEVQMLSGIAPVTERSGKSRWIHWRLACPKFLRQSFHEFAAQSILVSPWARAFYDQLRARGVSHQAAVRTLAFKWIRILFRCWKNRTPYDEQIYLASLRRRRSPLCAVLSSTPTGA

SEQ ID NO: 376912 - protein, 392 aa, unidentified
MVVSVGIDVAKDKHDCFILNAEGEVLVDVFTIPNNMDGFNCLLQTIRDCTTPQAIIKVGLEATGHYSYNILGFLLDNGLATYVLNPLRTNLYRKSLSLRKTKTDRVDARTIAAMLLSDVGLKPYTDTAYHNEELKSLTRYRFNKVKERAKLKSSVSRLVCILFPELEKLVPTLHGASIYALLEEFPGAVQTAGAHLTRLKSLLSDASRGRYGRDMAVEIRDAARNSIGSRMPAKSLELQHTIRLIRELDAEIEEIETAIQTIMDKIHSPITTIPGIGYRMGAMILAEVGDFSRFESPDKLLAYAGLSPSTYQSGQLKNCYPHMEKRGSRYLRYAIYNAAKYVCLWDPTFSAYLAKKRAEGKHYNVAISHAAKKLVRLIFALEKSRQPYNLAA

SEQ ID NO: 376913 - protein, 370 aa, unidentified
MGKSVLYVGLDVHKMSVDVAIAEAGAGGEVRFYGRIGGDLEALDKVTRKLIAKGAELRFAYEAGPCGYQVYRHLTAQGHSCLVAAPALIPRRPGDRLKNDRRDALALARLLRAGELTAITVPAAGDEAMRDLTRAREDAVSVERRAKQRTAAFLLRHGRVYPGKTTWGRGHWNWLLHQVMEQPAQQIVLQEYLDAVGQASARVQRLTGQIRELVPQWRRAPFVAAYQALRGVSLIVAATVVAEVGDLSRFSRPQELMAYLGLVPSEHSSGATVRRGHITKTGNGHARRVLVEAAWAYRLRARITRPLFKRQEGLPESIRQLAWKAQLRLCARYRRFQARGKAKQTIVTAIARELAAFLWAIGRAVETVTA

SEQ ID NO: 376914 - protein, 345 aa, unidentified
METMYYIGLDVHKKTIDYCVKDGSGRIYAAGSIRATRLELDMWMKTLPQPWTVAMEATIFTAWIYDHLQPHAAAVKVAHPLMLRAIAVAKKKNDRIDAKKIADCLRCDFLPECYMASTEIRERRRTLRYRNLLVRQAVQMKNKIAVLLMEAGVSYNKQKLHKVGYFRELLATNQDIDEGLKPLLRLCRETVVRLGKTESALVRSLERDSLLVERVERLMTIPAVGPITALTWALEVGDVQRFSSIKKAISYCGLCGAERSSADITKRMPLSKQRNKHLQTVLIEAAKMAPRNSPELAMVYEQEKQKGNANRATLAVARKMVAYLVAVDRRQKGFLVVENKNRTAA

SEQ ID NO: 376915 - protein, 419 aa, unidentified
MKSLSPRCGALDVHKETVVACARVQQGTRVSRDVATFATTTAGRLALADWLAARRCSPVAMEATGVYWKPIWHVLEGRCELVLANAAAVRNVPGRKSDVTDAVWLADLLAHGLIRASFVPPTPIQALRDLTRTRKQLVRQVTQHTLRLQKTLEDANLKLTGIVTDLLGPSGRAILRALIAGETDPERLLAQTTGRLRAPRPRLLAGLHGAVTGHHRFLLHLHLEQIEALERAIAQLEGRVAELIAPFHESVTRLTTIPGVSHLVAHVLVAEVGLDMSRFPSAAHLRSWAGLCPRLDESAGNRRSTRLRLGAPWLKTTLVQAAWAAVKVKQSYFRAQFLRLRARRGPQRAIVAVAASLLTAVYCILRDGSPYRDLGATYFDERDRSHILKRLTRRIEALGYHVAVRPRPAASVPGLAISS

SEQ ID NO: 376916 - protein, 365 aa, unidentified
MTCPVTVSSVLRTFGRAVTKRPKGVTPVTTIGNGGRCNESSGAASEVVLGVDTHLDVHLAVALDHLGRRLGTFSVPTTTKGYESLLAWAEGFGPLRCAGVEGTSSYGAGLARHLRAMAIPVMEIQRPKRRHLRRKGKSDPIDAEVAARAVLAGEAAGEPKSADGRVEMIRTLRSARRSAVKARSQAANQLQGFVVTAPEELRHRLRELTTRKLVAVAARMRPGKDLDGVGAAAKFALRSVARRYRYLSEEIADLDAQLGRLVAETAPELTSLPGVGTDHAATLLIVAGDNPERLGSEASFASLCGVSPIEASSGKVVRHRLNRGGNRDANRALHLTSAWCACASTSAPAATSHVEPRRESPGGRS

SEQ ID NO: 376917 - protein, 326 aa, unidentified
MINNFLGIDISKDRFDVFLSFISKKGKRETKKRNFKNDDSGFQGLLDFLQKHDVEQVTTCMEATGCYSEALAEFLHNAGYFVSVVNPYCIKSYARSKLVRQKNDQSDAEIIADYCQRQEPTRWTPPSSEKKKLKHLYRCSAALKNELTLVNNHLEKKERLPEEVVNVWENLSVNIEQSIETIKNSIHELLKQHKELLEDFQLLLTVPGIGKESAVAILAEISDIKVFINARQLASYAGTIPRNITSGSSVYAKPRLSKSGSRTLRKAMYFPAIVSKKHNPIIMTFCKRLKEKGKHNMAIVGAAMRKSFTNGKGYYKIRANDVDIFG

SEQ ID NO: 376918 - protein, 459 aa, unidentified
MGRHKSQGSVWEGLKVVHPHAAGLDIGSEEIWAAVAPAENQEPVRKFGTFTPDLQALADWLLACGVDTVAMESTGVYWIPVYEILEARGLQVHVVNARHVKNVPGRKSDIQDCQWIQGLHSVGLLRGSFRPAAEIVALRAYLRHRAGLIEHRAAHIQHMQKALQQMNLQLSQVVSDITGMTGLAIIRAIVAGQRDPQQLALLRDRRCKKTVREIAKALTGNYRPEHLFALQQALALYDFYSAQIAACDAEIERQFANLKPASDDLPPLPPSPKPDSHSKNAPTYDARAHLYRITGVDLVAATGLNESTVQTIVAETGTNLDAFPTEKHFSSWLGLAPHNDISGGKRLRSRTLPTNNRAGQAFRMAAQSVSKSPNSAFGAFYRRMKARLGAQQAIVATAHKIARAYYHMLKHRVPFHDMGGEEYERRARQREIHNLQKRAAKLGLSLVQTPTADALAGSF

SEQ ID NO: 376919 - protein, 408 aa, unidentified
MGRAAEVVAPSSSIRTDGGCPVVQVNDLSRSLAAFDPISTLVVVVEMSKASWLVSSVVPGVERQPLKKLEPDATAVLRLIERWRNEAVRVGRPISRIALAYEAGRDGFWLARWLIARGIEAHVIHSASVAVSRERKRAKTDRLDAAMLMRVFLGWLRGERGHCGMVAIPTMEEEDARRPNRERESLVKERSRIINRMKSALARLGIRGFKPHLRKAPERLAGLRTAEGTGLPANIIEEFRRDMARLALVREQISSIEKTRAERLERAPDTGPHAMVRLLARVIGIGIETADMLVREILSRKLRDRRALARYAGLTGSPDESGLKSREKGLAKAGNARVRRGLIQLAWRFLMFQKDSALARWYRTRTEGPSGARKTTMIVALARKLLIALWRLVTTGEVPDGVELRTAA

SEQ ID NO: 376920 - protein, 405 aa, unidentified
MQYIEGCAGVAGTEPHAWETGLMDTITYVGMDVHKATVSVALAEAGRGGEIRQFGVFENRPETLRKLAARLSKGRRRLSFCYEAGPCGYGLHRLLTGCGHDCVVVAPSLIPLKAGDRVKTDRRDAMMLAKLHRAGELTAIWIPDAAHEAMRDLVRARATAGRVLSKARQHLQGFLLRHGQIYRGVRAWTLAYRRWLTTVRFAHPAQQIVLQDYIHAVADAEARRDRLTRQIEELLPSWSMAPVVEALQAMRGVALVVAVTVVAEVGDFRRFANARQLMAYLGLVPSEHSSGSTIRRGGITNAGNALARRVLIEGAWTYRMKARVSRKLHDRLEPLPAEVRDIAWKAQVRLCARYRRLAALGKPSVVATTAVAREMVGFIWAIARLAQPAVEDQRTQRAHAEAPRC

SEQ ID NO: 376921 - protein, 364 aa, unidentified
MQEPTHIGLDVRKETIAVAVPRAGTVECDERVIPNTPEALRKLLSRYPDRSLLRTCYEAGPTGYDTQRLITSLGIACDVIAPSLIPRRSGVRVKTDRTDARNLARLHRAGELVAVRVPTPAEEALRDLVRAREDLKNDRRIARQRIRSFLLRYGKRYPAPGSRWSFRFEVWMRALRFDEPASQAAFDHLVGAYFVRDSQLGAVDAQIAELALLEPLAEPVARLRAFRGIDTLTAVTLLTETCDFRRFATAGSYMAFTGLTPSEHSSGASRHQGSITKSGNAHIRRVLVEAAWAYRYAPAVRGKLRARQIGQPPEVVAYSWAAQCRLHGTYRRLAAKKGPNKAVVAVARELAGFVWGAMTDNMAV

SEQ ID NO: 376922 - protein, 343 aa, unidentified
MDHFAGLDVSVKETSICIVDDAGKIVREVKVASEPEALLAVLKNLAYHFKRIGLEAGPLSQWLFSALAEAGLPVICVETRHMRAVLKAQINKTDRNDARGIAQMMRVGLYRPVHVKTLRSQKLRVLLTHRKLLQSKAIAIENDLRATLRNFGLKVGMVGTVKFEARIKELVESLPDLAVLVEPLLIVRQVVREQLGILHRRLLAIVRDDDVCRRLMTIPGVGPVVALTYRVTVDVPARFRNSKAVGAVFGLTPSKYQSGQNDRTGGISRCGDEMMRMMLYEAAQSMLVRSAKWSWLKAWAMKIARHRGIKKAIVALARRLAVIMHRMWVGGTEFRWTREVAVA

SEQ ID NO: 376923 - protein, 387 aa, unidentified
MSQVSDLSRSLVPFDQNITLTVVVELSEASWLVAGLIPGVDRQPVKKQEPEPVALLRLLERWRVEAVRAGRTIGRIALAFEAGRDGFWLARWLQARDIEVHVVHSTSVAVSREHRRAKTDRLDTAMLMRVFLGWLRGERGHCRMVAIPTLEQEDAKRPSRERESLVGERTRIVNRMKAALARLGIRGFKPTLRKAPQRLDALRTPEEVSIPPNTLDEIRRDMVRLAVVREQIDVIERARLARLEQAPAAGPHAMVRLLARVIGVGLETADMLVQEVLSRNLRDRRAVARYVGLTGSPDESGRRRREKGLAKAGNARVRRGLIQLAWRFLRFQGDSTLAQWYRARTGGPKGARKTTMIVALARKLLIALWRMVTIGEIPAGVALRQVI

SEQ ID NO: 376924 - protein, 355 aa, unidentified
MRQEKYIGMDVHQATISVAVMDVEGKLLMECVLETKASTIVEFIEGLRGPLYLTFEEGTSAAWLHDLLQPHVSRLVVCDPRKAALLKDGNKSDRMDARKLAELLRTNQLKPVYHGEHGMRSLQELGRSYLTITQDTTRVMNRIKALYRSWAIPCSGSTVYAPRHRQAWLAKIVKPGVRVRAEHLYQQLDSPQPLRLEARRQLLRESHKHAAVKLLRQIPSIGPIRAALLVALLQTPHRFRSKRQLWAYSGFAVATHDSGEYRYVRGKLQRNRERITVRGLNDNHNKDLKSLFKSAAISASTRPGPLRDFYTTRVESGMRPTMARLTLARKIASITLTLWKKGASFDPEQLQRQAA

SEQ ID NO: 376925 - protein, 316 aa, unidentified
MLYVGIDIAKNKHDVTALNVPGKTVLKPLTFSNNKAGFELLDLSLRQLNQDCLIALEDTGHYAFNLLNFLHEQGYKVYTYNPLLIKEFAKSLLLRKTKTDKKDAHGIALKLLSDPNREQFQHDNRQVELKILARHIHRLKKKQSDWKVQYTRCLDIIFPELDKIVGKHSEYTYQLLTCYPNPQKRLEAGFDKLIEIKRLTASKIQDILSVAPRSIGTTSPAREFEIIENIKHYKRLIDKAEKCVNDLMAELNSVITTVTGIGNRLGAVILAEIQNIHAFDNPAQLQAFAGLDSSIYQSGQIDLAGRMIKRGSPHLR

SEQ ID NO: 376926 - protein, 370 aa, unidentified
MSVRRILAKTIDTDLEYEAIGIDLAKNCVSAALLTTDGEVVCIDRLDYSELEKSAQALSPTTFAMEPCTEMNYLVQKLEAWGHRCLVIGGKNVQNYVENHYSGQKTDLNDAQALAFLAQDKQLRTIKAKDIEQQKYASLTTLREQYIKQYRQTIVSLKGICQAWGLNISKGISGKAQLKDLIENHAAFPEELRESLVDMVTHAQTTQKVLNKITKTLEVLAKNDKVCQLIQTIPGLGTICSCRLRATIGDIKRFKNPKDFPAYYGLVPRSIATGHNEKKGKITHRGDRTMRSLMVQGAGCVIRLATCGKLKSKQLTKWILKKQKEKMPWGKLVCAVAAKLLRIVRAILISSKPYNPKIAGVAKCSLSKGN

SEQ ID NO: 376927 - protein, 350 aa, unidentified
MFIIGCDYHPSFQLIACVDTETGELEERRLVHPQEAEQFYGELKERNLAVRVGMEASGHARWFERLLVQLSFELWIGDAAEIRTKRVRKQKTDRQDAQLLLRLLLEDRFPRIWVPDAANRDLRQLLWHRHRLVQMRTRVMNQLHVVALNEGLRRRKALWRPGGRKELELIALAPWAGRRRQDLLDLFDQLTPKIQELTRALEQEVEKRPVTRRLMTHPGVGPLTALAYELVIGTPERFHNGKQIASYVGLVPEEKSSGDRRRLGHISKQGNALLRFLLVEAAQVTIRSQAQWRSKFFHLAMRRGRKIAKVAMARKLAVHLYWMWRQGWDYGQFKRFGSYAGEPGHPDGKQ

SEQ ID NO: 376928 - protein, 370 aa, unidentified
MEEDSILYIGVDASKMKHAIAIAEHGRDAEVRYLGEIETCPSAVERFIKKMARKARRLHFCYEAGPTGYGLYRQIVALGHSCDVVAPSLIPKRPGERVKTNRRDAVSLARLLRAGELTAIWVPDTTHEAVRDLARAREAASADLRKKRQQLQSFLLRHGRTFTGHRNWSKAHRRWLSDQKFDHPAQQIVFQDYVDAVEDATQRLHRLEAQLVEIVPAWSMAPVVAAYQALRGVSFIVAVTFVAEVGDVRRFDNPRQLMAFLGLVPSERSTGNTVRRAGLTLCGNRRARRVLVEGAWSYRHPARVTQIIRARLEGLPKVVREIAWKAQRRLCARYRRLTSVGKTAPVAIAAIAREMAAFLWAIGREVEPVC

SEQ ID NO: 376929 - protein, 320 aa, unidentified
MESKNAVVYAGIDVAKATLQLHLQSRQSEFANSKAGLGQLLKQLQKVPEVHVICEATGGYEQAMVRTLHAANVPVSVINPAQVRAAAQARGQRAKSDPIDAEGLSDYGRRYQPAPTPPTSATQDQLVALTQWLKQLVQGQALAKTQAEHHQHPFVRRQHAKLMAHLRSQIEAVEKQIEALLEQDAVLQQRVNCLDDIQGVGPRTAWLVLAHMPELGRLNRRQAAALAGLAPWTRDSGTMKGMRCIGGGRPEVRVALYMAALSATRSNPVLRGLYQRLRAKGKLGKVALTAVMRRLLIYMNHQLKDLLSKTHNQNIVEVTA

SEQ ID NO: 376930 - protein, 340 aa, unidentified
MQLYAGIDLHASNNFVAVIDASGKRVFKKKIPNEAEMILSILGSFQEEMTGVVIESTFNWYWLVDLLCEAGYRVHLANPAAIQKYSGLKHCDDKHDAFWLAEMLRLAILPEGYIYPKEERPIRDLLRKRGHLVRLRTSLILSLQNIVARNCGVGLSVNDAKRLKRNVVLPLLQSNDDLAMAGLVSKESIDFFTRQIRAVETMVEQRVQLKNQYRYLLTIPGIGKILALTIMLETGPISRFAKVGNYVSYCRKVSSKWTSNDKAKGKGNKKNGNKYLAWAFSEAAELARRYDTQCRGYYNRKMQKTNFMVAHQALAHKLARAAYCIIKEEVAFMPERLFAC

SEQ ID NO: 376931 - protein, 339 aa, unidentified
MEIDILGIDLAKHIFQLHGAERSGRAVHRSRVGRGALIETVQKLRPRVVAMEACTSAHHWARRFLHMGIEVRLISPQYVTPFVKTNKNDRNDAEAIAEAASRPSMRFVSVKSVEQEDIQAAHRMRAILVRQRTAVINQIRGLLAERGLIVARSVQAFKRAIPALLSNEGSELTTFCQALLTDMLQHLQALEARIHWLEVAIKDFVKNSALCRKITAVEGVGPLTASAVVGAIGDAKQFSNGRHLAAWLGLVPRQYSSGGKARLQGISKRGDTYLRTLLIHGARTVLQYASGKADKRSRWLQQLIARRGYNCAAVALANKNARILQVLLSTEASYKPAAT

SEQ ID NO: 376932 - protein, 385 aa, unidentified
MAPPTRPRIVIGLDVGKSARWACVAAREGELLASGPIPNREDAIDGLCAQYPGALVVVDQVRNIGSLALSRAKLAGMPRAYLPGLAAHGASRLFAGDAKTDERDAMVIAKTALGIPDALLAVADRPPEIGAARSLAAQRDFLTYGNTRSKNRLRSILLESCPEFEAQADLSDPATLKLMAAVGGPWSISEASPQAVGALTRGCRRAKVAALVESVESSSRPHPAAVACEDRAVRLLARRISENAAEIESLTSEISALLAADETRRCLLTVPGIGPRTASELVISIDIADFAGHDRLASYCGLAPRNRRSGTSISSVSASRQGNKRLKNLLIFSCNCLARSRNRWGEYYARCRDRGMPHGKALKAVARKRLKVIYAIMRDKVPYAA

SEQ ID NO: 376933 - protein, 321 aa, unidentified
MSRIFIGVDVSKDFLDAHVRPAGVQKRFDNSPAGSDQLVAWVQPFTPERVVFESTGPYQKAAVGALLAADLPAVVVNARQVRDFAKGTGQLAKTDVIDAGILAHFAEVVATVVRPLPPQEILEFRDLCDRRGQLVRMLASEKNHRHAAQGSSPKVVKNIDKTIAFLERQVEDLEERMDRIVADSETFKAKDDILQSIVGIGPQVSRTLLVHLPELGGGSRQSIAALVGLAPFADDSGTVSRIRHIRGGRGKVRIALYQAAVAAIRYCPTMKSFYASLKARGKPSKVALIAVARKILVLANALLRTMTPYNNRANSVCPKTP

SEQ ID NO: 376934 - protein, 406 aa, unidentified
MELTALHKRVIACDVHQAQVTVCAILEEPDGSVRIEQQRFGAFQRDRRALAEWVGARRPDVVVMESTGIYWKSPYAALEAVGIRAVVVNARHVKNVPGRKTDIGDAQWLATLARAGLLRGSFVPPATLRELRLIARQRQKLMGQLASEKNRLHKVLTDGGVRLGVVVSDLHGQSARAMVKALIRGQPPHEVLRHASRRLKATRAEILDAVQGELTDSHRFVLDELMQHIEDLEARVARFEARLLAGLADQRPVLALLQTLPGVDLIGAALLLVEIGADMDVFASADRLASWVGICPGNNESAGKRKSGRIRKGNPYARRLLCEFAHAASRTPSAFQGKYKTLVVRRGHKRAIVALAHKLLRTIFFMLKRGEPYRDSATDYEALAVQRNAPRWIKALTRFGYITPAA

SEQ ID NO: 376935 - protein, 503 aa, unidentified
MGPLAYVTGVEASVSLRSEVRGRFWSNHFGWQSLFDVGHAPAWEHWTKSRPADQSLTGHPMSFDRLKRTQRRKRLPGHKLKPSRATLFVQNSKPHLSMKPTYFLGIDAAKHKMRVALSNRSEHVLFEKDLPVAATGLRQLLAAIKRQVNDPEQLLVLIEATGLLHLNWSAALTKAGYAVAVINPLIARRLYTLQNSIRDNKSDPIDARGLCTIGLLHGEKLLAHYRFCLKPEQFALQRLQSVRKALRSALTNLKKTYQSLMDLSFPELGGLLQLDGVGIRQLLIQAPTPAAIAGKRLCTLEKNWMVRPKAAALKTLAADSMADPDLAAASGPALVALLQSVAAIEARLHELDQQIAKLACTSVDQKTKALIETIPGFGPVNAAKTLAWLPTEILHSGSNRKVAARLQAFMGNDPRLRQSGQWKGHTKMSKRGVEMLRTAFFQSAFSAAHNDPELRTYYQCKRAQGKTHEVALSHLMRILTRRLVAVLRSGKPYQSHYNLKNAA

SEQ ID NO: 376936 - protein, 377 aa, unidentified
MTIVADPHSPVDGCEVTLGVDTHADTHVAAVIDPLGRHLGQASFDTTVSGFKALLAWANEFAPITLAGVEGTGAYGAGLARFLTTENITVVEVDRPDRKTRRDQGKSDPIDAYAAARAAASGRASGTPKTRTGDVEAIRVLRVARTGAIRARAKALTQLKSLIVTAPDALRAQLDGLDGIRLVTTCARLRPTRGTAPTPSPFAKRPPRPGRLIDPTAATKRTLASIAGRVQQLDAEITELDDDLEALLTPLAPTLLALQGVAFDVAGQLLVTAGDNPDRITSEAAFAHLCGVAPIPASSGKTVGKHRLNRGGDRDANAALYRIVICRLRWDPETRAYLDRRTKQGKSKKDIIRCLKRYIARDVYAAIQTDLNPTTTP

SEQ ID NO: 376937 - protein, 350 aa, unidentified
MPQLNVPRSAAVYGIDIGKNIFHVVGLGSDGVPVQKVRFRRDTLLQFFERAAPAIVGMESCAGSQWIARKIKALGHKVRLIPAQFVKPYVKSNKTDIIDAEAIAEAATRPTMRFAAFKSEEQADLQALHRVRDQMIGTRTRLINQMRAFCLEYGIALRQGAGLFKLDLPQVLEDKSNDLSSAMRKLLADLFADLRQLEQRIGDVTREIEAIASREDVARRLMTIPGIGALGATALLAAIGNGRQFQKARDLAAWLGLVPREYSTGGKQKLLGISKRGNRYVRKLLVHGARSCFRHLDRTRDRLGNWLDGLQARMHPNKAVVALAAKMARIVWVVLTKPGALYERRDPAFT

SEQ ID NO: 376938 - protein, 356 aa, unidentified
MSKSTQSANGLPVIHQRAAGIDIGSRFHVVAVPPHLSDEPVQTFQAFTADLQRLVAWFQSIGVQTVVMESTGVYWVPVFEVLESAGIDVIVANARETRSVPGHKSDINDAQWLQRLHAYLRHRERLLDYTVAHIQHMQKALTFMNIQLHHVVQDITGVTGMKIIRAIVMGERNPDVLAEFRDVRCKASTETIRGALVGNYQPEHVFALTQSLALRLIAECGTDLSKWRTAKHFTSWLTLSPGCKISGGKVLSAHSRKSNNRLTAHLRLAAVTVGKTNTALGAFYRRLAARIGKAKAVTATARKIAILFYNTMRFGMDYSDPGADHYEQKYRERVIKQLHRRAAEFGLELHQVECVS

SEQ ID NO: 376939 - protein, 343 aa, unidentified
MQTISTIGLDIAKSVFQVHGVDAAGQVVVRRQLKRRHVLAFFQKLPPCLVGIEACASSHYWSRELQALGHTVRLMPPAYVKPYVKRQKNDAADAEAICEAVTRPNMRFVPTKTVEQQSCLVLHRTRHLFIRQQTALINSIRAHLAEFGIVAPVGRRGVEQLLAVIADGNDTRVPDVARACIAALGVQLRALKAQILEFDRRILAWHRSSEVSRRLDHIPGIGPALATALVASIADPKVFRSGRDFSAWIGLVPKQNSSGGKDRLGNIIRQGDRYLRSLFTAGALAVIRYAKIHGTKHRPWLAALLARRPTKVAAIALANKIARIAWVLMTRGERYRQPAALKV

SEQ ID NO: 376940 - protein, 419 aa, unidentified
MTRKEAVMEILYDCCCGLDVHAKTVVTCLIKHGKKQTRTFGTMTSDLLALSDWLSSEGCTHVAIESTGVYWKPVFNILEGQVEVMLVNARHVKAVPGRKTDVKDCEWLADLLRHGLLRPSFIPPLEIRELRELTRYRQSLVREQTALANRIQKLIESGNIKLGQVASDALGVSGRQMLKALAAGERDAGKMAELARRRMKRKKPELKRALEGRLTPTQRWVLGELLTRYEEVEAAITRVEQQIEREVATCRDPFVTEAVQLLQTIPGVGERVAETTVSEIGVDMSRFASDGHLSSWAGMCPGNDESAGKTRSGKTTKGSPYLRAALIQAAWAATHQKGTYLAAQYQRLVKRMGKKKALVAVGHSILVIIYHVLKSHASYEELGGDYFDRRDTERQRARLIRRLESLGLKVTVEELPAAA

SEQ ID NO: 376941 - protein, 345 aa, unidentified
MYNMLTGVDLAKKEIQVCVAKSNKIVRNMPMTPTAFSNWLATQKPMTVVFEACATSNYWYQCAREYGHDARLISAKLVSNIRQNQKTDKNDAEAVLQASQLSNVNFISGKSKEQLELQSLVRMHQLSVKHKVAYGNQLCSLLLEFNIKLSPTDAGLNSAIQSILEDAENGFSAIFREALHTAWHQYLKSIELVKHYEKSVARASRASEACKNLMKIEGVGPTNAVNLYIALGCCELGVFKKARDAAACIGLTPIQHSSGGKVRLGSIGKNIRNSSLRANLVAGAMSAVNQAVKRDSRTKKDEWIKGLVERRGKRCAAVALANKTVRTAFSLLRNGTDYKAELLSA

SEQ ID NO: 376942 - protein, 347 aa, unidentified
MAIVDSTRVVVGGVDTHLDEHVAAVVDSVGGVLGVARFAVSPSGYGRMVSWMRAHGRLERVGVEGTGSYGAGLSRHLLRAGVVVLEVTRPNRQERHRNGKDDDLDAIEAARAVLAGRALATAKTSTGNTEALRVLLGAQRSAKQARISAMVQLRHLMFTAPDDLRERYAKLSRRELTLQCARLRPRLDGDNARYATKTAALTLARRAQALAAEIDELDALIAGLVKQTAPQLLNVYGVGTDVAATILVAVGDNPQRIRTEAAFAKLCGVAPLPANSGKRTGRHKLNQGGNRHANSALWHIVLTRVSQHEPRTAAYFERRRAQGLSTREIFRCLKRYVAREIFTALPR

SEQ ID NO: 376943 - protein, 344 aa, unidentified
MNYYAGIDVSLESSSVCIVDATGEIVKEARVESHPDALVKFFKAFGLPLTVIGLEAGPLSQWLYAGLTKAGFVTTLMETRHVNAALSATTVKTDRRDARGISQLLRMGWFRPVHAKSTGSQEVRALLVARKQIQHKLKDIELSLRGILRGFGLKVGKVTEKTFEARIRELVTSHPMLEEIAEAMLAARAALLEQFKKLHKAVLKIVRHDEVCRRLMTTPSVGAIVAITYKSALDDPGRIKKSRNAGPLFGLTPKRYQSGETDITGGISRVGDEMVRTALYEAANVLLSRVTRFSALKRWGMEVAKRRGLKRAKVAVARKLAVILHRMWIDGSTFRWTKTEAAYA

SEQ ID NO: 376944 - protein, 323 aa, unidentified
MSQPNLQCMGIDVAKLSLDIATTDTIEPFTVGNDEDGFAVITDKLKHTKINLILMEATGGLEAAIACKLQSEGYDVVVINPRQARDFARSMGYLAKTDNLDAAMLAQLALVIDRHPDRSRYIRHLPDEARAVLAAMVVRRRQLNHMLVAERNRLYPSHPQSRKSIDNIIDALQNELDRINEQMKQHMTAFFQEQARLIGSVKGVGDITVASLIAELPEQGKLNRREISALTGVAPLNRDSGKMRGKRTTFGGRAGVRATLNMAALVATQFNPAIKLFYQRLLAAGKPKKLALVACMRKLITILNTMLRKGEEWNASFQSQVIS

SEQ ID NO: 376945 - protein, 513 aa, unidentified
MKRKSRRAKCQKVSPFSGDLQLIEADAAAVDVGSRSHWVAVNPQRDPNPVREFGTFTTDLISLADWLAQCEAKSVVMEATGVYWVSLYELLERRGFKVYVVDAHTVRHLPGRSKSDVKDCQWLRRLHSYGLLRGSFRPPAQIRQLRNYLRSRTKIVEAAAQQQLRMQKALTLMNIHLHHVISDLSGLTGLAIVRTIVGGERNPNRLARLRDPRIRASKETIQKSLEGHWQEELLFDLKIALESYDHFQGQIAAYDEQIRQELKEVESKVNLANEPLPAARLKACRKRPGMSQQDQLDLREELYRISGVDLTRIDGISLQTAQKVFFEIGTDVSAWSDEKKFSSWLGLSPNHRISGGKVLKRGSRKVVNPLSVALRLAARTLRNSRSALGANFRRLIAKIGMPKAITAMARKLAVLLYRMLKYGTQYVDKGMQHYESKYQETKLQYLRAQAAKFGMILLPRSFFQNSQLPPALLVREINPFSVQNRQNPKCYKLLTVSEMPPVFMGSTRRSPQF

SEQ ID NO: 376946 - protein, 367 aa, unidentified
MKKLTTTMMQETLNKQDRCLTVGLDLGDRSSFYCVLDEAGDVLLEQRLSTTPKAIKEVFGAMPRSRIALETGTHSPWVSRLLSELGHEAIVAHARSVRLIGESRRKDDRIDARTLARLARIDPQLLCPVRHRSAEAQADLTVIRARAALVRTRTMLVNAARGLTKSYGERLRGCNARGMKPKAAQDLSPELKRALEPMMREIESVSERICEYDHLLESMTRNRYPEAERLKQIKGVGTLIALTYMLTLEDPHRFRKSRDAACYVGLQPGRRNSGQSEPQMHISKEGDPYLRTLLVQAAHHVLGPWGVDSDLRRWGMKLAEHGGKRGKKRAVIAVARKLAVLLHRLWVSGEVYMPLRTDGRATLPAVA

SEQ ID NO: 376947 - protein, 338 aa, unidentified
MVYGAIDLHSKHSLIRIIDAEGAVLRERRTPTSAERLVDAFAAVGPIRILVEAGTESEWVAQALEAASYTVIVADPNFAPMYGERSRQVKTDRRDVRALAEANRRGWYRRAYRRSAAQREVQQRLRSRRLLVQMRTQTISLLRSLVRQAGFRVPSGRTETVPQRLMGLALPPALTETLAPLRRMVEDLTKEIAGVEARLVPVAKADPVVVQLQTVPGVGPMVGLTYRAVIDDVRRFHRAAQVSAAIGLVPREDSSAERRHRGHITKAGSSELRSLLIQAAWACWRSKRSGTLHAWVENVARRRGRRIAVVALARRLSRILYALWRDGSTFNAALLATA

SEQ ID NO: 376948 - protein, 322 aa, unidentified
MTDFVLGVDIAKRKFDTALIVGGKLKHKVFTNDTQGFSELTVWLTKYGVDYAHVCMEASSTYGEELATYLHDAGYRVSIVNPARIKGFAQSELLRIKNDKVDAGVIARFCDKMRPDAWMPLPVEVRRLQALVRRVDALLSMRTQELNRIGSTHETVLHSINEHVSFLDEEIAALKKEIAELIKKDPSLKAKSDLLRSIPGVGEATIAAILSELSLFEKCGNIRKVVAFIGLAPREFISGSSIKGKPRICKMGQARIRKALFMPSLVSMQCNPVIITFRRRLAQKAKNGKVIVCAVMRKLVHIIFGVLKSGRPFDPNYGLETA

SEQ ID NO: 376949 - protein, 360 aa, unidentified
MSAATAPGHEIGPALDVVVGVDTHKHTHMAVALSANGGWLGNLKLDAQRSGYQELMRWVAGFASSPVFAVEGTGCYGAGLCRALQAAGMEVVEVNRPDRSTRRRLGKDDTIDAESAARAFIAGTAHVIPKAGDDLVEMIRMLKVVKDSATENRTAALNQLHAIVVTAPAALRERLQRLRGKELVECCVGLRSGEISTPLAAAKMALRTLARRIQQLEQELKDSTAQLDRLTMELCPELRNTYGVGVDISATLVVAVGDNQERMKSEASFAALCGVNPLPASSGKVVRHRLNRSGNRQANCALHRIVICRLQRHLQTKEYVERRTAEGRTMKEIIRCLKRFVAREVFGILRGGPAIRTAAT

SEQ ID NO: 376950 - protein, 345 aa, unidentified
MERYLGLDMHRDSCTAVVLSAGGKKTGQQVVPTEAAALVQYVKSLSGELHVCVEEGEWSEWVVEILSPWVQRVVSATAPGRKGPRSDAMDARELAERLRTNQTGPPVYKASQEWARLRESVRVEGKLLQDEVRAKQRLKSLYRRRGVACRNEEVYSPKLRVTWNAKLPRSVRPSAELLGQELDQLLELQQTAEQQMFAAAKQFPMWKTLQTVPGIGRKRAAQLLAIVVTPHRFRTKRLFWSYCGLGVVTRSTSDWVRQKNGQMVRSPVYQTRGLNPACNRQLKGIFVGAAKTALRCRRPNPLLEAHERMVEAGTKPNLARLTIARKIAAVVLAMWKTESEYRIMS

SEQ ID NO: 376951 - protein, 454 aa, unidentified
MTRLILGIDVACRAAHQATLTDERGEFLWSARKFRTTTTDLESLWSSLPDDGELTVVMEPTRNAWVPLASWFQLRGAVVVMVPPEQSADLRDYYSKHTKSDRLDSRILARVPLLHPEGLHSLEGLGPADPLRRITKLRASLVKRRTVIAARLDAYLELLGPSWHAAFSGDLISNRSLRLLAGGYADPHALRRLGRARLIKLIWRYSHGKCGESEALQILAAAEESIALWDGELDFAELADDIAVEARLALALCREIHELEERIVVSLKALDPLGIMTSVPGVGTVNGAQILARLGDPNRFRSLAGAKSYSGLVPSLSASGVHGRHGGPTKSGDAPLREALFMAADWARRVDPTLAQRYHRLMVTEGKHHNSALCHVSATLLTRIISCWRAGTPYVIRDLDGTPITKERGREIVAKHYSVHEAIRAQRRTINRGTSRRIKESPGAPSIDSSQEKG

SEQ ID NO: 376952 - protein, 315 aa, unidentified
MHGDPVIVGIDVAKAKLDVFISQVERIEQYAYQPEEVRCLLQTLQAAQPELIVLEATGGLERRLVAELAAAGLPVVVVNPRQVRDFAKATGQLAKTDTLDARVLAAFGAAVKPALREIPAQAVQELAELLARRRQLVDMLVAERLRLQQALSKAVRRELKQHIEWLERQLRASDAGLHQAVENSPVWQAKYDLLCEVRGVGPVASLTLLALLPELGQLDRKRIAALVGVAPYNCDSGTMRGYRRIWGGRSEVRRVLYMATLCAIRSKNPPILAQYLRLKAAGKKSKVAIVACMRKLLVILNAMIRDKAHFHTQIA

SEQ ID NO: 376953 - protein, 342 aa, unidentified
MEKKLFIGIDFSKKTFDVSVIHRRDLQSEAYQQFANSKEGYHALLQWLKTLHKETSESWLFCGENTGLYSVCLSEFLVKKGLFIWLENPLQIKQSIGIKRGKNDRLDSHDIVFYAYRFRDKARAWSLPEKALKSLELLLAFRARLLSNKHTLLVSSSEIRRVMQRNTTVRYIYEQSKKDIERINKEIKEVEKQMLEQIECDETLRENYELVSSIKGVALINTSAILVATRNFTRFENSRQFACYAGLAPFAKQSGTSIHTKPRVSRLADKNIKVLLTQAAKSAMRHDPNIRQYYERKLAEGKEEWLITNNIKNKLIHRIFAVVRNKQLYQVNYINFSNKAIV

SEQ ID NO: 376954 - protein, 350 aa, unidentified
MLIIGCDYHPSFQQIALVDTENGELQERRLKHRDEAEHFYRALAAAGKKVRVGMEASGHAGWFERLLAELNIELWMGDAAKIAAKRVRKQKTDRRDAQHILTLMVKDDFPKIWVPNWENRDVRQLLWHRHRMVQTRTRIMNQLQAAALNEGLRYKKKLWRESGRQQLESLPLAPWASRRRHDLLEVLDRINPTIAELTQAIEQQAEKCPEAQCLMTHPGVGALTAMAFVLIVGEAERFGCGKQIASYLGLVPEEDSSGERRRLGHISKQGNSLLRFLLVEAAQVTVRSDMRWRNWFFHLAQRRGRKIAKVAMARRLAVRLYWMWRRRWNYAQLESFGSHVGQPVNRHGVQ

SEQ ID NO: 376955 - protein, 345 aa, unidentified
MEIRTIGIDLGKSVFHLVGLDERGSIVAKKHFSRGQLLTYTANLPSCLIGMEACCGAHFLGALLVRQGHRVRLIPAQFVKPFVKSNKNDYLDAEAIAEAVQRPTMRFVPIKSTEQLDLQALHRVRDRLISRRTGVINQLRALLLERGIIFRKGRRYLRRQMPLILEDAEQNLSCRMRRLLEQLWQEWKSLEEQIQLLSDEIEKIAGQDEACQRLLAVPGVGSLVATALVASVGNGAAFRRGREFAAWLGLVPRQFSTGGKTKLLGISKRGNPYLRRLFIHGARSVAMHMNREEHALGAWMDQIESRAHHNVFVVALANKLARIAWAVLAKEKIYHPLPGIQISSV

SEQ ID NO: 376956 - protein, 324 aa, unidentified
MNKNKQFFGIDISKDVFDVVDHADNHYQFKNDLSGFRKFSKILTEHSLCVMEVTGSYYQKLATWLFSKSINVSVVNPLSVKRFIQMRLKTSKTDKSDARMIRIYGEYENPKLWQPPSQYIIEANELHKLIELLLKQRTVLKNKLHGLKSKGILTSAVVTSVRRQIRNLNKEVSSLEVKLEDLIKECQADLLTRLCSIPGIGKRTAIFLIVLTQGFERFENSRQLISYFGMNPTIHQSGSSIRGSSRISKTGNNHIRNLLFMCSFTACEHNKSCRDIYRRIIAKGKSKKLALIAVANKLLKQSLAIAKSGLLYDENFKSVYVNVG

SEQ ID NO: 376957 - protein, 338 aa, unidentified
MECKRISIDTSKHAFTIHAVDEKERPVLRHDLRRAQIERFFARLAPTEVALEACAGAHHWRRRLIALGHLVKLIPPQYVKPFVKRGKNDRNDAEAISEAASRPTMPLVPVKTVAEQAAAVIVKHREMLVGQRTQTINVLRGHAAEFGIVAAKGKGNVEALLAALAAEPTIPEIAKAMFAEMGRHVADLDAKIVAVDRQLLEQHKGSPVSQRLWAIPGVGPITAITMALSVNPANFESGRHFAAWLGLTPREHSTGGKHRLGRISKAGNERFRQLLVVGATALIRVAKPGRRSATAWLLGLLERRPRKVAAVALANKVARIIWAMMARGEAYRHQPASA

SEQ ID NO: 376958 - protein, 284 aa, unidentified
MDGKAEVECFVGVDFAKARVDVHVRPGGRAFGGTTDPEGLSALVDRLAPLQPRLIVLEASGGYEAVVAAVLAEAGLPVAIVNPRQVRKFAGAIGRLAKTDAIDAAVIAHFAEAIRPAPRPLPDHLSIRLRELLARRRQLVVMINAERQRLAKARDQIARPSFKALLRSLEAERARIDRALDKLIGASALWRAKEDLLKSVPGIGDVVARTLIAELPELGQVDRHQIAALAGVAPINRDSGRFRGQRRIQGGRVLVRAPLYMACLVAIRHNPPLRAFYRRLRAAN

SEQ ID NO: 376959 - protein, 412 aa, unidentified
MNQDKLFVGIDVSSKNNVCYLMQSDGSKHSSFSVPNNRNGAKIIVDRVTSVLLLQDIPQVVIGMEATSVYGDNLMRFLRESGSLGHFDRHLYMLNPKQVKKFRDAYSDLPKNDQVDSFVIADHLRFGRINKEVYMDDYKYQALKMYTRARHQLIQELTREKQRLLNTVFISFSGLTQEKIFTDNFGATSMALIEEFSSLDELAYMNIDELVEFIRKHGKNHFDNPEKIAEAVQRAAKNSYRPPQVIADAAKQMTAISMNTIRLLQKQIKEYDKAIEKILEAIPQTLTSIKGIGNIYAAGIIAEIGDVNRFPSQASVAKYAGLVWTQHQSSDFEAEDKRMIQGGNHHLKYYLCEAANALRRCDPEFKRFYALKYKEANKHNHKRALALTARKLVRLVYTLLKTNRLYIPPEEY

SEQ ID NO: 376960 - protein, 353 aa, unidentified
MPIVAEEYAFVIGVDTHAATHTLALVTAATGAVVDQAVFPTTSPGLDRALTWIERGIGGRAALVVIEGIGSYGAGLAERVGGADLLVAEPAPMAAAQRRGVGKTDSLDAVRIARSVLGVDTTRLRWPRATGARVALRVLVVAREQMVAERTRAINALTALLRTIDLGIDTRKPLSHSQIKTISTWRSRAEDSVVRTCRREATRLAKRIIALHAELADNRKALDNAVDDTAPELCELPGVGSVVAACVLTAWSHPGRVRSEAAFAALAGTCPIPASSGNTLRHRLNRGGDRRLNRALTTIVIVRMRTDARTRAYVARRRHEGRTTKEIMRSLKRYITRQLFRTLAATHPIPATP

SEQ ID NO: 376961 - protein, 341 aa, unidentified
MENVALVGIDLGKHAFHLHGQDRQGKAVFRKQVNRKQLVEFFATSHAYTVVMEACAGAHHMARKLASLGHQVKLISPQFVRPFVKGNKNDFVDAEAICEAASRPSMRFVSPKTESQQTLSALHRVRESLIRDRTKTINQIHGFLLEFGISLPVGQAVIKRLPAVLAEHPLPPRLVGILERLHAHFKYLSEQIGEIDREMGRQLADDDLGQRLLSIPGVGPVTASVLAAEMGDGKQYGCSRDFAASLGLVPRQYSTGGRANLLGISKRGDKNLRRLLVQCARAYMQRLERQSGRLADWVRGMLARRHSNVVACALANKLARIAWALATHHATFKTEASAAQT

SEQ ID NO: 376962 - protein, 363 aa, unidentified
MEDRAYLGFDVHERTTTACLAWKDGDELKRYDLGAVATTEAALREAAVGWDARLGDLWPPVAVMETGGRSLLVHDALVPFVDEVWVVAAEEVARLRGHRPKTDKEDAFSLARLAAQGLLHPLWIPSPQVLGLRALVRTRRTCVQRQTMLANQLRAYANQGGNPVDRGQTLSGANLRRLRTARWKTADFAVAVEALIEEAEALAGTLRKLTGRMEVSFGESQYAQWLDTLPRCGVVTSLTLATEIGDIGRFESADCLRSFAGLTPGLRESAGKTTGSGLSKHGNRHLRYAFMVLANQMGFLPADEEELAALYWREVNKRRQMRGAQIKAQAIVASRLCEIVYAMLRQGRGYERRAAEQQICRTA

SEQ ID NO: 376963 - protein, 397 aa, unidentified
MYIVGIDIGKRKHEAAVIDGEGTVIIKPFSFINNCSGYNRLLAMLAKAKLPLDEVSFAMEATGHYWLALFTRLQKEGFRVQVINPVQTNSIRSFYIRQAKTDPRDALLIAEVIRFGHFSESTLHPENIYELRELCRGRHAIVSMQADVKRKVVALLDQVFPEYETAFTNMFSDTSMAILQTCPTPKELSEMPLEELCHLIEVSSHKRFRMAKAQELQALARNSFGFAMAGDVFSTMIRLYAKHLDFLKQQVREMDRKIAEIMDTLDTPITTITGIGPTLGAYILSEIGDISRFSSAAKLAAYAGIDPTMRQSGEYNGVRNRMSKRGSPYLRHAIWLAASSAVLHDPALKLYFQKKRDEGKPYMASVGHACRKMVSIIYAVMRDNKAYTPCIPNEISA

SEQ ID NO: 376964 - protein, 334 aa, unidentified
MQNITLIGIDLGKHSFHIHCQDKSGKVLLRKKFTRTKLIEFLAGCASFTVVMEACAGAHFMARRIADLGHEAKLISPQFVRPFVKSNKNDFVDAEAICEAASRPSMRFVQPRTEAQQAMRALHRVRESLVSDKVKTTNQMHAFLLEFGISMPTGVAVVKRLSTVLAENELPPYLAQLLMRLHAHYIYLVGQITELEIALEQELSRDEVGQRLQTIPGIGPITASVLSSQLGDGKQYSCSRDFAASTGLVPRQYSTGGKNTLLGISKRGDKNLRRLLVQCARSFIQRIENQSGRLADWVRALLARKHSSVVCCALANKLARIAWAITTQQTVFER

SEQ ID NO: 376965 - protein, 355 aa, unidentified
MSQEKYIGMDVHQATISVAVMDAKGKLIMECVLETKAATILEFIQGLRGTLALTFEEGTSAAWLHDLLKPHVSRLVVCDPRKNALLKDGNKSDRVDARKLAELLRTNQVKPVYHGKHGTRALKELGRSYLTITKDVTRVMNRIKAVYRSWAIPCAGTSVYTPRHRAEWLAKLVEPGVRIRAEHLYQQLDSLEPVRLEARRELLLESRKHAAVKLLRQIPSIGPIRAALLVALLQTPHRFRTKRQLWAYSGFAVEIHDSGEYRSVRGKLQRNRERITVRGLNDNHNKDVKSLFKSAAISASTRPGPLHDFYVARVESGMRPTMARLTLARKIAAITLTLWKKGVSFDPKQLQRQAA

SEQ ID NO: 376966 - protein, 415 aa, unidentified
MALKIVYKICCGIDVHKTFVVACIASTDKHGVTSYERHRFSTYTKGLKNLLQWLLEHNCKDVCMESTGKYWIPVYNILEKDCSIVLAHPKYVKAIRGKKTDKKDAKWIADLFKHDLVAGSFMPPADIRQLRDLMRYRFKLTCFKSSEKNRLQNCLTVSNIQLGNVVSDTFGKSAQAILDKILENPEDTSFDLEPLVFKSLKKKLPELRDAIDGYITPEQAGKLKIIKAHYESLESRKAELEELILALAAPYQQELTILQTAPGISSPFTAIGIISEIGTNMEAFPSAKHLCSWAGLAPTNNESAGKKKSVRVSKAGCYIKPLLVQCANAVVKSSKHPEMRNRYLRLKKRRGHKKAIIAIARMLLTALYHMLKNGENYNAELYRKSDLPPVDREITVEQAILIARNQGYKIKSATA

SEQ ID NO: 376967 - protein, 416 aa, unidentified
MKIVRPICCGMDVHKNIIVATIGITNKKTRITEYIQETFSTLNPDLLNLKQWLINHKCFDACMESTGKYWIPIFNILEDEINIYLTHPKYVKAIKGKKTDKKDSKWICDLFKHDLIKFSFIPPKEIRALREISRYRYKLVGMRSSERNRYQNCMTVSNIGIGSVFSDPFGKSAQAIMKEVLESDIIEDEKILKCVHGLCKNKDKILDSIKHCNIETDQRFKMNESMTHMEELQVHIDNCEIEMMKRAAPMFDQFMHITQLPGISTLSAILIISEIGVDMKQFESDKQLTCWAGLAPANNESANKKKSVRISKAGQYLKPLLVQCALGAIKDKEGYFGIKYSRIKKRRGHKKAIIAIARMMLVSIYHMILTGETFNPSDYESFRNPNPPIKQQVLTEESAIEFLKKSGFDVSKLTKP

SEQ ID NO: 376968 - protein, 340 aa, unidentified
MNATTKFFIGVDVSKPYFDASLMKVINHEKQPMETQRFDNNNPGIKTFDKWLKRHKIFFDSNTLLVIENTGIYHRLLWAYCSDKNLPIHIGNAAHIKWSFGIARGKSDVVDSIRLCHYAFKECDSLKSTPVLNPILMQLKDMITARTKLLSQINSIKTYIRELKNVSDKSVQSILEKAHKAAIEGLALSIKNIETHIKKIITQNKELQNNYELLITVPGIGHLTAIYIICCTNNFAFKITGKQLACYAGVVPFEYTSGISVKGRNRVHHMANKDLKKLLHLCAVSAIQNHQEFKTYYDRKKKEGKHSMSILNAIRNKIILRAVAVVNNQKPYVQKHDVAA

SEQ ID NO: 376969 - protein, 402 aa, unidentified
MVFVGIDWADSEHEIYLLSRDGTELACFRVPHTRQGLENLKKRLLQHVNVPEEALCFLETSQGLLVQFLLEAGFPVYSLNPKVVDYRRKPSGAKSDAIDARLLADIGRSDFHRLRRLSPDSEHIQELKTLCRDQDTLLGDVIRLTNRLTACLKEYYPVALKLFSRLTLPVTLAFLGTYPTLEAARKASVSELVSFLKVHRYPQPELAAQRIYAHLHAPQLEARPAVARAKSRLMLVLIAQLEPLLKAVKEYDEEITRFFKSHPDSLIFASLPGAGTRLAPRLLAGWGDDRGRYENAAAVQALAGTSPVLYQSGKYRFARQRRACVKFLRRALHLFAFQSVRLVPWAQEHYRRKRATGKTHHEALRSLANIWVRIIFAMWLNHRPYDEAVFLAAKAKHAPLVA

SEQ ID NO: 376970 - protein, 356 aa, unidentified
MIVSNESPEGVVHMQISTIGIDLAKNVFQVHGVDAHGKVVLVRQLRRGQMIAFFAKLPACLIGMEACATSHHWAREITKLGHEVRLIPPAYVKAYVKRQKNDAADAAAICEAVTRPSMRFVPIKTAEQQSALAVHRTRSLLISQRTQLINALRAHLAELGLVAEQGRDGLARLIAMLKADRTLQSLPAAMLQALHAMIAQLAALQRQIDELDRCIEAQHRASDMSRRLKTIPSIGLLGATALTATITDPSAFKSGRDLAAWIGLVPRQNSSGGKERLGSITKQGDRYLRRLLVAGAMAVVQHARRHPEKYPWIARLLARKPAKLVAIAVANKTARIAWAIMTRGETYRPPALLSAT

SEQ ID NO: 376971 - protein, 437 aa, unidentified
MLLCLNPNAAGIDIGATEIYIAVPGDRDLQPVRCFSTFTEDLQAAADWLKACHIETVAMESTGVYWIPLFQILEARGFSVFLVNAHHVKNVPGRKSDVSDCQWLQYLHSVGLLRGSFRPEQAVCTVRSILRHRDSLVQMASSHVQHMQKALDQMNLQLHHVISDITGVTGVAILEAILAGERNPHTLAALRDRRIKASADTIVKSLVGDYRREHLFTLGQSLEAFRHYQELIAACDREIAQYLEGFESKVDPPPGPRSQSKGEPKPKDSEPRFDLQTHLHRIFGVDLTKVPGINVLTTQTLLAEIGPDFSRFASGPELTSWLGLCPDNRVSGGRVLSVKTRKVKNRAATALRMAAQSLYRSQSYLGHYFRRMRAKLGAPKAITAAAHKLARIVYHMVTTRQAYDETICAQNEVQNRQRLEARLRKQARELGLQVVAI

SEQ ID NO: 376972 - protein, 359 aa, unidentified
MFNNSTSFIGVDLGDKYSFITAINREGELIEESRLPTNRASFQHRFSSLQPCRIAMEVGVHSRWASHLLKNLGHDVLVANARKLRAIYHNPRKGDRADSETLARLARLDPALLSPIHHRSPQAQADLAVLRSRDALVRSRTLLINHARSIVKSSGLRLPSCSAYSFAHKVAPHIPEPLRPALDPIINTIASLTQQIKSYDKKTEDLCGERYPETKLLREISGIGPLVSLAFILTLENPDRFHKSRDVGPALGLVPRRDQSGDNDPQLRITKTGDPYLRRLLVFSAQYILGPFGPDCDLRRWGLKLAERGGKNAKKRAVVGVARKLAVLLHHLWKTGETYDPFYLARKHDPTLDAIPATA

SEQ ID NO: 376973 - protein, 338 aa, unidentified
MKLKRIGVDLAKSVFQIHGVDSHEQAVVKKRLKRSQLLDFFRQIEPCIVAMEACGSAHYWARELRKLGHQVRLIAPQFVKPYVKGSKNDANDAEAICEAASRPTMRYVAIKTADQQAGQAFHRIRRRLVKARTALVNEIRGLLAEFGIVMPTKGVAACRRLLVGVMEDGENGLPGQMRELLSQLSEELAQRDAHIAKLDLQIKEQCAQDERIKRLMAIEGIGPISASAIVSAIGDARQFNSGRDLAAWLGVVPNQHSSGGKDRLGAISKRGDSYLRTLLIHGARAVVSVCQNKEDRKSQWIKGIIARRNKNIATVALANKNARIIWAVLSRDECYQPI

SEQ ID NO: 376974 - protein, 391 aa, unidentified
MSMYFIGIDISKYKHDCCIISAANQKVVSKVTIKNNKAGFNELLTIIHSLANPADIRIGFESTAHYALNLELFLENSLLTFMEVNPVLISEYKKSKTLRRTKTDSVDCESIARWLMTVEYKPHSKGFYHAYSLKSLTRLRDKLIRQRSFYLIKITNVLDHTFPEFKPFFNERLSKTALYLLENYGSAEKMARMNSASYEKLRSLSRGKFSPQQFLRLKELAANTVGVNNSIFDVELNSLLSLYKSLVKEIDTIKKEINQLIEEVHPHYMSVPGIGPLSAAVIYSEYGDISNFTNPGQMLAFAGIEPGINESGTESHGGKMVKRGSSQLRYTLINCCLPLIRFDMTFATYYAKKRGEGKPHRVAITHVAKKLIRVIYALESQDIDFNAQELR

SEQ ID NO: 376975 - protein, 435 aa, unidentified
MSSLSKINPTCAGIDIGNESIFIGVENCDVASFGTFTDDYLKAIAYLKEHHITAVAMEATGVYWITLFDMIEAAGITVTLVNGKQVKYLPGRKSDVADCQWLQQLHSFGLLRPCFIPDDITRQLRTYTRLRADHLSMASSHIQHMHKALTLMNIKVQNVISQLHGVSGMRIITAIVMGERNPETLADLCEASILKTKRAHVVASLNGNFKAEHIFALKQALSAYDFYQHQITECDKQIEALLNDHTDDMTAPKDITPAKKIRHNPPQIDDLHTKLMKMTGGNDPSQITGLTDKTLLELIAETGTNLQEHWTTEKHFASWAALAPGMHQSGKTNKKRKIKKNSRAGQIFREAALSIAASKNSAFTAFYKRMKAKKGFLFALKATARKLAVIYYRIMTKGIAFVERGIELYQQKFKEQQLRLLQKKAKSLGFALVTS

SEQ ID NO: 376976 - protein, 344 aa, unidentified
MITIGIDPHKSSHTAVALDEAGRVLGELRVAATKAMLERLLHWAERWPDRIWAVEGAAGLGHLLAQRLVAREETVLDVPATLAARARLLARGHGRKTDGIDAASVARVAQSQPDLRRVGPEDHSAVLRLLSDRRDELTGERRRVVNRLHRLLRDLLPGGAPTELSTEAAARLLNRIRPKTAVDLERKAMARALVADLRRADRALVANRARCAAAVAASGTTLTTVFGISDVLAAKILGHVGDVSRFASADRFASYSGTAPIEVSSGEVTRHRLSRAGNRALNNALHLAARVQTMHAGPGRDHYQRKLTEHKSSREALRSLKRQLAKVVYRHLVADQTHRRALAS

SEQ ID NO: 376977 - protein, 376 aa, unidentified
MTKIIRIGVDTSKSVFVLHGVDAAERVVLRKRLRRRQVLELFAQLEPTKVGLEACGAAHYWARELQGLGHEVVLLPPQYVKPYVKRNKNDAADAEAICEAMSRPTMRFVPVKTAEQQAALMLVGTRDALVRRRTQLTNAIRGYAAEFGLIAAKGLDKIEPLLARIAAHAPLPGLAQELFAAHAKEHVRLQAQIREIEAKLRAWHKHNELSRRLAEVPGIGPIGATLAVMKVPNPKAFRCGRDFSAWIGLTPKDHSTAGKTRLGVITRAGDEALRSALVAGATAVIQHVRQGKGHPSPWLIELVRRKPAKLAAVALANKNARIAWKLMVSTERYNPAHSRTVAASGGRGPALRGGSAPRPPLAPHDKSREITATTRA

SEQ ID NO: 376978 - protein, 411 aa, unidentified
MDVQYERCCGIDVHKRIIVACLKCGKKQEIRSFGTTSEEIRTLVRWLLDAKCQMAAMESTGSYWKPLYNIFELSQLEIMVVNARDMRNLPGRKTDVKDAEWIADLLQHGMLRASYIPKREQRELRELSRYRKSLIGERARELNRLQKMLEGGNIKLASIVSDINGKSSRNLLQKMLEKDTRLQREDVEASLHGALRHRVEDIVQAVDGFLTPLQKQLIRQVVAHIDDMTKRIGEMDTLVKQYMGEYEEAMEKLDEIPGIGRQSAETILAETGLDMSRFPSEKHLSSWAGLAPGNNESAGKRHSGKTTKGNPTLKTTLIQCAKAAIKKTDSFLSAQYQRLVVRRGKHRATVAVAHTMLIAIYHMLKDGRLFIDLGAEYYNQFNRERKIKSYLAKLKKLGWTPEAATLSGATT

SEQ ID NO: 376979 - protein, 400 aa, unidentified
MIELERCRQVEGTVWIGMDVHKKSCTMTAIDDAGREISCWNMPTTPAQLNAFIRGVPTKAKIALEASTTGKAVAHWLRNANLDAHMASPRELAAIRASGVVTDERASYHIAHLFRNNYFPESYIPTVETDRIRDLTRFRIGLGRDVARIKNQIHAIVSRNLFDSEIPQTDMFGKAGLQKLVSLPFPEQDRSILKSHLEHLKLLIRQEEQYSEELARIGKGRPDVELAMSIPGIDFYGAIGILGEIGDVHRFATRRKLYSYSGLVPGADNSGEQVSKHRRCKRGNSVLKYFLCNAVQGAIRASKPNSIAKFYHKKAKQIGHAKAQVAAARKLAGILWTILVSGMPYKEEDPALTQRKKARMELKARATQHCVTTEELNELAANISAKEQVLKRLLPEDEEE

SEQ ID NO: 376980 - protein, 293 aa, unidentified
MIEQCFVGIDVSQDRLDVLLLPQATGFSVANNEAGWNALIARLRDLPVAAIGLEPSGGYERGVLRALLAAGLSVRRINPNRLRQFARARGALAKNDRIDARLIAEYVATMPTHVVRHDPAAARIAEIVTMRRQLCDEHVAIENQAAQLEDAMLRRLAKRRLARIETDIRLLDKRLTQMIAAEADLARRYARLTSMPGVGPVLAFTLIALLPELGRMSRKQIAALVGLAPYDFDSGKLRGHRSISGAAACRCEMSSTWRPSAPAVTTPPSKHSTTASPPPARSPRSSLSPSCAR

SEQ ID NO: 376981 - protein, 344 aa, unidentified
MPTSTPSPPRYQLFVGVDIAAQTFTTVWMTPDTSPGRPVTLDQTPQGFAALQARLLTTGHAAADILVVMEATGSYWVALATTLAQSGFAVAVINPDQAHNVAKALLQRAKTDAIDARTLARLAATLQPAPWTPPPAIYTKLQQRLAERDALIGLRQQVRNQRHALVQLPVVIPAVRARMEELIATFDAQITAIEREITQILPQDAGWAASADLLMSIAGVGLLTAAWLLVTTLNFTIGATPEAVTAYAGLAPVPKESGTSVRGRGAIGHGGNKRLRTALYRATLSATRYNPLIKACYDRLHAAGKPAKVARCAAARKLLHLAWAVVRKGQVFDPLYRQRHQSAA

SEQ ID NO: 376982 - protein, 409 aa, unidentified
MRSFVGIDWSEKRHDVRVHNDKGACLARFQVPHSLQGFEKLEKRLKAVNPRAAACLVGIETQENLLVDFLCERGYPLYVVAPGTVNSNRGRHRASGAKDDDGDAYLLADILRTDRHRLVPWRADGALVRQMRLWLHGIDELTNSIVRANNRLRANLLRYYPQCLQAFENLQSHIALAFLQTYAAPTQLQALSYEDFWTFCRRQGYRHYRLLPEKYAHLQTPAPQVDPAIVTAHAAYSCAVAQQLQLLTQQKKKALQQVTSLFVQHEDAYIFDSLPGSGKLLAPKLLVMFGDHRDRYPQPTILQAIAGACPITRRSGKSQLVLFRRACNRRYRATAQQFAMSSLVKSPWAAGYFYRAKERGHGNSHALRALANRWLRIIWAIWQKREPYDESYHLQQLHHRRQPQPSTSA

SEQ ID NO: 376983 - protein, 338 aa, unidentified
MNVVTIGLDLAKHIFQVHGADAAGRPLLRKRLRRSQVAGFFANLPPCVVGMEACCGAHYWSRVIGRFGHTVRLIAPQFVKPYVKSNKNDVTDSEAICEAVSRPQMRFVPAKSVEQQDIQSLHRVRSRLVSSRTQLANQIRGLLAEYGIVLPEHVSQLRRGLPLILEDATNELTVFSRRLFSSLYDELLSLQDKIEAIDAQIWALYQASEPCRRIAAVEGIGPLIATALVAAMSDGKTFKNGRQFAAWLGLVPRQYSSGGKARLLGISKRGDPYLRTLLIHGARSVVYRAGRKTDQRSLWIADKQRRLGTSKTCVAVANKNARIVWSLIARGEVYRRAA

SEQ ID NO: 376984 - protein, 411 aa, unidentified
MDIIHERAAGMDISKRDVKVAVRHPGKRKGSFTTDVRTFGATTSQILELIDYLKAEQVTTIVMEATSDYWKPFYYLMEEELPVLLVNAKQARNIPGRKTDVNDATWLANLAAHELLRASFIPSQPIRELRDLTRARTTFVRDRTKVYQRMEKFLESSGIKLSSVASSLTGVSARNMLQALIDGERDATVLAELAQRSMRRKIPQLIDALDGRFTDHHAFMMRILLRQIDELTAVIDQLTVKIDEAISPFRDACSALETIPGISRTSAQVILAEIGADMTVFPDAAHLASWAGVCPGQNESAGRSKSSHTRGGNMYLKAALGTAAMAATKRKDTFFAAKFRRLYARRGGSRALVAVEHTLIVAIWHLLATGEVFKELGPNFYAQRNESRSKIKAVKELERLGYDVQLVPSVA

SEQ ID NO: 376985 - protein, 442 aa, unidentified
MDQSAEVVELEQSVEQVGRVAAIDIANASAMVCTRLPSARNPDRRVQRTFAVASTTDAIAGLAGQLAGLRVQLVVMEATGDYWRPFFYLLEDQGLTVWLVNARDVKNVPGRPKTDKLDAIWLAKLAERGMLRASFVPPAPVRELRDLTRLRRTLTEERARHRNRIEKVLQDACIKLSDKHDGLSDLFGVSGRAILAALVAGQRDPAALAEPARGQVRKKIPFLRRALAGRFTDHHGYQIEMLLGLHDGLTERIEELTGRIEAAIAAIDPTAPPDPDHPDRMALLDRLDQIPGVGRDTAAEIIAETGVDMTVFPTPGHLASWAKLTPRTVQSGARSGHGGTGKGNRWLKCALAQAALNAGRTKTFLGARYRRIVKRAPKKKAQVAVARNIIEVFWFLIEDPDVRFADLGPDWHTRHIDTARKTRQAVRDLEHLGYTVTLTQAA

SEQ ID NO: 376986 - protein, 347 aa, unidentified
MAHFVGLDVSLKETSVCVVDEVGQVLCERKVPTEPDEIAVLLTSVGGDYVRVGIEAGPLSQWLVNGLVEADLPMVCVETRHMKALLKAQQINKSDRNDARGIAQMMRVGLFKPVHVKTLAAQEQRMLLTSRRLVQRKLLDIECDMRGTLRNFGLRIGAVSTTGYEGRIRDLVEGLPGLAAIIEPLLNVRRVMRQQLAVLHKMLLDRVRQDPVCRRFMTVPGVGPVVALTYRASVDQPHRFLHSRAVGAHAGLTPKRHQSGEIDYDGAVSKCGDATLRAMLYEAAQSMLVHSQKWSWLKAWAIRVAQRRGMRRATVALARRLAVILHRMWVDGTDFRWSNDTAAAAVA

SEQ ID NO: 376987 - protein, 313 aa, unidentified
MIHAEVIIGIDISKARLDIHVRPTGQCWSIENGRAGIAALVTRLTKLRPAAIGMEASGGYEQPLARALHAAGFDVHILAPARVRAFARAIGQSAKTDALDAAMIARCLEASRDRLEPYAPDPAREQLSALGAHRRRLIAERSGLTSQLDTIDEPIVRRMIQARVRSIALSLICLDKAATALLAAEPRLKRRVDRLRQAIGVGPVLAAALVADMAELGHISAKAAAALIGVAPHARQSGASKRPGRCTGGRKALRDILYMATLSAIKARDPVLATFYKRLREKGKPFKLAMVATMRKMITILNAIARDDPAFQT

SEQ ID NO: 376988 - protein, 327 aa, unidentified
MTHVVGIDVSKAKLDVVWLRDIQTLKAKSKVLGNDRAGHKDLLVWLQKQLDQPLEQIHVVMEATGIYHETLAYWLHEHGVKVSVVNPAQARDFAKGLGTVHKTDKVDALILARYGALISPSLWQPEPRAIRELKALLARLEALETDLQREQNRLEKAEFGAFSSVILDSLHTMIGELQKERDRLEREIDDHIDRHPDLKNDLRLLRSIPGVGPVVSRVMLSVLRSRDFRQASECAAFLGVIPKLKESGVFKGRTTLSKKGAPSVRAKLYMAAIVASQHNPAIRAQRERLLGRGKTKMQALGAAMRKLVHQCFGVLKHQTAYSPQLAL

SEQ ID NO: 376989 - protein, 416 aa, unidentified
MKIVRPICCGMDVHKNIIVATIGITNKKTRITEYIQETFSTLNPDLLNLKQWLINHKCFDACMESTGKYWIPIFNILEDEINIYLTHPKYVKAIKGKKTDKKDSKWICDLFKHDLIKFSFIPLKEIRALREISRYRYKLVGMRSSERNRYQNCMTVSNIGIGSVFSDPFGKSAQAIMKEVLESDIIEDEKIMKCIHGSCKNKDKILDSIKHCNIETDQRFKMNESMTHMEELQIHIDNCEIEMMKRAAPMFDQFMHITQLPGISTLSAILIISEIGVDMKQFESDKQLTCWAGLAPANNESANKKKSVRISKAGQYLKPLLVQCALGAIKDKEGYFGIKYSRIKKRRGHKKAIIAIARMMLVSIYHMILTGETFNPSDYESFRNPKPPIKQQDLTEESAIEFLKKSGFDVSKLTKP

SEQ ID NO: 376990 - protein, 361 aa, unidentified
MRIIGCDLHARQQAVAMLDTETGELVEKLLVHEGSNVRGFYSTLPRPVRVGIEATGSMQWFVNLMEELGIEYQVGHPAKIRAAEPRKQKHDRRDAELILKLQVEKRFPSIWLPSKELRDLRALLLHRHQWVRMRTRVQNALQGMALANGLRRGPSLWSQAGQQVLASLPLAPHTAHRRSELQALYVKFEAEIEKLNQRVEEQARERPGAVLLMTHPGVGPVTGLATDVFLGDPARFADGKALASYVGMIPSEYSSGDRQRLGGLSKQGNPLLRFLWCEAAMHTVRQDPELKRFYQRKLVQKGLGKARVAVARKLGIRLWIMLRDQIDYKEFCRRGQRRQENGGACAGMPETGHGAKQSPGV

SEQ ID NO: 376991 - protein, 355 aa, unidentified
MNSRKYIGMDVHKESISIAVRNAAGKIVMECVIETKASMILDFIAGLRGDLQVTFEEGTSAAWLYDLLKPHVAKVVVCDPRKNASMREGNQSDKIDARRLAELLRLNHLSPVYHGEHGLRSLKELVRSYLTITKDLGRVMSRVKAIYRSWAIACTGKQVYAPRHRAEWLGKITEPGVRRRAEFYYQQLDALRTVRQQVRRELLAEGKKHTAWKRFRQIPSIGPIRAAVLLGILQTPHRFRTKRQLWSYSGFGIETQSSADHRRVHGQLQRAKKQSSIRGLNRNCNHDLKNLFKGAAIVASSKPGPFQEFYTALLTKGMRPEMARLTLARKIATIVLIVWERGVSFDAQHLKPQTA

SEQ ID NO: 376992 - protein, 350 aa, unidentified
MGYHTEAFIGVDTAKLRNAVAVAESGLNGQVYFYGEIDNTEAAMRKLIRKLESKYKKLTFCYEAGPTGYGLFRLIKELGHNCSVVAPSLVPRKPGDRVKTNRRDALNLAKLLRAGQLIAVWVPDERHEAMRDLVRAREAAHIDYTRNRQQVSAFLLRLGRYYPGKKTWGKAHLKWLAAQKLDNYEQRIAFEELLLAVRQSRERIERLEQAIRDSLPEWSLAPVVEALQALRGIDLISAVVFMSEIGDLSRFASPRQLMAFLGLVPSEWSTGESVIRGPITKAGNRRARRILVEADGAIDIRLGWGKKSRKKSRLCRGPSVRLPGRHRHDCAAVSASSPGKASGRRLSPQQ

SEQ ID NO: 376993 - protein, 447 aa, unidentified
MKRYYMGVDWGDRLHQVYVGDEEGKKVREVKVPETVEGLAEMGRWLDEKRAEEIELWAAIEKPAGRIVDFLLDHGVVVYPVNPKAVDRVRDRYRMSGSKSDPFDAYVLAEFLRTDQVHLRALQPNSEKAQELKLLSRDQRRVGRQKTRLLNQLTITLKEYYPRVLEAFNDLETQIVLDFIKQYPTPAHLSVLKRKEFNRFATKQHHLGKARCEELWEELKKPQLAVPEHVVRAKAQLVEVLIEQLQASIKAVKIYHERVESFFASTPAAEIAKTLPGGKSGVVVAGIWAELGDARGRWKSSRHLQAEAGAVPVTKASGKSRVVQFRFACNKLLRYASYWLSFNSLNRCEWANKYYRDQRRKGHSHPQALRALGAKWLKIIFVMWRDHQPYDENPTWLTSLDNRCAKQPEKKRERCLTSVIESLPWAVRAGSTSPSSKATGARYPRFS

SEQ ID NO: 376994 - protein, 363 aa, unidentified
MQNSITWVGMDVHAENIVLAAVRESSEAIVFRAEFPNTPKGRERLAGKLAENAPVRCVYEAGPCGYELRRFLEGRGIECDVAAPALIPRKPGDRVKTDRKDAEKLARLHRLGELATVFVPTPAQEALRDLLRTREDAREDLLRRRHRLSKFLLRQGRRYTEGVRWTTRHWDWIRAQTFTDHNAETVFREYIVAIEQEVERIRRIEQQIVEESRSPEVGKAIARLRALRGVDTITAMTIITEVIDLNRFRSPRELMAFIGVVPRERSSGGRERRGSITKTGNAHIRRVLIESAWHYQRLPAGTPKTILARREGQPPEVIETARKAELRLHRKFMKLLGRGKPKGIAAVAVARELAGFIWALGRG

SEQ ID NO: 376995 - protein, 342 aa, unidentified
MEKVSIIGLDLAKRCFQAHGASAGGGVAFRKKLSREKVLTFLAEQPRCVVAMEACGSAHHWGRAIRDLGHEVRLIPPVYVKPFLKRQKNDAADAEAIAEAASRPTMRFVAVKNEDQQARAMLFRTRDLLVRQRTQLINALRGHLAEHGVVAPQGPANLEPLALAIEESGTSLPLLVVELGRVYLDQIETLSQKIAELETATSREAKRGATTRRLQTMPGVGPITAMAIETFAPPMEVFKRGRDFAAWLGLVPRQHSTGGKQRLGKTSKMGQRDIRRLLIIGAMAVVRWACRRGAPEGSWLARMLARKPRMLLAIALANKMARSIWAMQTKGEDYRIPAIAAA

SEQ ID NO: 376996 - protein, 339 aa, unidentified
MDTSKQVFQLHGVNAAEEAVLRGKLRRKQMVAFFQRLEPTVVGIEACGGAHHWARVLREFGHQVKLLPPKYAKAYVKRGKNDAADAEALCEAMSRPTMRFVPVKTAEQQAVQMLAGTRDRLIRRRTQLTNAIRGYAAEFGLIAARGIDKIEPLLARLQGEPTLPALARELFAWHAKEYAQLQTQLKAVDAKLMAWHRQNEPSRRLAKIPGIGPIGASLLVMKVAQPEAFRSGRHFAAWIGLTPKDHSTAGKTRLGGITRAGDEALRSVLVVGATAVLQQVRRGKGQPSPWLVELSKRKPPKLAAVALANKMARIAWKLMVGGQHYNPAHVIATAMDKAA

SEQ ID NO: 376997 - protein, 353 aa, unidentified
MVTIGVDTHKRLIVAVALDAAGQVIGDWSGDNTPDGSRHLQIWAVELGPDRVWGIEGSGQYGRGLAQQVVASGATVYEVNPRWTAAARQRARQPGKSDRRDALAIAQVVRQEGAHLPQLQPEDATSVVALLTSERTDAVGMATQVRNQLHQYLHQLDPTDRTVESHLTHPRTVATLVTYTVAADAPALTQTRAAAVRRLATHLRLLQTQIDDLTAEIEAQARPHGHALTDLPGVGDLTAGMLAGYLGPGNRFATDAQLASYAGVAPLETGSAGTVRHRLNRQGQRQLNAVIHRIALTQARCCRAARDYLDRRRGEGKTWREALRALKRFIVRAIWRQWQRCLAAQNGAVTPTS

SEQ ID NO: 376998 - protein, 344 aa, unidentified
MNNTVVGVDLAKDVIQVCIYTRNRVLSNKEMTHQEFGFWLINTQPMKIVFEACSTSNYWTQASIEAGHSAHLISAKLVSAIRQNQKTDSNDALAIIQAAQLPEVQFINGKSVEQQQLQSILRLRDLAVKQKTAQSNQLKALLLEINIRVSRKGGLSGTILELLGDAKNNLSIEFREALNTAYEQFLSTVKSIDTYDDCLEKSVQKHSDCKRLLKLEGIGIINAVNLYIALGCKELGVFSKGKDASACIGLTPIQHSSGGKTKLGSIGRHVKNSLIRSQLITGAMAVVSQVDKRPAKTRKDAWIQGLIQRRGKKCAAVALANKTVRTAYAMLTQGTEYKAEALAA

SEQ ID NO: 376999 - protein, 321 aa, unidentified
MQDVLNIGIDVAKAELVVGVVDHPQYNSTLANSAVHIKRWLRRIPPGSRIAVESTGPFHHLVVELAQAQGLTTYVLNARDVYYYAKGLGQRSKTDRTDAQLISHYLREHHAHLYPFKAGTLIEQQVNHLLRRRVLLVEQRDALKKSLQDVVNLEVLIQQLFAQFELLLAALDREMRTLLISDPQVASEYRSIQSVPGLGPQGAALLVCLFRRIGFTNADAVVAFSGLDPRAKDSGQKQGKRHLSKRGPALLRRQLFMAAFSACRTAVFKPTYQALRARGLSSTAALIILGRKLLRIAFAVWRTHTPFEASHYLANQACVKL

SEQ ID NO: 377000 - protein, 408 aa, unidentified
MRTVHERCCGLDVHKKTVVACVMTSAGQETRTFGTMTHELLELKSWLEAEGVTHVAMESTGVYWIPLHNLLEDGPFELLVVNARHVKAVPGRKTDVKDAEWLADLLRHGLLRASFVPSRAQRELRELVRYRRTLIQERARLVTRVQKVLEGSNIKLGSVASNVMGLSGRAMLKELAAGNTDAAAMAKLALSNLRSKRSELEQSLAGSVGPHQRFLLRSQVELIEVIERQLEEIDKEVEERMRPFEAALDLIDEIPGIARHGAEQILAEIGIDMGRFPTANHFASWARVCPGTNESAGKRRRASTGDGNPWLRSALVEAALGAVRAGRAHPNFFAARYRRLAARRGAKRAQMALAHSMLVAIYHMLSEGAHFVDLGPSHWDERHRESVAQRSLRRLEELGYKVTIEAVA

SEQ ID NO: 377001 - protein, 321 aa, unidentified
MQEATVFIGVDVSKAELIISLGPEHRPRSVVNDSASIADWLREVPPHALIAMESTGRYHGLLAHLASQAGLKVFVLNARDVYFYAQALGTRAKTDGVDARVIARYLAEHHGHLHPWQPRSRVQQRLQDLLTRRAQLATQRSAVRQIVTGVDASDIDTSGLQRAFDALLKAMDSKMQELVASDARLSAGCQRLLTITGVGPQTSVLLATLFSRFDFGNADALVAYCGLDPRPNDSGMRHGRRRLSKRGPALLRRQIYLVGLAASHSKALKPLYEAIRAKGFATTAAFIILGRKLLRVAFAVWKGVESFDAQRLLPKNDLQKT

SEQ ID NO: 377002 - protein, 347 aa, unidentified
MRFYTKQHKYYCGIDLHAKKMYLCILDGTGEIVLHRNIKTDRDVFLKTIEPFTEDLVVAVECMFTWYWIADLCTQEGIPFVLGHALYMKAIHGGKAKNDKIDSHKIGALLRGGMIPMAYVYPAKMRATRDLLRRRNHLMRKRAELYAHIQNTRSQYNLPEFLGRIAKPQNREGIVERFQDPSVQKMMDTDLAVIEAYDPIIAKMERDIIKMADQHDPVAYALLKSIPGIGRILGLVILYEIEDIHRFPTVQDFVSYCRLVKSAKESNGKKYGPSGKKIGNAHLKWAFSEAAALFLKGNEPGKKYLDRLANKHNKGKALSILAHKMGRAVYFMLKNKKPFEQNKFLWL

SEQ ID NO: 377003 - protein, 343 aa, unidentified
MCSVTLRTVFVGLDYHAATVQVCVMASDQRVLLNRSCANSWQAVMGAVQQQCGGEVNVQAAIESCCGAANLADELISRGWSVQLAHPGYVARMKQSPDKTDFSDARMLADLERVGYLPRVWLAPEEVRELRRLVHYRQTLTKERKNLKLQIGATLREARQKPPASVNAWTKAWLAWLDASAELSPNARHITTRRLRRLTALQEELRQVDKRLERQTREDPLVQKLLTMKGIGLVTATTLRAEIGRFDRFRTGKQLARFCGLSPRNASSGQRQADAGLIKAGNNEMRTLLIETAHRLIRCDERWTALAARLSSRGKPTGVVIAAVANRWVRWLFHQAQPSCLAA

SEQ ID NO: 377004 - protein, 377 aa, unidentified
MLYLGIDQHAQQWTIDLGDESGEMMVHRKVSTKPKLLKQFLEDLKARAGSEGYLAIVEVTGFNDYLLELLPKYGCCRVVVVQPVEHKRRKTDRRDARQLRDLLWTNRHRVLSEQRLPGVRVVTPATAEQADQRQLTSLMRLLRKQRTQVINRLHTILKKHNLQHDMPAKSLNTATSQSWLGSLALGTTDGLERDVLQSQLRDIDSEIRKVHAQLRAMFMQSQAARIVASTPGISVYGGLAISSRLGDIKRFANGDSMANFVGLTPSCRNSDATVRHGSVTKLGSSFVRFFLSQGLVHVLRKDRWLRRWYQRIKKRRGGNVARVAVMRRLATILYAMLRDQMPYVPGGPQRYCRLLAIREHQQLSYDQLESLAFNPQV

SEQ ID NO: 377005 - protein, 351 aa, unidentified
MQYYKSTTEFNCGIDLHAREMYVCVMDQQGNKLVHTNIKGNDFDFFLKKVAPYRHSLTVVCECTFNWYWLADACFDSNIMFVLGHALYLKLIHGGKNKNDRIDSEKLAHLLRANLIPPAYVYPSERRPIRALLRQRMSYVWQRSALMTHISMNQTAEGLSPAAKGGHNRDVWVERILAQYENPLHQLAVNCEMDVIRVYDTQIEKLENEITRQAKKHEGRDYNLLNTVDGIGPILSMTILFEIDTVTRFPTVKNFISYSRLVKGSVASAGKIKGLTGGKMGNAYLRWAFGEAAIHCKRYHPLLTPYADRLIGKYGKFKGNAILAAKLARAVYFMLQKGTAFDAEKVISTSI

SEQ ID NO: 377006 - protein, 456 aa, unidentified
MAEQELDQAEEEPAELVARAAAIDVAKDSGMVCTRVPHESRAGRRVQKVWSVPARFAAVTELADHLRCEGIERVVLEATSDYWRIWLYLLEAAGLQVWLVNARDVKNVPGRPKTDKLDSIWLCKLNERGMLRPSFVPPEEIRDLRALTRLRTTLTAECSRHKQRAEKILEDALVKVSAVVSELFGKSGRAMMRALVAGERDPKVLAGLALGRLRPKQAQLAEALTGRFRDVHAYEIGLLLDLVETLEARITELDGKIEAHLAALPGVPPACASCGLIGGGHAPGCGSHGAQLLSLVQRLDEITGVGVVTAQVIIAELGLDMGQFPTAGHASAWAKLSPQTIQSGARTRAGKTGKGNRWLRGTLGDAAMAAGKTDTYLGERYRRIRRRRGKQKAIVATARAILEIAYLLISNRDIRYHDLGPGYYDRLDPQRQTRNKIRELERLNPGMKVTLAVAAA

SEQ ID NO: 377007 - protein, 369 aa, unidentified
MAEVREAFIGIDAAKLRNAVAIADAGRDGEVRFLGEVDASPEGMRRLAARLAAKYDRLHFCYEAGPTGYGLHRLLTGLGHHCTVVAPSLIPRKPGDRVKTNRRDALTLARLLRAGELTPVWVPDEGHEAIRDLVRARAAAVETLRVHKQQVSAFMLKHGRHFPRKKAWGARYLRWLQEQRFEHPAHQIVLQEAVEAVRLAKERVERLERTIEEFVPAWSLAPVVRALQAPRGVDLIVAVTFVTEIGDLRRFESPRRLMAYLGLVPSERSTGGSVRRGGITKAGNGRVRHMLVESAWTYRHPPRVGAKKLAQLERVPPKVREIAWKAQSRLSARYRALAARGKRLTVVCTAIARELAGFMWAVAREARTA

SEQ ID NO: 377008 - protein, 420 aa, unidentified
MKSASTTPNNTLPEFPPNDVTAGIDWARDDHAACIVDGRGRKVATITVEHTSTGLADLVGFLRRHGINEVAIERPDGPVIDALLAAELTVVVISPNQVKNLRGRYGSAGNKDDRFDAYVLADTLRTDRARLRPLVPDREDTIALRRACRARKDLVKHRIAAANQLRAHLRNVLPAVVGLFADLDSAISLAFLTRFNTQDKLDWLTPKRLGDWLSKQGYSGKVDPAELHQRILQAPRGAHGPHSNSQATITASYVALLGTLTQQIKTLAAQIDRQLDHHPDAPIFTSLPRSGRIRAARLLAEIGDCRARFPTPESLTGLAGAAPSTRQSGKLRTVGFRWACDKQLRDAVTDFAADTRLANPWAADLYDRARARGHDHPHAVRILARAWLHIIWHCWQDHQTYDPAQHRALQRVLATQTQAA

SEQ ID NO: 377009 - protein, 347 aa, unidentified
MTTVEAVRGVTGGVDTHRDVHVAAALDPLGGVLGTESFPTDVAGYQALLKWLEAFGQVTKIGVEGTGSYGSGLAGYLRRSGVEVIEVDRPDRQKRRRSGKSDPLDAVEAARAAQSGRATGKPKSRDGAVEAIRVLVVAKRSARQARVKALIQMRHLGFTAPEQLRCRFKGLSVEALIAEGIKLRPTRSGDPVMSATKASLSSLAHRISALDDELAELDERIEALLVATVPDLLALFGVGPDSAAALVMAAGDNPERLHSEAAWAHLCGASPIPKGSGKSSGRVKVHDGGDRQANSALWRIVIVRMAHDPETKLYVERRLKEGKNKYEVIRILKRYVAREVYRHLPHG

SEQ ID NO: 377010 - protein, 372 aa, unidentified
MSHMSELNTKTIVAGIDVHKYSHTAVAIDCFGQKLADHEFSNDYLSEFVAWLDSLGARENLLVALEDVNGYGVHIVKRLANENILMRYVPGILTERRRKQSIHREKSDPADAMRVTKVILTNYEETLPAKESIADPGERSAAANLDFFLAERRSLVAGQTILKNQLHALLHQYWGDHYADNFAKAFNPKSMAYYQKNLKPKNMADPEQPALAMSIKRRLERLKLFVSQIREIDAAMRTAAKDCQPVQALRQNLKGCGQITACALLAEVTTIKRFRTKAQFARYAGIAPIHKSSGSHKRLYTSPYGNRKVNRALHTIALYQISRADGLGRLYYEKKLAEGKTKLWALRCLKRQLANRVFQTLKHEYESRIKPV

SEQ ID NO: 377011 - protein, 318 aa, unidentified
MDTQISFNQVVSKGCGIDVHKKVVVATIDGEGIKKEIRKFGTFTRSLTELKEWLLENGITHVAMESTGVYWKPVYHVLESSPLKVWIVNARHIKYVPGHKTDKQDSAWICKLLLAGLLKPSFIPPKEQRELRDLTRFRIKLVQQIASDKNRILRVLEDCNIKLSNVLSNTQGVVGTKLIDKLCDGEEITMSDIDQVYHRKLGASKEELYEACQGLMTDHNIYLLQMIRQDIVAKESIINELNKRIKTKLMEYDNVLERLKKIPGLDTRTIENLLAEIGLDMSVFPSANHLASWAGICPGNNESAGKKKADAPITGTNR

SEQ ID NO: 377012 - protein, 369 aa, unidentified
MDNITFVGLDVHKATVCVAVAESGRDGEVRQVGVFENRPDVLSKMVTRLGKNGRRLSFCYEAGPCGYGLQRLLRGAGHECVVVAPSLIPMKAGDRVKTDRRDAVMLAKLHRAGELTAVWVPDEAHEAMRDLVRARMTAVRVLGKARQHLQGFLLRHERVYHGPRAWTLAYRRWLTTVRFEHPAQQIVLQDYIHAVQDAETRRDRLTGQIEELLPNWSMAPVVAALQAMRGVALVAAVTVVAEVGDFHRFINPRQLMAYLGLVPSEHSSGGSVRRGGITKAGNALARRVLIEGAWTYRMPARVSRKIHDRLEPLPTEIRDIAWKAQVRLCARYRRLVDAGKPKVVVTTAIAREMVGFIWAIARIAQPNFA

SEQ ID NO: 377013 - protein, 343 aa, unidentified
MQISTIGLDLAKNVFQVHGVDEVGKLTITRRLRRGQLIGFFKKLPPCLVGMEACATAHYWARELVKLGHTVRLMPASYVKAYVKRSKNDAADAAGICEAVTRPSMRFVPVKTAESQAALMLHRSRDLLVRQRTQLINALRAHLAEVGLVAATGVDGLKSLLAIIREAGETGQLPGPMRQALQPLVDQLAALQAQIGQLERSIHAQHRASDVSRRLETIPGIGVIGATAIAATVTEPGAFKSGRELAAWIGLVPRQHSTGGKQTLGSISKQGDRYLRRLLIVGATAVIRHARAHPDKHPWIMKLLAKMPAKKVAVALANKTARIAWAILAKGGTYRAPALAEHA

SEQ ID NO: 377014 - protein, 355 aa, unidentified
MSQEKYIGMDVHQATISVAVMDAGGKLIMECLLETKAATIVEFIRGLRGTLALTLEEGTSAAWLHDLLKPHVSRLVVCDPRKNALLQDGNKSDRVDARKLAELLRPNQVKPVYHGKHGTRALKEVGRSSLTLTKDVTRGRNRIKAVYRSWAIPCAGTSVYTPRHRAEWLAKLVEPGVQIRAEPLYQQLDSLEPLCVEARRELLRESRKPAAVQLLRQIPAIGPIRAALLVGLLPTPHRFRTQRQLWAYSGFAVEVHDSGEYRWVRGKLQRNREPIPVRGLNDNHNQDVKNLFKSAAISASTRPGPLHDFYVARVESGMRPTLARLTLARKMAAITLTMWKRGVSFDPQPLQRQPA

SEQ ID NO: 377015 - protein, 418 aa, unidentified
MAKKAKKVKTAKGAELRIVNPDAAGIDIADGIMQVCVPTDRTKDNNRAFGAYTSDLHAISEWLRECGIKTVAMESTGVYWIPLFCRLQDDGLDVVLTNARDVKNITERKTDESDAEWLMLLHQYGLLKASFQPHNDAKRMRTLTRHRDTLSREASSIVLHMQKAMQQMNIKLTLVLFDITGKSGIRIIEAILAGERDPKKLAELADIQCKTPKEEITKALEGNWEEDLMFVLRQNYDTFKHFCAQLDRCDTELEKLMENYRTEVAETGRPSYSPTKKRRNYHKRKRKRTVGFDVERKAYDMWGVNVFEIPGISHLTALELMSELGHYFTRKSLSTKQFCSWCNIAPNTKISGGKRISSHVPHRRNKVGLIFRSVASSLANAKNQLGNFYRRIRSRVGGKAAVIATPWWQTRRLIIRKK

SEQ ID NO: 377016 - protein, 385 aa, unidentified
MSGQTFIPMDYDVFAGLDVDKRSISVTFTTHHGFLKSLRMPYSVEHLLNHVRKHFPAQKVAFAYEAGPTGYGLYDGLVAQEYRCLIASPSMIPKAPGQRVKTNRLDSRGLAETLRGGQLKSIHVPSAVYRELRHLTQLRDTFVSEMAAMKQRIKSLLLLEGIEFPPAPAGSQWSVLVKDQLRTLPCSTTVRFKLDQLLDSLAFNEQQVVKTTKEIRRFCQHEPELVQCIKYLMTLPGIGWIVASQLVARIGDWRELRNIRQLGGFLGLVPTEHSTGDRTERGSITHTGDPRLRSKLIQAAWSAIRQDGELREFFRSVCHTHPRPLAARVAIVAVARKLSVRIAVVLMKQRAYEVRKPVHSAPLTPEETVPQGTTRRLPEPGEKNS

SEQ ID NO: 377017 - protein, 345 aa, unidentified
MDQIIRIGMDTSKYIFQLHGVDAAERPVLRKKLGRKQMIEFFAKLHPTVIGMEACGASHHLARVLGELGHEAKLIAPQHVKPYVARNKNDSRDAEGLCEATGRPTMRFVPVKTAEQQAALMLAGVREQMITRRTQLSNAIRGYAAEFGITVAKGLDKIEPLLKQLAHDESVPALARESFAIQGREYAQVQVELKAIEARLRVWHRANPDSRRLAKIPGVGPVGATGLVMKTPDPHAYPSGRQFAAWLGLTPKDHSTAGKTRLGKITRAGDERLRSVLVAGATAVIQQAMRGRGNPSPWLIALLKRKPPKLAAVALANKNARIAWKLMVTGEDYDGARMLGASAAA

SEQ ID NO: 377018 - protein, 391 aa, unidentified
MKTENIMGPRLSTPKAITFSSHVIILLLKLRKKRSIMEREQINFKDFQLYVGLDVHKRQWSVSIYTVSAHHRTFSQPPYPKALKSYLEKHFPQASVKCAYEASKFGYWIFRELASFGYECLVVNAADIPTSNKESSEKADPSDSRKIGKALRAGLLSGIHIPQQHTEGDRQLFRYRKRLWADLVRVKNRIKDKFLFAGIEIPQQHDNPNWTKAFLKWLKEAVLPDVHTRLTLDMLLEQYHFLYRHFLKVSIEVRKLQRTSYYKTNAKLLRSIPGIGPLTTVQLLTEIEDINRFQTFKKFNGYVGFKPTTHSSGEHDWRGRMTYRQNRALRSALIECAWTTVSIDPVMLQRYEDLKKRITAKRAIVIIARKLLSRIYFVLKNQKPYELGIAK

SEQ ID NO: 377019 - protein, 324 aa, unidentified
MAGGVFVGVDVSKDRLDVAFRPSGEKLTVPNDRRGVTRLVRTISRLKPECVVLEPSGGYERKLLEQLSEEGSPVAMVNPRNVREFARASGRLAKTDAIDAAVLAHFAEVMKPELRRLPDPETRKLRALITRRNQLVRMMTAEQNRRLQALESVRAGLSVIIRCLKKQIGVLDKQLAALIRATPAFRQKAELLRSAPGVGHVVSATLIAHLSELGTLNRKKIAALVGVAPFNRDSGKLKGKRAIWGGRGDVRSMLYMSTLVAVRLNPSLRVFHARLRRAGKPPKMALTACMRKLVVMLNAMLKAGGRCTEEGIRPVKIIPARVST

SEQ ID NO: 377020 - protein, 422 aa, unidentified
MEKIQTKKLKSVNDKMLIATVDIGKGLNMGYARCPDRSEVRPFEFANNRAGFDKFWTRLVEARNAKGLDTIVVGFESTGAYGEPLQHFLKDKPVRLVQVNPMHTKRVKELQGNSPNKTDRKDPKIIADIIELGHALTVVIPEGSAAELRRLTHARERTIKRRSALYNQLQDLVFISFPEFLQVVKDVKTKTARHLLQFYSDPQTITELGLGTLGSVIKRISRGKLGPAKAKDLFDAAKTSAGITEGRFSVALEIQATLEAVAACDTFVLRLEEEMSRYLKAIPYAHLLLSMKGIGRITAAGLIGEIGDFNSFDTQRELLKHAGFDLFEISSGKLRGSRRISKRGRPLLRKLLFFAALNTVRKGGVMHEHYQRHLKKGMKRVKALVAIARKLLGIIFALVRTGQEYQLNYMELQTHANLAKAA

SEQ ID NO: 377021 - protein, 357 aa, unidentified
MREVISLTTKRVCGLDLGDKTSAVCVCGRGGEIEWEGRVRTTVAGLAKRFQGVEPMRIALETGMHSLWVSRQLRQWGHEVIVAHAAKVRLIGNSRRKNDRLDARTLADLASVRPRLLSPVEHLSAEAQAHRGVLRSREALVRSRSSLILHARGSVKAWGGRLPSCSAESFVKKAQGAVPAELLPALAPIFEMVGELTVRIRSYDRQIEELLRTHYPQAQRLRQVRGVGPITTLAFVLAVGDPQRFARSRTVGAYFGLVPAQRDSGSLRPQLRISKQGDPYVRKLLVQCAHYILGPWGVDSDLRRLGERLSQVGGKNGKKRAVVAVARKLAVLLHRLLVSGEPYEPLRQAGLAQRPAA

SEQ ID NO: 377022 - protein, 409 aa, unidentified
MTTDIDLSASPVAGVDTHTDTHTVAAVTPTGRHLATETFPTTRPGYTHLAEFLSKHGVGAVGVEGTNSFGAGLTRHLIDRGYTVVEVLRPARSIRRRDGKSDPVDALAAARQVLTGEGLSTPKDSTGPVESLRALQITRKQLVSTTAKLITTMKSLLVTAPDDIRTRYATMTNHALVNALVYCRPSSDVTDPRNGVLTSLKILATTYRALRVQCDELETRIAALVSVINPHVSNIVGCGALVSADLLISIGDNPERIHSEAALAHLCGVAPLPASSGRTNRHRLNRGGDRRANSALYRIAMVRMKCDQRTREYVARRTEEGLSKREIIRCLKSAIVREIYRVICTRRSTSQPRDLRRDELKELRIAKHLTQVVVAKHLGRAPARISDIETGKRPLTELASAYEKFLKSA

SEQ ID NO: 377023 - protein, 376 aa, unidentified
MKQFNEIYVGLDVHKDTIAVAIARGLRTKPNYFGEVPNTPTAIAKLLKQLSPDGEVLNFCYEAGPCGYEVYHQVTRQGHACDVVAPSLIPKMPGVRIKTDRRDAMSLAKLHADGSLTAVWVPGKEQEGIRDLSRAREDFKQTETKARQRLGAFLLRNGKVFTGKSKWTVAHWRWMETLTFETPTQHIVMQEYVEALKEASRRVLGMEKQILLAVRGWSLEPVLNSLLAMRGVNTITAVTLLAELGDITRFDNPKQLMSYLGLVPSEYSSGSKRQQGSITKTGNGHVRRVLIEAAWNYRFPARKSRTIEMRAEKTSERVQAIAWEGQKRLCGRYQKLLSLGKLKQKVCTAVAREMVGFVWAIACEASGRVHGSRATA

SEQ ID NO: 377024 - protein, 416 aa, unidentified
MDTMYERCCGLDIHKKTIEACFRSGKKKTHMSFGTTSAELRKLTMWLVENDCQSVAMESTGSYWKPIFNILELSGTDMEIIVVNARHMKNVPGRKTDVNDAEWIAELLQYGLLRPSFIPDREQRELRELSRYRKSLVGERAREINRLQKMLEGGNIKLTSVVSEVTGYSSRRLLDRLLRNDEPMTEDVISGLVHTSLAGKSKELETALDGLLSELQKELLIKVLDHIDDMSKRIADLDDFCRKQMKKYEDALDKLDEIPGIARRTAETILIETGLDMSRFPTAKHFARWAGLAPGNNESAGKRSSGRTTKGNPTLKSTLIQSAKVAARKKNSFFKARYQKIAAKRGANRASVAVAHSMLIAIYHILKSGERFKDLGEDYYNQFNREKKKNYYLKKLTKLGVNLKEATLSISIQTAT

SEQ ID NO: 377025 - protein, 429 aa, unidentified
MNSTQNKKIEQVKETTMIVGIDVGSEQHYFRAFNWRGIELTRKPVAFSNSMEGFNSFYNTIMELMQKSELEEALVGIEPTGHYWFDLGQFMGEKNIKFVMVNPHHVHKTKELDDNSPSKNDRKDPRIIAGLVRDGRYFYSYMPTGVYAELRNASNRRFVLVEEQTRAKNRLQKWIAVYFPEYKGIYTRIDAKGGLLVLKQAPTPEEITKLGEEGIIKIWKDAKLRGSGHKKAMKILNAAMRSIGLKAGLTEARMEMQDLIEDYELQTKRLERVNDLIKELCQQVRYADKLLEIKGIGITTVAGFIAEVGDITRFDSTKELQKLAGLELVADSSGKHNGRTKISKRGRKRLRYLLFEAAISVVGKNEEFKEIHRYYTTREKNPLKKMQSLIAVACKLIRVFHVILTKGVSYDASKMLKDIQHPGEQLKAA

SEQ ID NO: 377026 - protein, 385 aa, unidentified
MSKLNHTDTSAAAEYATVYVAFELSKAKWHLGVILPGSQKLSRFRIDGGDLAALSGHLAKWRAKAGAAGKPVRIVSCYEAGYDGHWLHRWLTSQGVINYEIDPASIQVNRRARRPKTDRIDLEQLMSTLLRYLRDEPRVCSMVRVPSPEDEDRRRASRERDRLLKERSGHTNRITGLLHAQGIRDAKPFQRAFIASLESMRTGDGRALPPKLKEEIVREHERLCLVQQHLTALEAKSRAEMRAPAHGSVEEKINHLVDLRGIGVVGGRKLMHEVFYRSFDNRRQVGSFVGLTNSAYDSGNSHRDQGISKAGNRRARTLAIELAWLWLRYQPESELSRWFHARVGDLKGRIRRIAIVALARKLMIALWRYVTTGVVPTGAVSRQSI

SEQ ID NO: 377027 - protein, 420 aa, unidentified
MSPRSEQPFTAYVGIDWADTKHDICVQAAGDTRREFGCIAHQVAAIDEWANALHRRFGGPVAVAVELAKGPIVAALQKYDFLVLFPINPTTLAKYREAFQPSGAKDDPADAELALDLLLHHPERFSALRPQSAAMRSLVSLVERRRQLVGDQNRLTNRLCDTLKQYYPQVLEWFDDRGTVLFCDFLERWPTLRSVRQARTATLEVFFHAHHCRSSRRISARIESIRGATALTDDLAVIGPCRLHVLALVTQLRAVLAAIVQFDREIAAVARTLPDYALFESLPGAGAQLAPRLLAAFGEQRERFRSAEEVQRYAGIAPVTERSGKKRWVHWRLKCPKFLRQTFVEWAAQTVNRSFWAGAYYRQQWAKGSSHQAAVRALAFKWIRILYRCWQTGTRYDESVYLNALRKRGSPLLGNLNLSG

SEQ ID NO: 377028 - protein, 408 aa, unidentified
MDVIHARCAGLDVHKKTVVACVRVTEPGAVRHEVRTFGTTTSGLLALADWLRAEACTHAVVESTGVYWKPVWHVLESEVAMLLANAATVRNVPGRKSDVSDARWLADLLAHGLLRASFVPPAPIQELRDLTRTRKQLVREVTAHTQRIHKLLESANVKLASVLTDVLGVSGRAILEALAAGETDPERLADHLHARSRGKRAAVVEALHGRIRDHQRFLLRQHLRMIVTLEETITAIEGALAVALAPFRGAVARLVTIPGVSATVAAVIVAEIGTDMGRFPTAGHLVSWAGLCPRMDESAGKHRSRRTRKGAPWLKPVLVQSAWAAVRVRDRYPRAQYLHLKSRCGAMKAIVAVAASLLTAAYHMLRTDQDYRDLGATHLTEAARRRIAHRLTQRLRHLGYEVNLRPAA

SEQ ID NO: 377029 - protein, 352 aa, unidentified
MEQFIGCDAHKRYSVFVAVDEEGRNSPEWKVSHEGRTFEAFLEKLPRSSDIALEACSSYYWLVAAMEQAGHRPRLAHPLEAKRRMGKSHKTDKLDAKGLAILLRNGTLPEVWIPPAELRDQRELLRLRMQLTQQRTRWKNRIHGALIRYNLHVEASDAFGVRGREQMAQQLGGLPPHTRRSVEQQLAVLDFVESQIADCERRLAGLLEPSEEVRLLRTLPCVGPILSAVLWLEIGDVNRFPDAPHLASYAGLVPRVRASGGHTRLGPVCRDVNHHLKWAFVEAANLVAVNQRRLGPCHVLELYQRLKRRKNHQKAVVAVGRHLAEAAYWVLKKREAYREPKAPRRAVSSTRG

SEQ ID NO: 377030 - protein, 336 aa, unidentified
MSELATVGIDLAKTIFQIHGVDESGRVLVRCQLRRSQLLAFFQKRPRCLIGMEACAGSHDWGRKLQGMGHDVRLMPPSYVKPYVKRGKTDAADAAAICEAVTRPSMRFVSIKSVACSSVLVLHRTRDFLVRQRTQIGNAIRAHMTEFGVITAKGAQNVGRLREQLDRLPQAARLPITLLFEQLAETNERIERLTEGIKETHAQSETSQRLATIPGVGMLSATIIAATTPDVDNFGSARDYAAWLGLTPKPHSTGGKQRVGRISKMGNRYIRRLLYLGAMAQIMLRCRLKREPSSDWLSGMLMRKKTKIVAVALAHRMARTIFAVLRDGSRYEPQSA

SEQ ID NO: 377031 - protein, 350 aa, unidentified
MIIIGCDYHPGFQQIAFVDTDTGECSERRLEHREEAEKFYRDLGGQGAAVRLGMEASGHARWFERLLGELRFDLWIGDAAEIRTKRVRKQKTDRQDAELILRLLLEDRFPRIWVPRGENRDLRQLLWHRYRMVQARTRIMNQLQAVALNEGLRCKKRLWRDAGREQLEAFELAPWASRRRRDLLELLDQLTPTIAELTQAIEQEVEKCPEARRLQTHPGVGALTALAFVLIIGRADRFQCGKQIASYLGLVPLEESSGQRRRLGHITKQGNSLLRFLLVEAAQVTVRSDPEWRSKYFHLAMRRGRKIAKVAMARRLAVRMYWMWRKGWDYEQLKKFGSHAGQPGTGDGVR

SEQ ID NO: 377032 - protein, 355 aa, unidentified
MSNVVPETTVGMDLGDRYSYVHILDADGVCVEEGRVRTTPEALRQRFAAVPEGRVVMEAGTHSPWVSRLVASVGHEVIVANPRQLRAIYDNAAKSDRVDAEYLARIGRLDPKLLRGIEHRGETAQADLAVIKSRDVLVRTRARLVSHCRGVVKALGGRLPQCSTAAFHRKAWEHMPAALEPALAPVLELLERITAQIRAYDRKLETLANERYPETGRMRQVRGVGAVTSLAYALVIEDPSRFRTSRSVGACVGLTPRRRDSGDSEPQLRITKAGNPLLRRLLVQSAAYIMGPHGPDCDLRRYGERIAERGGKNARKRAHVAVARKLAVLLHRLWVSGEAYDPLRNSNRAAAATAA

SEQ ID NO: 377033 - protein, 410 aa, unidentified
MQTLVERGCGLDVHQATVVACLLIVLKNGRVQRQVRTFGTTTRELMGLREWLLSESCTHVAMESTGVYWKPIYAILEGAFEIVVANAQHVKKVPGRKTDVKDAEWIADLLCHGLLRPSFVPPSPIRELRDLTRYRRKLVESRTAERNRLLKLLETANIKLASVATDVFGVSGLLMLHALVEGKATAQEMAELAKKQLRKKIPELELALEGKVEEHHRFLLRVQLRRLRTVEEDLGILEQRIQEKLKPYAAQFTLLQEIPGIDETLAAAIIAELGVDMGVFESVSQLSSWAGVCPGNNESAGKRRSSHIPKGNVYLKTALVEAANSAAKAKGTYLRDKFYRLKARRGYKRAAVAVGHKILVAIYHMLSHQVCYNELGDVYLDNLNKHHVTRNLVNRLERLGYAVTLQQKAA

SEQ ID NO: 377034 - protein, 399 aa, unidentified
MISVGIDISKEKSTVCVLKPYGEVVCSPFEINHTEKDLSELSAMLLRLNEDIKIVIEATGIYHLPVLSYLQGRGLFVSVINPFEMKQYRSQGLRSVKTDKKDSIAIANYGIDHWFRLKNYEIAEGLYQELKILGRQYSHYMCMRIESVQSLTHLLDYTMPGIKNLLKGWQDATEKDKLSDFVEAYWHFDNITKLSLEEFIESYKTWAKVKGYHQSQNKAVKIYSLAQDGIPTLPAEMESTQIMIQQSVSVLRQINTTLKTILTRMQALAKKLPEYPVVRAMGGVGDILAPKLIAEIGDVRRFHSSKALIAYAGIDTPPYQSGQFTGTNRKISKRGSSTLRKIGYEVMRVLKTHNAPEDSAVYWYILKKESEGKSKKVSKIAGLNKFLRIYYARVKEVYQ

SEQ ID NO: 377035 - protein, 423 aa, unidentified
MTSMTLDPPLPNSLSPAVELVAGVDTHKNTHHVAILDLVGRPVADREFRADGRGYAQAIAFLRAHGDVVRVGVEGTGSYGAGLSRALNAAGLTVVEVARQDRQARRRRGKSDPLDAHQAAVAVLAGTDTAIPKTGDGAVESMRILLAERRSAAKARAQVMNQIHALLITAPELVRQAFRALSGQRLVNTLAKTRPGTVASPDPEVVARQTLRRFAVRHLTMQAEIDLIEQQLDLLVRQVNPTLLSLSGVGTVTAATLLVAAGDNPERLGTRASFAALAGVAPIPASSGQRTRHRLSRGGNRHANAALHRIVLLRMRHREPRTMAYFERRRAEQLTDRDIMRCLKRHVANEVYAALPNPATDNPAGRELRARRQAIGIPISVLAATLGVPYQRLRRLEIGTRADPDLEARATAILKRITSPLTA

SEQ ID NO: 377036 - protein, 318 aa, unidentified
MNTQTVYVGIDVSKENLDLAVNPREHIRRFHNTATGIGKTVDHIRETGSILVVMEATGGLEISLAAALGEAGIPTAIVNPRQVRDYARSTGKLAKTDAIDAQILADFAATVQPEPHPLAAPQAQELKDILARRRQLSEMITAEKSRLQRARGVLRDHIRAHIAWMEKEMLDMDTTLKRFIEESPMWREKDNLFQSVPGIGPVLSTTLVAELPELGNLNRKQIAALVGVAPFNRDSGKMRGKRSVWGGRATVRAALYMGTLVATRFNPVIRQFYQRLIAAGKAKKAAITACMRKLLIILNAMIKHRTPWHYAPELAVIS

SEQ ID NO: 377037 - protein, 360 aa, unidentified
MLIRYVGLDVHKDSIKIAVAEEGREPARYYTSIPGENNKLINRIRKLGPANSIRCCYEAGPGGYTVYRVLTAAGIDCKVIAPSMIPKQSGKRVKTDRLDAENLAHYLRSGDLTEVWVPDETTESIRNLVRLREDARIARQKARQQLNQFLLRKGRAYRKTRWIVHHIEWIRFQKFPEEGDNVTLADYLRQVELLGERITNVEEDLKLYSRHWKQNGLVERLQCLRGIAFISAVGIAAEVGDLKRFATAGKFMSYVGLVPAEYSSGQKERRGSITRCGNVMVRRLLVEAAWHYRFQPRRSRAIAFRNEKLPQQIQDLGWKAQERLHRKYMKLLMGGKPKNKVCVAVARELAGFIWAIGQSV

SEQ ID NO: 377038 - protein, 312 aa, unidentified
MDATVCVGIDVSRDRLDVHVRPGGEAFHVGRDGDGLAALVERLCALSCGVVPVEATGGFETVVAAALAGAELPVVVVNPSQIRHFAQALGKRAKTDPIDAAVIALFAEATKPAVRPLPDEATRLLADLVTRRRQIVAMIGAERQREKRAPARVRKSILRLIKALEKELASLDRDIDDSVRGSPAWRAKEDLLSSVPGVGPTIARSLIAELPELGSLDRRQVAALVGLAPFTRQSGQWRGRSFIGGGRAGVRSLLFMGAMVGIRHNPILKAFRDRLVAAGKPRMVALIATARKLLTILNAILRTRQPWREETA

SEQ ID NO: 377039 - protein, 365 aa, unidentified
MLGGVYVIYDDGRPLVEAYDGPQIVGMDLHRRRSVLVRMAEDGHKLSTVRIANSPARLAAEIKRAGLHPKVVLEACYGWYWAADTLTAAGAEVHLAHPLGVKEFSHRRVKNDELDARDLADLLRMGRLAEAWIAPAEIRELREITRYRGKLVQLRTSCKDQVHGVLAKLGIEVTCSDIFGAWGTQWLDELPLPQPYSWKVASLRQLIGWLSAEITVLEQVTADLLAGHDAYRAVQQLPGIGPVLGAVIVAEIGDITRFRHPARLCSWAGLTPRHYESDTKVVRGRITKQGSRPLRWALIEAVQRTPAGTPVRQARDAIIARRGPQARNIAKVAAARKLLTYVFYAMRDGHVRALDTPGAAAPETI

SEQ ID NO: 377040 - protein, 406 aa, unidentified
MMNAVGIDVSKGKSTVTIRRPGDEVILPPCDVRHTRSSIDTLINEIKSLEGETKVCMECTGRYYEPMATWLTDAGLFVSTVNPVLIKDFGDDSLRAPKTDKADSKKIARYTLDRWTKLKQYGLMDETRNQLKTMNRQFGFYMDQKTSMKNNLISLLDQTFPGANDFFDSPARSDGSQKWVDFVYTYWHVDCVAGRTLDVFTEHYRNWCSRKGYNFSAAKAKTIYDVSKDLIAVFPKDDVTKMIIHQAVDLLNAASKTVETLRAKMDETASTLPEYPIVMDMNGVGPTLGPQLMAEIGDVMRFEKRGSLTAFAGVDPGKNESGQYAQKSVHTSKKGSPHLRKTLFQVMDGLIQRSPVGDAVYDFMDKKRAQGKPYYVYMTAGANKFLRIYYGRVKEYLESLETNESE

SEQ ID NO: 377041 - protein, 313 aa, unidentified
MSTLPHSILSIDISKDHLDTDAWPTPWRKRIANDAGGVATIVKKARRLEAFVIFEATSIYDRGLMAALEKAGLSYHRANPRKAREFAKAAGFLAKTDRVDAAMLAEYARRIPLAPAEPVSPERQALRRLIDRRDQLVTMRKQEATRLKQVDDEAIRAEMETFLIEISGRIAAYEREIKAHFKTHPEHEHVARLLSSAPGVALVTAASLVAFLPELGNRSAKSITALVGLAPLSRDSGRWRGQRRIWGGRRKRRALLFLAARHAARHPAFAAFAKRLEDAGKPAKKIRIAVARKLLLALNAMISENRPFREQET

SEQ ID NO: 377042 - protein, 404 aa, unidentified
MNNVAGIDVSKGKSMVSVLRPFGEVVAKPFSIGHTGSELKELADYLKSLDGETRVVMEHTGRYYEPVARFLHDQGIFVSAVNPKLIKDYGNNTLRKVKTDKADSRKIARYGIDNWAELRQHTPMDTIRMQLKTLNRQQSLYTKTKTMMKNNLIALLDQTYPGVNALFDSPVREDGSQKWVDFATTFWHVDCVRNMSLTAFAERYRKWCKRHGYNFSQSKAVEVHAGAQDLIAMLPRDALTKTMVRQAIDALNAISASMERLKAEMQALAAQLPEYPVVMAMHGVGDSLGPQLMAELGDVTRFTHRNAITAFAGVDPGADQSGTHEAKSTRVSKSGAPELRRALFLVMDCLLKTQPQDDPVYRFMDKKRAEGKPYLVYMTAGANKFLRIYYGRVKEYLALRENAD

SEQ ID NO: 377043 - protein, 415 aa, unidentified
MEIRRETAPTAAAHGDTAFVALELSGQSWLTAVQPPCCGGSISLHKLAAGDAAGLLRLIERLRAGGKAQRVVCCYEAGRDGFWLYRLLVAQDGVRCHVLDPASLPVDRRARRAKSDRLDVRMLLRAVIAYENGGGDRQACRPVRVPTVAEEDAKRLHRERTALIRERVRHVNRIQALLATQGVSGFAPLRPGSRAQLPALRRGDGSDAPLPPALLAAIGREFDRLELVRRQIAELEAARDTVVREAAAATRVPAAAAATPASDGTAATVSADPDPVAAKIARLVEMKGIGAQLATVLGREVFYRSFANRRELAAYVGLCACPWRSGGMAREQGISKAGNPQARTAMIELAWLWLRWQPESTLARWFTGRVGTAMGRVRRIAIVALARKLLVALWRYLETGLVPEGAVTKAVAAAM

SEQ ID NO: 377044 - protein, 415 aa, unidentified
MSHKYLLKGVLLMVSVGVDVSKGKSTVCMMKPYGEIVKSPYTINHTKDDLLAMVAFIKTLDEEVWVVMEDTGHYHWPILLFLYEQGMRVTCINSLRMKKYCSQSIRRAKTDTIDSVQIANYGLTYWHELEAYVPRTEVFQALRTYSRQYYQYTCVETKIRVNFQNLLDQVMPGISARLADQNGRHKLTEFVYRYWHFYNITNHSKTVFVRSFSSWAKKQGYRSNEFIASEIYELAQTGIPVLPCNDSTKIIVQQLAQTLLTVDQTRIDILSRMDELARQLPEYDLVKKMSGVGDKTVSLLISEIGDVSRFKTKHSLIAYAGIDAPPYQSGKFDATQRSISKRGNKYLRRIGFEVMLSLLRNKPSSDPVYMYILKKKSEGKSSKTAMIAGFNKFLRIYYARVMELYSYIDNTRIAA

SEQ ID NO: 377045 - protein, 411 aa, unidentified
MQVLYERCAGIDVHKKTVVVTVLLTASNGKVQKQTQTFSTMTSDLLALEEWLTSLQVEQLALESTGVYWYPIYNVLEEGHQIILVNPQHMKAVPGRKTDIKDSEWIADLLRHGLLTPSFIPPKPIRQLRELTRYRKTLVQERAREVNRLQKVLESANIKLAAVATDVLGKSGRDMLEALVQGTTDVGVLADLARGLLRKKMPQLQRALEGQVQPHHRFLLQCILAHIEFLEASMEQVQGEIEQRLNPYEQAMVLLQTIPGIKAISAAGILAEIGIDMSRFPTSKHLASWAGVCPGNKQSGGKRLKSGITKGNPWLRGMLAEVVWAITHTKDNYLAAQYRRMAKRRGPYKAVMAVAHSVLVIIYHVLRDQRPYNDLGGDYFDRLDTSRLERHYVHRLEQLGYTVSLTPTQVA

SEQ ID NO: 377046 - protein, 386 aa, unidentified
MQKLNDLSRSLTPLAPDGTLIAVIEMSQSSWLVAGIVPGVERQPLKKLAVDESALLKLLHRWRDEAEKAGRRIERIAVAFEAGRDGFWLARWLRARSIEAHVIHASSVAVSREHRRAKTDRLDTELLKRAFLGWLRGERDHCKMVAIPTTKDEDAKRPNRERESLVGEQTRIVNRMKAALIRLGIRGFNPKLKKAAGRLEDLRTPEDEPIPPNTLAELRRDMERRRLVSDQIRQIEEARLDRLKQAPGEGPHAMVRLLARVIGVGIETADMLVQEVLSRNMRDRRAIARYAGLTGSPDESGTKRREKGLARCGNARVRRGMIQLAWRFLMFQKNSALAQWFRARTENARGTRKLMIVALARKLLIALWRLVREGVVPDGVVLRPAQ

SEQ ID NO: 377047 - protein, 485 aa, unidentified
MDYYPIQENVYNTEEQIALTILKTSKHPINMEKNIKNRELGGFEMINPDAAGIDISSREHYVAVPKDRDKENVKKFGTFTEDLHTIAKWLQSCRIKTVAMESTGVYWVQLFLVLESYGFEVFLVNASHVKNVSGRKTDVKDCQWIQQLHSYGLLRNSFQPENQIRELRNYVRHRRKLIEDKSRYVQLQQKSLEQMNIKLHTVISDINGKTGSSIIRSILEGERRPEVLATYCSPRIRASRETIIKSLQGNWRGDQVFMLRQAFESVEFIDKQISELDHQIESVVQQITDQYGKPENETGKKERKSSYKNRLRFDSKGYLRTLYGVDITKIEGIDELSGLSLLSEVGVDVKSKFKTEKQFLAWLNVVPNNKITGGKIKSSKVMKKKNKAGQIFRNAAYTLFNSKGYFGQYLRSKKAKDGAPQAIIATASKMARVFYKMVTEKIEYKEEILYMSNEKYLRRKLAKMKESIENIENVIKANTISYAFS

SEQ ID NO: 377048 - protein, 362 aa, unidentified
MKEYIGVDLGKRKAVVVKKDRLGKVTGKVTLAVTEAALENYFSKQDRRSKVVVEATGNWMYLYETIEKYVPEVVLAHPLKTRAIAEARIKTDTIDATTLAELLRLDGIAKAYIPPREVRDARELLRYRASVVSMRMGLKNKVHAVLTKNGMECGFSNVLGKRSRQWLKTLSVRDCYRRELDGYIRLAELSTGLIQEITTKIKEVVSVTPQAQLLMTVPGISYYSALLILSEIGQIDRFPSAKHLCSYAGLVPSVYSSGSKSFHGRITKQGSRWLRWICVEISIHAANGDAAFQSLYRRICRRRGLATAKVAVARKILTVIYAMLKNNEPFRRRRPRHQILAKAWSKKNKESSGHPPGVMIQA

SEQ ID NO: 377049 - protein, 328 aa, unidentified
MKAFTGIDVSKDKLDVCWLRDVTTNKKKTKVLKNTSKGHEALAEWLLKNTGLTPQEIVITVEPTGVYSEPLMYFLHAKGFILQQANPGKAYKYAQALDLVHKTDKSDSIMLARYGHDRQYSLSHWQPETKEFRELRAMLRRLEALEKDLQREENRFEAADFSSASKRVIESLENMISALKEEINKLTEEIDDHIDRHPDLGKNRDFLLTIKGVGPVISRIMVSLFASKDFKDAKQLSAYLGLIPKMKESGKRAGKTTLSKEGPGYIREKLYMAAVVASQHNPDIRAQKARLLAKGKTKMEALGAAMRKLAQICFGVVKTQTNYQPQVT

SEQ ID NO: 377050 - protein, 348 aa, unidentified
MDKVVAGMDLHSNNVVIGIMEMSGKRLASRKLACDLKEVVKFLAPYKKRLERAAVESTYNWYWLVDGLRALKYPVVLANPAGMQQYSGIKHADDTNDAFFVAELLRLNILPTGHIYDPRLRPMRDLLRRRMMLVHHRSALMLSFKSLYTRTTGQEMSLSRLKELEIKEAQGLYEHPANQLIAGMQIQHIDQLSESIEKIEKVVLASARELPCYAKLTTLPGVGRILGMTITMEVGEIERFASPGDFASYCRAVEAKCTSNQKKKGENNSKCGNRYLAWAFVEAANFARRYYPQCRQWYDRKAAKTSNVIATKALACKLAKAAWSVMSTGSDYDPNRMFGPMAKSKMKA

SEQ ID NO: 377051 - protein, 343 aa, unidentified
MEVTRIGLDIAKTVFQVHGVDAQGKVSVQKRLSRSKVLPYFAQLPPCRIGREACGSAHYWGRELQKLGHDVRLMAVQLIKPYRTKQKNDRNDAEAICEPVSRPQMRFVPIKTVEQQAVLTVHRARELLVTERTALANQIRGFLLEYGIALPPGIQRLRWELPAVLAPEDDTLPTLARTVVTELQARLRELDERIAGHDRGIAQVAKQNEAAKRLMQVEGVGPLTATAVVATVGDATAFPQGRHFAAWLGLVPKQCSTGGKPVLGRITKRGNVYLRTLLIHGARAVLQLTPKRTDAKSVWVEALRQRRGDNIAAVALAAKHARILRALLARGQQYWRTAETLAC

SEQ ID NO: 377052 - protein, 367 aa, unidentified
MTEERYYIGMDVHKDSVQMAVFEQIGDEPIYERKLNNDPALLVKEAKRFSQKGETEAAYEAGCLGYVIQRAFEKAEILCHVLPANKLAKKRDDRIKTDKRDARLIGRELRSKSIRPISVPNDADEATRDLLRCREDANEDMRRAKQRLSKFLLRHGHSYPEQQGSHWTAKYWGWMDKIQFSQEYERAVFEEYRSQILAMEARLKRLDQQVEEAAENPRYRTAVSKLRAFKGIDYIIALAVVCEIGDFQRFGSAKAFMSYLGFVPSENSSGPKRRQGGITKAGNGHLRKLLIEGAWHYTRNARSGKRLEQRRRDCPSDVIAIADRALFRLHKKYVRLLLKGKHKNTAVTAVARELAGFIWAVQVSPVA

SEQ ID NO: 377053 - protein, 344 aa, unidentified
MNDTTIAVDVAKAVFEVAVSAQPGHVRERHRLSREGFARLLRAQPAATVVMEACGSAHYWGRRAQQQGHEVVLIPPHVVRPYVRGNKTDRTDTEGLLEAFRNEEVRAVPVKSETQQALAALHRLRSTWVATRTARLNTVRGLLREFGVVIPVGARQVVPHVRALLEDADAGIPGLLRPALAEAVAEIGELETRLRAVERHLETAAAGSLVVGQLRTVPGIGVLTATALVAAVGDVQRFPSARHFASYLGLTPREHSSGARRRLGAISKRGDTYLRMLLIHGARAVLWHAKRPSARPLDRLRTWALQLERLRGHTKAAVALANKLARIVWAVWTRGTSFTALPMA

SEQ ID NO: 377054 - protein, 409 aa, unidentified
MRIIGLDIHRAFAEAVVWDDGKLKRMGRVDMRRPLLEAFAKKLSKEDVVVVEATGNASSVAAVIAPHVKKVVIANPKQVRIIAHAKIKTDTIDASVLAQLYASGFLPEVWIPDEPTQALRRQVTRRNQIVRQRSRLKNIIQSILHNHLIPSCPHADLCGASGRAWLFHQILPEDERLAVERHLREFDRLGEDLKVIERDLARSALGDEGVKRLMTIPGVDMVVGLAIVAAIGDAGRFEQSQKLVSYLGLNPSVRQSGPGPAYHGRITKQGRGHARGMLVEAAWAAARAPGPLRAFFLRVRARRGQHVAAVATARKLAVLIWHLLRKGESYAWARPALHARKLRDLELKAGYKAERGQRGAAHAYNIKSHRDEERRWVEQAETAYARFVAGWNPRGPKRARTGAANEGRQ

SEQ ID NO: 377055 - protein, 398 aa, unidentified
MRIETQPQDHPTATTGETARLLVSFELSQSKWVLTVRAPASAKLSRFTVPSRDTEKVSSLLTAQRQQAERRTARPVQIVSIYEAGLDGFWLHRWLETQEVESHVVDAASILGPQRRRNAKTDRIDGEKLLRSLAAWLGGEVGVCSMVVPPSVAQEDLRRLSRERGELVDERTRLSNRVGGLLANQGIAGFKPLKKGARQALQTLRTGDGHELPPHLRTAIERILQRLELLSEQIKAAEAERDALLRAAQVAAAPEAATAASPEMAAAPLLLRLRGIGPEFATVLPLECLNRDFDNRRQLGAFAGIAPTPWCSGSVEREQGISKAGNRRLRTILIEAAWSWQRHQPDSALTQWFRKRIKGQSARVKRIAIVALARKLLVALWRYVKHGVVPQGAVLKAV

SEQ ID NO: 377056 - protein, 451 aa, unidentified
MAKKKLEMDIINPHCAGIDIGSRSHFVATGQALEDVKEFGVYADDLIKICEHLNARGITSVAMESTGSYWQNLYVELVKHGFDVVLANGKFTKNIKGKKTDVKDARWIQKLHSIGLLTGSFLPDDQTETLRTYCRQRQNWLDLAVEATHKMQKYLKLLNFRLDVVVRDVCGLTGMTIIKDICKGNLNPEELAKHRHFNCRKSQDEIAKALKGNNRTDYLFGLKQEFESYEFYQKKIAECEKMIAAFLKSQINTNPQKKKLKTTDKQHKRLNKNAIKGIDLNQASFQYFGGVDLMAIEGLGHSTVLSIISEVGPEGFSKFETAKHFTSWLRLAPNNKISGGKLLSSKTPKGSNRLKIALRNAANAIGNLKDTHLSNFFNRVCYRKGRTVAVSATARKLAVIIWNMVVKQIPYQPPTQYLFLDEKRKLGMVKRIRKQMDRFELTNADLGFATT

SEQ ID NO: 377057 - protein, 416 aa, unidentified
MRNNRKSGDRPGSTRPIAGLPIVRAKVAGIDIGSERHWVCAPGLEGSGREVADFGATTPELVRMAEWLKERKVESVAMESTGVYWIAPHEVLEKDCEVLLVDTRQLARVPGRNKKTDPSDCEWIQRLHSCGLLNGSFRPQEQVCILRTLVRDKAILVAESADWVRRMQKSLDQMNVRVHRAVSDLNGVTGMAIVRAIAAGERDAQKLAQFRDRRCRQSKEEIAEQLSGHWREDHLFSLRQSLQMYDAIAERITAYEQEILQKLATMEIEESPGGVVPPVKNLEKAKAIKKRGQEPMRQALYRMSGVDVTQIDAIGVETVEVVLSEYGPDLSRFPTEKQFVSHATLAPRVPKSGGKPLKRKKRNSASTRVAAALRMAALSLRHSETALGAYYRRLARRIGGDVAVFATARKLASLAA

SEQ ID NO: 377058 - protein, 458 aa, unidentified
MGHARARKIPARVVEDEEYQLRHERCAAIDVAKASGVVCTRLPPAREGGRRISKIEDVAATVTAILALAARLLADGVEMVAMESASDYWRVWYYVLEDAGLNVQLVNSSQARQLAGRPKTDRADAQWLARLTEMGLLRPSFVPPAAIRALRDYARTRLHLVQERTREWQRLEKLLEGALVKISSVVSSLATVSARAMIEALIAGERDPRRLADLAMARLRGKRDQLAAALEGMMFGEHHAELARIHLDLIDFLDRRVRQLDDAIAACLEAIPESWGVDAGGATGPGRGTGPGAPVLAAAQRLAEIPGVSPELARAIIAETGLDMTRFPTAAHLVSWAGLAPVARQSGPRARKPAKGQGNSYLRGHCTQAAAGAARTGTFLGERHQRIARHRGGGRARVAVARSILIIIWHLLKTPEARFTDLGPDWHARKTDRDKKIKGHIRQLEALGLDVAVTPRPA

SEQ ID NO: 377059 - protein, 471 aa, unidentified
MSTTPTRAKRRPKVRSVSKPKVPLPPQLKRINLNAAGIDIGSEEHWAAVPAGRDSEGQDVRRFGAFTGELGVLADWLKHCEIETVAMESTGVYWIPLYELLVERGFEVLLVDARQAKNVPGRKTDVLDCQWLQELHTYGLLRGAFRPVDQVCVLRSYLRQRSMLVAYVSHHIQHMQKALEQMNLKLAHVVSDISGLTGMGIIKAILNGERDPAKLAKLRDPRCKNSETTVARALEGHYRGEHLFALKQAVELVEFYQQQITACDCQIEACLQQFEQKSAESPVSTRRRKRRRGGIAFDAHSYLYRMTGVDLTQIDSIEANTALTVIGEIGLDMSRWPTEKHFGSWLGLAPGSKVSGGKRLSGRTKPSANRAAAALRLAAQSLNQSQSALGAYFRRLKARLGAPKALTAAAYKLARILYRMLKYGAGYVDQGEAAYEERYRDRLLRNLKRRAAELGFQLTTITSGAGEAALI

SEQ ID NO: 377060 - protein, 369 aa, unidentified
MEKDTTYVALDDSKRKIVAGMLRPGDAQPELREIANDPRQIRRLFERLKREGPVAACYEAGVSGYDLYRQITALGVACAVMAPALTPRRPGQRIKTDRRDAAKLVRLFRAGELTAIHVPAEAEEAVRDLVRCRDDIRRDVLRWRHRVLKLLARHGRAYLAGKNWSQAHWRWVREQRFDLPPLQRAFEATLFALEQALARQAELDKEIEALAATAPYREPVGGLRCFRGIDTLSAMILLAEVIDFQRFRRPRELMAYLGLVPSEYSSGETQRRGALTKAGNSHARRVLIEAAWHYRHRPTIGRALASRSQGQPDEIVSHAWRAQQRLHRRYRHLIGHGKRTPVAVAAIARELVGFIWAALTRHESRRQAA

SEQ ID NO: 377061 - protein, 358 aa, unidentified
MKKIVIGIDISKEKIDASAIDVRDCQLGVVRLDYQMFDNCPMGFRRMLVWARHLMKEATLQDVLFCCETTGGYDRILCDYLYGKGLDIWREGALQIKRSMGVRKGKDDKADSLMIAEYAMRHMDKAVIYESPNETIRELKALFLYRHKLVQEKAEKQVRAAHLTDTAAKSRSMRFILHDARRSVKAIQKSIKECEKHILELIESDEEIQRNYGHIVSVKGLSIVNATAFIAYSNNFRGITTANKMASYYGVASFRDRSGSSVDKKACVKYYSCSLLRATITQAAEWTVKENGIYRDYYLRLKAEGKPYGVIINNVKNKLIHLVFSLVTNDTDYEQNHEFLRVKRKTEHRKSTQLDNIN

SEQ ID NO: 377062 - protein, 420 aa, unidentified
MKRMTPILPSANPLVSGRLVAGIDTHRNTHHVAVVDHLGRPIADSQFPATGRGHQQMINFFHAHGHIDRVGVDGTGSYSAGIARELTVAGFTVVEIIRQNRQARRLRGKSDPIDAHQAALALLSGADTVPKTADGQVESLRILLTERRSAAKAKSQTMNQIHALLVTAPEPVRDTYRALGSTKIVKTLARTRPTGSGFDPNLVTRQTLKRLAVRYLILQDEIDEIEKQLDPLVRAVNPTLLSLSGIGLVTAAALLVAAGDNPERLATRATFAALAGVAPQPAPSGQRTRHRLSRGENRQANAALHRILLLRRRHQEPRTMVYFARRRAEGLTDRDIMRCLKRHVANEVYAALLTPATENPAGRQLRTERQRIGIPITVLAPSLGVPYQQLRRLEIGTRADPELEQRATLALARVDHTEAV

SEQ ID NO: 377063 - protein, 378 aa, unidentified
MKRVRFVGLDVHAETIAVAVAEKDEEVRSLGVIPNRAESIRKLVKKLGPAEELRVCYEAGPTGYVLYWQLTALGAPCEVVAPTLVPVKSGERVKTDRRDALKLARSYRSGDLTPVWVPDAAHEALRDLVRAREAAKKDQLRARNRLSKFLLRHGKRPPAGVKSSWTGNYLLWVKQEVHFEQFAQEFTLRDYWHEVEHAAGRVERLDRAVEEAVKSAPPQMRAVIEGLQALRGIAQVSAVTIVAELGQISRFARARQLMGYSGAVSSEDSSGERVRRGAITKTGNAHLRRIVMEAAWSYRHRPAVSRALRQRQEVVSEEVKEIAWKAPHRLHTRYRKLTARGKNKGPVITAIGRELLGFIWAIGVKVEGAQKEPLPRAA

SEQ ID NO: 377064 - protein, 382 aa, unidentified
MNRIIKIGMDVHSTNYTLCAMEPVLDGEDRIFTNIQVTPDYENVIQFIDNLKERLGSSDSYSIECGYEAGCLGYSLYHQLTKAGVKCTILAPTTMLTQQGKRVKTDKRDAAMIAQCLSYGGYHAVHVPTDKDASVKEYLRMRDDHKLALKKIKQQINAFCLRHGYIYDGHKWTIRHLDWLKKLNLSELYRETLNEYMTSYEEQTAKIERFDKRIEELAADSDYHENVRKLSCLLGIQTYTALSLIVETGDFKRFRKGNTYAAFLGLAPGESSSGEKISRTGITKAGNSRLRTLLIEAATGICKGRVGHKSKALCARQAGNPEEVIAYADRGNIRMRSKYKRMIRHEKKRNVAVAAVARELACYVWGIMTNHIEPREEGKKVA

SEQ ID NO: 377065 - protein, 354 aa, unidentified
MDKYIGFDVDSKKTVACVVQKGKKDRYTTLKTDIGQMENFLKQQCRPAEKLHLTFEVSGQSGFLYDSLLNSADSITVSNPSRMTWIYRTAKKTDRIDARKQAVLLSIGEIPKVHMPKKQIRQWRATIQHRRKLVSSVTQVKNRIRALLKSVGIKKPAFNKNFWTKRNHNWMHQLANQPTETIQSAWQLTLADMLDQLELFQLQLKQRTRYLNEYLQTKPAAKLIMTIPGIGPRTTEAVLAYTDDIKRFRKNKRYCAYFGLTPRLDESGSNRRLGHISKQGPSVVRWLIVEAAWRVIKKSPSLRAFYERVVGRQQQRKKIAIIAVARKLLTIIRAMLTTGELFNEQLISKYCYLQ

SEQ ID NO: 377066 - protein, 394 aa, unidentified
MILVGIDIGKHQHIFSIIDKQSGEILSNPSVFHNNQDGFLLLIGKLSCYAKSQLLIGMEDTGHYHFALLKYLLNRHYTVALINPTTTDLTRKLQGGITKNDPLDSLTICDVIGSNQRKKPYRITKVNRFDLYEQKQLTRHHHNLKEELNLYKNRLQKCIDIVFPEFNSLFRSKYGIVYMNVLKSFASAEKIANSDIRTIRKCFEYEGRGKRIQLSAEQLKTAAKASVGISSVAEEIQIRHLVSQIEMIEEQLSEIDKKIEEFSLQNNSPILSIPGISHFSGTSILAELGDVCNYTKASQIIKFAGVAPYHYESSQFIARHTAITKKGSRYLRKTLYQIILPVINHNRVFTSYYNKKIAEGKGHRCAQGHCIRKLLRVIYHLLSTGQSFDSTLLI

SEQ ID NO: 377067 - protein, 426 aa, unidentified
MTNAHSIPDNAVLVAIDIAKARNDVLIEIPGHKRRRRMVVQNTRAEHDRFIDLLRSFERPVVAGFEATGNYHRAVAWRLLDAGFETRLISSMALARTREAIHNGWDKNDPKDAQVILHMLRTGLSQYYQDPLAAGISDIQELSKTHEMVSKAKTETLHRILTHYLPLYFPEIERFRQNSRSEWFFAFLEQFPTPASIVALDKEAFVSAAWDVVGRKVSKARLIADIYETARESIALPIPIDSQAVAMFRMVLAEIRSLIRQRDAIEAKAEDLLGGQRDYEALKQVPGIGPINALTILAEAGDLRRFGHHRQFLKFCGLDLSTHQSGTFRGQTKLSKFGNARLRRTLWMAAQVAIRQQENSFREKYERYVAKDRNNADLKRKAFTAVTAKMARVVHAVIKSGNQYRPFFEGSAPSGRTPLCKGRGGA

SEQ ID NO: 377068 - protein, 387 aa, unidentified
MQDEAPRATQAAIRTDLGANFVSMELSRSNWLITSLSPGAGEKMSKHSIAASDVAGLLERFAQLKLKARARTGQDFPIIVIQEAGLDGFWIHRVLESEGIESHVVDPASILTSRRRRRAKTDKIDGETLVRTLLAYKRGEPRVCSMVKAPTPEEEDRRRICRERKTLLAERIEHVNRIKGLLFAQGIFDYQPLRRNRRKWLEDLKTGDGRPLPPHLKAQISRELDRLENVLTQLGAVEAERDALIGQASQDVSAPAALLTQLKGIGPEFAAVLWSEGLFRSFDNRRQVAAYAGLAPTPWQSGAVDREQGVSRAGNPRLRTAMIQLAWLWLRHQPGSALSCWFHERVKRNGGRLRKTTIVALARKLLVALWKYATTGVVIEGAVAKAT

SEQ ID NO: 377069 - protein, 405 aa, unidentified
MKVYIGIDWSSQKHDIVYLNEEGGIIAYQTIPHTPLGFEAFDDQRMKLGVGEEDCLVGIETEHNLFLDYLSLHQYRQIYVIPPTTIKGLRGRFGASKANTDRSDAHLIADMLRTDRARLHVWHADSLLTQQIAALASLEQFLTRTIIQTNNRLRNVLWRYYPNAANVFTGLDLQISLEFICAFPTPQAAAQLTFEQFKDFAKSHHHSAPSKLPACFARLQKPQPEALQQTVLAFQSEAVRLARLSLQAVQDKAATIRETQELFVEHPDYPIFSSLPGVGKILAPALLAKFGDDRQRYPTPQVLQSMAGTGPVTRASGKHKVVFFRYACDHEFRWIVQQWAKSSLDDSVWANTYFQSIRPHCDSLSHAYRRLANRWLEIAWRLWQDRVPYDEERHLRQHALRVKPI

SEQ ID NO: 377070 - protein, 339 aa, unidentified
MANVAVLGIDIAKNVFQLHGVGADGQVALRRRVMRDQLLQVTEAMPPCLIGIEACTGAFHWQRHFEAQGHTVKIIAPQYVKPFLKGQKNDGNDAQAICIAVQQPHMRFVPKKSIIQQDIQGLHRARQRLVNHRVALISQMRGLLLERGVAIAKSASIAQRTIPEIINNPRIDITELTRDIIGTLHAFLLQLNEKIRYFDKQIEAVFRESDVCQRIAKIRGVGPKTATAVVAAVGDGADFKNGRHLAAWMGLVPRQHSSGDRRVLLGISKRGSQHLRTLLVHGGRSVVRTAQRKSDPASEWVNELRERRGYNRAAVAVANKNARVIWALLQHGGEYRANP

SEQ ID NO: 377071 - protein, 352 aa, unidentified
MKGVPGDEDIALDLGKYKTVGCAYESESGAHQFKRGFTSPAGLTRMVQEVKPDRVVIEICSIAGWVCDLLWELGIEVQVANTSDDAWRWRKVKQKDDRRDALKAARLSAVNQIREVYIPALAVRQWRALITYRQQLIRRRTKIKNHIRDLLLREGQILARGSSCWSEVGIEPLAAQARSFSECGPAELWRGELQLELEQLREVQRQVVTVTAQLDKIGAGDTRVKLSRRVRGVGPRMAEAIVALLDQPQRVRKASQVSGYIGMVPKALDSGETERRGHITRQGSRVVRSLLVEVAWAGLRHNAWVRQTYQRLSGGKKARKKIAIVAVGRKLLVRCWAMLRDNRAWDWQPQIT

SEQ ID NO: 377072 - protein, 452 aa, unidentified
MSRKKTRLQSVTEAPQVRPGAAGIDISPEVIYVAVDPQKDGRSVRSFGTFMGELYHIANWLKACGTRTVAMESTGVYWIPLFQVLEERGFEVFLVNARHYKNVPGRKTDVCDSAWLQYLHAVGLLQGSFRPAQEVCAFRTLLRHRSGLVQAASEQIQHMQKSLDQMNVQIHRVLSDLTGVSGLAIVDAILAGVRDSHELAALRDGRVHASEAMIMAALEGDYRAEHLFTLRQSLESYRHYQKLIGECDRQIREMLDQFEDRAGGEEPPAARKKMRTSADEELRREFHRVLGVDLTAIPGVNVGTVQVLVGEVGPDLSRFRSAGAFASWLGLCPDNRITGGKVLSIKTRKVESRLAGARRMAAESLSRDQSYLGQFYRRMKSALKGGAPEAITAAAHKLARIAYTLITRQQEYDESRFEAAEKRNADKQRQRIIKQARKWGLVLIPEAPIPVV

SEQ ID NO: 377073 - protein, 425 aa, unidentified
MNFNTNEKINQVSENTLVIGIDIAKYKHFACAIDNRGRVLQKSFPIAQSHMGFEAFYERLLALKAIHDKQEVLVGFEPTGHYWMNLAAFLTNYGIPFVMVNPMHVNRSKELDDNLQTKNDQKDALVIARLMRDGRFSYPRILAGVEAELRNGATLRAKIQEDLNALQNRSIRWLDRFFLEFTQVFKSFGKMAYAVLEKTPLPSDINGKTPEELLFLYRQVEGMKSPQLPKAKQLVEVAESSIGVTEGLVMARFEIATLLSQIQLMQTQLEKLTAQLIELAKQMSDYDYLASVPGIGDITIVDLLSEVGSLTQYAHPRQLIKLAGLTLRENSSGQQKGQKRISKRGRRQLRALLFRVMMPLIKHNPAFRALHEYYTTRANNPLRKKQSIVVLCGKLVKILHALCKKKTMFDEHQMMKDFAHFQMTA

SEQ ID NO: 377074 - protein, 387 aa, unidentified
MRRSKSRIVGLDVHPDSFAGAILQGMDPWKARVVSTSTRVALPLLEKWVLRHTREEDILVMEASGNAFCVAERLRALKHEVVILESHRAGKVGKTYCATDRVDAIKIARIYLSALSPVVWQPDTKTRERREVFSAYQAVVKEGMRLKQQIKSMLNEHCVRLEKGFRLSHPSAIGRLLQRRKWTPAQKMLLQQLHAGLVGARARRQQLRHYMAQEVLAQKELLRLTRLCGINLITLYGLIAAIGEIQRFATARKLSAYFGLNPSVEQSGNYEGSGALKRHGRGAIRALLVQSAKKLLQVDNPLQKWGLAIAMRRGRNKAAVAVARKLCVAVWHVMQGHVIGAIERMDTLHTKLHKLATDLGLSAIKQLGYDTKEAFVQKKLFLLRSYA

SEQ ID NO: 377075 - protein, 343 aa, unidentified
MEEKKLRGIKYFIGIDVSKATFNYCLRYGGGNVVNGKVGNNVESIKEFILSLREISGFKLGYAVFGMEFTGVYGFILVNTLTKMKAKVVVEPALRIKNSLGLIRGKNDKLDAARITRYLIRNLQELKLWIPRRKIIDELSSLSTLRERTVKVGKIMTTPLNEDKGFIDEGISEANIELCKPSIAQVNLLVKGIDLRIKALWKNDDHCNRLMQIMLSVMGIGDVTALQMLIHTNEFKSITNARTFASYCGVAPFEHDSGTSVKKVARISPMANKRIKALLHNGVRSCITNDPEIIAYYKRKVEVDKKKKLSVMNAIKFKLICRVFACVRGDRLYDRNYVSVKPT

SEQ ID NO: 377076 - protein, 470 aa, unidentified
MRIIGLDLAITSAHKAVVMSEVGKFLTPVLQVTTWLESLDGLLKRAREGAETTCPLVVVMEPTGLAWLPVAVYLLMHGVTVYLVNSQQVADLRRFYKKHAKSDRIDARILAKLYLVAQEKLHALRLPPAGVYALQRTCRELDWVVTEITKLTNQLTALDRSVWLGGWEDLGFRGLFSPAARWCREHYYNPAAVLHTGPERICQDWRASALAEVEESETWISALVELAGKVVAVYGNPCPFVDFEVLQAEAVMKQKWLGQLEADRDHLRQNVVFPLYHQLHPSGNLETIYGIGEESAAVFLSFFGDPRRFPNGRRMRGWSGMVPNSKQSSQSESKGLHISQAGPDLIKKFAFLDAEVARRYDPQLAAIYYDQMVNKGKHHTQAVCAVATHLLDRVLIVMTEDRPYELRDVDGTQVSSKRAREIIAEKYTVPEDVRKRNNRKARLARVENWAERQHARRERQRESSPDLVRG

SEQ ID NO: 377077 - protein, 404 aa, unidentified
MTDGPTRYFGLDIHKEYFVAVAVNRDLEIVFGPQRVSNYQLEDWAGRVLTPQDAVVLEMTTNTYLFYDTLLPHAHSVIVVHPPNVPEVTNVRVKTDKKAAETLAQLLAAGMLKGKGVWIPPHEVRDLRALIARREKMVRLSTMAKNRLHALEHRNHLILPENPFSSEQRTWWENLPLSTTEKLLVRSDLDTLEFAQKQVEQVEECLKQKSAQDERIPLLVQLPGVAMLTAMTILAAIGDITRFPTAKKLVGYAGLGTRVHNSGMTHSSGRITKAGRRDLRRAMVNAANHAVEDHPHWKAELERLEPHLGRSKAIVAIARKLLVAVWFVLTEQVADRFAEPQSVARSFLSHAYKVHVRNLPKRQTAAAFTREQLDRLGLGKDLQKIPWGSKIINLPPSKLLIEKK

SEQ ID NO: 377078 - protein, 356 aa, unidentified
MQTIACTVEEVVLGVDTHLKTHTAVLVDLLGRQVDAETFATTKRGNEALILWAQRRGTVKRAGVEGTGSYGVALARRLSLEGIRVFEVTRPKRKRARHRGKNDLRDALAAAASVLADGHELAAPKSRDGIVEAIRVLRIARASAVKSRTQTILQLRNLILTAPEDLREALRDLSAKQLVAHCARWHRRDPHGALQATRQALRSLARRHQVLDAEIAELDADILRLTRQAAPRLLAQPGIGPETAARLLIVAGDNPGRLRSDAALAALCGASPVEASSGQTIRYRLNRGGDRQGNNALWTIANNRMIHHPETRDYVKRRTTAGKTSKEIRRCIMRTLARRLYPLLLADLNDAQAIPI

SEQ ID NO: 377079 - protein, 349 aa, unidentified
MSQNLNSAVAVIGIDIGKNSFHVIGLDGRGAIVLRQKWSRGQIEGRLANMPPCLIGMEACVGAHHLSRKLLAFGHDARLMPAKYVRPYSKGQKNDFRDAEAIAEAVQRPTMKFVATKTAEQLDLQALHRVRERLVSQRTGIINQIRAFLLERGIAVRQGQRFLRAELPRLLAMPPDVLSSRMVEVIRDLAEDWRRLDERIDALSNEIAVLARQDAGCERLMSVPGIGPIISSAMVAAIGTGDAFSKGRDFAAWLGLVPKQLSTGDRTILGKISKRGNRYLRVLFVQAAWVVLIKPMSWERHGLKHWIEAARRRLHRNVLAIALANKLARIAWGVLAGSSTFEASKLQAV

SEQ ID NO: 377080 - protein, 343 aa, unidentified
MPCYVGLDASKRLTSVCVLRSNGETVREGDIPTSPKAIVGFLRGDRLRYARVGIEAGSVGSWLGPALIRAGLPVTQIETRRAHSILKERANKTDRSDARGIADLMRTATFTPVHMKSSESQHVRALVTARKLVKAKVLDLQNGIRGLLHGFGLPFDAGRARSFEARARDAARRLAIAQDVVLPLLTALAQLHSILASYDKTIRAVAGASPVCSLLMTAPGVGPITALLFYSSIDDPLRFRRSRNVGPHFGLVPRTQQSGESERRGRISKRGDAEARSSLYCAGLTALRTSTRPSWLKTWGLEVAARRGRKRAAVAVARRLAVILHRMWITGTPFRWEQSGAPA

SEQ ID NO: 377081 - protein, 371 aa, unidentified
MGKHKLAFVAFDSAKVKHAVAIAEDGRDGEIRYLGEIENSPDAVKKFVTKLSRQYEELHFCYEAGPTGYGLHRQLTDLGHVCDVVAPSMIPKRSGDRVKTNRRDAVMLVKLLRAGELRTIWVPDSIHEAVRDLARARETGMLDLKVKRQQLLSFLLRHGRNFPSGKNWTKMHARWLAAQKFDHPAQQIVFQDQIDAINFAQVRLAALEQQLRDIVPTWTMAPVVAAYQALRGVSFLVATTFVAEVGDVRRFSTPQQLMAFLGLVPSERTTGDTVRRGSITKTGNRRARRVLVEGAWTYRHPARVSQTLQSRINGLPLTVRTIAWKAQVRLCARYRRLVANGKNPAVAATAVAREMAAFLWAIGHQVAPNAP

SEQ ID NO: 377082 - protein, 322 aa, unidentified
MAAVMIGVDPHKASHTAVVISAAEEVLGELRVHACVAQAERLLAWATAWPQRTWAVEGAGGLGHLLAQQLVAAGERVLDVPPKLGARVRLLAAGDVNKNDPNDARSVAVAALRSAGVREARADDHAAVLKVWSKRYRNLGRTRTQAACRLHAVLCGLIPGGVPKAITTARAGRVLKALRPASAVETARCELAADLVDDLRRIDARMRETRKKLAAAVAAAGTSLTGLFGVGPVIAAAVIGDIRDVSRFPGRDHFAAYNGTAPIEVSSGPARSTGFPGAGTGGSTTPSTWSRLPRSVTGTARGAPITTRSWPRARPPKRPCVR

SEQ ID NO: 377083 - protein, 343 aa, unidentified
MQTITTIGLDIAKSVFQVHGIDAEGTIILRRQLKRRYVLVFFQKLPPCLVGIEACASSHYWCRELKALGHAVRLMPPAYVKPYVKRQKNDATDAEAICEAVRRPTMRFVETETPEQQSCLMLHRTRHLFIRQQTAVVNAIRAHLAEFGIVAPVGRRGVEELLNVVADANDERLPEVARACLAALGDQLRVLKAQVLKFDRMITVWHQSNEMSKRLDELPGVGPALATALVASVADPKAFRSGRNFSAWIGLVPKQSSSGGKQRLGGISKQGDRYLRSLFTAGALAVIRYAKIHGTGHRPWLTALLARRSTKVAAVALANKIARMAWAMMARGERYREPVALAA

SEQ ID NO: 377084 - protein, 461 aa, unidentified
MARTRARQRSPRATPPSALPQVNANAAGIDIGATSHFVAVPADRDAEPVREFATFTGDLYRLAEWLRACGIETVAMESTGVYWIPLFQVLEERGFEVRLVDARQLKRVPGRKSDVLDCQWLQQLHTFGLLAGAFRPDDQICVLRSYMRQRAMLVSYAGQHVQHLQKALVQMNLQLGVVLDDVTGATGMKIIRAVLAGERDPQRLAALRHGKCKHDEATIAAALQGDWREEHLFALEQAVELVETYQAKIAATDARIQAHLRRFADRGTGEPPPPGPRPRADRHDLGFDATAELYRVTGVDLTAIAGLQAHTVLKVLSEIGLDMTRWPSARHFGSWLGLAPNNRVSGGKVLSRRTTPTANRAATALRVAAQALHRSKSALGAFLRRKAAHLGMPKAITATAYKLARILYALLATGSAFVEPGQDAYERAYADRVVKRLSRRASELGYTLVKHDAPHALATSG

SEQ ID NO: 377085 - protein, 372 aa, unidentified
MSRNFRLISPLLLIERRIMEKIAIGIDFSKETFDMTVLDTKKTNGKVNADALTKAPHEQFENRRSGFRKSLSWARKVTGRKLDKDNAIFCGEATGKYSVRMSEYLREQGLFVWIDSGLRIKNSMGIVRGKSDKADSCRIAEYAFRHWDKAELYEPLEESVSALRELYLYRDHLVGIRKATEQRNSLMKEFFDVVGESSFIRRSGDRIVKDLKEEIKRCEEEMRKLIESNKELKTTFECITSIKGVSLINGVAFIVYTNNFEWFGNNPRKIATYWGVAVFGKESGTSVKGKTKTSKCASRKLKKLISEAATCAIRWEPRIKAYYQKMRDKGKHHGVAMNNVKNKLIHIITALAVNKTKYRDTYEEDRKLRKAG

SEQ ID NO: 377086 - protein, 349 aa, unidentified
MYYMGIDHHKQYSHITVMDEKGSIIKADCVLNKRRKVENFLFDIGNEQLEAVIESGRSSYTMVDLLEDLGVKVKIAHPLQVKAIAQAKIKTDKRDSKILAHLLRSDLIPEVWRRSSSNRQAQRVLRHRMSYVKMQTRIKNQIRVLLSKQNEEIREMVEGGRALFSNSGMEGLRKLKLPGKDKDILEALIRSLEHTRAEIKQSDALVKKLYSESPQAQLIITIPGFGTFLSVLVTTEIADIERFSSDSRLHSYAGLVPSIYDTGQRSYHGRLVHQGNKHLRWAVVEAVWPAVRADCGISMMYQRIARRKGANSAKIATARRLLTIIYRMLKEKRSYEFNKVNDSAAFLRN

SEQ ID NO: 377087 - protein, 402 aa, unidentified
MNAVGIDVSKSKSVVAIMRPFGEIVSAPFEIKHTASDIHSLVELINSVEGESRIVMEHTGRYYEVLAHQLSEANLFVSAINPKLIKDFDNDSLRKVKSDKADAVKIARYALDKWQNLKQYNVMDELRNQLKTMNRQFGFYMKHKTAMKNNLIGILDQTYPGVNTYFDSPARSDGSQKWVDFASTYWHVDCVRKMSLNAFIDHYQNWCKRKKYNFSQSKAEEIYGKAKELVPVLPKDAITKLIIKQAVDQLNSASTTVESLRTLMNETASKLPEYPVVMAMKGVGTSLGPQLMAEIGDVSRFTHKSAITAFAGVDPGVNESGTYEQKSVPTSKRGSADLRKTLFQVMDVLIKTHPQDDPVYQFLDKKRAQGKPYYVYMTAGANKFLRIYYGRVKEYLSSLPES

SEQ ID NO: 377088 - protein, 370 aa, unidentified
MQFIGVDLHTNKFTCCYRDEESPAEGKRGKTTETFELSSYGLAQFCKTLTPDTYILVEATITTFCFARLIQPLVKEVLVANTYELKQISLARKNTDKIDADILCRIIKMQVLSGEKAVSAVTIPPLEIQELRGLFTDYRLLKKQTTQIKNRIHSVLKEKLHGFTQEEIFGRKSRRKLREMKEDPVLSFQLDLHFTHLEQAETLIGSLQEKIKELAEPFMREIQILTSMKGVSVFIAIAIIADIIKVDRFKNSKAFASYLRSAPRVSNSNTSVSIRGTNKKGRKTSATLLTQSLSHVLDASKKLNAWYTRLAKYKKKGLVRTGLRRRVFAEMYQMLKKGEYHYGREAEKHEAKMLQYRNFLKKRKKTVKTA

SEQ ID NO: 377089 - protein, 322 aa, unidentified
MTISLLAIDLAKHVFQLHGVDRSGAVMLRKRLKRSQLLAFVHSLPPCTIAMEACSSAHFWGREFARLGHTVKLLPPQYVKPYVKTNKHDAADAEAIAEAATRPSMRTVRVKSQEQQDLQTLHRGRERVIKTKTMLLNSLRGLCAEYGIITPKGSSWLTRDLAGTRQQLEAVNSPVLSLLFERSLAEFHRMEEDEKFYTAQLERIATTHPVAVRLMQIPGVGVLTATAALAVGAAPQEFKNGRHFAAFLGLVPRQHSSGGKAKLLGISKRGNSYLRRILVSGAQSILRWSPRRTDAIGRWVTALRQKKPWNLVAGRWPTKMPA

SEQ ID NO: 377090 - protein, 315 aa, unidentified
MAMRVTLEKPIIGVDVAKNELVIYHDQYDRLEAIPNTKVAITQWLKALASSCAIAIEATNVYHVLFADAAHEAGCDVYMVDGYQLSHYRKGVNIRAKTDAQDARLLARYLKNELDELRPWIPASPLYRQRLSLFRRRAALVQARTGLVQSWTNEPFLRTAFANQVNSMKRFEALVEKKIRDVLQEAGLMRQVNRCMKVEGIGFLTAARLVTSFQRGEFSGANAFIAFLGLDLRVSKSGQSDGPRRLTKRGDPEARRLLHNAAMSGSRTPAWKPFYEEQRKRGFSTTQALVMLSRKLARVVFALLKNQSEYQTKVA

SEQ ID NO: 377091 - protein, 374 aa, unidentified
MKKLRFLGLDVHAETIAVAVAEPDGEVRSLGTIANREESVRKLINNLGSVEQLRACYEAGPTGYVLYWQLTQLGVECAVVAPTLVPTKAGDRVKTDRRDALKLARSHRSNDLTAVWVPDGDSEALRDLVRTREAAKQDQLRARHRLSKFLLRMGRRPAVGIKAWTEPYLAWVRQVRFKRPAQQATLEDYLHEVDHMAARVKRLEQAITEVVKLASPQVQEVVKGLQTLRGIAEISAVTIVAELGNIARFDTPRQLMGYSGAVPSEDSSGKRKRQGSITKTGNAHLRRIVIEAAWSYRHRPAIGARLRQRQEGVSEPIKEIAWKAQVRLSRRYARLAAAGKDKPKIVTAVGRELLGFIWAIGVKAERTVTQQIAA

SEQ ID NO: 377092 - protein, 332 aa, unidentified
MYLGIDVHKRYAQVAVMDEAGEIVEEVRVENANLDDLAQRYAGAQAALEATSNYYHIHDTLSEHLDVTVAHPQELTQIADTDKKTDRVDAKELARMMRLNSVPESYVPTDEIREARALVRGRQTLVEDRSKYANKIHGLLSDHGITEDVKPLNVEGREFLQELSLPMPWDTLLESYLDVIERLTEEIRELDEAIEERAGSLKETQLLMTIPGVSYYTALTIYAELGEIDRFDGHKEVVNYVGLNPVIRESGDSRIEGSISKRGSGRVRWLLVQAANTAVHTCNDEYLSRFYDRLASRKNSQKAIVATARKMLVSIYHMLDRGEVYDPPGVSA

SEQ ID NO: 377093 - protein, 311 aa, unidentified
MSDKEQFIGIDVSKHQLDLAIRPSGETRVFHNNEEGISEMVVFLKTCPSSRIVVEATGKLELPVVRALSVHGMPVVVINPKQARDFAKATGTLAKTDKLDAHILARFAETLKPELRPLKSEETEKLEALVTRRRQIVEMLTAEKNRLYTARGWARKDIQGSIDGLQRRLLRINKELDDIIKQSPLWRDKNKLLTSMPGVGSILAMTLLSELPELGTLSRRQIASLVGVAPLNRDSGLYRGRRSIWGGRRTVRAALYMGALAATRFNPAIRSFYQRLRLAGKKSKVALVACMRKLLTILNTMVKNNAAWHTT

SEQ ID NO: 377094 - protein, 336 aa, unidentified
MRFIGVDLHTTQITVCYLKAEDEFEMKKYQLCEIDKFISRLQQGDEIAVEATCNTRWFYEQVRASVSRVVLVNPRQFEVVKNSVKKTDKRDALNLARFLRADLLPEVRVKAEAAEKVQSLVNTRTKLVRLKTSLINKIHALNVANGRKLKKTSLASEKGLDKVLLDEWSAIERIELEIIVEQIRSLKAGIKKLDKAIEEEASQFEGYQSLVSMAGIGSLSAGILLSVIGEVKDFTSADKLASYFGIVPRVANSNERVNHGRITKRGSKTGRTTLVQSALAAIKKNEYLKKYYEQVKARRGHGKAKIALARKYLGIIYNTLTNGWVFADFNNFELAE

SEQ ID NO: 377095 - protein, 464 aa, unidentified
MTRGDRRRNARRERLRAVLPRDGAVIGIDLAEDKQAIAVIDHDVRVLARKTVQVKAFRLGEALDWAVGQARARGFALVTVACEPTGPRWLQVQRLCAERGLPLVCIQPLMSHIAREQQDYTTHKTDEADCVLIARLAVELHCYLPEELDETWAHLRHLGRRRAQLITSATASAQRIRDFLSVAWPTVTETCARPLESKTWLAALQVVTSRCGADPGKLAVMGPEAFTALVRGAVPGWGGKKGWGTICRRIFAALTSTEGVVVSSRRGLLRRCADELGDLQRTRAQLRAVEADMAAVLEELGLSRLADIPALTAVGAAAILAEAGDPRRYDSSSSLVKHAGMSPSDNASGAFYGEAHISRRGRPGLRLTVWRAVWPMLRYNPVMAAKYQAMTQAAGTAAQTAEAQSGAGSRQVSAAAAAARARRAKARVACAASLLRWIYSMVVHDTSWDPAAAAGTASCPAEAA

SEQ ID NO: 377096 - protein, 391 aa, unidentified
MPEDAPRPAPAAIRTALGAIFVSLELSRRAWLITSLSPGGGEKMSKHSVPAGEVSGLLCRFAELRRKAAARTGRDFPIIVIQEAGLDGFWIHRVLQSEGIESHVVDAASILTSRRRRRAKTDRIDGETLVRTLMAYKRGEPRVCSMARAPTPQEEDRRRVCRERRTLVGERVRHVNRIKGLICAQGVFGYEPLRKGRRERLEDLRTGDGRPLPVRLKAQIIRELGRLEVLLEQLKTVEAERDTLLKPASDEVVSPAAMLARLKGIGPETAAVLWTEGLFRQFDNRRQVAAYAGLAPTPWQSGSIDHEQGVSKAGNPRLRTTMVELAWLWLQNQPTSALSLWFHERVQRLGGRMRKTIIVALARKLLIALWRYTTAGVVIEGAVMKTASATI

SEQ ID NO: 377097 - protein, 462 aa, unidentified
MPRIAAVSACYRIPILLRALRAAHRSVAAISWEIGMDVVHPRVAGIDVHKKVVWVAVRLPGAAAGERKVIVKSFRTFWRSLQKMAAWLAEFGVTDAAMESTGVYWWPVYHALAQTETIEVCVCNAAHMRNVPGRKTDIRDCQWIAELHEHGLLRASFIPGQQVAALRARTRYRKKLIEHRASEGQRLSKVLEDAGIKIDSVASELLGVSGRQMIEALIGGERDPWQLASLAKGRLRAKLDDLQMACDGRFTAGHAQLCRVHLDAYDLLTGQIAVLDQLVERAAEPFDAIIARLVTIPGIGPRLAQVIVAETGGDMARFASSARLAAWAGLVPGDNESAGKHRKAAARKGNPHLRSAMIEGAWAVSRTATRPGARFRRLAYRFGKLNIKKAAFAVAHTLLCIAWAVMKNDTNYTEAGADYYEHRDQRNHEHLVRHHQQALARLGYQVTLIPPGDGSPPPAQTA

SEQ ID NO: 377098 - protein, 360 aa, unidentified
MTGTMTWAAMDVHARSTYAASLDVITGELCRQRFDTGAVEPVIGWLAGLPGPVRACYEAGPTGFGLYRAAVAAGIDCQVIAPSKTPRPSGDRHKSDRRDTDLLLRQLMAGALTAVAVPSATCEAARDLARAREQVRLDLMRCRHRLSKLLLRHGRVWDRSAWTKVHREWLGSQTFAHHNTELAFIDNLAACDGLSARRDALDERLSRVATDPEFWPVVRRLRAFRGIDTLSALILLLEVADFARFPRAVQLGSWLGLVPSRQQSGESDVHGSITKTGSKYARRILVEAAWHYARPPRVGKTLYERQEGLPDHVLQIARRAQSRLYRIHRRMRERKKPGNVITVACARELSCFLWAAATVP

SEQ ID NO: 377099 - protein, 430 aa, unidentified
MKRGVVGNQEFSIYVGLDWGTEFHRACVLDASGEVVRECQVDHSGPAITDFVRLLNAMIHGKPERIAVAIEVPRGPVVEAFLEGGFAVFSINPKQLDRFRDRYSVAGAKDDSRDAYVAADSLRTDQHCFRRVAVQHPDVTRLRELSRTEENLSGDLRRIVHQLYQLLLRYYPQLLQLNSTPEEPWIWALLEAAPLPQRGARLTVARLKQLLSKHRIRRWTAEQLHDVLVSPPLPLAAGSADAISEHALLLLPQLRLLYRQRQDIRDRIETLLDGMVAQGREGSEFQEHRDVGLLLSLPGVGCLIAANLFTEGSDPLAQRDYLALRAHSGIAPVTRQSGKTRQIIMRRGCNERLRNAMYHWARCSVQHDPLSKVHYARLRQAGHKHGRALRGVADRLLAILIAMLKSGKPYEASRRQNGRSHDDASPANNP

SEQ ID NO: 377100 - protein, 355 aa, unidentified
MTSTKYIGMDVHKESISIAVMNAAGKIVMECVIETKANMILDFVHGLRGELHVTFEEGTSAAWLYDLLKPHVTKLVVCDPRKNASMREGQQSDKIDARRLAELLRLNHLHPVYHGEHGLRSLKELVRSYLTITKDLGRVMSRVKAIYRSWAIPCTGKQVYAPRHRAEWLGKIGEPGVRRRAEFYYQQLDALRTVRQQVRRELLAESQKHQAWKRLCQIPSIGPIRAAVLLGILQTPHRFRAKRQLWTYSGVGIETSSSADHHVVKGQLERKKKQVEIRGLNRNYNHDLKNIFKGAAIVAASKPGPFAEFYAELLAKGMRPEMARLTLARKIATIVLIVWKRGVRFDAQYLKPQTA

SEQ ID NO: 377101 - protein, 314 aa, unidentified
MTIQADYVGVDVSKHHLDLSIGSSKGHWRVRNDAGGMVELARRLSNLSQPHLVCEATGSYTRLLMGEAGRQGLALSRVNPRQVRNFARACGQLAKTDKIDAAIMVRFAQAMQPPVSPPVDAAALQLADHVRRRRQLIDMLVMEKQRLEHPESPQVLVDIGEHIAFLKTRIASQDRLIQARIEADARLTRRRAVLCSIPGIGATTAAILIAELPELGQIGQKQIAALVGVAPINHDSGLNRGQAHIGGGRLSVRCALYMATLSAIRSNPPIKTFYKRLREQGKPAKLALTAAMRKLVIIANTMIQTDTMWHPDPH

SEQ ID NO: 377102 - protein, 364 aa, unidentified
MNETYYIGFDVHKKSVSFCVKTASGEIVEEGKFAARREVLRAWAAAQPGPWRGGMEATLFSAWIYDTLKPYAERLEMGHPARMKAISAGKKKSDRLDARTLADLLRCNLFPTCYVLAPEMRDLRRLLRYRHLVVRQSVRLQNKMAGLLMETGAPFVKSRLHGRKYFTQLVEALEEVPESVKDLLKMSRGAMEMFEATQKRLIERLLAEPLLQARVERLSTIPGVGPITALTWALEIVDPFRFPSIAQALSYCGLTTAFRSSADQAQRGPLSKQRNAWLQTTLIEAAKLAPRWNPQLAALHQRELDRGHRNRATLAVARKLVAYLMAVDKSGQPFQTRSTTPAVPDLAVPVPGEMALAAAAPATA

SEQ ID NO: 377103 - protein, 318 aa, unidentified
MFSERTSVGLDVHARSVVACALDVVSGQLQRQRLTPDVDDLRRWLTTLPAPVAVTYEAGPTGFGLARSLTAAGLRCVVAAPSKLQRPAGDRVKTDARDAEHLARLLRMDQIVPVRVPSADEEAARDLVRAREDTRGDLMRTRHRLSKLLLRQGIIWSGGAAWTGRHELWLREQHFDHVGTQLAFDADFEAMLLTSSRRDRLDKAIEAMAAASQFTPVVRRLCCLRGVSTLTGFALAVEVGDWDRFTGSTIGAYLGLVPTERSSGGSRSLGSITKTGNNPCPPVVGGGSVAPPQDLPQPGPDHASPVGRRAAGSRRTGS

SEQ ID NO: 377104 - protein, 447 aa, unidentified
MKMSESCTSASSEPEWAAFAAIDWADQKNYWRLQPAGSPQCEHGELDNTPEAVEVWAASLQQRFGGRPIALCMEQSRGALTYMLTKYPHLVVFPIHPTTAARYRETFTPSGAKSDPSDTASLLDLLLRHGERLHPLRPDTPETRLLHFLVEERRRTVNEKTRQSNRLTDCLKLYFPQILDWFDDVTTPLVKELLERWPQLEQLQRAHPGTLRNFFHQHNCRSAELVESRIAAIYPATPATHDPAVREACSLMAGGLLALLASLREHITALDQRIEQLVRRHPDAPLFASLPGAGPVLVPRLIVAFGTHRDRYQSAYQMQCYSGIAPVKEASGKTEWTHVRLACPKFLRQTFQEFAAHSIALCPWAKAYYEHLRQDEKKSHHAAVRALAFKWIRIIFRCWKDSQPYDEATYVQSLRRQGSQLARNLGLPRGAGWRAVAGFQKFSASTT

SEQ ID NO: 377105 - protein, 415 aa, unidentified
MTENHPMPEAMTLVAIDIAKSYHDVLVEPPSPARRRRFRVANTLLEYQRLAMYLRQLATRVLVGFEATSNYHRTLAYFLHRQGFDLRLIPTLALARTREAMHNSWDKNDPKDAQVILHLLKTGLSQTWHDPLLNGTNDAQELSKTYHQVTLARTRVWHSLRNHYFPLYFPEIEGFIRSNHSDWLIQLLLLFPTPGAVTALPREEFIAQAWSIIGRKVHKADLLANIYAAAQRSVGLPVTTDSPAVSMFRLMLEQYLTLGRLREQITVHAEAALAGDPDCRRLMTAPGIGPTTALTILAEAGDLRRFMHYRQFLKFCGMSLSTQQSGHFRGRSRLSKYGNARLRTAFWMAAKVAVRMRENSLRRKFDRYVRANPLDADLQRKAYSAVAAKLARIVYGLIKNETDYRPFFEEAIPGG

SEQ ID NO: 377106 - protein, 408 aa, unidentified
MQVLYPRCAGLDVHKDLVVARVRCVSEPLHDEVKSFATTTAALLELNEWLASHAVSHVAMEATGVYWKPVWHLLEEQFELVLANAQHIRNVPGRKTDVNDATWIADLLAHGLIRASFVPPAPIQELRDLTRTRKQLVREISQHSSRIQKILEDANLKLGSVLSDVLGQSGRAILEALIAGETDPEKLADLARGTARKKRTELIEALHGRVRPHHRGLLKVHLELVAALEQALAEIDATVGKTLAPIRSSARLLTTLPGVSDLTAQVMVAEIGVDMSRFPTAAHLISWTGLCPRSDESAGKRRSSRVRKGAPWLKTALVTAAWAAVRAKNTYLQAQFHRLRSRRGAKKAILAVASSMLTAAYHMLKNDMPYRDLGPEHFSSRDRSKAIQRLVRRLNDLGCEVHITPQAA

SEQ ID NO: 377107 - protein, 389 aa, unidentified
MKIYVGIDIAKLNHFAAAISSDGEIILEPFKFTNDVDGFQLLVSKLESFDKNSIIIGLESTAHYGDNLVRYLVAEFYQVCVLNPIKTCQMRKNNIRKTKTDKVDTFVIAKTLMMQDDLRFITFFDLDMMDLKALGRFRQKTIKQRTRLKIQLTTYVDQVFPEIQYFFKSGLHQHAVYALLKEAPSPKEIASMHMTHLANLLKVNSHGHFTKEQAKELRVLAQKSVGANDSAISIQITQTIQQIELLDSQLEKIEAEMTDIMKFNDSVIMTIPGIGYINGGMILGEIGDIHRFSNPNKLLAFAGLDPSVYQSGNFQAKTTRMSKRGSRVLRYALVNAAWNVVRNNATFKAYYDAKRAEGRSHYNALGHCAGKLVRVIWKMLTDEVEFNLE

SEQ ID NO: 377108 - protein, 344 aa, unidentified
MATYYIGMDVHCNNTELAVEKGHKIVERYSVPTTIPAIVEVLESLSGKKHLAMEEGPMAGWLYRNLFDKVDYLIVSDPRRNRLIASEGDSDDKIDSAKLATLLRGGYLRAVHHSLDVDQWRLKRWVGLYHDRIKDATRAINKIRACGRMHGIKTPRAVIRDVVKRRQWLASLDDRNAAALLEVLWIGYDAAARQSRRARQDLLSRSRKYAIVDWWQELAGVGPVRAVTMFAYLDTPWRFKRKNQLWKYCGLGLVHNSSGKDSRGRYKSGQLRLAWHVNKRLKNAVIGAAMSIINGKDSVFKDYYEQLINDGLTRSNARHAVARKLLTVMWGMWKRSCRFDESLV

SEQ ID NO: 377109 - protein, 368 aa, unidentified
MRVRKTKTEVVKQNVGIDISKADFKVCFFHLDSNGRKSIKGTRTYKNTAAGFEQFHNWICKKIVIEIGVHITLEATGVYYENLTYFLVENNYLVSVLLPNQSKAFAMSLNLKTKTDKVDARMLGQMGIERDLPKWLPLSDNMRILKQLTRDRVSLLDEKTALSNKLHALNHSYKPENSVIKRLKQHQKLIIKQLSQVEKEIRQNVEKDEVLNQKIANICMVKGLGIITVATIVAETNGFVLFTSRSQLISYAGYDVVQRESGSSIKGKTRISKKGNRFIRRALHFPAITMVKHEQQYKQLFERILDRTSIKMKGYVAVQRKALILIYTLFKNNEPYNPNYENKIEGNIEQVTEKCRQDKNPAYSGCLS

SEQ ID NO: 377110 - protein, 332 aa, unidentified
MDNCIGIDVSKASINVHISKNSEDLEFVNSVQGFKSLHLKLKKIYKKEIEDNIFIFEPTGSYSETLRKYCYQQKIICFIINPKQFSNYAKALGVEVKNDIEDARVLSKALPLAKSHQIRVPMYDEDVERIKELMSYYKFTTKQTTQQKNHLESLTSKEGDLFSIKELKQSIKESKAKEQRILDQIQMLIDNNPKYKKAYANITSIKGVGQIGGIVLLHLFLKYPEANQRQITSLAGLNPIYKQSGTSVQSGYKISKAGSSMYRGSLFMGVLTAVRFEPTFQTFFNRLIAKGKHTTIAHIAVMRKIIITAHSLYKNDKKFEQNFNYQEAKMTE

SEQ ID NO: 377111 - protein, 383 aa, unidentified
MHASNICTPIADHNGTIFVAIELSQKAWLAVIHSPDRNRMSRHKLEGGDHAGLLALVEGVRVRAARVLGREPAVVSCYEAGYDGFWLHRRLEAAGISNFVFDPASIAVEQRSRRAKTDRIDGELLLRTLMAHCRGEPRVVRIVRVPSRDQEDVRRGSRERQRLVKEQTAHTNRIKALLRTLGLAAGNPRRRDWLKWLAEQRDWEGEPVPPHYLAELKREHARLMLVVEQLGELSRAPELTHVSAAAARMAEQKACLRRLKSLGPAFAGTLVDEAFYKDFDNRRQVASYFGLAPSPWRSGRTNREQGISKAGNPRARQQAIELTWLWLRHQPDSALSQWFRQRTAGASARIKRIAIVALARKLMVALWRYLTTGLVPQGAVIKG

SEQ ID NO: 377112 - protein, 440 aa, unidentified
MNREDRSRLEEFRQFRKEVRGSTEYLFVGIDVAKDKHHAFFGTATGETLFRRLIFENNLEGFRKLLAQAEAMKVQHGLKRVVFGMEPTGNYHKPLGEHLIRSGHGVVLVSGVAAHENRKTLDGRWDTNDTRDAANVADLISQGKCLFYEFPVGALQDLRNLLSLKRRLKRMEHGHRVRIRNHLVAKYFPELDRYYEQSESTALAIVRWCLDPSEIAGLEYRKFVQMVSSIRGRSSQEKRLQTIWKMAVDSVGCEAGPTVEFEARVMVEGLKQIRESIGEIDEKIQGVCSQFPEYEFLLSIPGFGPDVSAKVLGAIGDPFRFQNGKQVLKMAGLDLSAERSGKTSQSAIPVISKKGKADLRYALYQAALIASIRNQDFIAYYTDKLRGREREPGIKTKMRVKLSAKLLIVAWTLMKKKESFHPGYLRVEGQSFSAEAGRER

SEQ ID NO: 377113 - protein, 384 aa, unidentified
MKNDSIVFVGLDTHKEHTEVVYTGDSRGSELVHVGKIQTTKQGLVKQARKLQSKYPQATLHFVYEAGPCGYWIYRLLTSLGHPCYIVAPSLIPKKPGDKVKTDKRDAQQLTRLLKSGDLDPIYVPEPEDEAMRDLSRARERAMQDLNDARYQLKALLLRNNIQYTGTANWSLKHLRWLTELILPHPCQHLVLQEMIQTISERNARLERLDNELMHQVKNWRYYPIVKSVQALRGVRLLVAAGVVAELGDLTRFDTPRKLMAYVGLTPSEHSTGARRKLGSITKSGNGRARRLLVESAHSYRYPANVSTDMQKRQEGLPKAVIDIAWQAQLRLCRRYQKLLHRGKNHNVVKTAIAREIIAYIWSISREVALPRVDEKKRLARVPA

SEQ ID NO: 377114 - protein, 364 aa, unidentified
MKIIGCDFHPSFQQIAMVDTESGETTERRLLHADGEAQQFYESLSGPVLVGIETSGNTLWFERLLEKLGHQLRIGDATAIRAAAPRHQRCDPRDARNLLQLLLEKRFPTIWVPTLAERDLRQLLKHRHTLVQMRTRAKNQLQHIAMNQGLQKKRQLWSKAGLEQLKSLALEPWTKRRRDDLLKILEQMDSHIAELSKAVAAEAQHWPQAVLLMSHPGVGPIVALATVLTLGDVSRFARGKHVASYLGLIPREDSSGEHRRLGSITKQGNSFMRFLLVQAGMSAARGDAELGRVYKRLAQRKHHGVAKVAVARRLVLRLYWMLRTNRRYPEVVRMQGSSSHPVAEVKADRLSEHPASRCCTHPGL

SEQ ID NO: 377115 - protein, 405 aa, unidentified
MQTIIAFDVSMGKSYMVIYQNGQCVEEKEIQHNKKDFQALHVTIQSLFMRYGQYPEIVFEATGVYSKVLESFMQANQYPYYLLNPLEAKQQCDRLRVHKTDRSDAHRLAQTHLTSNRKPKVFESTEYQQLRVLSRFYEEIDKEIILIKNRLHNALQLTFPELASIFPNQNSALYLNVLLLFPHPELVLSCSRTVLKNKLLANTKKNLSSERALKKAEELVSIASSSYPAVTLEDVTVSKVRYYAEKISHLLCKKQEIIEEMEALASPLPEYDILRQIPGIGSSSAVRFIAEAGDVRRFTTSRELNAYAGIDIRRYQSGKTFYSDHINKRGNPKLRKLLYLMIQNMLKNQQNTPNHIVHYYYKQKEEPYNKCHKVASVACINKLLKTIHYLTKTNQMYDYSLATTS

SEQ ID NO: 377116 - protein, 361 aa, unidentified
MNATTVAVDLAKSVFQIAVADASWVVIESHRLTRTQFERWFANREVGLVVMEACGSAHHWARWLNRLGIEVRLLPAAYIRAYVKRNKTDAADACALLEAARCADLVPVRIKTVEQQALQGLHRIRSLWMSTRTSRINALRGFCREFGLAVPTGARTGVEAMSRALVDPESPIPLLIRASMKLLIEEIRLLELRISQLEKELTALAKQSPACTTLLSIPGVGLLTATAMVAATSGDVTHFKDARHFASWFGLTPKESSSGSRRKLGRISKKGDRYLRMLLTHGARSVLRMASLARQAGRRLDGLRTWALDVQARTNHNKAACALANKLARICYATLRDATPFGEPVIRPNKKLERTAFAIAA

SEQ ID NO: 377117 - protein, 337 aa, unidentified
MAVYGGIDLHSNNAVLALVDAEGGVLFQKRYPNELGLILEGLAPFRGELDSVVVESTYNWYWLVDGLMAAGIDVRLCNPAKADRYDGLKYADDYSDARWLAEMCRLGILPEGYIYPRAERAVRDLLRRRSHLVRLRTALVLSNQNLVARNTGERLKGNVVKGLDWEAVEHYLPEPNLGLAVRANVAVVERLNEQITLLEAEAKRQARLKPGFKHLKTVAGIGEILALTIMLETGDIQRFARPGQYASYCRCVKSERRSNDKKKGDGHRKAGNKYLAWAFVEAAHFAVRYHAPVQRFYQRKRARTNGIVAIKAVANKLARASFYVMRDGVPFDMERAF

SEQ ID NO: 377118 - protein, 328 aa, unidentified
MSKERFEVGVDVGQSEVWASVGSGKARKFKHDESGVKQLYRWAKDKSGELLLHFCMEATGVYSQSLAVRLLGCGRCEVSIVNPAQIAAFAKAQMRRSKTDQIDAQVIWAFTQAQQPRCWQPERQAIQELAALVAQADALQKTQRSWKNRQHAHQYRPALPNMVRQTSAVVEETLKQQLEEVQNEIYRLCQADAELKRDVDLLCTIPGIAKLTATRLLAYGKSTLTERSPKELTAHAGLAPRHRQSGTSLKGRSRLCKQGDARIRFMLYMPTVVATTHNPIIQYHYQRHLANHKPKMVALMACMKKLLLMAQAILISQQPFNPNLIPLT

SEQ ID NO: 377119 - protein, 351 aa, unidentified
MRVVEDDGLIIGVDTHLDTHTAAICDARGRVVAQLQIPATTAGYVQVLAWARQAAGTRAVAWAVEGTRHYGLGLARHLTAQGEQVAEIDCSRHIGKRRAGKSDPIDAVRAARELLARPAPAQMRADGDREALRLLMIDRDNAVQSAKTARTALAAVLVTAPAPLRERIRPLPRVRRARECAALTCPAGADRQTRVLHQALARLGQRIAALAEVAAELEAQIGEIVEEMTPGLVAAEYGLGYLSAAQILLSWSHAGRIRSEQAFAMLSGTAPVPVSSGRTDRHRLNRLGDRQLNRAIHTIAVTRLRCHQPTQAYAQRRRAEGKTDREIRRCIKRYLARHLYRTLTNGSLSGP

SEQ ID NO: 377120 - protein, 386 aa, unidentified
MQKLNDLSRSLTPLAPDGTLIAVIEMSQSSWLVAGIVPGVERQPLKKLAVDESALLKLLHRWRDEAEKAGRRIERIAVAFEAGRDGFWLARWLRARSIEAHVIHASSVAVSREHRRAKTDRLDAELLKRAFLGWLRGERDHCKMVAIPTTKDEDAKRPNRERESLVGEQTRIVNRMKAALIRLGIRGFNPKLKKAAGRLEDLRTPEDEPIPPNTLAELRRDMERRRLVSDQIRQIEEARLDRLKQAPGEGPHAMVRLLARVIGVGIETADMLVQEVLSRNMRDRRAIARYAGLTGSPDESGTKRREKGLARSGNARVRRGMIQLAWRFLMFQKNSALAQWFRARTENARGTRKLMIVALARKLLIALWRLVREGVVPDGVVLRPAQ

SEQ ID NO: 377121 - protein, 354 aa, unidentified
MPVGRMTQGVIVGVDTHKDTHVAIAKDEMGRHLGELVIPASPRGYRDLLTWAKGYGDVASFGVEGTGSYGAGLARHLASEGQRVIEVNRPNRQTRRCNGKSDPADAEAAARAVLSGEAAVSPKTADDVVEMIRVLRIARRSAMKARTQATNEMQAILITAPEDLRQSLRGLSATKLVRTCARFRVSEASDPLGAARLALRSLARRHESLEEECSSLQAELERLTTKSASGLKDLFGVGTDTAGALLVAAGDNPERLRSEAAFSALCGVSPMEASSGKTKRHRLNRSGNRQANQALWTIVMVRIACKHQPTADYVARRTAEGKTKREIIRCLKRYVAREVYAALVSGTSNASAAA

SEQ ID NO: 377122 - protein, 356 aa, unidentified
MEQIARVGVDLAKNVMQVHAVDRAERVVVRKAISRERFVNWFANLEPCLVAMEACGGAHYWARKLRSLGHDVRLIPPQFAAPYRKGGPHVKNDAQDAEAICEAASRPQMRFVPIKSPAQQSVLVLHRMRSGFVEERTALVNRLRGLLAEFGVSLPQGIRSLQKHIVDRLEDGSNELAGAARQALIRGWTQCQALDQEITWLDKQIAEHVVHDEQAQRCMKVCGVGPLTASAAVATVVDARQFKNGRQMAAWIGTVPRQNSSGGKQRLGRITRQGNDYLRTLLYQGARSAIRTAPRRVDRLSRWIVQLQARVGYYKTLVAVANKHARILWAVLAKGEKFDPSHVVGTPSAVIPATYM

SEQ ID NO: 377123 - protein, 343 aa, unidentified
MKLTRVGVDLAKNVFQLHGVDRAERPIWCKRLKRNRWIKEIEENVEPGVEIGMEACGGAHHWARLLQSKGYRVRLIAPQFVKPYVESNKTDANDAQAVCEAMSRPSMRYVAVKTIEQQDIQAVHRVRASLISERGAKANQLRGLAYEYGLVAPREIAALRLAVPAWLEDASNGLTVRLRALLCGLYADLRALDERVRELDKEIRAIGRENEAVGRVQELRGIGPLIASALVAMIGDARQFKNGRHVAVALGLTPRQHSSGSKERVLGISKRGDSYVRTLLIHGARSALRTAPGKNDRMSRWALALAKRSHVNVAVTALANKMARVAWAMLRHGTTYEPNGLRA

SEQ ID NO: 377124 - protein, 346 aa, unidentified
MEHYVGLDVSLKLTSICIVDRTGKIEREGVVASDPEAIATFIKLHAPHVVRIGLETGATSTWLWTELNKMGLPVICIDARHAKAALKMQINKSDRNDAVGIARIMQCGWYKEVCVKDLDSHATKALLVSRALLVKIKRDIENQIRGLLKNLGLVIGRAKMNMFAVRAAQLAEDRSELFAAVDPLLKAREAVEQQILDLDRKVLRLARNNAQVRRFMTTPGIGPVTALCFLATIDDPARFKRSRSVGAYAGLTTRRYASGEIDWTGRISKCGDKMLRSYLYEAANVLLTRVAKWSALKAWGVRLAKRSGLRKAKVAVARKLAVILHRMWIEGTEFKWSSKEVADQPA

SEQ ID NO: 377125 - protein, 401 aa, unidentified
MNTTTMLYVGIDISKDKSDICIKDVKGNDLIQRFKITNNKADLGHLYKTIERIQSRTDGNSDVVFGMEATGIYSLPLYSALTRDGHKVKLYNPIQTNGFRKMNIRKTKTDQIDSAIIADMLRFSEPPQVNPIKDLNLYQLRELVRIRDRLIDKQTVCKVQLVRNIDTVWPDYSSVMKRATGATSIAILKKYSVPSKVRAESFEKFYQLVKMKSRSKISRTTAEEIYTHAGNILTIPELDSIISLEIKTLITELELYDEQIRSIEKRIDQMMNLIDSKIMSIPGIGDTLGPMILGEIGDADRFPSAKKLIAFAGLDPVVSQSGRFENKSGPISKRGSPLLRKGLFLAANVARQNDDNLKRFYDKKISEGKHHYSALNAVAAKVLRIVYWVLKNNKEYQTQQN

SEQ ID NO: 377126 - protein, 428 aa, unidentified
MKNRNVQKLEAITPGTLVVGVDIAKETQWARFVDYRGLELRKVLKFKNHKNGFDSILASIEAICKNRRLGNIIVGMEPTGHYWKPLANYLLKNKVNVVMVNPYHTKRAKELDDNSQTKSDKKDALIIARLVRDGRYYEVYMPQDIFAELRVLSNSRISLMKRSNALKNTITAVMDEYFPEIVTVFKKPLKGKAAMQILKSCPFPSLILELGIDGVLFEIKKAVKKTVGRKKAQQLVETAKSSIGVGYGLVSAKLKLGLMIEELELLTKQLEQLEKAMEKALADTGYIKLILSIPGIGVVTAASFLGEIGDPMRFDHPRQICKMAGYNLIEDSSGKNKSKTKISKRGRKNLRSILYQMARTMVAVNTEMKELYQYLKTRPNNLLKKKQALVVISKKIVTVIYNLIKKQTEYQAELVLGEFRKNQIRQAA

SEQ ID NO: 377127 - protein, 356 aa, unidentified
MDSKKYIGMDVHQATVSVAVMDSRGRVVMDSVIETKATTILEFIQGVRGTLWVTFEECASAAWLHDLLKPHVAKLVVCDPRKNALLKAGNKNDRIDARKLADLLRSGLLWPVYHGGAGGLRTLKELARSYLTITKDLTRVMNRIKGLYRSWAIPCAGQKVYSPRYRSAWLQKVTEPGVRRRAEWLYQQLDDLQPLRREARREMLAESQKHPAHGVLRQVPWLGPIRVALLIALIQTPHRFRTKRQLWAYSGLALQTRASGEYRVTGGQLQRAKRQPSLRGLNENHNHELKALFKSTATRASTAAGPFGDFYAALLATGMRPTMARLTVARKIAAIVLTIWKKGERFDPEQLKRQAA

SEQ ID NO: 377128 - protein, 312 aa, unidentified
MNKTICGVDVSKEWLDAHVEPNGAAGRFRNDAAGITDLAAWCQGHGVELAVMEASGGYERVALLLLWDLSLPCALVNARSVRRFAEAMGFLEKTDGIDAAMIAGYAQAKRVQPTLPPSPAQQRLKALVARLGQVTGDLTIQKQRKSAAADTETIASLDEVIALLVRQSRRLEGEIASLIDDDPLWACLDRAFRSLKGIASRSVARLMAELPEIGILSNKAIAKLAGLAPIANDSGKRSGRRPVRGGRAGPRGVLFLVARIVAKYDPHLAAFQHRLQAAGEEKMVIRIALARKLLVILNAKARDARSEFANAT

SEQ ID NO: 377129 - protein, 346 aa, unidentified
MNATTYGMDIAKNVFQVHWVDGNTGEICRKKLPRGKVTEFFAVRPAGRIAMEACGGAHHWGRTLGPLGHQIELLPTHQVRPFISGNKDDAADARGIWLAAQHGDIRRVAVKSSEQQAMLSLHRMRTHWVSVRTATVNALRGLLYEFGVTLPRGRHSGLRQLAQQRAEINDAVPAVMVRLVDDQLLALADIERHVQAMEEEISLMLKSQESARRLRDTPGIGVLGATALAATLGDGTSWRNGREFACCLGLAPGHRGTGGKVRIGSISKRGNAYLRTLLINGARALASREHPAPWIVALLGRRPFNVVVVAIAHKLARIAWALVAHGRAYEASWKATAPPAASAGAV

SEQ ID NO: 377130 - protein, 344 aa, unidentified
METVLQISWYLGIDVSKGSLVAHLGSSSKSERRTFVNDSKGIQELLSWLGDRGAVCKVVMEATSRYHRLCERALLKAGIRVDLLNPRRARGLAIGLGIADKNDTVDAKVLSRAAQMIEEAQIKVHTLQAQDLKDHSRSIDSIKESAATFIRQMEGLDPDSKAYLAYLEATKALKKLAAKQEKEWAQTVKEDAEMLRRYTLAKSVPDVGHVTARIASVELPADLNERTLRQICGYAGLAPRSNQSGNKDLPPHIFGGNEHLRTGLFMSAMHAVYHGKRYLPFYEALKARSISPARTKGAPHLIAIVAVMHKILRNIVAVIKRNSPWTQEAPEFKNAKNAVQAETA

SEQ ID NO: 377131 - protein, 350 aa, unidentified
MDATTIGVDLAKTVFELALANAAWRVTGRKRLTRPQFERFLSTATSVHLVMEACGTAHHWARVARAHGHRVTLLPAQYVRPYVRRNKTDRTDAEALLEAVRSGQITPVTVKSVAQQELLALHRVRAEWMATRTARLNAMRGLLQEHGLTIARGARTAVTTIPRLLEDAEAPIPDRLRAVLSQLFEEVRAVEANLAALEQDLTTIARANPVATRLMTVPGIGLITATALVATVGHIHGFRTGRRFASWLGLTPSVRSSAHRRRLGAISKMGDVYLRCLLTHGARSVLLGAHRTRKRETPPARLQQWALGVQARRGHNKATVAVANKLARIVWAVWTRNVDYEARPALPATA

SEQ ID NO: 377132 - protein, 419 aa, unidentified
MSFKILKNNCCGLDVHKTWIYACIGITDSFKRTEYKQARFSSFTKGLQQLCLWLAKYNCIDVCMESTGKYWIPVFNVLEKNNIFVTLSHPKYTKPQKGNKTDRKDAKWICDLYMCGMVKPSFIPPADIRQLRDLVRYRFKLTCMITGEKNRAHNCLTVSNLKLDDVFSDIFGKSSRSITEQILQHPGEAFDVAPFVDSRCKTPIEEIQAAVDGAISHEQAVKLRQCLKHIDELEMHKAEIEREIFRLSQKYESVLDLIRTIPGFDKNPLTAIQVLSEIGADMSVFPTAKNLVSWAGCCPRNDQSSRKIKSTRISRAGSYFKPVLVQIANALIKSKKHPEFTTRYRRIKARRGHKKAIIAICRMILTAIWHILTDLKPYTPEGFLESRPVNKEKVLTISQALNLIKQRGYIIKDDVVPVT

SEQ ID NO: 377133 - protein, 354 aa, unidentified
MPRSAETAVARTIGIDTGKNTLHMIGLDEKGAIVLREKVSRTRIAARFVNLPPCLVGIEAGMASHYVARELAGLGHEVKQVPPAYCKPFRQSHKNDFRDAHAVAEAVERPSTRCVPIKTDGQLDLQALHRVRSRLIGNRTAVINQIRGFLLEHGIPVRQGYRFLRQQLPQILATRTDVLSPRMIRIVGDLMADWKYLDERIEGVTDEIEVLAHADEGCQQLITVPGIGPIISSAMVAAIGNGAAFCKGRDFAAWLGLVPKQMSTGDRTILGRITKRGNRYLRMLFIQGARAVLLRPASWAKHGFGSWLTAATRRLHRNVLAVALANKLARIAWTVLAQGRRYEARVEPRVEAAA

SEQ ID NO: 377134 - protein, 499 aa, unidentified
MGKGSGQDPTEPEFLEEGTKMIYSVGIDLHQGQHRARCLDDRAQSCDGFSFQTTPEGLAVLEERVFRDGANPIIVLEPAGLPWKMVAVYLRSRHPDCRLMKARTQKVAALRRYLRGPVKSDRLDALTLAKMPFIDPEKLVEIYLPPAEIHALQRLTRQRKRIESAISGRKIRISAIVDGYLPGVRRTFSEAWSLPLRALLRSRLNPYAVVQEGEEALHAYLSKSCPRSRWSRAETHLVFLACQSVAEVCELSRSAGTVDEEFFVDLQDEIARELRLMESEEAESESLARRIMELYKKLHPSDNLTSIPGVGQHTAPIFLSAVGDPARFRSQSAFANWEGVVPGARQSSDMEAKGLRMTKAGPSIVRMGLYQAGDIGRRWDPQLAAVYYREMVHHGKNHRQAMGAVMSHLGARVLAVLKEDRLYELRDTDGNPVGKDDARRLILSKYQVPDEVRRERRRRNPKAINMVEALRKDRETATHRTNEAAKAPQPVQIKALSRQ

SEQ ID NO: 377135 - protein, 452 aa, unidentified
MAKHREKKKAHGLVAAPVMEPNAAGVDIGASEIYIAVPPDRDMQPVRRFAAFTEDLKAAADWLEHCRIETVAMESTGVYWIPLFQILEARGMKVCLVNARHVKNVPGRKTDVSDCQWLQYLHAVGLLRASFRPSGQVCAVRSLMRYRESLVGMAAVHLQHMQKALDQMNLQLHHVISDLSGTTGMAILDAILGGERNPLKLAQLRDPRIKASPETIAKSLVGDYRREHLFTLRQSVTAYRSYRQLLACCDAEIEQMLGEFSDGAGPDTPVLADPKDRHRPRRNEMKFDLRGHLYRIFGVDLTEVPGLNALTAHTLLTEVGPDLSAFPNVGAFASWMGLCPDNRVSGGKVLSSHTRKVNNRAARALRMAAQSLFRSQSWLGQYYRRMRAKLGAPKAITAAAHKLARIVFHMLTNRHAYDETVFAQQEIQNQHRLQQKLMQQAKKYGFQLIPIT

SEQ ID NO: 377136 - protein, 447 aa, unidentified
MALDVVTKTDKTPVLGGMLSKYVGRKTSSIENDITKARNHSRQRGNIMRVVFGIDVSKASSEVAILVNGEKVHGYTIPNDTIGFNRLLGDLKTVHEPEIVFEATGVYSRRLQAFFEDNSYAYTRLNPLESKKQLDSLRVRKTDRIDAEKLAASQFILNRKPSYVQEALYQELRDLSRFYQNLTEDIVCAKNRLHKVLQVTFPELENILSAPTGEQYWNLVMTFPCNSFVLESDDATLTAIIRQSTAKRISEKRVIYLVDKLTKLANQSYCAVKKTSPVIEEVKYYAGELLRLSEHRQGVLEEMVALAQSLPEYEILLSIPGIAETTATSIIGELGDIRRFHSANQINAFIGIDLRHYESGNFLAKEHITKRGNPYARKILFKCIHNIASASHTNPCHIADFYEKRKRQSQVTSTKPHTIASIHRLIRTMYYLITHNKLYDYTSTQNR

SEQ ID NO: 377137 - protein, 403 aa, unidentified
MTMKLMSGIDLHSNNLFCGIVDLNGERVFEKRLPCDLAPVLKALEPFKERLQTVAVESTFNWYWLVDGLQDAGYNVVLAHATGMAQYNGIKHTDDKSDAFFLAELLRLGILPTGYICMRQWRPVRDMLRRRMALVQKRTGLMLSLKSLHTRTLGEPLTQGEVKALVPESAGKLFSDPCDRVVAQVQAKLLKEFAEGIGRLESEVQKKAADLPFFPVLETLPGVGKILSLTIALETVDPSRFAGPGNYASYCRCVDSRRISNGKKKGENNQKCGNKYLSWAFVEAANFAKRFDEQCRKFFDRKAAHTGNIVATKALACKLSKAAWHMMSERVAYDAGRIFPGHTAVPMVPGGNAKRSKVAGAPIGGSLASPLRVATGGAASEGSKARRRRSPAPANKTARLTRK

SEQ ID NO: 377138 - protein, 418 aa, unidentified
MNEDGITRGPRRYIALDVHKKYSVIGGVDRDGRVVLHAVRVEHADLEGWLKKNLRSTDHVVLESTTNAWHVYDLLSPLVERVVVANPAKVKQIANARVKTDVRDTFILARLLVANLVPDVWVPPAHVREMRQLLSQRRQLVETHTQIVNRMHSVAHRHHLKHERGKRFNEKNTVWQKDKRLSKVERFQLELEMENQVYIEKQISRIGKEVAKMSHQKPWAESMTYLMQLPGFGVITAMTVLAAIGDIQRFRSARHLASYSGLTGGLDQSGTHLVQKGITKEGRKELRWAMVEVAQRAVKSDPHWKRKFQEMEKRMHRNQAIVAIARQLLELVWYVLTRRQPYRHFSQERIAYKYLTWAWQMDEAARDGLTRQQFTRYYLMRLGIGQDLTRIALDPKHPRKIATETELLALRPELHHIE

SEQ ID NO: 377139 - protein, 338 aa, unidentified
METYAGIDLHSSNNYIGIMDQDHKRLFGRRLPNSLDKILMVLEPFKSDLQGVVVESTYNWYWLVDGLQEHGYKAHLANPSAIKQYEGIKHTDDKWDSFWLAHMKHLNILPEGYIYPKEQRPVRDLLRRRLFFVRHRTANILSLQSTITRNLGIKMSSNEIKKLDMDEACDLFDSSNLVFMAQNNISTIKHLGNIIKGIENEVKSQVKLRKEFVMLTTTPGIGLILGFTIMLEVGDIGRFIKVGNYSSYCRCVGSKRLSNGKKKGENNKKNGNKYLAWAYVEAAHFAKRHIPKAQRFYQQKMAKANGAVATKALANKLARASYFIMRDQVPFDENMLFR

SEQ ID NO: 377140 - protein, 482 aa, unidentified
MKKSSIYPNRSQELAALFEKAGNLSKLICVPIDYAKKDHLVMFCNGNGEVLRKPFSVKNSVDGVKYLLGQVNRSCRHRHIQSDHVFFGGEDVNSYAENFANTIRSKGWLVANVNAHDAKKQRENLQASTDRLDLMGIATMLLNRRANCCPAQTGVYRNLRTLVRHRKKLVKMKTEVRNRIHTLVDRLFPGFLNEKKSGIRPFSNSSLYLMQERFSAPQIRRRQRGALIRNLEKRGTKKAEQVAARLQNYASQVLKTPDEYTAALQVSLASHVTHYRCLFEGAHQLVNEMAQLLAQTQGAFLTSIKGIGIVLAAGVAAEIGDPLVQRSTDQVASYAGIVPTVKQSGGSQGPSITSHVSKRSNHILKDYVVQSAFHIGRYGPKDLKDDYSRREAAGQHADFGIARRFVRMAMCMMRTSQVYLPPDMRSTHIKPERRADYYLAMWSYLRDKWSKAGGLNVAFARDKPLGQWRYILQEVYGIKLKM

SEQ ID NO: 377141 - protein, 412 aa, unidentified
MDVLLERCAGLDVGKDEVVACVRTPARDGPGRRVELRTFPTFTSGLEALADWLSAEGVVEVVMEATGPYWKPIWYVLEDRGFELKLVNAKHVKMVPGRKTDLADAAWLAELLEHGLLRSSFVPPAEIRELRDLTRYRKRLIQTHTAECQRVQKVLEDAGIKLDSVASDVLGVSGRAMLRALIDGERDPEVLAELAKGVLRKKIPLLREALRGRFREHHATMLRIIFEHVEQLEASITTLDGEVDRVIAPFAQARDRLSTITGVGKRAAEAIIAEIGVDMGRFPTAAHLASWAGMCPANNITGGKRHRAGSLHGNRWLGEMLNQCAVAASHTRDTYLATQYWRLTRRIGKRKAAVAVGHSILVICWHLLANDCDYDDLGGDWFTRRTDNDKRRDHLIRQLHDLGYGVTLTKVA

SEQ ID NO: 377142 - protein, 375 aa, unidentified
MKKVRCVGLDVHADTIAVAVAESDGEVRSLGQIANRPESIRKLMKKLGPADSVRACYEAGPTGYVIYWQLTALGVRCDVVAPTLVPVKAGDRVKTDRRDAEKLARSYRAGDLTAVWVPDAAHEALRDLVRAREAAKKDQLRARHRLGKFLLRHGRRPPTGMTSWTQRYLAWIKTAVHFEQPAQEATLLDYLHEVEHVAGRIAGLERAIDEAVRTVPARMRAVIDALQALRGIALVSAVTIVAEVGELSRFTRAPQLMGYAGLGTREDSSGSRTRRGGITKTGNAHLRRIVIEAAWAYRHRPAVGGALKKRQATLGEEVKAIAWKAQHRLHGRYRKLLGRGKCQQQVVTAVGRELLGFIWAIGVEVEHRTSSTIAA

SEQ ID NO: 377143 - protein, 322 aa, unidentified
MTYIGLDIAKLTFVVGIKQQDTYHVKEFDNQESGFAEMTKWIDDFDIRQAHYCMESTGKYGFALAAYLYKNKQTISVVNPFKIKHFGKSLMLRNKTDQVDAKLIAQFCEVHKPSAWTPKSQDIERLSSLTKRLLQLEKMLRQDKKRLELETQNDVIESINKLGEELQKQIDSIENLIAQTIANNDELVKNASLLKSINGVGNKTIYCVLSKLGHPKQFQSAKQFAAYIGINPEHKQSGTSLNKSSISKMGDRNLRKILYMPTLSAIQCNPLIKEFYQRLVANGKPKKLAVCAAMRKLLFIIFGVLKHETKFDINFANTKNCG

SEQ ID NO: 377144 - protein, 417 aa, unidentified
MTPDEKHAYARAFPIHVGVDTAKTFHVLVAQGPDGQRSAPLKVLVSRAGFLATDAHLRRLFPDYAPSQMLVGLEFAGHHGFTFARFLADRGYPVVNVLPAHTNRSKELEDNSPLKTDAKDAAQIAKLVSLGIFVRFPFLTTPYVELRLLSVQRHRLTVEATRFKNRLQGVLDLAWPEFLGHFSGLHKRTPLAILERWPLPQEFARAAPQTVGRYIRAASRGHVSKERIAVLRQSARDTIALTQATPERRLEITQLLARWALVRAQLAEVEARIAVLVEQCPEAKVLLSVPEISSACAATIVSELGTPADFQHPRQVLKLAGMNLVGRQSGQTEGRRRQSKRGRPMLRRQLFLLAGRWCQPRGLYRPEYEAMRARGVPGTKAVCTMARKLVPLLLMIMQTGEPFDAARWRGNRRQAAA

SEQ ID NO: 377145 - protein, 495 aa, unidentified
MVPIKRGLFVGGPQGTPFRSVHNHKLIGSGQSIFQEAYGMSKRTKEQKVKQSRVDAMAQINSNAAGIDIGSEEVYVAVPPGRDEESVRSFPTFTADLQSLANWLKVCRIDTVAMESTGVYWIPLYEILEERGFQVCLVNARHLKNVSGRKTDVLDCQWIQQLHTYGLLSPSFRPPDQIVAIRSMVRHREMLVQYRSAHIQHMQKALTQMNLRLTNVLSDITGVTGLKIIRSIVEGEHNPEVLASFREPGCKKSEAEITKSLEGHYKREHLFSLKQALELYDFYDRQLQECDTELEDLYQQFGPPEDPGTPPPAPRRNKPRKNQAHFDLAPALYRMTGVDLTQIDGLDALTAQKVLSEIGTDMHKWPTEKHFASWLHLCPNNKITGGKVIHAGVQPTQNRASTALRVAASSLTRSDSALGAYYRRIRARHGAPSAVTATAHKLARIIYFMLKERKPYHDFGADYFELQHRTRFLKNLTRQANRLGFRLEPAFQTAF

SEQ ID NO: 377146 - protein, 355 aa, unidentified
MSQEKYIGMDVHQATISVAVMDGNGKLLIECLLETKAATILEFVQGLRGTLSLTFEEGTSAAWLHDLLKPHVSRLVVCDPRKAALLKEGNKSDRIDARKLAELLRTHQLKAVYHGEHGIRTLKELGRSYLTVSKDVTRTMNRIKSLYRSWAIPCPGTTVYAPSHRLEWLAKIVQPGVRVRAQHLYEQLDNLQPIRQQARRELLLESHKHPAVKLLRQIPSIGPIRAALLVALLQTPHRFRSKRQLWAYSGFAVETHDSGEYRYVRGKVQRNRERITVRGLNDNHNPDLKNLFKGAAISASTRPGPLHDFYVARVAKGMRPTMARLTLARKVAAITLTMWKKGVSFDPQQLSRQSV

SEQ ID NO: 377147 - protein, 408 aa, unidentified
MKVIFGIDVSKSTSTVCTLINDIKTITTITNDRPGFLQLLNDLKAFAQHPQIIFEATGVYSRRLQTFLDDYGYGYVILNPLKAKKEMDLGLRHNKTDRTDAYHLALIQKLYHHPVSQLQAEQYHQLNALSRFYDQLTTDIVMAKNRLHKVLQFTFPEIESLFSTAKGFNYWSIVKMYPHCELVNVSTKLEIYNKLIELPGFQDKKAKKFTSNLISLARKAYPVASCNSVESDETRYYAQRLIDLNNQRQDLVNQMVKIAKNLPNRDLEILESIPGIAQTTAVRILGELGDLRRFSNPNKINAFIGIDPGRYQSGEMDSSLSITKHGNAVARKILYRAIGQIDQASKTQSCHIADYYENKKLSSQTIGFKKIAIASIHKLIRTMYALISNDQLYDYDVAKHNQKDFYRN

SEQ ID NO: 377148 - protein, 335 aa, unidentified
MQIKHFIGIDVSKDTLDLSVVVDGENLQHYCIKNSTKEIKSAVNKIMKAFGATVDDTIFCMEHTGMYNLPLVKWLQSQQGKMWLESGVHIRKTLGLVRGKNDKVDSARIAMYAYINRHQIRLWKAPRKVIERIAALLSQRSRMIKAKKQLNTANHEQRKFLDKEIMSSLNRYTYKAVVVIDKQIEAIEKEILGLIQEDEMLNRMYQIITSVNGIGFITASYILVTTNEFININNPKKYACYSGVVPFEHSSGSSVRGKTRVSQMANKNIKTLLHMAALSSVRMQGDIQDYYKRKVSEGKNKMSVLNAIRNKLVLRIFACVNQNREYEKIYCYKFA

SEQ ID NO: 377149 - protein, 383 aa, unidentified
MKLVGIDIAKYEHAAFIMEASTGESLCDPFFFKNNKEGFKKLYTELNKYSKNELLIGMEDTGHYNFAIESSLLAEGYKVALITTKSLRKASLKSVKSDKEDALLITKALLDKAYYRIISIQDEKLKEAKELTRYRTQLTLEMNRKKNVLQRHIDIVFPEFNTLFNNEYTITYLNILRKYSDAYTIAHTDIRSLRKCFKYCNSFSAEELKELASNSVGIHDVSISFIIQSVISSIDLINSQIEELDKKIEELAITQASSITSIPGISIITGTSILAELGDISKYSNAGKVIKFAGVNPYISESGKFSADKTAITKKGSKYLRTTLYRVIIPVIRHNPAFNNYYHLKRNQGKGHLCALGHCVRKLLRIIYHLETNNLSFDINSLK

SEQ ID NO: 377150 - protein, 365 aa, unidentified
MQKISTMRTSGKNIFQGRLTIGVDLGDRSSAYCVLNEAGEIVFEHKLATTPLAMKQVFGSMPRCRIAMETGTHSPWVSRLLTALGHEVIVGHAQKVRLITKSRRKDDRLDARTLARLARIDPALLSPVQHRSAQAQLHLAEIRARAGLVSARTALVNAARGLVKSYGERLRKCGTQQFRREMASGLSAELREALKPLLQEIESLNEGIREYDRRIEKMAKEKYPETALLKQVKGVGDLIATAYVLTIEDPHRFRKSRDAGCFVGLPPGRRNSGESEPQMHISKEGDEYLRTLLVQGAHYILGPFGKDSDLRRWGQKLAARGGKNAKKRAVVAVARKLAVLLHRLWVSGEVYEPLRNSQKAMSAAA

SEQ ID NO: 377151 - protein, 331 aa, unidentified
MKFKEVIGIDVSKNTLDVCFHSLNNFEVVDNTTKGFSKLISWVKEQAKIPMDQILFCFEHTGLYSSMLARYLAAKQINFAIVPGLELKRSLGIQRGKNDKVDAGKIALYAYRRRNEIETYQIPESSLSKLKQLLSLREKLVKQRAGYKATLLEQSSFLNKSENKLLFSIPCRLIKELDKQIDKIESEIDVILEENQKLKNLYELIISIKGVGRQTALYVLVITNGFLLFDNSRKLASYAGVAPFPYRSGTSIRGRTKVSNLANKKLKSLLSSCASSAIQHDPELKLYYKRKTDQGKSKMQVKNAVRNKIVHRIFAVIKRGTPYVSTHDFAA

SEQ ID NO: 377152 - protein, 365 aa, unidentified
MLIKEPACPHWPNALTLSWASILTNTPTHTAALVTPAGGLVVHLTVSADADGYGNLLTFARAHASGRRIWAIEGTGSFGAGLTAHLLEHAEWVVEIDRAKRPARRNGAKTDELDALRAAREALSREHLAQPRRRGDREALRVLLATRKEVVQTRTRAINHLKALVVNAPEAMRSKLRLLKTGALVVRCAALPTRTTPTAEQAATVLTLRLTARRIQALEAEAAALEAQLEPLVQGVATRLRAEFGVGPISAAQIICAWSHVGRLRSEAAFAALAGVAPIPASSGQVQRHRLNRSGDRQLNSALHTIVICRLARHAETQAYAARRASEGKSSREITRCLKRHLARRLFKLLEAVPRGSSSDLELAA

SEQ ID NO: 377153 - protein, 360 aa, unidentified
MFTERTSVGLDVHARSVAAAAIDGVTGELFQARLTPSHEHIQAWLADLPGPVAVAYEAGPTGFGLARALDAAGIRCVVAAPSKLQRPSGDRVKTDARDAVHLARLLRLDEVTTVTIPTPATEAARDLVRAREDCRGDLMRARHRLSKLLLRQGIVYSGGKAWTGGHEVWLRRQRFDAPATAMAFESDFEAVLAVRARRDRLDAAITALAADSEFTPVVHRLGCLRGVSTLTAFALAVEIGDWHRFTGNTIGSFVGLVPSEHSSGSSRIQGPVTKTGNGHARRLLVEAAWHHRARYAPGTTMRERWELAPAAARARGDQGNRRLYHRWVVFTERRKRHTVANVAIARELAGWCWSLAVMDD

SEQ ID NO: 377154 - protein, 350 aa, unidentified
MRKLDSITCDDKAYVGLDVHKRSIHGAVRINGKQISTFVMPAKKDAVIKTLEPLAAGLEKIVYEAGPTGYSLARSLQEIGWPIEVIAPGKIPKEANQGSKSDRLDCKKLAEFAEKNLLKAVAIPTEQEEADRQLTRLRDHLKKKDKRTKQQIKSFLLQHGLKEPNGLSNWSQCGIDELAELELNSELRFVLDIFLEELKDLKNHLKITHNRIKQITKAERFEKKIALLKTHPGVGPQTSIKFLTEVYQPGRFTEYTQVARYTGLAPRVRQSGEKRREGPLIKAGQAPLRCMLIQAAWAWVRYDPHAAMVYRRLLKNTGKTQKAITGIARRLAVDLWCMLMRNEVFRTAAV

SEQ ID NO: 377155 - protein, 461 aa, unidentified
MVATRARTQRRQVEDLTCVHPNAAGLDIGSEMIVAAVPPDRDEQVVRAFATFTPDLHALVVWLLACGIDTVAMESTGVYWVAIYELLEQAGITCYLVNAQHVKTVPGRKSDWNDAQWLQKLHMLGLLQASFRPDAEIRCLRLLARHRAELIRHRAPHILHMQQALKLMNIQLSEVLSDITGVTGQAIVRAIVAGERDPAKLAELRHPGCKHTEAEIIKALTGTWQEAQIFILEQNLQLYDFYTAQLSTCDREMERCYQAMESRHEKDAPLPDLPKAKPGSRSKNEPNFNVRAQLARIVGVDLVGVMGLSASSAQTIITEIGTDMERFPTVKHFCAWLGLAPRNDISGGKVLRSRTLKVRSRANQAFRQAAESVARSQSSFGRYFRAMRARLGPEQAIVATAHKIARVVYHLLTTKEPYREECAEEADQKRQERELKQLARRAQRLGYTLNPVAEPAPAPNP

SEQ ID NO: 377156 - protein, 406 aa, unidentified
MSQEVYVGVDLAKDFHQVMAVGSDHQVLAPTFRIGRGRGGVKEMIERLRFLVRQESDLVFTIEATSDYWWELAWELDDRGCVVYLAHPKKAHDLRKFYALHTKTDVTDAEALARMPLVDTNLRSLWRPSVAVQSLQRMCRLRWKSRCRIADLKRRLSHLSDVVVPGVGKVMPIRYSKSARVFLRRYLAPERARRLGKKRLGMVLKKAAWGKFSDKKLDQLWECVQNAPRLGLQPEDLLLEVGLQLDEIEALEKQIVQLDGRIAELYGEVDPAQCLLAVSGLGEFLAAAITGVVGDVRRFPSAKHLISFSGLAPRVKSSGGHSKARQGITKQGNPYLRAWAFLAAENARQYDPELKAYYQRMRANGKHYLTAMCATSARLLERVYDILSAQAGETEKESQAQSVGTG

SEQ ID NO: 377157 - protein, 386 aa, unidentified
MSQANNLRRCHTTLDQDSSLIAVVEMSQSSWLVAGIVPGISRQPAKKLKPDQTALLGLLRRWQDEAAKAGRRISRLAVAFEAGRDGFWLARWLRARGIEAYVIHATSIAVSREHRRPKTDRLDTELLKRAFIGWLRGEPNHCSMVQIPSLEEEDAKRPNRERESLVGERTRIVNRMKSLLARLGIRDFKPALRKAPEHLATLRTAEAMQLPPNTLAELRRDMARLRFVMDQITEIEQARLDRIAQRPEEGMHAMIRVLAGVKGIGVETADMLVHEIFSRPLRDRRAVARYAGLTGSPDESGGRRREKGLAKAGNARVRRGMVQIAWRFLVFQKDSALSQWFRFRTENARGTRKTMIVALARKLLIALWRFTRTGELPEGVVLRASA

SEQ ID NO: 377158 - protein, 309 aa, unidentified
MTSNIQYIAIDIAKQTLQVQSDLKSLSLNYDEQGLKQLRAFIKQHENPMVIAEATGGYERPLMSMLFKYSICVALINPRLARAFAVSEGIKAKTDPIDADMLLRFAKEKKPKSTEYIGAEREELGALMDRRSQLTEHIAKEKNRLDKSPKSICGSIKKMIRILNKELALIEARITKLIGSNEQMHAQSKLMQEVCGVGPNTAWSILAYLSEITSLNRNQLVALAGLAPYNRDSGKCKGKRSIKGGRAKVRATLYMAAQTAAIHNPIIKPYVDRLRYEKGKPYKCAMTAAMRKILVHLQSLLKKQQLLLD

SEQ ID NO: 377159 - protein, 359 aa, unidentified
MASNVKVNRINFNGKMVNIGVDMHKQSWRITALVEGEVAFTGTLAKPNYDSFRKLLARFEGNCVRIAYEAGPGGFGLYDILTADGIECMVTPPSLIPTESGSRVKTDKKDSLKLAKLLESNMLKKVWVLSPEERAHRQLVRTRRQIVDHRSNVMRQIKSLLFFHSMDIPFSSRQQWTVPFIKWLHELNLDDQCLNQSLKTLVHLFDYLSVEKKRLTHEVIELAKEEKYTQRVKLLNTIPGIGTLSGMEILVELQEITRFKTSDELAAYLGLTPSQYSSGEYVRMGHITHAGNDRVRTTLVESSWILIGKDPSMRRKYENIKHRRGGKRAIIAIARILSARLRRMLLDQVPYEIGFQKAA

SEQ ID NO: 377160 - protein, 320 aa, unidentified
MTYVGIDVSKATFVVAYSSAKSSKTKTFKNTTKGVHEFIQTLSASEHHCVLEATGNYSSLLVYLLSQVGITVSLENPLKIKNFARVMLSVTKTDETDARLIALYGEKMQPAPYRLRSDAILTLKQKRTVIRQLKKQLIATRNLKGSMEALPFFDPKCKKAIEKTIAFLEKQVKNLEEELAVLAQCEYKKQMDLLISIKGIGVTLAAALIMATGGFTYFDNAKQLTRYLGLSPTYQQSGTSVNVKGHINRNGDSSLRGQLYIAAMASLRCNAECKECFDRLRSNGKPGKVAVVAVANKLVRQAFAVVSQEKPYVEDRKSVV

SEQ ID NO: 377161 - protein, 338 aa, unidentified
MTIVRVGIDLSKSVFHVHAVDGTERTVMQRMMTRPELRRFLALSAPCGVAMESCGSAFHWARYAATCGHRTQIIASQFVKPYVKSNKNDFNDAAAICEAASRRSMRFVPAKSIEQQDIQALHRVRTRRVAERTALGNQIRGLLLEFGIAIGLGLTTLKRRLPDIVTDESSELTPRGRALFRELYDELIELEGKIFAIERKIGQVFRSSEACQRLAEIRGVGPLISTALVATVGDARVFKNGRHMAAWLGLVPRQQTTGGKPRLMGISKRGDRHLRMLLIHGARSALRVIDRNPDQRSRWAADVARRRGANVATVALANKTARIAWAMLAHGESYRMAA

SEQ ID NO: 377162 - protein, 348 aa, unidentified
MRFYTGQHRYYCGIDLHARTLYMCVVDGQGKIRLHKRLRCEREALLRALEPYRSDLVVGSECIFCWYWLADLCAREQIHFVLGHALYMKAIHGAKAKNDHIDSHKTAVLMRGGAFPIAYVYPPQMRATRDVLRRRLYFVRKRGELLAHVRNTFHQYNLPRPSGQLLYKKNREGLAQAFDDPMIQKTIEADLALADRFDPVIRELERTIEEEAHVHDSDTLQRLRTIPGIGRILALTLLYEIHDIARFSTVQRFSSYCRLAKPEHRSAGKRVGSGGAKIGNAHLKWAFSEAAILFLRDNARGQTHLKRLTRRHGKGKALSILAARIGRATYFMLKNRETFDTERFYTRT

SEQ ID NO: 377163 - protein, 344 aa, unidentified
MNTTNRIYIKSSHRNIGIDVGKDTLDIYVYELSLHWQEANSPEGIRRLMSRLKRFQLTRVLVEATGGYERLLIEAATEQSMPIIIVQPIQVRQFARAQGAFAKNDKIDARLIAQYGVLLQPEVRVLPGKKVRRVRDLLARKRQLNAMRTMELNRSHKTQKIIAASHRRLLKLLDKEIAEINEKLTREVSDIAEWRRTYDVISSVPGIGDGVAFTLLGELPELGRLTNRQIAALCGLAPFNRDSGKMRGKRRIRGGRAPIRTVLYMAMLSAIQHNPVIKQFYQHLVAQGKNKKVAITACMRKMMTILNTMVRNRSGVANELIRVQRGLVFNHSRLLCDIFSTSDL

SEQ ID NO: 377164 - protein, 340 aa, unidentified
MLNLPIFVGIDYHTHTLQICVMDQQRKLLANQSVENSPEAVFRIVAPFGSHVHVAIEACTGAADFAEELTANYPWHVELAHPGYVARMKQTPDKSDWTDAKLLADLTRAGYIPRVWLAPKHIRELRDLVRHRHGLVQQRTQVKLRLRALLRQHRITCPYNPWTIKGNAWLLDKANITAPNLMFLVCDHYDTIAFYDKKISVVLEQMQNAVADDPVVKQLLRQPGIGMITAITMRALIGQFDRFRTGKQLAHFCAVCPRNNSTGGKTTTGGLIKAGDELLRQVLVEAAHRLIRYNDEWKAMATRLKANGKKTCVVVAAVANRWIRRLFYQMVSSSHQAIAA

SEQ ID NO: 377165 - protein, 372 aa, unidentified
MREDSEAYVGLDTSKLRISVALAVAGRDGEVRFFGDIDSAPEAVERLVRKLEKRYRRLCFVYEAGPTGHGLQRQIVAFGHDCAVVAPSLIPKRPGERVKTNRRDALSLARLHRAGELTPVWVPDPGHEAMRELVRAREAAMEDLRAKRQHLQSFLLRHGRVFTGRGAWTKAHTRWLCELRFEHPAQHLVLAEYRQAILDAEARLERLAGQVAELVPSWSMAPVVAAYQALRGVAFLTAVTFAAEIGDVRRFDSPRQLMAYLGLVPSESSTGEKVRRGGITKAGNGRARRVLIEGAWTYRFPARMSRPLQERQVGLPKAVCDIAWKAQLRLCGRYRKLAARGKRQGVVTAAIAREMAAFLWAIGREVEPRPAA

SEQ ID NO: 377166 - protein, 412 aa, unidentified
MTATNQFAAHVGLDWADKKHDVCVQFKNGERTFHVIEHTPEALDVWLTELHQKVKGRIAIAVELKKGPVVYALQKYPFITVFPVHALSLARYRQAFSPSGAKDDPQDAELALELMLRYPQKIKAIEPDNADIRLLQQLVEQRRQLVEDKRRFVNRIINTLKQYYPQPLEWFSHRGSLLLCELIIRWPSLQQLKRARHDTIRNFLNAKGGRAMALTEQRVASIDNAIPLTTDPSVIEANALMATALATQIKVVSEIIKTYDERIEALFDTLPDAELFKSLPGMGPCMGPRMLAALGDNRDRFNSAEEIQNYAGIAPVTERSGQKSWVHWRWQCAKFVRQTFVEWAAKTVNSSYWARLYYQGLRGKGKSHQSAIRALAFKWIRIIYRCWKARTQYDEAKYLLALEARHSPLLKP

SEQ ID NO: 377167 - protein, 363 aa, unidentified
MEHIAIDLGAKESQICVRSADGEILEERRIATRPEKLRRYLVGRPKSRVIVETGAEAFWVAEIARECGHDVHVVASMLAPSLGVGRRGLKSDLRDARVLSETSCRVDLPSVHIPRVETRRLQSRLAMREALVRNRTQLLNVVRGYLRTIGERAPRRTAEGLIVELREKLAYAAEQLQPVLESIEVLNRSVKTFDEELKRLASKDKLAKRLQTAPGVGVVTSLRYMATLDVANRFANGAAVGSYLGLVPSDHSSGQSQRRGSITKAGSPAMRAVLVQASWAALLSRRHRNDPMMIWAREVARRRGKKIAVVALARKLSGILFAMWRDGTDYDATRAAKVIPAAPRRLVLNEDSRRSRHPESVPA

SEQ ID NO: 377168 - protein, 391 aa, unidentified
MFLLGIDIAKLNHVASCIDSSTNEVVFSNFKFKNDFKGFSALLNKIKSFDAKNLIIGLESTSHYGENLINFLFIHDFKVALINPLQTSHLRKANIRDAKNDNLDSLNIAKSLIFTKLNFVSKKNIECFSLKKLTRFRSNLIKQRSKAKIQLTSLLDLLFPELQYLFKSKIHSKAIYSLLKKYPSAEEIAALKDDEISNLLYASSKGHFKKEKSIELKSLAKTTVGIKDTSISLHLIQLIELIELYTKQIKDIEIKITDIVNNLDTTLLSVPGISVIACAIILGETNNFENFSSSKKLLAFAGLDPKIRQSGNFNASSCRMSKKGSPYLRYALIFTAWNIVRHSEKFNKYYSLKRSQGKSHYNALGHVAHKLVRILFTLIKKNISYQEEKLE

SEQ ID NO: 377169 - protein, 322 aa, unidentified
MLTPQAATADPPVVGIDVSKALLDLYCDTGAEALRVANCQTEFAALVERLRELAPARIVVEASGGYETPLVTALATAGLPVCLVNPKRVRDFARGLGQLAKTDRLDAQVLARYGRLAQPALYQLREAESLDLTALLLRRRQLVEMQTAEENRLGVAPPAVARDLREHLRFLARRIARSDDELRRRLRETQLWRRRDEVLQSVPGVGPVTSLTLLALLPELGRLSHKEVAALVGVAPHARESGRWRGERHCSGGRAGVRSVLYMAALTAARSNATLKAFYRRLRAAGKPAKVALIATARKLLVILNAMVRDDTLWRGEVTTST

SEQ ID NO: 377170 - protein, 465 aa, unidentified
MPTNKKGTRGRKERKELARQLRSEDPGLEVVHPDAAGIDVGNSAHYVAVRPGRDKEPVQRFECFTADLYRMANWLRSCGVKSVAMQSTGVYWIPLYDILEDSGFEVFLVNARHTKNLPGRKSDVQESQWLLKLHTHGLLNNSFQPASEIRVLRTYWRQRAEHATGMATCVQRMQKALTQMNIQLANVISDLSGRTGQAIIRAILAGERNPRKLAALSDRRIHATKEEIANSLEGNWRSELLFVVKQQLEMYDVYQQRIAECDQKLQEHLAGFADAVLPEPKEGLSLSKKTRQHRYMPQFPLTGELLRIAGVDLTQIDGVDVMTAQTLISEVGLDMNRWKTEAHFASWLGLCPDNRISGDKVLSRGTRRVINRAATALRIAATTLLKSKTYLGAQYRRLRTRLGAPKAITAMAHRLARLVYRMLKYGQQYVDKGAEYYEQKSRRQHIDFLTKRAAQLGFRLTPTRT

SEQ ID NO: 377171 - protein, 354 aa, unidentified
MIACAVEEVVLGVDTHLKTHTAVVIDLVGRQVDAHSFPTTKLGTDELIKWARRRGTVRRAGVEGTGSYGIALTRRLQLEGIEVFEVTRPKRKRARHRGKNDLQDAHAAATSVLADGEQLATPKSRDGIVEAIRVLRISRASAVKSRTQTILQLRNLVLTGPEDLREALRELTINQLVARCARWHRREPDDALQATRQALRSLARRHQALDTEIAELDVDILRLTRRAAPRLLAQPGIGPETAARLLIVAGDNPDRLRSDAALAALCGASPVEASSGQTTRYRLNRGGDRQGNNALWTIANNRMIHHPETRDYVKRRTAEGKTSKEIRRCIMRTLARRLYPLLLADLNDAQAIPT

SEQ ID NO: 377172 - protein, 376 aa, unidentified
MTATRTLSGSVSEPTLYVAFELGKQEWKLAMTSGFGIEPWLRTVASREWAAVERVLRQGAARFGLPATAVVVSCYEAGRDGFWIHRALLQRGIRNRVVDSASIEVNRRARRAKTDRLDALKLVTMLVRVCYGEQRVWREVRVPTVAAEAARHVSRERTALVEDQTRLVNQMRGWLATWGAPLPARRRGEWWTTMRDWAGAALPVEVQARLARAEVRLQGLEAQIAELDAQQHAAATATPPPTPGLRALTQLKGVATTSASVLLDEGLVWRAFRNRRQIGGLLGFAPTPYDSGETKREQGISRAGNARLQAISIQLAWNWVRWQPHSALTRWYQAHFGKGKRARRIGIVALARKLVIALWRYVTRGIVPEGAILKSV

SEQ ID NO: 377173 - protein, 389 aa, unidentified
MEARTVNNLPPAAPHDDAVRCLLAIELSKKSWIVAVNTPLSDKISRYTLEACDWKGLLDLCERIRTGVAREMKKPVEIISCYEAGYDGFWLHRLLEAHGIRNYVIDPASLQVDRRARRAKTDRVDVERLLRSLMAYLRGEPKVWSVVRVPSVVEEDDRRLHRERDRLINERIQHSNRIKGLLAIHGIYEYEPLRRDRMQQLERLRTADGQTLPPRLKAEILRELQRLVLVIGMIKTIEAERDAIASAKTEAEHTSAKKIQNLAKIKCIGPEFANSLVGEVFYRSFDNRKQLASYVGLTPAHFQSGAMSRDQGISKAGNAKARTVMIELAWLWLRHQPDSPLSVWFRGRVGKLKGRIRRITIVAVARKLLIALWRYLETGLVPDGAALKL

SEQ ID NO: 377174 - protein, 418 aa, unidentified
MNEELIARLSRRYIALDIHKHYSVVAGVNFDGQVIVEPVRVEHAGLEAWLEKRIEATDYVVIESTTNAWHIYDLLEPLAEKVLVANPIKVKQIAQARVKTDIRDTLILARLLAANMIPAIWVPPVEVRNLRYLLSQRRHLIGMHTQTVNRMHSVAHRHHLSHPKGKRFNEKNTGWQADTELSDSEKFQLELDMNTRQHLDEQAGKITKKLARMSHEKPWAGSMMYLMQLPGFGVVTGMTILSAIGDITRFDDFKKLSSYSGLTPGVEQSGTKNRGKGITKEGRKDLRWAMVEVAQRAVKSDPHWQRRFNELCRRMHRNQAIVVIAHRLLELVWFVLARKQSYRHFSDEKIAYKYLTWSWQIDESDRDGLTRQQFARYYLMRLGIGHDLERIALNPKYPRKLASEAELLALRPELTQTE

SEQ ID NO: 377175 - protein, 412 aa, unidentified
MIHPLLVGVDVHRKTNTISAMDVSGREVTSRFTVENNRPGTAALAQELRSLAAEGGYDAILLAAEATGWYWWHFFRALDEDPDLQRTPLTLYAFNPRLTAHFKKTYADLDKADLIDAFVVADRLRLGRDLPQPFAYDEPGLRLRFLTRHRFHLVHQLVREKAYFLAHLYLKASEYTHLKPFGDVFGATSRALIQGYPSIEELAAIPFDDLVEIIDQQGKRRFADPADNARQMQAVARNSYPLPPALQVPVNLILQQGLQQIAALKRQMQRTESAIAEALQPWPHTLDTVPGLGPVFSAGIIAEIGHLARFDYDEAKVAKFAGLRWHQSQSADFQAEETPLTHSGNRYLRYYFCEAANSVRMCDAEYRAYYERKFHEVRLHQHKRAIVLTARKLVRLVVRLLTTNQPYRPRRA

SEQ ID NO: 377176 - protein, 351 aa, unidentified
MLIIGCDFHTRFQQIAMLDPTTGELVERRLEHETEEAEKFYASLPGPARVGVEATIGAQWFENVLSRYGHELWVGDAAEISAARVRKQKTDSRDALHILDLLVTNRFPRIWVPSPSERDVRQLLRHRHKLVRYRTSVMNQLHGLAMSQGLCRKKKLWSQRGRRELEALQLDPWASRRRQELLRLLDQLNPWIEDLDRAVQKEAERRPEAMHLMKQPGVGPITALAFVLTIGPVSRFQRSKQVVSYLGLNPREESSGSKQRLGSISKQGNSMLRYLLVQAAQTASQSDPELRRYYQRLKFRRGFSGVAKVAIARKLAVRLYWKLREAAQSFPPARMQGSPSYPMVDASPSIS

SEQ ID NO: 377177 - protein, 365 aa, unidentified
MREQDERDKITIGLDLGDRRHRFCALDKEGQVIEEGTLSNTRECLGELSSRYAGALIVMEAGCHSPWISRDLEGMGCEVVVSNPRKSRAIYQHERKSDRRDALMLARIARMDRALLYPVRHGSEQAQQDLLRIKLRDSLVRARVGVINSLRFTLKSLGYTIANPSTERFHKVIEGQIPDSMSTVIAPSVRALEELSLRIKLLDREIIALARSEYPETAWLEQIPGVGPITALYFVLKIGDPTRFERVRDVGAFIGLCPRRNQSGENDPQLRISKRGDVYLRRLLVSAAQYILGPFSPPSALRRYGLTLAAGGTSRAKKRAVVAVARKLAVLLLTLWKNKSAYQAFPDHDKEKMRTSDRERLRCIA

SEQ ID NO: 377178 - protein, 342 aa, unidentified
MQVTTYGLDLAKRVMQLHWVNLETGEIHRKQLKRRALLEFFANRQPGIVAMEACGSAHYWGRELRKLGHEVRLIAAQFVRPFVKTNKNDAADAAAIWEAVQRPDMRFVAVKSEEQQSVLSLHRMREQLIKMRTMQVNQIRGLLYEFGADLPQGRQRGLKEVPDALADLEKSISPMLRDTVRQQLKRLEEMDKDIADIEKRLTLWKKGQEAVTRLMAIPGVGLLTATAIIATVGDMKSFRSGREFAAFLGLVPRQSGTGGKVRLLGISKRGDTYLRTLLTHGARAVVNFQIKNRNHWIDKLLSRRPHNVVVVAQANKMARTIWALLVKNTEYDAHHAAVKAAA

SEQ ID NO: 377179 - protein, 428 aa, unidentified
MNVLNERITRITATTIIVGIDAAKEIHWARITDHRGIDLSKPVKVHNSMDGFENLLAKIEKLRTKHGCDQVVIGMEPSGHYWRALGWYLKLHESEPVLVGVNPYHTKQAKELNDNSQTKSDPKDALVVAHLIREGRYFDTYLPEDEYAELRQLNTERQRIMKQVSRANNILIALLDEFFPEYATVWSDVTCPTSLELLKIYAFPSDITSAPRDKLLKDIRMASNGKEGTLLVEKMIRAASRSVGVKEGLRAVRLRMLSLIDELYYYEDKKADVEAKLEAVMDTLQLGKVLQSMLGVGAIISAAFIGEVGDISRFTNWKQVRSLAGLNLVENSSGQHKGKTKVSKRGRPYLRHMLYMAGECGCRCNPEMRKFYRYLRDRKNNPLKPQQAFVATGLKIMRILFHMAKTGETYEPDKALGAIRLQQIASLT

SEQ ID NO: 377180 - protein, 370 aa, unidentified
MALKIVYKICCGIDVHKTFVVACIASTNDKGVTSYESHRFSTYTSGLKTLLQWLLDRNCKDVCMESTGKYWIPIYNVLEKDCNIVLAHPKYVKAIRGKKTDKKDAKWIADLFKHDLVAGSFMPPADIRQLRDLMRYRFKLTCFKSSEKNRLQNCLTVSNIQLGNVVSDTFGKSAQAILDKILEDPADTSFDLETSCFQKFKKETSWTSWCHWRIYTPEQAGKLKVIKAHYENLEARKAELEELILALATPYQQELAILQTAPGISSDFTAIGIISEIGTNMEAFPSAKHLCSWAGLTPTNNESAGKKKSVRVSKAGCYIKPLLVQCANAVVKSNKHPEIRNRYLRIKKRRGHKKAIIAIAECFLPHYTTY

SEQ ID NO: 377181 - protein, 345 aa, unidentified
MQNMYYIGLDVHKRTISYCVKDGSGTIHAEGTIPATRFDLDRWMKTLPQPWTAAMEATVFTGWIYDHLQPHAAALKVAHPLMLRAIAAAKKKNDRIDASKICDCLRCDFLPECYMASTAIRERRRTLRYRNLLVRQMVQMKNKIGMLLMEAGVSYNKQRLHKAGYFRELLATSPDIDEGLCSLLRLCRETVVRLQKTESALVRSLERDSLLMDRVERLMTIPAVGPITALTWALEVGDVKRFSSIKKAISYCGLCGAEKSSGNTVQRTPLSKQRNKHLQTTLIEAAKMAPRNSPELAMLYDREKQKGNANRATLAVARKLVAYLMAVDRGQRNFQVVETNNCIAA

SEQ ID NO: 377182 - protein, 427 aa, unidentified
MNCNTQNEKIEMLTDEWLIVGIDVGSEKHFARMFNNRKVELSRKALGFENDEKGFTQLEGWISNQLRTSGKKFIMCAMEPTGHYWYNLAAYLQAHGMVVVHVSPSHVKKSKELDDNNPNKNDRKDPKTIAGLVTEGRYMFPYMPNGIYASIRELNNMRMRATESLVVVKNRLARWFSIYFPEFTAVFGDLKAKSSRLLLAEAPLPEDVIKLGAEGVNRIFRNAKLRSVGMKKALQIVEAAEHSIGRKENPWAAREEISELLEDLDRYLAREEKLMARLHEEVMKVPNVERILEIKGIGIRTVSGFIAEVGDISRFEDAKSIQKLSGYAIVANESGKHNGQSSISYRGRKILRYFLFQAAISVIGKNPEFAVIHEYYTTRKKNPLKKMQSVIAVACKLIRVLYTILTKGVRYDGQKMLNDIVRPETIA

SEQ ID NO: 377183 - protein, 335 aa, unidentified
MEVKTIGLDLAKNIFQVHGVDAAGEVSVTKRLRRSQMLEFFAGLKPCLVGIEACPTAHYWGRELKSLGHEVRLIPPQYVKPYVRRSKNDAADAAAICEAVARPSMRFVPLKDEMQQAALMLHRVRDLLVRQRVQLISAIRAHAAEFGVIEAKGPQNIVRLLASLEAGGVPDLARQLIGVLTEQLDAVEDQIADVDRRIVSWHKSNETSRRLASIPGVGTMTATAIAATVPDPSVFRGGREFAAWLGLVPRQNSSGGKARLGKISKQGNEHVRRLLIIGAQAALLCSKETKANAWVQGMMARRPRMVVVVALANKMARIAWALMTRRTQYGVAVAA

SEQ ID NO: 377184 - protein, 429 aa, unidentified
MSYRIAAIDVHKKMLAVVVSDVEVESEYTFERRKFSSNPEQLRSLAAWLLEQEAEEVVMESTAQYWKPVWESLERYWKPFCAKREGARRKSGTLHLAQALSNRGRQGRKRDFPDAERLVKRLVAQELTLSFVPDVEQRLWRTVTRKKNQLRRDRVRLQNQLESLLEEAHIKLSSLVSDLLGLSAQRMLKAIAEGETKPAALAALADERLRATTEQLCDALGACTELNPVYRRLVNMALEELRLIDEQIGRLDHEMASLLKAYQDAVERLAEVPGLGVDSAQQIIAEVGPTAAAFASAKCLSSWVGVCPGTDETAGVNYSHRSPKGNRHMRRLLNQAANAGARTKGSIFEVVYRRTVPRLGHNQTIGAIAHRQCRLIWLILHEGVRYEERGSGLSKRSKQLRTWKMIRQLRNLGYRIEPPISEPSHPPVE

SEQ ID NO: 377185 - protein, 408 aa, unidentified
MEPIYTCCCGLDVHRRSVAACVRRLEAGGRLHQETRTFGTMTRDLLELADWLAAEGVTHVAMEATGVYWKPIYNLLEERFTLLLVNARHVKHVPGRKTDVQDCQWLAQLLQAGLLRGSFIPTRPQREFRELTRHRSQLVAEKTRVANRLQQVLEDANIKLGTVATDILGASGRDMLRAMIAGEQDPEKLADLARRQLRNKIPELRRALEGKVTDHHRFLMGQLLAQLDHLEGQIEALSRRIEEVSRPFAPAIAKVATLPGFDQRSAQNVVAEIGADMDVFPSAQHLASWAGVCPGNNESAGKRKSGATTRGNRWLRTTLVQSAWAASRKKDCYFRAQYHRLAARRGKKRAIFAVAHSLLTVIYHMLKNGSNYKELGGDYFDKLNKNRLVPYMLRRFKDLGFRVTLEAA

SEQ ID NO: 377186 - protein, 372 aa, unidentified
MEERSKIHVGLDVHKDSISIAAAEPGRMPGRLIGKVTHDVNKLLKVLAKVGNADQLHIVYEAGPTGFGLQRALHSRGYLCEIIAPSQIPRRPGDRVKTDGRDCIQLAECSRAGQLSAVWIPDPEDEAIRDLSRAREDAVNSRVQARHQLKGFLLRHDVRYTGKTSWCGAYYRWLGTLNFGTGAAQTAFTEYWQAVTAADDRVERLTKALESSITGWRFEPVVGALQALRGVAAITAIGLVAEIGDLGRFAHPRKLMGYLGLTPSEHSSGERTSRGSITKTGNAHARRLLTEAAWNYRFKARIGKQAQIRQQALSEPIRRMAWTAQLRLTQRFAALNARGLQVNKACIAVARELAGFIWAIGMQAQREHGQAN

SEQ ID NO: 377187 - protein, 341 aa, unidentified
MKKNLFFIGLDIAKADFAASIYQTPGQPIVTKEAIPNDPKGFDLLLLWLKEHHIDKTNSHICMEATGVYSQAIAYYLLFQGFPVSVEPPLKVKRAFDPVGHKTDPVDSKQIAEYAYRFQDELTSWQPRDEILEKIRQLLSVREQFTKQKVALMNAIQAYSKQRVQVALIKKAHQETLNQLKKQIARIDKELANLIKQDPEIFQKANNLDSIPGYGMLLAAHLLVITENFTKIQQHKRLASFVGIVPYQHQSGTSVFKRAKIRHFGPGPSRKLLRLAAQSVATHDVTFRRYYLRKLAQGKAKALVLNNIANKLLKVACAMVQNNSRYIKDYRSIHPMYLKST

SEQ ID NO: 377188 - protein, 331 aa, unidentified
MNYSHFVGLDVGKKTFDASLMSADEKELSHKSFDNTPTGIQSLLDWIAGYHLSLSKLLFCAENMGSYVTELSVSSVSMGFSLALVCPLTIMKSIGLQRGKNDRIDAKRIANYAVLHYRKLELYKLPDKDLVRLRGWIIIRDNLVKQKVSSIKLLETFSWMAKLADVTESISFLEEQLKSIKERILEVEEDMEQLIAASTSLYTNYLLLRSIKGIGIINAIVLLCVTDNFQRFDNPRKFACYCGVAPFEHTSGISIRGKTQTSSLANKEVKVYLTRAAITAISWDPQMKAYYKRKIAEGKHKASVINAVRAKIIARSFAVIRRQTPFVTLAV

SEQ ID NO: 377189 - protein, 378 aa, unidentified
MNRIIKIGMDVHTTNYTLCIFEPSFEHDGTVHCITQVKPEVKNIIRVIETFKKKHENEELNIVCGYEAGCLGYSLYHELKEKGIECVILAPTTMKTEKGGRKLKNDYRDAKMIAECLAYGGYSAVHVPTELDNSVKEFIRMRDDIKENLKSIKQQIIAFLTRNGKQFEGKSFWTRKHIDWINTISFSEPLLQDTLKEYMIEYNHLCDRIEILDKQIEEISLKEEYVEKVQQLQCLIGIKTHTALSLIVETSDFNRFKKGNMYSAYLGLIPGDESSAGHENKLGITKAGNSHLRKLLVEAAQGYTRGKVGFKSKDLKSRQEKCSSEVVAYADRANERLRRKYYRMTLRGKRYNVAKTAIARELACFVWGIMTDHIDLCN

SEQ ID NO: 377190 - protein, 381 aa, unidentified
MSRSLVALDQDSTIIAVVELSQSSWLVAGVLPGIERQPRKKLEPSAERLLGLLHRWRDEAVRAGKTITRIALAFEAGRDGFWLARWLNARGVEAHVIHPSSVAVSREHRRAKTDRLDTELLKRAFLGWLRGERGHCSMARVPTIAEEDAKRPNRERECLVGERTRIVNRMKGALARLGIRNFKPTLRKAADRLATLHTPEGMPLPPNVLAELQRAMARLGFVVSQIREIEQARQKRLEQQPETGPHAMVRQLARVVGVGIETADMLVHEVLSRPMRDRKAVARYAGLTGSPDESGTKRREQGLARAGNARVRRGMIQLAWRFLLFQKDSALALWYRARTADSRVGTRKTMIVALARKLMIALWRFVTTGETLEGVVLRPAG

SEQ ID NO: 377191 - protein, 358 aa, unidentified
MAKQRISRLEAFVSGFEATQFRVGVDVHKKSYSLALLREDGGCFTWTGPARAETLLEPVRRFGLGIKAVVYEAGPTGFSLARRLEAAGLRVMVVAPSRVPRPVRAGAKCDRLDCIKLAEYADNRRARAIAVPTESEEAKRSLLRRRHALANGRRRCKQRIKAHLLYLGVSAPEGLDHWSQAAVSALRGLGIKPSARLTLESLLRELDFHNQELRQVEGQLLERLTSGAQGDRLGYLRTVPGVGFLTAASYMLEVFRPERFNNARQVASYLGLAPMVHHSGDRKPRGKITPVGQSRLRSLLIEASWVWKSHDSYAAKLYNRFLSRMGIAQKAIVAVARRLAIILWRLSIEQRSYRRQPV

SEQ ID NO: 377192 - protein, 345 aa, unidentified
MELHTIGIDLGKTVFHLVGLNLHGEVVVRKKFSRTQLLRFTANVHVGLIGMEACGGAHFLGRALREQRHEVRLIPAQYVKPYVKTNKSDYIDAEAIAEAVSRPTMRFVPIKTDDQLDLQSLHRVRERWVMRRTAVINQIRGLLLERGITLRKGRCHVGAALPRILEDAEAKLSGALRMLLAQLKLELDHLDIRIDEADALIKKTARENEACQRLVAIPGIGPVTATALIAAIGNGAAFRKGREFAAWMGVVPREHSTGGKQKLLGISKRGNSYLRRLFVQGARAVLQQRTKQSSGLSAWLAQLTSRMHRNVAAVALANKLARIAWAVLAKNEQYRPSVLADVAAA

SEQ ID NO: 377193 - protein, 358 aa, unidentified
MAEHPEASHVVGGVDTHKDLHVAAVVDHQDRALGTESFPTTRHGYRLMLAWMRSFGDLQRIGIECSGSYGAGLLRYMKAAGVEVLEVTAPDKLDRRRRGKNDDFDAESAAHAAFAERHTVTPRSRDGMVESLRVLRVCRKTAVQARRIALQMIQTTIVCAPDKLRDPLRQMTRMQLIRTLAALRPDLTAYREVEEAYRISLKSLARRYLELHDEIADLDDMIEAIVKDLAPELLGQTAIGLNSAAQLLLTAGDNPERLKSEASFAALCGVSPVPASSGKTVRHRLNRGGDRAANSAIHIIAIGRLRLDPRTQAYVAKRIAAGNSKLEAIRSLKRYIAREVFGIIMRRQKQINQTQIAA

SEQ ID NO: 377194 - protein, 342 aa, unidentified
MPQVAIIGVDLAKRLFQLHGAAADGSVVFRKKLTRERFLPFLASQPPCVVAMEACATAHGWGREIERVGHTVRLIPPIYVKPFVKRHKNDAADAEAIVEAASRPTMRFVAVKSEAQQARAMLFRTRDLLVRQRTQLINALRGHLAEHGVVAPRGPAHVKRLADAIANDEAGLPIAVRELGQLLLEQIAALDGKTGDLDKRLHEAAKREGTTKRLQTMPGVGPVTAIAVETFAPPMEVFRRGRDFAAWLGLVPIQRSTGGKPRLGKTSKMGQRDIRRLLITGAMSVVQAAGRSAPPENSWLARMLGRKPRMLVALALANKMARGIWAMLTKVENYRDPVTTGA

SEQ ID NO: 377195 - protein, 405 aa, unidentified
MAIIGMDIHRSFAQAAFLQDGRIKREQRVDLVHDRLVKFGKTLSVEDEVVIEATGNSAAVERVLRPFVKRVVIANPRMVRAIAYARVKTDKIDATILARLHAGGFLPEVWVADDHTQRRRRQTVERMGVLEQMVRTKGRIHAILHANLIPKYSRHLFGKAGKTWLAGQPLPDEEKAIVGRLVVELERNSDQLAKLDMTIIREALDDPRVVRLMTIPGIGPIVASTVLASIGDIARFATPEKLSCYFGLTPKVRQSGDRPARHGRISKQGNTHARKMLVEAAWSAKTAPGPLRAFFERVQRSRGAPAAAVATARKLAVMIWHVLTDGTEYAYARPAFTAMKLRKAALKGGAPREYGKAGPGRDYWIKEIREREADYVRRAEQAYERMVAAWKEKPPKAPAATAAPG

SEQ ID NO: 377196 - protein, 418 aa, unidentified
MKTLASFEFAAYIGIDWSDTKHDICIQPAGAVEREFECIAHQPEAIAQWAQSIRQRFSGPIAVALELAKGPLVSALQNYDFFVLFPVNPSMLAKYREAFKPSRAKDDPSDAELAVDLVLRHPERFRPLQPQSTEMRTLVHLVEKRRRLVEDRRRFSNRLISALKAYFPQAVEWFSHKETFVFCAFITRWPTLKQVKRARRSTLERFFREHNVRRPRIVETRIQAIKTAAALTEDPAVIEPYTLEALALAEQLRTTLELIKRFDDAIAELAPTLPDYAVFASLPGAGPVYTARLVAAFGEDRERFQSAAEIQRYSGIAPVTERSGKTSWVHWRWACPHFVRQTFVEWAEKTIYYSFWAGAYYRQQRLKGASHNTAVRALAFKWIRILYRCWQSRAPYNESLYLKALQRRGSNLVPQESA

SEQ ID NO: 377197 - protein, 407 aa, unidentified
MELIHERCAGLDVHKETVVASIRIAAGKKPKRETETFTTTTKGLLRLGDWLMEHHVTHAVMESTGVYWKPVWQVLESFVDLSLANASEVKNLPGRKSDVNDAEWLADLLAHGLLRRSFVPERPIEEMRELTRTRTQTVREVTRHAQRIDKLLQGANIKLRSVLSGVLTGSGKAILRAMIDGEKDPKKLADLAKGKARNKRVQLEEALDGFVTDHHRFLLRQHLDMVESLEAMVAAIEERIEEVMRPFGQAAERLETIPGVAKTSARVIIAEIGVDMRRFPTPGHLVSWAGLCPRMDESAGKRRSTRIRKGNPWLKTTLVQCALAAIRSPGYLRARYHRVRSRAGTQKAKIAVARAILVAVHGMLSNDQPYRDLGETFFEARDRDQIAKALTRRLTRLGFEVELRPAA

SEQ ID NO: 377198 - protein, 355 aa, unidentified
MNEAKYIGLDVHQATISVAVRDADGKLVMEAILETKAETILQFVRGLRGSLHVTFEEGTCAAWLYALLKPHVTQVLVCDPRKNALLKVGNKNDRIDSRKLAELLRGNLLSSVFHEDTGLRAVKELARSYLTMTKDLTRVMVRLKALYRSWAIPCATKQVYAPRHRAEWLAKIREASVHRRAELYYQQLDALRSLQQQVKKELLIEGRKHSATKLLRQIPSIGPIRAVLLLALIQTPHRFRTKRQLWSYCGLALETRTSAEYRVVHGQLQRSKKPVAIRGLNKNHNHDLKNLFKGAALRAAAVEKPFQEFYAALVAKGIKPEMARLTLARKIAAITLIVWKKGARFDAEQLKQQAA

SEQ ID NO: 377199 - protein, 312 aa, unidentified
MRNDKIYVGIDVGKTWLDMAVRGIDHVTRHRNESSGIEALVGIIDTIKPELIVVEASGGYEKELVETLLLKGEKVAVVNPTRVRALAKAMGVLAKTDEIDAQIIATYAYTIKPEAKAAQDDEELHLKALVTRREQLVNMRTSELNRLGTCHSSTKADIHEHLNWLDHQINILDEEITLLVKGLEKWNQQTKRLQSIPGVGYVTSITIAANMPELGQLNRQQIASLAGLAPFNRDSGAKQGKRRIFGGRQAVRRVLYMAALSASRHNPVIKQFYLHLCSKGKPFKVATTACMRKMLTIMNAMEKTGTLWRCTA

SEQ ID NO: 377200 - protein, 350 aa, unidentified
MIIIGVDFHPEFQQIAWVDKDTGEFQEKRLAHGEEAEKFYRTLAAAGQKVRVGMEASGHARWFERLLAELQIELRIGDAAEIRTKRVRKQKTDRQDARLILQLLLEDRFPQIWVPSWENRDLRQLLWHRHRMVQARTRIMNQLQAVALNEGLRCQKRLWRAHGREQLESFRLAPWASRRRRDLLELLDRLNPMIVELTQAIEQEVEKCPEARRLMTYPGVGPLTALAFVLILGDAERFQCGKQVASYLGLVPLEDSSGNRRRLGHITKQGSSMLRFLLVEAAQVTARSLPQWRSKYLHLMMRRGRKTAKVAMARRLAVHLYWMVRQGLDYQQWIKFGSHAGQLGHRHGVH

SEQ ID NO: 377201 - protein, 323 aa, unidentified
MNEIIPTCLGIDVAKAKLDCALLNGGKYRHKTVANTLEGYAVLVQWLAKQGVDQTHLCMEATGIYWENAAQALAEVGHLVSVVNPALVKAHAQSNGIRTKTDAVDARVLADFCRQKQPPAWLPPPASHRTLRALVMRHQALVEIQTQEKNRLESSREEVRDSLDAHLVWLAEELKRVEQAIAKTLADDPDLRTQRDLLDSIPGLGERSIATWLAFCAEPARFTNARQVAAFAGLNPKHHESGSSVRGKPRLSKIGHAFLRRALYMPALVTLYKTDWGKRFRERLVANGKPAKVIIGAMMRKLVHVAFGVLKSGKPFDPALHRT

SEQ ID NO: 377202 - protein, 340 aa, unidentified
MEKRYIGIDLHRNRFTCCLRLENERTYVTQWGLEKLARFVEKLRPTDEVAVEITSNTRLFYDAVAPHVARVVVVDTNQFRVISRSVKKTDPNDARLLSLYLSKGLLPEVRMKDKELAQLASLTQTRDTLVKQRSALKNKVNNILSARGLNLAKEALSSEKKLAEVLELPFEEIVRIELRVIVAQIRSLNQSIAELDQTIGEEGSKLEGYQSLSSIKGIGKITGAILLSVIGDVNDFPDEGRLASYFGIVPRVSNSNETERSGRIHKRGTKLGRTALVQSALIAANYSPYLKRFYEQVKARRGAGKAIIALARKFLGIIYRTLKNKWVFEDFPNFVLAEES

SEQ ID NO: 377203 - protein, 349 aa, unidentified
MDEAYDGRQVVGMDLHRRRSVLVRMTEDGRKLETVRITNSPAALRAVLARAGKNPRVVIEATYGWYWAVDVLEAAGAEVHLAHPLGVKAYSYRRVKNDERDASDLADLLRMGRLPEAWIAPQEIRELRELTRYRHQLVKARTSLKDQVHGVLAKLGIPVTHSDIFGVHGQAWLDELKLPQPYAGKVASLRQLAGGLSAEIGLLEQVLGDLLAGHEGYRAIQQLPGIGPVLAAVIVAEIGDIRRFPGPGQLASWAGLTPRHYESDTKVIRGHVTKQGSRMLRWAVTEAIQRQPAGSRPREVKDGIIARRGKEAKNIAKIAAARELLTLVYYGMRDGRVRRLDAPRTQPAA

SEQ ID NO: 377204 - protein, 346 aa, unidentified
MEHYVGLDVSLKLTAICVVDQAGSVMREGVVDSDPETIAEFVTSNAPSVVRIGLETGPTATWLWTELKQLGLPVICIDARHAKAVLKMQINKSDRNDAAGIARIMQTGWFKEVRVKDLDSHSVRALLASRALLVKIKRDLENQVRGLLKNLGLVIGRAKLNVFAVRAEELIEGRPELMAAVRPLLDARNAIEQQVDDLDHKVMRMARNNAQVRRFMTAPGVGPITALCFLATIDDPTRFKRSRSVGAYAGLTTRRYASGEIDWTGRISKCGDKMLRSYLYEAANVLLTRVAKWSMLKAWGVRLAKRSGLRKAKVAVARKLAVILHRMWIEGTEFKWSSKEAANQPA

SEQ ID NO: 377205 - protein, 449 aa, unidentified
MKIVNPCAAGIDIGSKTHWVSVDQIPGNVREFGVYTRDHQRLIEHLKSHQITTVAMESTGSYWQTLFHALQKAGFEVVLVQGSQTKNLKGKKTDILDCMWIQKLHTLGLLSSSFLLSDYLQTLRTYYSHREHLVEQMAKYVNKMQKALRLMNIRLDVAIRDLTGKSGRAIVDAILDGHRDPDYLASLAHFRVKKSKQEIAAALHGNWRDDLLFELRSCLKFYDAYKKEIVVCDQQIQAILLNFFPEAKLPTLENISPDKPNHKQINRNSPSFNVRQLAFAHLKTDLFQIPGVSHSTVLCLLCNMGNDIKRFSSAKRFASWLRLVPNNKLSGGRIISSKTPKGKNAIAIALRQAANSIGNQKEHPLTPFFKRIAYRKGRNAAVTATARKLAVIIWNMITKTQSYLHPTTELLVEKRKNAQVKNIKMRLFRLNLTDEEMAILFEKTSFPST

SEQ ID NO: 377206 - protein, 371 aa, unidentified
MNTVIQIGIDVHKDSYSLCSYSFATKQSFGQTRIASNNALVIKYVQKLLAGQSGTKVLCGYEAGPTGFGLYRDLMKADIACVIMAPTTLPKASGNRVKNDRLDAQALAQHLAWGTYSAVCVPTAEDEAVKNFTRMRNARKEALKKAKQNLLSFLLRTGRTFSEGKNYWTGLHYAWLKGQKFVDPLDQETFSEYLQEVYDQQDKVDRYDQRAEEIAQWDAYREKVSRLCCFRGIDTHTALSIVSEIGDFSRFANAQQFSSFLGLVPSEDSSGQREKRGGITKAGNTRCRLLMVESANSTLRSSPYGQKSKRLMARQKGNAAEVIAYADKANRRLHRVYNHLSIRGVNKNKAVVAVARELSCFIWGMMNDRIG

SEQ ID NO: 377207 - protein, 309 aa, unidentified
MENTPNLICVDVAKSELVLFDGKKTWAIPNEKEAINSVLKEFPKHRIVCEPTSIYHLELATLAFKNRNEVSLVNPKEIKNYRDCRAFRAKTDRIDACAIYEFSIRHYEALRLWKPPAKQLEKLYKLISQRSCVVRNRVTLRQVFGQDQAIKPVISETTTLVEVLESQISEIAKSYEDYLRFSPMPGVGPLVCATLVYLFNRYEFADDDAAVAFVGIDLRVSDSGKYKGSRRLSKRGDPLIRNILIQGGFGLMISKAASQAKRKFDAAGRHRTEQGVIAARKILRTAYVLHNTKTDFDLSKWHWMVDNET

SEQ ID NO: 377208 - protein, 409 aa, unidentified
MNPLFVGIDVGSRDNAVYLMLPDGSKHNSFSVQNNLGGAQTLSKRVVSALAEKRLNDVLLGLEATSVYGDNLVYFLREDGALARFNRKIHVLNPKQVKKFKDAYADLPKNDAVDAFVIADNLRFGRISTAVYMDDYRYKALQNLTRARFFAVQSLTREKQRFMNYLFMKCSGLAQEKTFSNNYGTAAMALFESFDTPDDIANMDVDELAAFIVEKGRNRFPDPEKVVKAVQSAARGSYRLPKTVNDSVNQVLAVSISSIRAMQSQIKVLDKEIERQCENIPNTLISVPGIGRVYSAGILAEIGDINRFPNHPALAKYAGLVWTQHQSGTFESQHTRLIQSGNRYLKYYLCEAALSLVRCDTEFRRYYDLKYKEVNKYQHKRALALTARKLVRLVFRLLKDNRLFIPSAR

SEQ ID NO: 377209 - protein, 348 aa, unidentified
MNLSIKEQEKKYQPHIYQSYVGIDVSKSKLDVTILITPSEKHLFHFVVSNDNKGINQLLNQLEKQKIDKQTTLFSFEDTGVYSLPLGCFLSEQMLDYWMIPAIEIKRSKGISRGKTDKADSKDIAFYSLTHLHKLRLSQIPEKAILELKLLFTEREKLLKATRLMESTQEGIGYMPKEVLVKTLKLNKNIVKQLKTAITKIDSTIKQIIDENEAVKKQFELIQSQPGIGPQTALYLILVTKSFQSFENWRQLACYSGVAPFEYSSGSSIRGRTKVSHLADKKLKTLLNLCALNAKKWDPQLKEYFEKKVAEGKPKMLVLNNLRAKLLARVFAIINRGTPYVNLQKFAA

SEQ ID NO: 377210 - protein, 452 aa, unidentified
MRLLNGKQGLRRSQFAKELRGADLEKVLIVSIDVSKVLQKSMILNYFGEVIQTPFSFMVSQGGFRYLFDKIETAQKLCQAEKVFVGIEATGHYYEDIVRILTDAGYSVHIINPASTHEERKQHLTYTKTDDIDLYLIAEALIGNKATNAKLPTGHYKQLQHLTRARRNEVNKRSRIKVEIRAIHDHIWREYQGYSVLVDGKVKTKNIFSDFWGKASLHLLVNFPHASQLLELGELGLRKLSKEYNLKLRNTTIEKLLFAASESVSKPIEELSSELFILKQKLKDYQWHTENIKAYEQEIERIFIDTDGLLLLTVPGIGLVTAAEVYCEMGDLSHYTSASQLIKKAGTNPTIKQSGPEKGYYGQISKQGNANLRRAVFNAGKTLSTHNEALRPFYKRLKENGKKTRQAYIAMGNKFLKIAFAMLKNQQPFQWNNPTYNYKEEVIKKLTLPIAA

SEQ ID NO: 377211 - protein, 355 aa, unidentified
MDSKKYIGMDVHKESISIAVMNGAGKIGMECVIETKASTILQFIDGLRGDLQVTFEEGTSAAWLYDLLKPHVTKLLVCDPRKNASMREGNQSDKIDARGLAELLRLNHLSPVYHGEHGLRSLKELVRSYLTITKDLGRVMTRVKAIYRSWAIPCTGKQVYAARHRAEWLAKIGELGVRRRAEFYYQQLDALRTVRQEVRRELLAEAKKHQAWKRLCQIPSIGPIRAAVLLGILQTPHRFRTNRQLWSYSGFGIETHSSADYRSVDGQLRRAKKQSSIRGLNRNCNHDLKNLFKSAAIVASSKPGPFQEFYTTLLTKGIRPEMARLTLARKIATIVLIMWKRGACFDAQHLKPQAA

SEQ ID NO: 377212 - protein, 409 aa, unidentified
MQRMKGKRSASGIVGCAPRCAEPHAETPEGVLPQTFRGGRPVSKTITSFVGLDVHKDSTAIAEAEAGRESPRFIGTVGADLGQLLKALRSLGKPETMLVVYEAGPCGYGLARQLRSRGYSCEVVAAGKIARRPNERIKTDRRDALTLARLARSGDLVKVRVPDERDEAMRDLSRAREDAVKARLKARQQLKALLLRHGHRYGGKSSWTLAHERYLATVGFAHPAQDIAFAEYRQAVREGQERVERVTQALRTQTEQWRMKPLVAALSSLRGIDFVAAVTLAAEIGDFSRFAHPCELMGFLGLVPSEYSTGNTRRQGDITKTGNSHARRVLVEAAWNYRFPARISRILQIRQEGQPQAVREIAWRAQLRLAHRYRRLSTRKLHPNKICVAIARELAGFLWDIARQVKVAA

SEQ ID NO: 377213 - protein, 365 aa, unidentified
MIDPINHNPRFFMTDTPSIAWLGLDAHSRNCVLAQLDDQGTERQWWRFPTHPQQLLAHVQAIPAADKRLMLEESNLARWISQLLKPLVQQIVVCDARRNRLISQDAHKHDRRDAFALARLLRLGEFKPVWQPTDDQRVLFKRAAQAYENSVLRQTRLKLQLKSLFQHWGLFPAGATVFAQADRATWLKQLPYDALRSQARLLYELLDQALAGQSQARRLLCQTGRAFPEVQRLRSVPGIGLVGAHLFVAYVQDPRRFRKFSHLTRYCRLAIRDRTSDDKPLGFEQLDRQGNGTLKAISYRAFLQAAKRRSGPVWDFYQASLRHTGSTTHARLNTQRKILLVLWTLWRNGENFDPNRFSPSQPIDV

SEQ ID NO: 377214 - protein, 351 aa, unidentified
MKTKNTAQPKLFIGIDMHKASWSIRLATDLFQGKRMTIPADPENLRNFVEKNFPDHEVHCAYEAGCCGYSAHRAFQGFGWHSLVFNPSDISRTGKSQFQKSDQIDADLICRELRDNRLVGITVPDMERDHLRCLFRRRNDLVKDLRQIKSKIKMQLLYLGIKPPPEFDNANWTKGFRRWIDELSFENETVKAAMNSRKAQFDFIEASVREVSNELRKYCRQHYKKDYRLLRSVPGIGGIVACAILSELGDLRRFNNFRQLAAYVGLMPSLYQTGDNVRSLGINPRGNGIIRSYFVEASWQALRFDPAMQAYYRTHAGRNSKTILVKVARKLLSRTMAVIKTQTPYQVGVIA

SEQ ID NO: 377215 - protein, 347 aa, unidentified
MDYYAGIDVSLEESSVCVVDSDGKIVREAKVLSEPDALIAWFGGLGVGLSRIGLEAGPLSQWLYAAMKEAGLAVELLETRHVRDAFKAMPVKTDRKDARGIAQLMRLGWFRPVHCKSMSAQEVRALLTARKLVQSKLLDIEMSLRGILRGFGLKVGATKPNRFGVRVEELVAGHATLETVAKALLAAHEVLLRELRGFEKRMRAMARDDERVRLLMSTPGVGAIVGLTYVAAIDDPGRFKSSKDVGPHFGLTPKKYQSGEKDISGRISKIGDASVRAALYEAANVILTRPIKGASSLKSWATKLAGRAGMRKAKVALARKLGVILHRMWVDGKPFSAEPVGALKPAA

SEQ ID NO: 377216 - protein, 344 aa, unidentified
MDHFAGLDVSVKETSICIVDDTGRIVREVKVASEPEALLKVLGNPAYRFKRIGLEAGPLSQWLFSALAEAELPVVCVETRHMQAVLKAQINKTDRNDARGIAQMMRVGLYRPVHVKTLRSQKLRMLLTHRKLLQSKAIAIENDLRATLRNFGLKVGMVGTVKFEARIKELVENVPDLVVLVEPLLIVRRALREQIGILHRRLLDIVRDDDVCRRLMTVPGVGPVVALTYRATVDVPAPFRKSKAVGAVFGLTCSKYQSGGIDRSGRISRCGDEMMRVMLYEAAQSMMYSKKWSWLKAWAMQIARRRGMKKAIVALARRLAVIMHRIWVDGTEFRWTREQAAAAA

SEQ ID NO: 377217 - protein, 345 aa, unidentified
MELHTIGIDLGKTVFHLVGLNLRGEVVVRKKFSRTQLLRFTANVHVGLIGMEACGGAHFLGRALREQRHEVRLIPAQYVKPYVKTNKSDYIDAEAIAEAVARPTMRFVPIKTDDQLDLQSLHRVRERWVMRRTAVINQIRSLLLERGITLRKGRRYVDAALPLILEDADAKLSGAARMLLAQLKLDLDQLAVRIEEADAVIGKTAHENEACRRLVAIPGIGPVTATALIATIGNGGAFHKGRESAAWLGIVPREHSTGGQQKLLGISKRGNSYLRRLFVQGARAVMQQRTKQSFGLSAWLAQLTARTHRNVAAVALANKLARIAWAVLAKNEQYRPQVLADVAAA

SEQ ID NO: 377218 - protein, 348 aa, unidentified
MKNLFIGIDFSKEKIDVTMISAIGLTEQSARVSSEFKATPCGYRQFLKWVEEHSCGIDVSSWLFCGENTGDYSKPLCNYLYGKGYDMWLENAKCIKDASGLRRLKTDRADSAMIAEYAMRNHDRALFYRPLSNSLSQLRELFLYRHMIVRHKCSFQVRKEEKRMTMEKSPSRTLISNTGKHFITEFDKAIAKLDKKIKEIIESDEELKHTYTIVTSVPGIGTQNAVCLMVYTNNFDKFDFDARKIACYYGVAPFGKESGTSVHSTPRTHYMANRMIKSMLTQSALIAIRFCPHLKQYFTRLISKGKKMQVALNNVKNKLLHMVTAMVKNDMLYSPDYINACQRIANTL

SEQ ID NO: 377219 - protein, 345 aa, unidentified
MQGQKSPERSAQPGVYVGVDVCKDWLDVYLHPIGQAFRVANTPEGLKALKRRLAELPVELIVMEATGKFHRQAHRTLHAAGFAVAVVNPLRARLFAEAVGQLAKTDRLDARVLALMGQALEPSAIAPAPEAIEALQELARARSAAKANQTALSNQRGASQTAFLKAELGRRLKTLAGHIERLDAEIERRLGADPALKRRYDILITIPGVGPVAALALVIGLPELGACSGKAAALLAGLAPLACDSGEKAGQRHIKGGRAFVRTSLYLAAIAAARFNPQLSDDYKRLRDAGKKAKVAITAIMRKLVVLANVLIKEDRPWKQSTLDCQHRCSPFGSGVLRGEGPSRL

SEQ ID NO: 377220 - protein, 378 aa, unidentified
MLSARPARVPPPPCPGEETTITSIPHLAAPQLTIGVDTHLDLHVAHALDQLGRRMGTVSIPTTPAGYRHLLAWARGLGEPAAWGIEGTGCYGAALARFLAAQGQVVVEVNRPDRATRRRRGKSDPLDAEAAARAVQAGQAAVTPKAGTGQVEMIRSLRVARASAIKARTQSVNVLKALLVTAPAELREQLRGRSAAALARAAVGLQPGPVTSPLAAAKLALSTLARRYQALTAEIDTLTEQLDQLIAKAAPNLVALFGVGTDSAGALLVAAGDNPQRLSSEAALAMLCGAGPVEASSGKTTRHRLNRGGDRQANAALYRIVVVRLRWDQPTKDYMARRLAEGKTKKEVIRCLKRYVAREMFAVLKQMGQDHHALTPAA

SEQ ID NO: 377221 - protein, 399 aa, unidentified
MIGNHESIDVFVGLDVGKGEHHAIAVDRAGKKLFDKALPNDEARLREILDSLNKHGTILLVVDQPATIGALPVAVAQAAGVMVGYLPGLAMRRIADLHPGEAKTDARDAFIIAEAARTMPHTLRSIQIADEQLAELTMLCGFDDDLAKQATATSNRIRGLLTQIHPALERVLGPRLDHPAVLDLLRTWPTPEALRHAGRRRIETRLTKLAPRMGKRLAGEIIEALDQQTVTVVGTNAATIVLPQLARMLADIRESRDTVFTQVEALVEAHPLHPVLTSLPAVGVRTAARILTEIVGKDFASAGHLASYAGLAPVTWRSGSSIRGDHPSRKGNKILKRALFLSAFAALKDPLSRAYYDRKRTEGKRHNQALIALARRRCDTLYAMLRDGTFYEPRQPSAA

SEQ ID NO: 377222 - protein, 416 aa, unidentified
MTFKVVRFICGGMDVHKNLIVATIGTTDRQTLITEYIQQSFSTFYSDLIRLKEWFISHDCYDVCMESTGKYWIPIYNVLETELNICLTHPKYVKAIKGKKTDKRDSKWICDLYKCDLVKHSFIPKKEIREMREIARYRCKLVYMRSSARNRYQNCLTVSNISLASAVSDPFGKTATNIMKELMQSEVIEDDKILKLIHKNCKDKDKILDSLQGYHIESDQRFKMDTVMNHIEYLDKQIQACEAELIKRAYPLRDYFQHITHIKGISALSAILIVSEIGTDMNQFESDKQLVNWAGLSPANNESANKKKSVRISKAGQYLKPLLVQCALSSIKDKNSYFGIKYCRIKKRRGHKKAIIAIARMMLVCIYHMILTGEEFNPCDYESLTNPKPKKEPIMTVESALQFLKDSNFDFSSIQL

SEQ ID NO: 377223 - protein, 425 aa, unidentified
MSASDSLASPVEVSDFAYVVGVDIGSQQAVYCVCQPDKSQVVKPTEVANSRAGFEALDHRLRQLAVPPQRMLIGLEATGRYSENLYQFLQEQGYRLCLLHPRQTHQFAQQRGLRAKTDRLDATTIARLLLSGEARPGYVPDELISTYRELERLHSQLTDDSARYQNEIQALLVVLFPEFVQVFADPCRPTALGVLKRYPGAQAILDAGVEALTSTLRELAPRHYGRPTAQELVRLASQSVATPLASSGRALSLKVLCDQLEHTLTNLAQIAHELDQLLDRDHGASGLKSTPEFGRKTVAVLRAELGDVTRFQRVDQVVAYVGLDLQVRQSGKWKGQVKLSKRGSGRVRRVLYMAALRSLALPASAFGAYYRRLVARGLKARDALTAVMRKMLIVAYHLLRSNETYDPTKVCAVAGPPPHTPSSGS

SEQ ID NO: 377224 - protein, 344 aa, unidentified
MTYYTGLDVSLRSVSICVVNDKGEVCLEAKVAAEIDAIVDRLRRFSSDVKSVGFEAGTLTQYLTYGLQAAGFEVICLEARQVSVTLAAMRNKTDRNDARGLAQILRTGWYSRVHVKSLHSHQVRALLASRKAILKKCIDLENELRGLLKVFGIRLPSRVGHGSFDAELRDTVSSDEMLACALVPLLDARTVLYKTYLKLDNTVKGLVRNDPICRRLMSIPGVGPVTALTFKAAVDDPSRFKSSRTVAAHFGLTPRRFQSGELDYPGHISRAGDADVRSALYVAAHSLLTRNAQWSILKAWGVALAKIRGHRRAVVAVARKLAVILHRMWIDGSEFRWSPAPASA

SEQ ID NO: 377225 - protein, 407 aa, unidentified
MDQRVYVGVDLAKDFHQVMAVGQDHRVLAPTFRIRRGRGGVEEMLERLRFLVRNENDLVFTIEATSDYWWELAWELGDQGCTVYLAHPKKAHDLRKFYALHTKTDVTDAEALARMPLVDTGLRSLWRPSAATQSLQRLCRLRWKSRCRIADLKRRLSHISDIVVPGLGQVMPIRYSKSARVFLRRYLAPEKARRLGKKRLGAVLGKAAWGKFSDEKLDRLWECVLNAPRLGLQPDDLLLEVGLQLDEIEALEKQITQLDGRIAELYGEADPRQCLLQQPGLGEFLAAAITAVIGDVRRFPSAKHLISYSGLAPRVKASGGQAKSRQGITKHGSPYLRAWAYIAAENARQYDPELKAYYKRLRKNGKHYLTAMCATAARLLEKVYVMLAEQAAEAEKQESPTQSICTG

SEQ ID NO: 377226 - protein, 412 aa, unidentified
MLFIGDDWAEGHHDVVVQDEAGKTLARRRLPEGVDGLARFHEVVASCLGEDGEPDAAQVMVVIETDRGPWVNALAAAGYRVFPVNPKQAARHKETVAVSGKKDDFFDAAGLADMGRTRRHQIRELAADSDVAEAVKIAARAHQKLVWERTRHVLRMRSALREYFPAALEAYADLTLTGADALELLGKAPEPASAARLSVTQITAALRRARRRGDLAQRARDIQAALRVPHLAQPAVIAGAYGASVQAGAAMITALNEQVKIMEARVSELFHRHPDAGIYLSQPGIGDITGARMLGEFGDAPGRYASAKARKNYAGTSPLTIQSGKKKTVHARYIRNRHLIDALHTQAFAALTASPGARAYYDELRAREIGHQAALRRVASRLTGVLHGCVTTGREYDEATAWSHRAAPVQAA

SEQ ID NO: 377227 - protein, 480 aa, unidentified
MRPHIPLMEDAMDKNNKQKRKNKKHRKVNTSHLEQLNINAAGIDIGAEFHYVAVPNGRDPEGQDVRHFSTFTADLHQLADWLRQCNIDTVAMESTGIYWIPVFEILDSQGFDVRLVNPRNVKNAPGRKTDVLDCQWIQQLHTYGLLQSAFRPEDRICELRAYLRQRAMLVSYASHHIQHMQKALEQMNVKLTQVISDITGVTGMKIIRAMISGERNPVKLASMRDARCNNSETIIAKALEGNWRSEHVFALQQAVELYDFYEKQIIECESRIQDHLESFDDRSNGTPLEKPRRKSRGSSNQFHFDARRYLHRMTGVDVTRIEGIEAPTALTIIGEIGIDMSPWPSEKHFASWLGLCPGSKITGGKVLSSKTKPSANRAAYAFRLAAYSLQRSKSAIGAFLRRKKAQKGAPKAITATAHKIARIFYNMLKYGTEYVDLGQEYYEQRYQDRVIANLKRKAKQFGFELVNIKEHKLLTGLPAN

SEQ ID NO: 377228 - protein, 369 aa, unidentified
MAEPITYVGLDVHKDTIAVALAEAGLRGEVREHGKIPNTPTALKALTVKLASARRELRFCYEAGPCGYGIQRQLTGMGHECAVIAPSLIPRKSGLRIKTDRRDAINLAKLHRAGELTPVWVPDQAHETIRDLVRARQAAVRTLRQARQQLSGFLLRHGRHYHRPAWTQLHRRWLASLKFDQAVHHIVLEDCIAAVEAAMARRDRLEAHIEAVLPEWSLAPVVEALQALRGVRLVAAATLVAELGDITRFTNPRQLMAYLGLVPSEHSSGRTRRQGGITKAGNGAARRMLIEAAWSYRFPARISREQLLRQERQAKPIRDIAWKAQERLCRRYRKLARAGKQPTVITAAIARELAGFIWAIAKQVQPMAT

SEQ ID NO: 377229 - protein, 354 aa, unidentified
MMTSTGADVVGGVDTHGRTHHAAAIDCAGRLLGDAEFPASAVGYRALLAWLVGFGRLVKVGVEGTGTYGAGLARHLAAQGIEVVEVDRPDRRTRRRQGKSDPIDAIAAARAVLAGTARGAPKTRTGPVEAIRALRVARRGAVKARTAALNQLHGLVVSAPELLRAELGGLTAAELVPRCAGFRIDPALLLEPSTGTKAALRAISRRVQALDEEIALADARLRPAVVATAPRTAAIFGAGPEVAGQLLVSAANSPDRLRSDAALAHLAGISPLPASSGRIDRHRLNRGGDRAANSAVHRIVLVRMRHHQPTRAYVARRTTQGLSKREIMRCLKRYVIREVHTALLADFENLTQAA

SEQ ID NO: 377230 - protein, 349 aa, unidentified
MNMVGGLDLHRRQITYDVLDVDSGEIWRGRLWQPDRSRFRYWLEHEVSARAQGGSVALAVEGCTGWRYVVEEISAVGFAPFLAEPADTQAARGRKHRAKTDRTDAQLLRELLQAGELPESWIPPDDVLEWRERVRLYKSLVDQRTLWCQRIHAVLYHHGVTIPEGAIRTEKTRSMLADGNLRISPAGRERIDVGYKMIDAADREALPLKHALQHFGTRQPACRALVDAQYGIGGLLAVVLWTELGDCRRFSRSEQVVRHSGLDVTVDSSDRRRAGGHLSRQGPETLRWALYEAAKNSSHGRSPDHGYYAKVKERHDGKIAAISVARQFARRSYHVLRAVDPDEVYAIPA

SEQ ID NO: 377231 - protein, 352 aa, unidentified
MRDAPDTPRTSSQRTSASETSASSRALASRRTLGIDVGKTGLELALVDTEGLVAKASVSNDPSGHESLLSWLEDRGAAPETTGVCLEASGGFEEEVARLLHEEGYAVSVVNPRRIKGYADSQLRRSKTDSADAALIARFGQREDPRLWTPLSASESRLRELTRARQTLKKEKTRTRNRLDETSEEAVREAYQDLLDEIDKKIEALENEIEEHVGEKEDLGEQCSLLGTIPGVGLQTAAIVVSELRSPDRFESARQAAAYAGLVPSHFQSGTSVRGRPRMSKVGNARLRSAMYFPAMTALRCNAAIKAFGDRLKERGKEKMVVIGAAMRKLLHICYGVLKSGRPFDASLHPGV

SEQ ID NO: 377232 - protein, 305 aa, unidentified
MDNSLYFVGADIALKKFDVAIRLDGNRYKHKVFANTPEGFTAFHAWLQGFGSHFHILMEATNVYHEDLADYLLVQGLTVSVINPRCMPNFAKSTNMRSKTDKVDARLLADYAYCNAARLRKYAPLATNYRTLKRLMRQLTHLKKIIAKEQVRIQMMMDALCVEISQEIIAGTKALAKELEKKIKELVKEDKVLSRNAQLLQSIPAVGWMSAMYLLSHLGDDSRFRNSKAAATYMGLTPIVKQSGDSLHIVSGISKMGPRDIRDVLYAPAMSYAFGPWKERVVCAVRTAADGERQGAERGYRRVDA

SEQ ID NO: 377233 - protein, 389 aa, unidentified
MTYFVGIDIAKFEHVASILDSSSGELIVNSLLFDNNIKGFNLLLSNLSMLNKEDVVIGFESTAHYHLPLFNFLNENNWKCVLVNPIQISRFRKISIRDTKNDNIDSRVIANFLLLEHKHLLEEEFYNNELKELCLQRHFLIESSTRLKIKLTSYLDRVFPELQTTIPKGTLHTMGLRAILKKFPTAKLISDVRIDHLVNIAKKASKGRYKESMVIKIKEAAKSSIGFNSIGLALKIKQSIESLESIERQIDEVESIINSHHTIINSPLHQIKGINSIEIAYIISAIISINRFSSDKKLIAFAGLDPKVRQSGTWEAKSTRMSKRGNRLLRYALIWTANNMRKYPSKMKDYYNKKRSENKSHYNALGHCAAKLCRYIFFILNNPNVEFIN

SEQ ID NO: 377234 - protein, 378 aa, unidentified
MHKDSVYLCILRENGEKIERVYGVLTPQLDSMRDFMAENEVSEVAMESTSVYWIPIWRVLVDSFELKLVNPYFIKQLPGRKSDVKDAQWIAECVMKELIRGSFIPPPLIQQLRLYDRRIFELNAELVRKYSKIDAILQRCNIRLSNYVSNTDCKSYKNVVKRISEGVTSPQELLMLVHKRIINKHGEDTILAALTGVVSEAEIDMLAQYVAESALLEDNKNKCIEKMREICNREFEEQMKNLQTIPGVSERSALTVLAEIGPDVNAFPSAKHLVSWCGFNPRNDESNKKIKSNKITHGNRFIRIASVQCAWAASRTKDCYFSKFYAFHTQVRKKFKLKVVVAVARKILVCIWHILKFNVSYKDFEPQKSVAKDCTQLA

SEQ ID NO: 377235 - protein, 407 aa, unidentified
MDVVHPKCAGLDVHQQTVVACARVGSGKTVTHAVRTFGSTTPELLALSDWLATHGCTHVAMESTGVYWKPVWHVLDGHFELVLANAMHIRNIPGRKSDVNDATWIADLLAHGLIRSSFVPPEPIQELRDLTRTRKQLVREIAQHTLRIQKTLETANIKLTAVLADITGVSGRAILQALVAGERDPERLATLANERVKASRADLVAALHGRVTGHHRFMLHLHLTQIAALEAAVREVEARLGDALAPFRAALDRLITMPGVSETVARVIVAEIGFNMTRFPTAGHLVSWAGLCPRLHESAGKRLSNRTRSSNPWLKTTLVQAAWAATRKKDGYFRAQFLRLKSRRGPKKAIIAVTASMLTAAYHMLKHGVDYRDLGANHFDRRDKAKLAKRLIARLQDLGITVEVRAA

SEQ ID NO: 377236 - protein, 477 aa, unidentified
MNKKQGDNLQPPKAKSKRRRRNKGMCLEDRPVLEPNAAGVDVGAREMFVAVPPGRDENPVRVFATFTADLERLTDWLEQCGVTTVALESTGVYWIPLFEILEQRGIRPCLVNARHMKNVPGRRTDWHECQWLQFLHSVGLLRAAFRPGQDVCAVRTILRHRNELVAAASQHVQHMHKALTQMNLQIHHVISDITGLTGRAIVDAILAGQRDGAELAKLRDPRIKADTETIRKSLEGNWRPEHLFTLGQSRDLYRIYQQQIVNCDLEIEKMLQGFAPRIDPGERPLPPDRKRNRAGSKRRKKNGHPHPEFDLRTEAYKLFGVDVSQIPGLEENALPLFSEVGRDMSRWPSAGHFVSWLALCPDNDISGGKLLWRGARRVKNRAGQLFRMAAYALHRSLTPLGNYLRRMKAKLGPEAATMATAHKIAVIFYTMIKNQVEYNETIWDARDAQREKKLQVKLKRQAKQLGYELVPIEPQAA

SEQ ID NO: 377237 - protein, 394 aa, unidentified
MIAQYIGIDLHKQFAMVAAVNKEQESLLPPVRVEMDRLPAWCEKHIQPQDAVLLEANTNSWPVVDMLRQHTKQVRVANTYKTKLIAEAHIKNDKVDASSLAKLLAANFVCDVWVPDETVRDQRALASYKMTLQKQSTQTKNRIHGLVRRHNLRCPETALFTTAGFAWLDSLSLPFADALQLRQLRDQLALLQQQLDETDKAIARQASHDPRIPHLMQVTGIGYFTAFAALAGIGDLSRFPTPGKLTAYAGLVPRQHQSGSRSYHGHITKAGNAMLRWVMCEAAQTAIRWDDHWKNVYERIARRRGSSIAIVAVARKLLVTIWHMLHDQTIYFYLRPQTYVTKLQEWAYRIGRDHLPAKTAKAFVLQHLHSLELGVLADSLVHDPRNSRLRVPIT

SEQ ID NO: 377238 - protein, 311 aa, unidentified
MGKRFVGIDVSQDHLDVYVHPLGEGWRLPNTGQGRAELAPRLAEHEPQLVVLEASGGLQRSVAEALREAKVPVAVMNPRQVRDFAKALGYLAKTDVLDAEVLARFAAAVQPEPRSPANERTQRLAELVRRRRQLVAMATAEKNRLRAASPQVRPGVERHLEWLKSEIAALDEEIEALKGGDWAERDRLLRSVPGVGPVLSATLLGCLPELGSLSGKKIAALVGVAPFNRDSGKKRGKRRVWGGRGQVRAVLYMATLAATRSNPVIRGFYLRLVEAGKPEKVALTACMRKLIVILNAMVRDERPWQPQPATP

SEQ ID NO: 377239 - protein, 383 aa, unidentified
MLNLTDTPAANDYATIYVAFELSKATWKLGVVVPGSPKTSYFNVAGGDSAALSELLAKWRAKATATGKPVRIMSCYEAGYDGHWLHRWLTDRGVTNYEIDPASIEVNRRARRAKTDRIDVDQLMRTLAAHVRGEPRVCSVVRVPSHEDEDRRRVSRERKRLQNERTQHSNRIIGLLHAQGIRDVQPLKRGLLASLDQLRTGDGRALLAKLKAEIVREHERLCLVNKQLSELEAASQAEVKAAASGSAGAQIKELARLRGIGLRSGRDLVNEVFYRSFNNGRQVGSFLGTVNSPYNSGNSKRDQGISKAGNKRARALAIQLAWLWLKHQPQSELSRWFHRRVGELKGRIRRINIVALARKLMIALWRYVTTGVVPAGAVLGRGI

SEQ ID NO: 377240 - protein, 425 aa, unidentified
MKNNLISTLFVGIDVSSKTNVLCALDFKGNKLLNLKALNNQPGAESILESILKCLDSNSLKYVVIALESTSFYSTHIANYLSSNEILLAYKPFVYCLNPKTVANYRKSFVDMDKTDPLDAYIIADFARCGRITSAPWRGSQFLALQRLTRHRLHLVESITREKAYMVSNIYLKFSELATLDKGEKPFSDTYGATSAAVLTEFLSLDDITYSPIEDLVAFVRDKGKNRFSNPLKTAKLLQKAARDSYRLDRMLYEPLNVSIASSFNVIKALEDEIKVIDKSIDKAIKGINTTEYQSLTSIPGIGSVLASGILAEIGTITSFRSHDALAKYAGLTWRVNQSGNYSSDNTRMTKTGNKYLRYYLIEAANSVKNHLPEYKEFYQKKYSEVTTHQHKRALALTSRKLVRLIFSLLTKNQIYSKDKVGEIQ

SEQ ID NO: 377241 - protein, 345 aa, unidentified
MYYCGIDIAMKSSYIYITDNQGHKKTSGQIPTTADVFRQRLKPYVQAGLSVAIEAGNQTAWIHDLLVDIGAKVTVVNPAKVKLIAESRRKTDKVDAKVLCELLRLDGLPHPVHVPDKKTRSLRGLLVARRQLVSARTKLCNVVRGMLRQEGIQLPARYLTSFVGWQKLMGRLYAHEHIGLVLDAYYQSFVSLSRSIQALDKQLAKRERQDARTARLKTMPKVGRIASLTLLAAVDEVDRFGTSRKLVSYSGLCPTVRSSGERTEYGSISREGRSELRAVWVQIAHLVVRDTSRSTARLRQWYSKVASHRGKRTAIVALARKLLTIAYRILKDRTVYCSSLVGKAA

SEQ ID NO: 377242 - protein, 341 aa, unidentified
MEEYIGLDVSMKETAVSIRRAGERIWRGKCASDPRIIAELIRKRAPAVKRVVFETGPLSIWFYHSLRTEGLPAICIDARHAKAALDMATNKTDANDADGLAQLAEVGFFREVRVKGFDSMLTRTLVAARTRLVRITTELSNQIRGVMKTFGLLVPAGKGSIFEKNVRSLLADQDGLASIVLPMLEAWRSIRIRAAELGRQLVRDARQNQACRILMSIPGIGAITATAFTTAIERPDNFKKSRSVGAWIGLTTRRYQSGEVDYDGHISRRGDAHLRGLLYEAAAVILTRSSTDSTLRTWGLKLRERIGFKRAAVAMARKLAVIMHTMLKTGELFNPNAGAIA

SEQ ID NO: 377243 - protein, 311 aa, unidentified
MTEHTIGVDISRAHLDAFRLEDGATQRFENSAAGFRALQKWLGNAPVARIVFEPTGPYHKAFEAAFSKTFPLVKVNPLQARRFAEAYGTRAKTDAVDAQMLARMGAAFNLEPQAPCSKETLVLRDLHVARAGLIKDRTRLRNRAQTQDIPLLKRQTKARLTQVERQIAELDAEIAALIEAHGATARNRDILCSMPGIGAVTAAAMLTLLPEIGTLQRKQVASLSGLAPITRQSGQWQGKSFIGGGRKPLRDALYMPALVAMRFNPDLKAKYDALRTVGKPAKVAIVVVMRKLIEMANALVKADRMWTPKTA

SEQ ID NO: 377244 - protein, 337 aa, unidentified
MDYFAGLDISMDETHICVVDREGVVVYECKAASTAQAIAGELAKAPSCRRIVFETGRMAPILFHGLSQLGLPVVCVESRQAYQALKSLATHKTDRNDARGLAHLARTGFFKPVHVKSLSAHALRSLIIARKKLVGQRVTLENQIRGLAIVFGIRLPRALTAAFIDKALQASEGIAGLFAAMRGLIAARTAVMTAVAAIDADMRRMARASAACSRLMTIPGVGQLTALAFVAAIDDPSRIRRSRDVGAYLGLVPRRYQSGEVDYVGSISKCGDRRVRTLLYEAANVMLTRYKGQLKLKDWAFAIARRSTMRKARVALARRLAIIMHAMLRDGTEFTSA

SEQ ID NO: 377245 - protein, 430 aa, unidentified
MKSNTQNAKIEAITEKTLVLGIDVGSETHYTRAFDYRGIEYSKKPFKFSNTEAGFATFKEWILDLKERHEKDKVVPGMEPTGHYWFNLGKFLQDNEMKPVLVNPHHVKKSKELDDNNPTKNDRKDPKVIAGLVREGRYMIPYLPEGVYADLRTASNIRFQLQAELTRIQNRISRWFNIYFPEYKTVYGKPDAKSGMLILKAAPFPEDILTLGINGVNQIWRDAKLRAVGKARAKTLIEAAEHSVGSKEGAVSARMEIRMLLEDYESRNIRLQEVMTLIEGLVKQIPMAEKLLEIKGVGIKTVSGFLAEVGDISRFNTPKELQKLAGLALVESSSGKHKGETTISRRGRKRLRYLLFEVAMSLVAKNPEFRELHNYYTTRRLNPLKKMQSLMAIAAKLIRVFYAMLTKGVDYDPKKMVSDIKRLAVYLQAA

SEQ ID NO: 377246 - protein, 395 aa, unidentified
MSNTQIRVAIDVGCECHRVAVGLSNDKILDEFDVIHSADGFNNFFSRIETLEKRYHLPVAVAMEGYNGYARPLDGQIRERGYKLYSVNNLKLARYKEVFPAPAKTDAIDARKILELFQLADSLPLAKDVLQEVVDTPIENDKLKRLTRRRRQLVGERVRVVNRIQSDLQAICPGLLAITHDVANRWFLNFLSCRDELPKLTKIRSAGLLEIPAVGRIYSARIKLWQPSAQFAPDVEWVGEMIIQDAKRILSLSTDIKLLDRRIEEIAANSSLAKTIGSIPGFGKTSMAELAGEIGTIERFDSEAGLAMYLGMAALDNSSGKKTGTKTPRQVNTRAKAAMMTAVARHQECVPLSRTYYEKKRAEGKKHNQAIRALGRHLVRVIWTMLKHGRTYEIR

SEQ ID NO: 377247 - protein, 388 aa, unidentified
MGAVVIGMDPHKRSATIEVMAGEETVFGGGRFGTDAAGYQAMLSYAKQFPQRTWAIEGCQGIGRHIAERLVRDGETVVDVPPKLSARARVFATGQGRKTDATDAHSVALVGTRMTGLRPVVNDEQLTVLRILVDRRRSLGEDHTRMTSQLHQLLLELIPGGAKKDLSAAQAKALLAKVRPRDAVGKTRRRVAAELVADLERIYARTKAADKELKQLLTETGTTLTTMHGIGPSGAARLLVEVGDITRFPSRAHFASWNGTAPIDASSGEQIRHRLSRKGNRQINRVLHTMAVVQLRNPTEGRGYFDRRKSDGKTSMEAMRALKRRLSDLVYRQMLADALTPSVTGPGGQSGNDSVSSAADSHPAIGSSDQPLPGPATSKPKTPVLAVS

SEQ ID NO: 377248 - protein, 351 aa, unidentified
MYLIGVDYHPSFQTIASFVEETGECGKQELSHSCGEAGRFYRDLQQRGVNVRVGMEATGYSRWFERLLAELGFELWIGDPAQIQAKRVKKQKTDRKDAQLLLRLMQEDNFPRIWVPSPENRDLRQLLWHRHRLVQMRTRIMNQLQALAMNEGKRMKKKLWSEQGRAVLEKLALGPWASRRRQELLELLDGMNPKIEELTAAVEQEAKKRPDALRLMTHPGVGPLTALAYVLIIGTPARFPRGKQIGTYVGMIPSEDSSAGKQRLGHISKQGNSLLRFLLVEAAQAAVRIHPDWRRRYIHLAMRRHKSIAKVAMGRRMAIQLYWMWRNGCEYSQSGKCGSYAGQLGSTHGGK

SEQ ID NO: 377249 - protein, 345 aa, unidentified
MSEQYAGRQIVGMDLHRRRSVLVRMTETGETLETVRISNDPEYLRQVMERAGEAPEVVLEATYGWYWAADTLAELGAHVHLAHPLGVKMFSYRRVKNDQRDAADLADLLRMGRLPEAWIAPPATRELRGWVRHRAKLVGLRSGLKCQVHAVLAAAGVQVPMSDLFGERGQQLLTTARLAPESRARVESLRRLITAFDFEIDLYAKLVAGRMRTHPGYRAIQQIPGVGPVLAAVFVAEIGDITRFHRPQQLASWAGLTPKHHESDATVHRGRITKMGSRLVRWAAVEAVQRVPAHTDLGALRDRVGARRGRNVGVVAAARELTEMVFYGLRDGQVRRLSTARNPAA

SEQ ID NO: 377250 - protein, 312 aa, unidentified
MIEQCFGGIDVSQDRLDVLLLPQATGFSVANNEAGWNALIARLRDLPVAAIGLEPSGGYERGVLRALLAAGLSVRRINPNRLRQFARARGALAKNDRIDARLIAEYVATMPTHVVRHDPAAARIAEIVTMRRQLCDEHVAIENQAAQLEDAMLRRLAKRRLARIETDIRLLEKRLTETIAAEADLARRYARLTSMPGVGPVLAFTLIALLPELGRMSRKQIAALVGLAPYDFDSGKLRGHRSIYGGRMPVRNVLYMAALSACRYNPALKTFHNRLAAAGKKPKVILVAVMRKMITTLNAMLRDGAGWQPQAA

SEQ ID NO: 377251 - protein, 348 aa, unidentified
MKKLVAGMDLHSNNVVIGVMDLDGQRVATGKVACDLKAVVKFLAPFKARLERLAVESTFNWYWLVDGLQAQQYPVVLANPAEMDPYSGLKHANDTSDAFFLAELLRLNILPTGYIYDAKLRPVRDLLRRRMLLVRQRTALMLSFKSLYARTTGQALTLTELKAMEIPKARELYQHPANQLIAGMQLEHIEQLNASIAELEKVVLAAARELPGYARLTTLPGVGKILGMTITLEAGDIQRFAEAGNFASYCRTVKAERISNQKKKGENNAKCGNKYLAWAFVEAANFARRYDEQCRRWYDRKAAKTNQIIATKALACKLAKAAWHVLTAEVDYDAQRVFGPLPATPAKT

SEQ ID NO: 377252 - protein, 403 aa, unidentified
MLKIVYRVCCGMDVHKSFVVACIASTNEYGVTTYKSKRFSTFTGDLRRCAVWLAENNCKDVCMESTGKYWIPIYNILESTCNIVLAHPKYVKAIRGKKTDKRDAKWIADIFKHDLVAGSFIPPADIRQLRDLFRYRWKLTSFTTGEKNRAQNCLTVSNFKLDDVFSDVFGKAASAITVRILDNPAKKITDVSGFRTKHMKATDEEILAAVDGVMCEEQAEKLRIIRSHMDSLELCKLNLESLILATAEKYLPQLNLVMTAPGIQSFAAIGIISEIGVDMSVFPTSKHLCSWAGLTPQNNESAGKKKTTRISRAGAYIKPLLVQCALCAIRAKQFPEVRNRYLALKKRRGHKKAIIAIARMLLTVIYNMLKKNEPYNPELYRKDDRPPAHREVCLLYTSPSPRD

SEQ ID NO: 377253 - protein, 359 aa, unidentified
MECFAGLDVSIDETALCVVSADGETLLTASVATDPDVIASALAPFAGSLKRVGHEAGALSPWLQPALKEAGVPAVCLETRHVRAAMSAQRNKTDATDALGLAHIVRTGWFRTAHIKTEACYRLRLLLVHRRNLKRKFLDLENTIRHSLKAFGVRLNRVSRGGFEATVRDATAADPLSSELMDCMLRARQALWEEYVKLHRLVVQIVARDELCRRFMEIPGVGPVTALTFASAIDDPRRFRRSRDVAAYFGLTSKRWQSGSSIDVQGRISKAGDPDVRRALYEAASAMLSRFKGRDRIKSWGAKLAKSKCHAKASVAVARKLATVMHAMWRDGTSYAGDPSDTAEVRAGRALAKLQRAPC

SEQ ID NO: 377254 - protein, 420 aa, unidentified
MYKDTMPQELSAFRKEWRMWYAGIDWADTHHDALVIDESGQQVSSLRVSHTPEGVSHLISFLSSMVPTKEQMACIIETNHGLLIAALLEAGFAVYPVNPKTVDRRRGASGAKTDAIDAYLLAKTGRADLADLRQLKPDSPVVAELKALTRDQDALIQSQTRLVNQLTACLKAYYPVALQLFTKLHQASTLKFLQTYPTPQAAQAASVEQLTTVLKATRHPTPAKTAQHIWHMLQQPQLQADAITTRTKSRLMLALVAQLLPLIGQIAAYDKEISTLFLTHADQEVFRSLPGAGKRLAPRLLAEWGDDRERYSDASSVQALAGTAPVAYESGNYSKPHKRYACIKPLRNALQQFAWQSTKQEAWALAYYQRKRNEGKSHSMALRALANVWVRILYAMWLNHTCYDGATFEAAQRAHTKLAA

SEQ ID NO: 377255 - protein, 405 aa, unidentified
MSEIEQHERVEVFVGLDVGKGTHHAVALDRKGKRLLDSALPNDESKLRALIGKLKEHGQILLVVDQPATVGALPVAVAQAEGVWVAYLPGLAMRRIADLHAGEAKTDARDAYIIAEAARSMPHTLRSMKLADNEVAELTMLCGFDEDLAGQITQTSNRIRGLLTQIHPALERVLGPHLDHPAMLDLLERYPSPAQLAAVSPKQLANRLVKLAPRMGKTWAAEIVQALCEQTVVVLGTQAAGIVLPRLARQLAALRIQREEVAKEVERLVVAHPLHPVLTSMPGVGVRTAARLLVDVASRAFASAGHLAAYAGLAPVTRRSGSSIRGELPSRRGNKQLKRAMFLSAFAALRDPLSRAYYTRKISQGKRHNQALIALARRRCDVLFAMLRDGTLYSPPQPENLLTTT

SEQ ID NO: 377256 - protein, 353 aa, unidentified
METPIKQTAGIDCGMQELVVSFGILTGDGTFICKLTKVFANTAKGFQQLLQWINEVSSKETAVLYAMEATGVYYEKLAYYLVANDCHVSIVLPNKINAFAKTCTSKKQDDQQASKVLCEFGCVKHVDEWQPPHPLFAALKQLTREKHQLQQELVIIKNQLHAEQTKAITASASIKRMKARCRLIEKQIAEVEKEIIDTLNDDAAIKEKINKVCTIPGVGLSTAVTVIAETNGFNLIRNARQLVSYAGLDVVQKQSGISVKGRAHISKKGNPHLRHCLHLPSFVAVKYNLPMQQLHHRIVEKQAIKMKAYVAVQRKMLMLIYTLWKKNEAYNPSIKFLEQPVEAALTELDYIRS

SEQ ID NO: 377257 - protein, 331 aa, unidentified
MKNVTQTIGIDVSKLTLDVCIRTTAVHKQFSNDTKGFKQLICWVIKQKSDLESSLFCFEHTGWYCLMLSYFLYENKYDYCCINPIEIKRSMGLRRGKSDKADAWEIANYAWLRRDELIPSIPPAKNLLELQRMMALRDQLVKQLTACKNLNSGMQEITVNRSKDISLGILSKSMRHLEKQIKAVEKAMDGLISQDESMVANYKLSKTVKGVGRVLAVQMLLHTHNYTRFASPRQFSAYCGLVPYPYQSGTSIHGRNKIHPISDRKMKSLLSMSAISAIQHDNELKLYYRKRVEEGKPKMVVLNIIRNKIVSRVFATVNRGTPYVEINKFLA

SEQ ID NO: 377258 - protein, 408 aa, unidentified
MMLFVGDDWAQDHHDVYLMDEEGARFAARRLPEGLTGIGRLHEMIAAHGEDPSEVIVGIEKDHGLWVGALAASGYQVYAINPMAVARYRDRHSVSGAKSDGADAKLLADLVRTDRHNHRLLVGDSDQAESIKVLARAHQNLIWTRARQISMLRAGLLEYYPAALQAFPNLGDRDRDRDALAVLGRAPTPGQGARLSLSKIAAALKAGGRQRGIDERAREIQALLRGQQLHAPAAVTAAYGAATSASVNIVVELTNQISAVETELAEHFRTHPDADIYLSLPGLGVILGARVLGEFGDDPNRFTDAKCRKNYAGTSPVTVASGRKRAVLARHVRNRRLYDALDRWAFATLKCSPGARAFYDHHRAAGDTHHKALRALANRLVGILHGCLRHHTPYNEDTAWAHRLPAAA

SEQ ID NO: 377259 - protein, 323 aa, unidentified
MQGKVSFQEDAMPVVYAGVDVSKEWLDVHLHPLGESRRFSNDKTGIRQLKRLLARHQPKSIVMEATGKFHRPAHRSLWLDGFAVAVVDPLRARMFARACGYLAKTDRLDARFLALLAESLRPPADTPPSPHVEALQELVNARSAAKCDITALQNRSKTATTALLRGELNRLVRRLEQHVERLDKEIERRVGEDPQLYRKAEILTSIPGIGRVTALALMAGMGELGTCSGKQAAMLAGLAPIANDSGARTGRRSIRAGRPAPRRALYMAALSACRYNPALARFADTLKAAGKPAKVILVAIMRKLLVLANCLLAHDRIWTPNPP

SEQ ID NO: 377260 - protein, 464 aa, unidentified
MVAKTVDIINLNIAGELIAEASVVAPAAHLYLGVDIAKNAHVAACISQELIARYGRFEKCPVLTFANSREGFEKLATQIREYGSPEACSVLVESTGHYGAALSQYLREIGCQIYVMHVMARPQSHDKSDRRDALALANSLYLHLAKGVRIDDKARRIVRKLPPTETAMQLQGLVHRRQEITSDTTRRKNKLTAIVDEMFPELTKVYADPNTPSALALRQKYPAPQSIIDASIDDLCATRLHRRPGRASLTQLQALAAQTIGTKSEHRLASLVVEQEQLIAELTLLNKHVERLEERIAPIVEGSREGQILLSFPAVGMHQAALLIGSIGNIRNFDSIAKLRSYCGWSPQEEQTGITLDRSHLVQGGSPLLKTSIYMTTLQAIRMDTPWKVLYDRLVPRMCPYDERLGKYRGKMKVVGRVAGQMVGLIWRFLYEDAFILDNLAPGQEPPEPKLYDATIHLKHLTHV

SEQ ID NO: 377261 - protein, 322 aa, unidentified
MNKYKKIYGVDISKDSFDVVDNEGNHDQYGNEAKGFLKFKKLLDADSLVVMEATGYYHYSLAQFLSASSIPCSVVNPLSVKRFVQMKLAKVKTDKADAAAICAYAQVTELSMYSALKDTQAECLQIYSLLEHYEKKRTAIKNKLHGEKTLGKPSKAVYQSLNRVLKVLKVEITLLEQQLVELVKQEHSSQLKLLKSIPGIGIKTALFLIVVTNGFSKFETASQLCSYAGITPTERRSGTSIRGRSRISKVGNKRLRHLLFMCSFSACKYNLACNTQFKRIVAKGKSEKLALLAVSNKLLRQSFAIVKSGIPYDASYCSTLIS

SEQ ID NO: 377262 - protein, 392 aa, unidentified
MIYVGIDVAKDKHDCFAMNSDGEILIEKLTITNNSDGFETLYNSLISFSDSLDNIKVGLEATGHYSDNILNFLNKNGFNTYLINPLQTNLYIKGQSLRKTKTDKLDAHIIATMLISDNLKPYIPVSYHISELKSLTRHRFRLVKENSKFKTSLVRLVDIVFPEFPKIVSSVAQKSSLALLYELPNAKKIAECNLTHLTHLLSDSSYKHFGRDKAIEIRELARKSIGLNSDSVSFELKQTISIIQFLQNQIDELDKRIKEILLELDTPILSIPGISFKLAGSIIAEIGDISRFDSPAKLLAFAGLDPSIYQSGKFFSTHSVMVKRGSKYLRFALINAARMVCMNDLTFNNFKDKKLSEGKHYRVTLGHVAKKLVRVIYYLLKTNNKYEADKVA

SEQ ID NO: 377263 - protein, 327 aa, unidentified
MNQDSPDGASRFWCGIDWGGRSHYLCVLDDRGGQLLSRKIAHTVDGLTILVEVIASLTGSVRIAIERAEGLLVEHLQQHCSAEIYCVSPKISARARERYRMAAAKSDEFDAYVLADTLRHQYAQWRPLAVASPVLAELIAVSRDRQRILDMQVDTENRLRSILEAYHPAPLHLFSSLDRDITLAFIRTFPTPAQASRVTTRRMGGFTGRHGYSGRQKPETLIARMQPHLLSASEGTVAGKALAAKAFTEQLALLNTHLRAHDKRLGELLDMHPDTPIFTSFPGIGPVTAGVLISEMGEQRSRFPSAPSLLAETGLAPVTKAPGAPVR

SEQ ID NO: 377264 - protein, 362 aa, unidentified
MNKRIVAQNRTVLVGVDVHTKSHVVTIKVGSEIMGTCTLSPNRDAWRSFLKRVPGCELHVVYESGPNGYNLHDWLMELRQEYEGGAIYVYIAPPALVPKAPGKKRVKTDKRDSAALIQALEMKSFRPVVVPDRALREARELVRTREQMMRTRTSLKNKIHGMAKFHGIEYPDQGARWTLKWIEQLAVNVKEADTTGSLNYAFKMKIKMLKEMTEVIERLDKRIKRLSEKGSCGATARKLTKLPGIGTLSAAIIATEVADFAAFDKSSSFASYVGLVPGESSSGESTHRGHITRAGNRRLRWIFTECAWSWLRNDPEARRIYNRIRAGKTERTRIAIVAMARRLAVKAYHQVMNEHPEHNIAA

SEQ ID NO: 377265 - protein, 364 aa, unidentified
MNKCHSNTELSSHEGTRCQFNGGTGAIKLGIDVHQDFYVVVEQVEGSNPKPPQRFQKQAFVHWAAKLRSQSAEVYAVYEACGFGFSLQRNLSALSIHCYVVCPQKLDEQNRRVKTDGLDAKALCLKLDRFVQGNRAALATVRVPSEAEERSRAIHRQREQLVGARKRLEAQGRSLMVNHGIEPVRSWWKQGNFVALQVPTWMKGLLGNSQPILLGLQEKIADLTIQLQSAAAPNQPRGLGLMTSVIIDREIGDWNRFHNRRQIASYTGLCPGEYSSGNTRLQSCVTKHGNPRLRAALVELSWRLVRFQPNYKPVVKWRQILAKGALATGAARKKAIVAVARQLAVDLWRIKTGRLRPEELGLIN

SEQ ID NO: 377266 - protein, 404 aa, unidentified
MTKTLMAGIDLHSNNLFCGIVEQDGERVFEKRLPCNLSDVLGALKPFKKRLQTIAVESTFNWYWLVDGLQDAGYNVALAHATEMTQYNGLKHTDDKSDAFFVAELLRLNILPTGYICDRKWRSTRDMLRRRMALVQKRTSLMLSLKSLHARTAGEPLSQDKVKALVPQTAQKLFKDSSDQLVAQVQAQLLNEFDKAIAEIEKEVIKKAAGLPFFPVLETMPGVGRILSVTIALETVDPKRFEGPGHYASYCRCVDSRRISNGRKKGENNQKCGNKYLSWAFVEAANFAKRYDEKCRAFFDRKAAQTNPIVATKSLACKLAKAAWHMMSEKVAYDESRIFPGPAAKIAQCVKKPKTRQTPGAPIGGSQASPLRVATGGPASEGSKARVRRSPAPAKKTARARAQK

SEQ ID NO: 377267 - protein, 429 aa, unidentified
MTDETICRILRFREFKKEIRGSEEYLIVGIDISKNKHHAFFGTANGKSLLRRLIFANSLEGFQKLLSRADAIKSQNGLSKIVFGFEPSSNYHKPLGMHLIRCEREVVMVSGIAVKRNRELLNGRWDKNDTKCAANVADLISQGKCLFYDLPSSEICGLRELLSLRERMKKQYHSLRMRIRGNLLAKYFPEFDRYFGQCPSESLSIVKFCLDPHKIAGMDFEQFVCTVTIRDRGIAQQRRLRKIHHLAYDSIGCPVNRFAEFVAAMLVDQVNHTKQLIAQIDAQIEQAASAFIEYHCLLTIPGFGPYVSALVLAKIGNPFRFENRGQVVKMAGYDLSAKRSGKSSDKATPVISKKGSNALRYALYQAALIASARNNHFIRYFTNTLKGRERERGIKIKMRVKLAVKMLIIAWTLMKKKIDFNPDLLFNDQ

SEQ ID NO: 377268 - protein, 348 aa, unidentified
MYYAGIDYHKRYSVVSIQGAQGQIVQEERVDHQFPEVFQRLFRECPEPVSLVYESTINWAWLYEILEPVANVASITLANPYKVRLIAEAEIKTDKISARALATLLRLNVVPACHIPDQKTRQRKEVLRQRSYWVKLRTAVRCRVHKILGNQHDLSLPQVTDLFGRKGRAALDKALLPEPDATLLAQNLRVLDALDKEIGTDEQLIRQEGQADRAAQILASMPGLGLILANMVAAETDGIARFGRSERYTGYSGLSPTVHSSGGKTHMGHMMQQCNRWLKWAYIEAAWIAVGCSPYFGGLYRYHRGRGKQANTAITIVARRMCHIAYQLLTEDRLYQERPFSPAALVKG

SEQ ID NO: 377269 - protein, 344 aa, unidentified
MNEAITIGIDLAKNVFQVHGVDAEGAVVFRRQFRRARVLPFFKNHPPCLVGMEACATAHHWARQLIALGHEVKLMPPHYVKPYVKRNKNDAADAAAICEAVTRPTMRFVSVKSTEQQSILMLHRTRELLVRQRTMLINAIRAHMAEFGIVAPVGVAHVKKLLGIIADTPDARLPPIARACLESLARQFLSLHEEIYATEKQLHAWHRSNEVSQRLETIPGIGPITASALAASITDPEVFKNGRELAAWVGLVPRQNSSGGKQRLGKISKQGDQYLRWLLVAGAMSVILHEKRRGTSNVPWLGDIIARKPTKVAAVALANKTARIVWALLRHGGTYQKPVGVPAT

SEQ ID NO: 377270 - protein, 342 aa, unidentified
MEITTIGLDLAKSVYQVHGVDAAGNVVLRKALRRAQVLPFFGKAVPCLVGIEACGTSHHWARELAKLGHEVRLMPPAYVKPYVKRGKNDANDAEAICEAVTRPTMRFVAVKSPEQQAALALHRTRDLLVKQRTQLVNMIRGLLAEFGIEIVRGLHHALELAARIASGTAPEVPELAVRVITGLAGQIGDLQVRLTALEKELLAWHRSNELSQRLGTIPGVGVISATALAASVTDPGRFRSGRQFAASLGLTPLQNSSGGKERMGRISRMGDRYLRRLLVVGMTSLVRRARAKPDSVDPRIAAMLARKPARVVTVAAANRTARVAWSIMARGGTYRAPTSVAV

SEQ ID NO: 377271 - protein, 367 aa, unidentified
MKKISTVGAKQNKNFPDQKLTIGLDLGDRSSWYCVLDEAGEVVLEQRVSTTAKAMKEVFGRMPRSRVALETGMHSPWVSRLLSELGHEVIVAHARNVRLIGESRRKDDRLDARTLARLARIDPQLLAPVQHRSAQAQAHLMVIRARAGLVRARTALINTARGLTKSYGERLRGCSPRNMNAEKAQGLSPELQAALEPLLAAIESLSERIYEYNQQIEKIAKESYPHVARLKQVKGVGTLIALTYLLTLEDPQRFRKSRDVGCYVGLQPGRRNSGQSEPQLHISKEGDPYLRTLLVQGAHHILGPFGADSDLRRWGLKLAERGGKNGKKRAVIATARKLAVLLHRLWVSGEVYEPLRNSRPMRLPAAA

SEQ ID NO: 377272 - protein, 381 aa, unidentified
MYEKVASNGMDVHYKFSQVTFRDAQGEIVRRERLDHPDREKLRERIGRWPKGLPVVLEASFGWGWLSDLMEEAGMDVHLSNCYKVEQMRKARGQVKTNDKDADLTSLLPFEATNWWEVWRAPKEVRDRREQMRYRADLVAVQTITKNRIHALFHRQGIFHEFSDLFGGPGRKFLTGLCQNGSPYLSHEALSALGGQVRLLDHLRSQLLDVALTLRDQLAKTPLTRLLKSVPGFGVVLSHVLAAEIGAIDRFDGEKHLASYSLLAPRSHDTGEPDRDQSPKGRHLGVQGNRTLKWAFIEAAHGAVRHGGKWRAMFDRVTDGGKKNRGRGYIKVARELVRMVYVVWKKQVPYTDTPPVRPGQQQNQGTSRSGTGQPFHPMVQA

SEQ ID NO: 377273 - protein, 338 aa, unidentified
MDATTIGIDLAKNVFQIHAANSGGKTVFTKRLTRPHFLAFFANLPPCMIGMEVCSSANYWARQLTKFGHDVRQISPQFVKPYVQSNKNDYNDAQAICEAVTRPNMRFVPPKSIEQQDLQALHRIRMRLVRDRTALVNQSRGLLREYGVFLPLGIRSFREQLPQVLEDAENELTPLTREIMADQAQRLRELDQRITAYDRRINLYFRRSEVCQRLATLGGIGPIVATALIAAIGDIHYFKNGRHLAAWLGLVPRQHSSGEKSRLLGISKRGDTYLRTLLIHGARSVIRRCDTRDDALARWVRGIKERRGFNRASVALANKNARIIWALMAHEDTYRTAA

SEQ ID NO: 377274 - protein, 369 aa, unidentified
MFVCILNENGIVFQEKYGVLTTELEQMLEVMMQHDVTEVCMESTSVYWMPIWRVLENYIPKLMLVNPYFIKQLPGKKSDVKDAEWIATCLLKDLIKGSYVPEDRIQQLRQYDRRIFDLNKEITYKLTKLDMALQRCNIRISNYVATTDGKSYQEVVRLISEGKTSPEELAKVIHGRTVNKHGLKTIIGALTGVISGTDMDIIRQLREEILLNQKHKDECQSKMDELCQKWFPTQLKNLQTIPGVKTRSATAIISELGTDMSSFEDAAHLVSWCGLKPRNEESAGKIKSRSITHGNKYLRKTLIECSWASSKTQGCFYNKFSYIQTVVRRKNKMKVQVAIARKMLSAIWFILHDNVAYRDYTPDIASADE

SEQ ID NO: 377275 - protein, 371 aa, unidentified
MNFIGIDLHTNKFTCCYRNEHSPADNPKKGREIKTFNLTEDGLTAFYQTLTSDTYVLVEATITTFSFVRLFKDRVKQVIVANTYELKQISHARCNTDKIDADILCRFLKAQIISGEQFITNVFVPSKEIQDLRSYFTTYRLLKKQNVQLKNRIHSLLKEQLYGFTQEEIFNAKSRVKIRTIGLGSAMNKQVCMLLDRLERDESDVEELEAQIKIYARPFMELIEILTSMKGISVFIAIAIIADVIDVSRFKNSKAFTSYLRSAPRVSNSNTYERTRGINKKGRKLAATLITNSLEHVMNSSNKLRRWYDRLCEYKKPGLVRTGLRRRVFAEIFQMLKKKEYHYGREPLKHEQKMSQYRSFLKKRKNLLEIA

SEQ ID NO: 377276 - protein, 319 aa, unidentified
MQSKLTFGMDIGKNEVVVACHEGAFAILKMANAVAGLRRWLGSVPAGSRLGLEATGGYHEPVAELAYSLGFTVYILNPKDVHFYARALGARGKTDRLDAQIIAAYVAEHCARLHPFTPLSADEKLLRELARRRATLVNAKSMLQQSLRVLPGFEREARELLRAMGSFADRLERKLAQIAARSSERATLVKRLQTIDGVGTLTSIRCATLFTRVPFHSSDAVVAFFGLDPRPNDSGQHRGRRRLSKRGPSEDRRLLYNAAMSAIRTPAWRPLYLHLRNRGLASTEAIIIIARRIVRIAFAMYQNHSNFNPRLVPRPYCPA

SEQ ID NO: 377277 - protein, 415 aa, unidentified
MALKIVYKICCGIDVHKTFVVACIASTDHNGVTTYESHRFSTYTSGLKDLLQWLLKHNCKDVCMESTGKYWIPVYNVLENDCTIVLAHPKYVKAIRGKKTDKKDAKWIADLFKHDLVAGSFMPLADIRQLRDLMRYRFKLTCFQSSEKNRLQNCLTVSNIQLGNVVSDTFGKSAQAILDKLLENPADTSFDLEPLVYKSLKKKLPELRDAIDGYITPEQAGKLKVIKAHYENLESRKAELEELILALAAPYQQELAILQTAPGIRSDFTAIGIISEIGTNMEAFPSAKHLCSWAGLTPTNNESAGKKKSVRVSKAGCYIKPLLVQCANAVVTSKKHPEIRNRYLRLKKRRGHKKAIIAIARMLLTALYHMLKNSENYNAELYRKSDLPSIDREITVEQAILIARNQGYRIRSETA

SEQ ID NO: 377278 - protein, 351 aa, unidentified
MVIRGQFNGGKADIKLGIDVHQDFYVVVMQEGGSNPKPPQRFHKQAFLLWAAKLKSRSAEVHAVYEACGFGFSLQRQLSQLSIHCYVSCPQKLDEHNKRVKTDSLDAKTLCLRLDRFVRGNREALAMVRVPSEEEERSRAIHRQREQLVKVRKILEAQGRSLMLNHGIEPVKNWWKRNNFAALPLPAWIKELLQNSQPILIALQQKISALTLQLQVAAAFNQPRGLGAMTSVMIDREIGDWHRFNNRRQIASYTGLCPGEYSSGHTRLQSCVTKHGNPRLRAALVELAWRLVRFQPNYSAVRKWKERLAKGTLTTGAARKKAIVALARQLAIDLWRIRTGRLSAEALGLEI

SEQ ID NO: 377279 - protein, 311 aa, unidentified
MEMYVGIDVSKNTFDVCFGEKNKFKHFEYTEKGIKSLKEILRELKPNLIVMEATGGYEAQLLIELQDDGFSVAVVNAARIRNYAKAIGLTAKTDKIDAHAIAQYAAAIKPAPNTICTPNSRKIKGLVARRNQLISMRVAESNRLEHLRDRIVTKSIGAIIRTIDKQIQIVDDQIKLCIESDPEMKEMKIIAKSMPGIGDTTAAVLVSELPELGKLNRRAIASLVGVAPFNRDSGTFRGKRMTGGGIKNVRTKLYMPTLVAIRYNPAIKKFYNSLLKAGKTKMSAIVACMRKIITILNSMIANKQEWNNNLA

SEQ ID NO: 377280 - protein, 416 aa, unidentified
MEIYPNTRAIQRYIALDIHREYVLAGGMNASQEWELSPHKIEMGKFREWARKNLSGTDAVVIETTTNVWDIYDIVQPLVGHAVVAHAGAVRQIAEARVKTDREDVKRLIRLLIAGIVPEVWVPPQHVRELRGLVAYRQQLVKTGSMIRNRLHSLLHRHNLCLPEEGLADREWWTQQEKICALEKLQIRQELSMLQQIETHKAEVDHELGRQSLGETWGKAAVRLMQLPGMGIVVAMTVLSAIGDIHRFESADKLVGYSGLGAGVHDSGKEHIEKRITKSGRKELRWAMVEAAWRAVRMSPYWKEQYEKFLKRMRRPNQAIVVVARKLLVAVWHVLSKDETDEHATEEDLAYKMLLWSWSLSEEARQGLTHKQFAKYALMRLGVQTDLTRFVRGKVPRRIASREEVLVRMAELGLNG

SEQ ID NO: 377281 - protein, 349 aa, unidentified
MVVIGIDPHKGSHTAVAIDEDERKLDEVLVRADKRQLERLLAWAEAFEKRSWAVESANGLGALLSQQLVGAGEEVFDVPPTLSSRVRVLGTGKSQKNDPNDALSVAVAALRSSRLRLVVAEDHVAVLRLLWNRHKNLTSLHTQAVCRLHALLAVIVPGGMRRRLSADQASAVLAGIRPRTMAEGARKSQARDLVGDVRRLDAQMKASKRTIAEAVAAVPTTLGELSGVGPIATAIILAHSGDIRRFPDADAYASYNATAPIEASSGPRKRHRLNPRGNRQLNHAMHIIAFSQLSHAGPGRDYFERKIAEGKTQKEAVRTLKRQISNAVYRQMGHVPGSGVTTTTTSTSV

SEQ ID NO: 377282 - protein, 450 aa, unidentified
MSDTWPQGPDEMPQSTSAPVFAAFASIDWADRKHVWKMARRDAPSEQGEFENTPEAVQAWATGLFHRFGGRPIAVCLEQSRGALVYMLTRYPHLVLFPVHPTTAARYRETFCPSGAKGDPGDTASLLDLLLRHRERLRPLQLDTAPTRLLQLLTQQRRELVDEKTRQKLRLIASLKQYFPQLLQWFDDVDSPLVGALLQRWPSLQQLHRTNPSQLRDFFHEHNCRGEERIQQRIQAIYAATPATEDAVVLEGEGSKACDWVAVVATLRERIAKLDQRIAELVATHPDSVLFASLPGAGPVLLPRLLVAFGTRRDRYDSAYQMQCLSGIAPVTESSGNRQCVQFRFHCPKFLRQTFHEFAFCSLQKSVWAQAYYKLQRDKKKSHQAAVRALAYKWIRIIYRCWKDGKLYDEQTHLENLQKRNSPLRGGIASATGKRWNPVGGLRKISENFS

SEQ ID NO: 377283 - protein, 366 aa, unidentified
MAKGSRRVSGVSCEVELIAGLDLGDRSSRLCVLDRESGAVKEESRVVTSPAGMKRRFGGCARMRIAIEVGTHSPWVSRLLSECGHEVIVANPRKVRLIYENRRKDDRVDAEYLARLARTDPKLLAPIRHRGAQAQRDLAMLRARDSLVRSRTQLVNHVRGAIKACGHRMPRCDAEGFAGKAEATLPAELKSALTPLIEVIAGLTAQIRGYERQLETLAATSYPETALLRQVRGVGLLTSLAYVLTIEDPARFRTSRAVGAYLGLVPAHRISGQSNPHLRISKEGDSFLRRLLVGSAHYILGPFGEDCDLRRCGERLGARGSRKERNRAVVAVARKLAVLLHRLWSSKETYDTLYNARRASELQPAA

SEQ ID NO: 377284 - protein, 338 aa, unidentified
MTLDILGIDLAKNVFQLHGVNAAGRVVLKRRVMRDQLLEVVAQTQPCTIVVEACTGAFTWARKFEALGHRVKIISPQYVKPFVRRQKNDGNDAEAICTAARQPHIPLVPKKTIEQQDIQALHRARQRMVNHRTAVVSQIRGLLLDRGMAMPKSITCARRLITDILADFNNELTPMARETIHELYDLFRDLDRRIGSFDKKIERVFRESEPCQRIAKIKGVGPKTATAIVAAVGNGAEFKNGRHLAAWVGLVPRQFSSGDRTVLMGISKRGSQHLRSLLVHGARAVVRTCANKTDPLNQWVNQLRERRGFNRATVAVANKNARIIWAVLRTGEPYRAGA

SEQ ID NO: 377285 - protein, 347 aa, unidentified
MAILKQVAGIDVAQNELVVSLGRIDHKLTVDIFDYKVFKNNVKGFKELVKWAEKQMQNELSVRYVMEATGVYHESLTYYLTDNRSEVSIVLPNKISNFFRTLDVNTITDKTASEAIARFGLERKLDMWQKPKKIFRDLKQLTRERDQLIVDRTVLKNQLHAENAEAFPNPGSIGRVNKRIKLIDKQELEIKAEIAAIVKQDAELVKKIDLMTTIPGVGKLTTVIVLAETNGFELIKNKKQLVAYSGLDVKLKDSGTSVKGKPKISKKGNRHLRKAMYMPALSAMKHNEQHQILFVRLVSKHGIKMKAAVAVQRKILELMYSIFKSEKPFDNNYTQPKTQDLAAEVSK

SEQ ID NO: 377286 - protein, 403 aa, unidentified
MTTFYAGLDWASQSHAVCILDERAQIIERLDIEHNADGLTVLIRRLRHYGNPPLAIERPSGLLVDTLVEADVPVVPIHPNVVKATRPRYRSHSAKSDATDAFLLADLLRTDGHRFRPLAPQSAEIRALRALVRGRDHLVATRVQLANQLRTVLDSYWPGAAAVFADVDSPIALAFIERYPTPDSAARLGPKRMAAFCAQHAYSGRRRPEDLLERLHHAVAPVGEEIELEAKGALVRSVVAALQPIVEQISQLTRRIEHQLTDLDDGRILMSFPRAGRICAAQILAELGSVRERFDSDDHLAAEAGVAPLTYQSGKSKTVAFRWACNHRLRAAVTCLADNSRHAHPWAASVYANARARGCDHPHAVRILARAWIRVLWRAWCDRKPYDPTLHRGAQNLLYPTMG

SEQ ID NO: 377287 - protein, 317 aa, unidentified
MEQGERSTKIAGIDVGKRRLDAAVHGLGDELSVENTVAGVGELIAWLRVREVGRVGLEATGGYERLVRAELEQAGFEVVVHQPLEVRLFAKLKRWRAKNDRLDAHLIAAATAQVDAVRASRDPRLVELAERLTAYELITDKAADLKTFLESVALKDVTATIRASLRSLERTKAKLAAEILARIKAAPDLLDRFRLLLSLPGVGPIVAATLLVRMPELGALRRGQAASLIGVAPFDRDSGQWKGLRFIQGGRSRPRRMLYLAALQARRCSPSLKAFADNLITHGKPKKLVIVAVMRKLIEAANLVLGRGQPWLKQLAA

SEQ ID NO: 377288 - protein, 322 aa, unidentified
MKMALFQVFVGIDVSRDWLDVHILPFRRRLRVANTPAGWRELSGALAAHPQASIALEASGGYERDSLHHLATAGWQVHCLDPYKVRQFARAAGRRAKNDRIDAATIARYLATFTLQPTRIDPVVERLAEHVTYRRQLIEERTAVANQARLLRDPALRRLSRQRLARLETLIKRLEQSLAEQIAGNPQIAAKAAVLQTIKGVGPTLAATLLALLPELGTICRRKIAALVGLCPYDFDSGRFAGQRHIAGGRKHVRNALYMPTLVAMQHDRAIKTFYERCVEGRSDKKPAVIAAMRKLLTILNARMRDHLANLPRNAQILQTVQ

SEQ ID NO: 377289 - protein, 312 aa, unidentified
MAMLSFCGVDVSKDRLDVVVLPEGWFFSVSNDTAGWAELVARLRPLTVSAIGLEPSGGYERGIIRALLAAGLSVRRINPNKLRQFARARGVLAKNDRLDARLIAEFVAIMPTRVVQRDAAVERLAEIVTMRRQLCDEHVAAENQAAHLEDAMLRRLSKRRQMRLEADIRLLDKRLAEMVAANGALAQRYELLTSMPGVGPVLAFTLIALLPELGKMSRKQIAALVGLAPYDFDSGKLKGHRSIYGGRMSVRNVLYMAALSASRYSPALKTFHKRLAAADKKSKVIIVAVMRKMITTLNAMLRDSAAWQPRSA

SEQ ID NO: 377290 - protein, 343 aa, unidentified
MELSHIGIDLAKNVFQLHGVDRHGKTMFKRRLKRDQWLRVLLANATTDCVIGMEACGGAHHWGRALESRGYRVRMMAPQFVKPYVKSNKNDANDAEAVCEAMSRANMRFVAVKSVEQQDIQAVHRVRAELMAHRTAKANQIRGLVTEYGLVAPQHMTSLRAALPRWLEDAENGLTSRFRRLLHGLWEDLTRLDERIVVLDSEVELIAKSNPVAKRLQQLRGVGPLVATALVASVGTGEQFSKGRQMAASVGLTPRQHSSGGKERLLGISKRGDSYLRSILIHGARSAVSHAKHKDDRLSRWMTELSERRHPNVAAVAMANKTVRMAWAMMRNGSDYDPEFVVA

SEQ ID NO: 377291 - protein, 507 aa, unidentified
MGAERSEAVNNFAEMNFESNLRPGNNGSGRKARGRTRSACPNPTRIKPRTPADLGAFIKKSERTTPQEGHRIRTTHDKGQGPCANKKPMNETVRWETITYYAGFDWAKDHHDVVIVNPQGKIVKDLTFEHSAEGWAKWKELVAAYALLAVAIAANQGAAIEQLLESGVIVYPVNPKSAERYRDRKAPSGTKTDFLDAWSLADALRVDGHGWRALKPLDPLIQELRLLCRDEVDLIAKRTELVNQLQAALHEYYPAALQAFEDWTATPSWNFVQQFPTPQLLRQAGRRKWEKFLHVHHLYRPELNEKRLEIFAKAHEFCGPAAVTRAKSRLALALVKLLNALENQLEDYRKEIRRLFNEHPDHELFGSLPGAGEKLAPRLLSELGSDRSLFDSAQALQCYVGTAPVSFESGQVRQVYVRFMCNKSFRHAVHLWADLSRKFCSWAQVYYQQLRAKGKTHATALRCLGQRWLKILWKMWQTKTCYNADFHMANQLKHGSWVLSVKPSKSK

SEQ ID NO: 377292 - protein, 329 aa, unidentified
MKLVIGADVSKKKLNISEYDGKNHKLKIILNKGSDIERFLKKYDKSKKDLLFVMEATGIYHLQLASILYERGFLVSVVNPLIIKRYAEMKMLRAKTDKVDAKVIAQYGYEQDVKLFQPRSKKRQRIIKILKAIEDLTVSKNSYLNRLEALDKDPLKERSVEECFNKLISELNISIKRLEKELKNLINKHYLNEYSRLLSISGVGPKTAIIIIAFFGRFEDFKNSKQVVSYIGTNPSPKESGSSLRGRGRISQKGNSYLRKQLFMTSLSAMQHNNACRNMYERLSLKGKEHKVLRVAVLNKLVRQIFVVLKYDREYDPNYEEKFTSLVYA

SEQ ID NO: 377293 - protein, 341 aa, unidentified
MKKISTIGLDIAKHVFQIHGVDDSGEVVVRRRLRRSEVLNFFARLPLALVGLEACATAHHWARELGKLGHEVRLMPAQYVKAYVKRQKNDATDAEAICEAVRRPSMRFVPVKSAEQQAALMLHRSRDMLVRQRTMLINALRGHLAEFGLIEARGPSKIAGLVALIEGEDESIPQAARRALAPLVAQLRSTKEQIEMLEAQILAWHKESEVSLRLATIPGIGPIIASAIAATVPDAKAFSSARQLAAWIGLVPRQRSTGGKPRLGRISKQGDGYLRRLLIIGAQSVLRWSRPAKSSAWTIAILARRPRKVVAVALANKMARIAWALMLRGETYRQPTLRSAA

SEQ ID NO: 377294 - protein, 400 aa, unidentified
MLSIGIDVSKGKSTVCGMKPGGEIVYAPFEVQHTREGMSELVSLLHNSGEEVRAVLESTGSYHCPVVAALLENGIFVSVVNSLRMKRFCSQSIRKVKTDRIDAMQIALYGLAYWQELQPTKLPEDTYRELQLLARQYYQMTSLLIKAKVDFNAICDQVLPGMQELMNDHAGRHKLSDFVLRYRHTTHILEMGETRFRKDYCKWAEKKGYRNCERMAALIFATAQNGIPVLPNAPSTQIVITEAIRVLHTVEASRDAILTQMQALAKTLPEYSLVREMPCIGDTLAPRLIAEIGDVRRFHSKRALIAYAGIDAPPYQSGKFCANNRHISKRGNRYLRKTGYEVMQSYVMHKPANDPIFTFIEKKRSEGKCGKLAMVAGLNKFLRIYYGKVTELYRSLSAIE

SEQ ID NO: 377295 - protein, 343 aa, unidentified
MQVVRIGLDLAKYVFEVHGVDADGNVVIRKTLRRGSMSTFFANLPRCLVGMEASNGAHYWARVLTDLGHTVRLISPQFVAPYVKSNKNDRNDAEAICEAVGRPTMRFVPPKSPEQLAIQALHRIRQRLVRSRTRLVNQIRGILSEHGIVIARDIWRLRRALAEIAGNIPDDLNSLVGVLMMEAYAELIELDRRIASCDRRIRELYRTSELCQKLGEIEGVGPVTATALVAAVGDRSCFKNGRQFAAWLGLVPRQRSTGGRARLLGISKRGDRYLRTLMIHGARAALGKAGGKQDPRSRWLAGLRQRRHPNVAAVALANKNARVAWAMLAGNVSYEPARSVQAA

SEQ ID NO: 377296 - protein, 382 aa, unidentified
MSTATVSFASFAGVDLHKNTVTLRAVDPRGQPISGLTCDTKCVDRIRDWMLALPKPSHLAVEAVGFVEWFIDRFRPCVDKMEIADATELANRRGKRRKTDDKDALDIALRLARGECPLGWIAPEPVMQLRKLGRHWRSLSRTLSRTKHCMKSMLLAANLRGPKFDGASAQKWLLAHGDLLKDVQREAFGNFLDIVCLIERQRQSLRRRIIFANREERFSGLTTILKSVPGIDEIWSCIIAAEVGEFTRFPNADALEFWSGLTADLKESAGRTQSGHITKAGSATLRWAICKAAITLCRSDGKQEAIRQRLIRRIGKPKANVAMGRRLLRILFAMVRDGALYLGADKKGQVKTGHQHAANKARLRQQRVKERKELQGKELVPA

SEQ ID NO: 377297 - protein, 395 aa, unidentified
MNYLGIDIAKTNHVASLIDGEGKVLVRAIKFTNSNEGFDKLLSALKDYDLSNIVVSMEATGSYWLALFSALVDKGFDVSVFNPFQIKSYRTAYSNRKQKTDVIDSIIIGDYLRVFGTDKTVLPKDEVLSLRTLTRFRSNLLANIVTAKTQIIGILDKVFPEYKQAFYNIFGTTSLALLKECPTAQDIANINTRKLANLLSNNSRGRFGTKEAKVLKELAKNTFGIKFTNNACSFEIKQLINQIIFLEEQIEQTQNEIEIIYNKLDSHLLSVPGVGRILAPIILAEIGDINSFDKPSKLLAFAGIEPSKNQSGNKDSTNEKTSKRGSPFLRNAIYNAALTAMKAEPSLRAYYDKKKAEGKHHTVALIGVCRKLTTIIYYVLKENRDYKSYAEVTSK

SEQ ID NO: 377298 - protein, 320 aa, unidentified
MDGVLGIDIAKAKFDVTLLLANGKRRRKVVTNTPAGWMELQAWLERQGVPHVHACLEATGTYGDGVATWLHDHGHRVSVINPAITAAYAKAQLARAKTDRVDADLIADYTATHHPPAWTPLPLEVRELQALVRRLDALLGMQTQEQNRLQAGALVPAVATSIETVLASLAAEIKAVRARITDHINRHPNLRTQRELLRTIPGIGDATAAQLLGDLLHRRFTSARQAAAFAGLVPRIRESGTLRGRPALSKLGSGRLRKALYFPALAALRFNPTIRAMAARLQRAGKARMVIVGAAMRRLIHVAYGVLKSGRAYDPDLVRA

SEQ ID NO: 377299 - protein, 421 aa, unidentified
MLIHQTSADVMFAAYVGIDWADEKHAVCMLEGTGQIEQALDHSPEAIAAWADALRRRFDGRMVAVALEQSRGALIYALMQYEHLMLFPVNPTQLARYREALSVSGKKDDPGDAHLLARFLRDHRDCLRAWKPDNVQTRELARLCELRRDIVDARKKTIQQLIASLKQYYPQALQLAGELHKPLALELLRRWPTLKQLQRAHPGSLRKFFRQYGHRDDEKINALVQSIRGFQPLTKDDAVIRPSALYVGLLIKQIEQFNQAVSSFEEQIAKRFAEHPDAEVFRSLPGSGPALAPRLLTAFGTDRERLQMAAELQSYVGIAPVTVRSGKFCRVQRRYACPKFLRQTFHEFADQARRWSKWSKAYYQLLRDRGKKHHAAVRALAFKWIRIIFRMWKTRTPYDESKYLESLKKNGSPIIKLLETT

SEQ ID NO: 377300 - protein, 339 aa, unidentified
MSIVMGLDQHRGQITGVWIDTETGELQRTRVAPADRAAVREFLERFRGLELEVALEATTGWRFVVEELRRVGAVVHLAEPAETAGLKGPKKRAKNDRADARHLRELLMVGRLPESWVPPDHILDLRARVRLRHTLSEQRSEWQQRIQATLYHQGCPQRRQLMTAGGREWLAEQPLPAAAREQITVATLMVDALELQITPLDKELRAYARRQAGCRALMAHYGIGELTAVTILAELGDCTRFSSSRQAVRYAGLDITVYQSDQRRAPGHISRQGPPALRWALYEAAQVARRGERSPDREYYLEAKERIGAGRACISVARKLLKRSYHTLRELGEEALAPA

SEQ ID NO: 377301 - protein, 412 aa, unidentified
MFKIFRNNCCGLDVHKTWIYACIGITDPNGRTEYKQARFSSFSKGLRKLAAWLAKYSCTEVCMESTGKYWIPVFNILEKSCFVTLAHPKYTKPQKGNKTDRKDAKWICDLFMCDMIKPSFIPSPEIRQLRDLVRYRVKLTNMLTGEKNRAQNCLTVSNLKLDDVFSDVFGKSARSITNYILEHPGETFDVSPFVDPRCKTPVSEIQAAVDGAISPEQAVKLRQCLAHIDELEAHRKEIESEILQIAEPFSAVLDLLSTLPGLDKNPMTAIAILSEIGPDMSVFPSSKHLVSWAGCCPRNDQSNQKVKSRRISRAGSYLKPLLVQVANALIKSKKHPEFKERYHRIKSRRGHKKAIIAVCKMLLTAIWNMLSKLEPYNPEGFLEHRPVKQEKTLTVSQALELLRLRGYTITNQ

SEQ ID NO: 377302 - protein, 357 aa, unidentified
MSKRSGSLQSKRSDPLQPTVFCGVDVSAATLAVAIQQDDQPLEQREFANNASGHKALIACLHKRKARARVSLEATGIYSLDLGLALDAAEQIEVAVLNPKVVNRFAQSLRRSKTDSADAWVLAEYSQRMGFAAWRAPSRSGLQLRMISRHIDGLTIEHTREQNRLHAARGSATPGCVVQDLKRSLASLERRMVRLRREAMGLIQSDETLRRRFELMISVPGIAQISALQVLGELATLSPELSVRQWVAHSGLDPVHEDSGTSVHRPSRISRAGNRHLRRALYMPALVAVQRDPHLRAFYELLQSRHKAKLQALIAVARKLLHAIYGIFRSQQPYDGRKLFPALPLKEKKTLQIERES

SEQ ID NO: 377303 - protein, 350 aa, unidentified
MLIIGCDFHPRYQQIAMMDTETGELVERRLEHENGEARAFYASLPKPVLVGMEATGYAQWFERMLAEFGHELWIGHASEIRAGVVRKQKTDARDAHHLLRLLLEKRFPRIWIPSPAERDARQLLRHRHKLVCFRVSVKNQLHGLAMSQGVCRKKKLFTAKGREELEKLSLGPWGSRRRQELLGMLDQLNPVIEELDRAVQQQAETHADAARLMTHPGVGPVTALAFVLTLGPVARFPRSKQVVSYLGLNPKERSSGDKQHTYAISKQGNTMMRWLLVEAAQTAVRFDPELLRVYQRLKFRKGANVAKVAVARKLAVKLYWILRATASGAQMAPMQGSSRGTLVPQVGSSF

SEQ ID NO: 377304 - protein, 322 aa, unidentified
MAMLSFGGIDVSKDRLDVVVLPEEECSSVPNDAAGWAELVERLRCFSITAIGIEPSGGYERGAMRALLAAGMPVRQVNPFKLRQFARASGVLAKNDPLDARMIASFVTIMPTRPAQRQTPAAERLAEMLAIRRQLSAEKVAAENASRLLEDAMLQRLSRRRIVRLAADIDLLDKRMVEIVATDDALVHRYRLLTSMPGVGAVLACTLIALLPELGRMSRKQVAALVGVAPYAFESGTLKGRRCIWGGRAHVRQVLYMAAMSASNWNPVLKAFHDRLTAAGKLPKVVIVAVMRKMITMLNAMVRDGVVWADCLSGRHVLPTAR

SEQ ID NO: 377305 - protein, 343 aa, unidentified
MNITTTGLDLAKSVFHVVCFNNQFKEVKKRMLRRSQVLHFFTQLPSCRVAMEACASSHYWGRELRALGHDVKLIPPQHVKPYLRGNKNDYNDARAIAEASTRPGMPFVAIKSTEEQDMQAIHRMRSQCIRDRTALSNSTRGLLGEFGIALPKGLATLRQSIHGILEDADNGLSDRFRKLLARRYDQFVALDDHIAFYTNELEILSQQDDACQRLQTIPGFGPVISSAFRSVIGDGRAYDRGRDASASLGLVPRQHSSGGKNVLLGISKRGDRYLRSQLVHGARAVVIQAARKDDPLSKWINRIREERGWNKAVVATANKMARIGWAILRHNTIYQPASEQSIH

SEQ ID NO: 377306 - protein, 318 aa, unidentified
MSHGYDKYVGIDVAKESLDVSGLTAGSPSQFENTAAGRAKLLSLLPQAGACLLVAEATGGYERELVAEVVAAGHHIAVVNPRQVRDFAKAIGLLAKTDRIDAGVIARFGEATRPTPQGFSEQQEQLRELIVRRRQLVDHRTAEKNRCEQAHSTLVRNSVRKSIEGIDKDLTRIDRAIIQLVESNDDWRGRYERLKSVPGVGAQTAATLMAELPELGRLNRQQVAALVGVAPFNRDSGQFRGRRTIWGGRATVRSGLYMAALSAKKHNPVIRAFAARLLAKGKPPKVVLTACMRKLLVILNAMLRSDEMWGPRLATLTQ

SEQ ID NO: 377307 - protein, 341 aa, unidentified
MQDVTLIGIDLGKHSFHVHGQDRQGRALLRKKFSRKQLVEFLATFHACTVVMEACAGAHHMARLLAHYGHHVKLISPQFVRPFVKSNKNDFIDAEAICEAACRPSMRFVTPKTESQQCLSALHRVRETLVRERVKANNQIHGFLLEFGISLPVGHAVIRRLPSVLAEQALPARLVALLERLHSHFKYLDEQIADIEKELGRQLHDDDPGQRLMSIPGVGPITASMLAAEVGDGKQYRCGRDFAASIGLVPRQYSTGGKNNLLGISKRGDKNIRRLLVQCARAYMQRLERQTDRMAQWVRSMLMRRHSNVVACALANKLARTAWAIAAHHTEFKRQEAVMVA

SEQ ID NO: 377308 - protein, 424 aa, unidentified
MTYSEIKSTEFAAYIGIDWADQKHDICLQEAGSNQIESLQLDHKPDSINDWVSQLRQRFQSKPIAIALEQKRGGLLYSLMHYEFIVLYPINPKALSSYREAFATSGAKDDPVDAGLLLEMLRLHRNKLRAWTPDDPLTREIGLLVEYRRRLVDDRTCLTNRLQALLKQYFPQALDWAGELGSLLAIDFLARWPQLEAIQKASPEQVRDFYRSHGCRLGAKLPERLAEISAAQLLTTDRAVVNASITMVQALLEPLRGLIAAIESFDQQIKVCYEQHLDKEVFNSLPGAGPVLAPRLLAAFGADRERYQSAEEVQCFSGIAPVTERSGKTKFVHRRLACPKFVRQSFHEFAKSSIIWSRWARAYYDQQRQRGNKHHEAVRALAYKWTRIIYRCWQDHEPYDEDLYIAKLELRGSPLAKLISAQAE

SEQ ID NO: 377309 - protein, 349 aa, unidentified
MLIIGVDFHSRFQQIAMVDTESGELVERRIDHSNGEAQKFYVELQKPVRVGMEATGYAQWFERMLAQLGHELWIGDAAEIRAAMVRKQKTDARDALHILDLLLANRFPRIWMPSPAERDLRQLLRHRHKMVGLRTSVRNQLQALAMGQGVYRKRKLWTAGGRTELEALGLDPWASRRRQELLEILDRLDPILAELDRAVAQAAEQRPAARCLMEQPGVGPVTALMFVLTIGPVERFRRSKQVVSYLGLNPRESSSGGRQRLGAISKQGNSMARFLLVEAAQTAARYDEELRRDYQRLKFRRGTAVAKVAIARKLAVRLYWKLRKLNSVVPPTRMQGSPENPLVGASLSS

SEQ ID NO: 377310 - protein, 401 aa, unidentified
MNAVGIDVSKGKSMVCVMRPFGEVVLEPFEVLHTAQNLHDLAEKLKALDGETRVVLEATGNYHKPVAFVLHDAGLFVSVVNPVLIHDYDNNSLRRVKTDKKDAVKIANYTLDKWTRLRQYLPEDDTRLALKNCYRQYQQAVAVRTMLKNNLISSLDLTFPDANKLFSSPAKSNGCEKWVDFIGDFWHSECVSSLSSDAFAKKYLKWCQKHGYNFTRSKSDTIYACAVNAASLPKSPTSKLLIQQQVAQLKAVSQSVAAFQQEMLRLSQQLPEFDTVMEMYGVGPSLGPQLMAEIGDIRRFSSKKLLIAFAGIKPQPNDSGKIVGNDSGISKVGSAVLRRTLFLIMTVILKTQPQDEPVFQFMNKKRSEGKPYKVYMMASANKFLRIYYARVKAVMDSKHSK

SEQ ID NO: 377311 - protein, 339 aa, unidentified
MRMFAGLDVGFKRTSVCVVDQAGKIVWRGVVDTHPEMIAAALHRWRGELAKVGLESGSMSPWLARALGAMGFAVVCMDARRAADAIKSRRVKSDKADAYALAEMLRTGWYSTVHVKSEASHRLKALLGSRELVRAKRALGNQVRGVLRPFGIRLPSRQGTKKLSTAAHHAVRHDAMLNASVTALLEALAAIEAQIARLDQQLRELARRSPVCWRLMSVPGVGPIVALAFVATIEDVGRFRRMRDIGPYLSLTPKRYQSGETDVVLGISRQGDAMARHYLYEAANVLLTTVRSPSALKSWGLKVLKRRGPKRARVAVARKLAALLGRIWKDETHFDAATA

SEQ ID NO: 377312 - protein, 352 aa, unidentified
MEVTTIGLDLAKSIFRVHGVDTTGQVVVRRPLRRAQMLPFFARLPSCLVGMEACGTSHYWARELIKLGHEVRLMPPAYVKPYVKRGKTDAADAEAVCEAVRRPTMRFVPVKSPEQQAVLSMHRARDLLVKQRTQLVNMIRSLLAEFGLNIPKGLERALLMARRIVDGKAPDVPMEAAKIVSTLSQQALDIHVRLRQIDRDLLVWQRGNDVARRLMTIPGIGPVGATALAASVTDPHQFRSGRQFAAWLGLTPLQKSSGGKERLGRITKMGDKYLRKLLIVGMTSLVCRAKHNPQTIEPRLANLLARKPVRVATVAMANKTARTIWAIMTRGETYRAGHQPALAHNNNVTRIS

SEQ ID NO: 377313 - protein, 344 aa, unidentified
MTIVTIGLDLAKTVFQVHCVDENGRAVVRRQVRRADVATFFGNLPRCLVGMEACGSAHHWARLISALGHDVRLIAPTRVKPYIQRGKKNDANDAAAIAEAVTRPHMVFVPVKTEAQQGVLMLHRSRDLLVRQRTMLINALRAHLAEFGIVAAKGRGKVKNLIAGLDDAEIPALARNALGQIAELIDGCDQHIETLEKQIVAWHKGNEASCNLATIPGIGPITASALAASVPDPSAFDSGRKLAAWLGLVPRQNSTGGKARLGSITKAGDSYIRRLLVIGATSVIRYARAKAPGEAEWLKNLLERKSPRLASVALANKMARIAWSVLTRGEVYTKNYRSPVLVAA

SEQ ID NO: 377314 - protein, 341 aa, unidentified
MVHVGLDLSRTRLDVHVMDEAGSALAITTAAPDRGGLAVLASRIDGFGGPVYAAIESMNGARFVHDQLELAGWQVEIADAQKVKGLAPLACKTDKIDAWVLAELSRRDLVPAIWLPTPTVRAERERARWRLHLVRHRTALKNRIHATLLAFGHPCPVSDLFGVGGRELLARLELPEPWAADTTAALQLIDQLDVEITAGERALRRLGADHRYVPLLMTTPGVGWVLGYTIAAEIGDITRFATPTKLAGYTGLCPRVYQSGGKDHRGPLSKNGPKYLRWALIEAATHACRHPIYAERYRRTKTRLGRQRGPKIAQVDLARRLSEAIWHMLSTNRPFAPAGAA

SEQ ID NO: 377315 - protein, 326 aa, unidentified
MQGKEASEQETKAKSSVGIDVSKDWLDVHALPGEERLRVPNTCDGIRQLKRWLRRFDLALVVVEATGKWHRPVQRSLTASAIAVAVVDPFRVRMFAKAQGILAKTDRLDARVLALFAAMMAPPVRPPAPQALAELAELVTARMSAVEAQTALKNQRAAATVKFLQRQLERRIERADKDIAALEAAIRKRIEADESLARRYAILTSIPSFGFVTAATLIACLAELGSIGAKQSGMLAGLAPIADQSGLRDGVRVIWGGRARVRRILYLAALSAARFNADLKAFYQRLTASGKPPKVAFIAVARKLVVLANTLISQDRMWQPQAPKHA

SEQ ID NO: 377316 - protein, 410 aa, unidentified
MGYETLIRRAHVMTRKNTLKSLPTDTEFRVVGLDLAKSDVSVAAIPVDDNTPSLVDRMTYADLLDWAGKISPTLFAMEPCNGYSLLCLQLENLGHEIKVISGWTVSMWINTHLSGQKTDLNDAIALARLAVSDAELTPIRHKSITEIRIQTVQAVRQQLMSQRSKSIVSFKALAQQWGIPCAAGHRNLKKLRESIEAKVDLITRPVANAMLFLLDAVKSLDRQIGQLNQTLQELVMSDERGRLLQSVLGVGTQISARVITVVGNIERFNSPSSLVAYVGVAPRNFITGHKNLTKKKHGNCPDLSHKGQGKISRRGDKLLRSLFIQGAACLYMQFCKDQLPECQLKRWILKQLASQKPYGKLIVSLAAKLIRIVWAVLTYGEKFNIQKAGMTRSMWSEMALETPLNKEVPA

SEQ ID NO: 377317 - protein, 353 aa, unidentified
MKRDKYMGMDVHQATTVVAVIDVEGKTVLETIVPTAGGPIRRLIESITGPVHVTLEETTQAEWLHDLLQGFVAEVVVCDPRRNKLLVEGSKGDKADARKLAELLRTGMVRSVWHGRKTTRGLKEVVRAYETFAVDTRRTMMRIKALYRSRGIATTGSAVYQKKEREGWLKQLTEAGMQQRAAWLYEQLDHVRELRKRAKAAVLSEGQEHQSVQLLRTIPQVGPIRAAQIVATAGTPHRFRTKRQFWSYSGLAVVTHTSAEYEMREGRVVRRNKPVATRGLNANCNRRLKSVFISAATAGGSSHPWQPYLDHLKEKGMRPDMARLTLARKIAALVLAIWKKGESFDPKKLNWTN

SEQ ID NO: 377318 - protein, 402 aa, unidentified
MNAVGIDVSKSKSVVAIMRPFGEIVSTPFEIKHTASDIHSLIELINSVEGESRIVMEHTGRYYEVLAHQLLEANLFVSAINPKLIKDFDNDSLRKVKSDKADAVKIARYALDKWQNLKQYNVMNELRNQLKTMNRQFGFYMKHKTAMKNNLIGILDQTYPGVNTYFDSPARSDGSQKWVDFASTYWHVDCVRKMSLNAFIDHYQNWCKRKKYNFSQSKAEEIYGKAKELVPVLPKDAITKLIIKQAVDQLNSASTTVESLRTLMNETASKLPEYPVVMAMKGVGTSLGPQLMAEIGNVSRFTHKSAITAFAGVDPGVNESGTYEQKSVPTSKRGSADLRKTLFQVMDVLIKTHPQDDPVYQFLDKKRAQGKPYYVYMTAGANKFLRIYYGRVKEYLSSLPES

SEQ ID NO: 377319 - protein, 346 aa, unidentified
MVIVGCDFHPRWQQVAIFEAATGEIGERKLVNGNGEAEQFYRSLPVPSLVGLESCGNSQWFLELMEQLGHEVWVGDAAQIRASYVRKQKTDRRDAGHILKLLLEGRFPRLWRPDAAVRDLRQLLIHRHRLVQIRTRVKNGLQHLAMNRGMQKKSKLWSAAGQRAFLELPLPGWAGCRREDLLALLAKLDEQIRPLEAAVEKAAFTHEQARLLMTQPGVGAITALAFVVTLGDANRFQRGKQVSSYLGLIPREHSSSGQQRLGAISKQGNSFMRMLLVEAAQTAVRLDEGLRKKYQHRCHSKAKGVAKVAAARKLAVRLYWMLRTNTPYPEIVHNESSSRCPMAGAS

SEQ ID NO: 377320 - protein, 337 aa, unidentified
MPQPNDLSRSLVALDQDSTIIAVVEMSQSSWLVAGVLPGVERQPRKKLEPSAERLLCLLHRWRDEAVRAGKKITRIALAFEAGRDGVWLARWLSARGVEAHVIHPSSVAVSREHRRAKTDRLDTEMLKRGFLGWLRGERGHCSMSRVPTIAEEDAKRPNRERECLVGERTRIINRMKATLARLGIRNFKPTLRKAAERLATLRTPESTPLPPNVSAELQRDMARLGFVVSQIREIEEARQKRLEQEPETGPHAMVRLVARVVGVGIETADMLVHEVLSRPMRDRKAVARYAGLTGSPDESGAKRREQGLARAGNARVRRGMIQLAWRFLRFQKQSAR

SEQ ID NO: 377321 - protein, 398 aa, unidentified
MNATGQVLEQRWIEHNGSSLADLADWLTKQSQQAPACLAAAIEVPRGAVVETLMERGFAVFSINPKQLDRFRDRYSPAGAKDDSRDAMVLADSLRTDMHCFRRVQLDDPTMIRLRELSRLEDELIQEQNRAINRLREQLHRFFPQLLQLSENVDEPWLWTLFETAPSPARAAKLSLAKIQALLRQHRIRRLNAEQVLAILRSQPLSLAPGAAEAASEHALLILPRLRLLHQQHTDLARRIETILRQLAASEPGLAEHRDVAILLSLPGLGRKVAATMLSEASQAIADRDYHALRCYSGTAPITQQSGKRKIVLMRRGSNERLRNVLYHWTRVSMIRDPVSKNTYAQMRAKGHSHGRALRGMADRLLKVLMSMLRHKTLYDPKFRAADSNGSSPLQASN

SEQ ID NO: 377322 - protein, 385 aa, unidentified
MVYIGIDIAKFKHFASVVSQDGKVIVKPFPFENSRQGFMKLIEEIENFQDCLIGLESTGHYAENLIQFLYERNYSVALINPIQTDSIRDSNIRKTKTDKVDTMLIVQCLMLKKYSLVSSKDIDLIKLRRLSRFRLEMVQQQTRIKTQLTACLDIVFPELAHFFKGNLHLKVSYALLEKYSSAKAIRSARIDGLTNLLFNNSRGKYNYEKALQLKALAKDSIGLDNPAIELQIQCLIKQLRLYQKQISDIDISIMTIMEIINSPILTIPGVGYTLGAMIISEIDDIKKFSNPSKLLAFAGLDPVVKQSGNFQAEHMKISKRGSTYLRYAIYRVAFLIIYNNETFHNYYLEKRAQGKTHRVALGHVCNKLVRVIFKILTDETPFNLS

SEQ ID NO: 377323 - protein, 414 aa, unidentified
MFAVGVDVSNGRSTVAVLQTKTSTLMKPFEIPHTAEGFASLAGKLAGLDGEVRIVMEHTGRYYESFARAMHSAGFFVSAINPLAIKNYQDGINIRKVKTDKADAMKIARFALDKWEILPQYTPMDTIRYDLKTMHRQFQLSSKTKTALSNNLIALLEQSYPGANQYFDSPVRPDGSQKWVDYVDTFWHVDCVARVSQNAFVERYRKWCKRHGYNFSQQTAIDLHTDARQKFPLVPKSDTCKLLVREAVSQLNAVSRTVETYRTEMDRLASQLPEYETVMAMTGVGKSMGPQLMAEIGDIRRFPHQKSIVGFAGTDPIKDDSGDKVSDSKPSSKRGSPYLRKTLFVIMSILLQLHPQDDPVYQFLDKKRSEGKPYYVYMTAGMTKFLRIYYGKVRDCLKEQGLWEQTPDATGKAD

SEQ ID NO: 377324 - protein, 355 aa, unidentified
MDNTKYIGMDVHTESISIAVRNGAGKIVMECVIETKASMILEFINGLRGDLQVTFEEGTWAAWLYDLLKPHVTELVVCDPRKNASMREGNQSDKIDARRLAELLRLNHLSPVYHGEHGLRSLKELVRSYLTITKDLGRVMSRVKAIYRSWAIPCTGKQVYAPRHRVEWLGKISELGVRRRAEFYYQQLDALRAWRQQVRRDLLAESKKHPAWKRLCQIPSIGPIRAAVMLGILQTPHRFRTKRQLWTYSGFGIETQSSADHRRIDGQLERVKKASSIRGLNRNCNHDLKNLFKGAAIVASSKPGPFQEFYTALLSKGIRPEMARLTLARKIATIALIVWKRGASFDAQHLKPQTA

SEQ ID NO: 377325 - protein, 461 aa, unidentified
MAKKAKKVKTAKGAELRIVNPDAAGIDIADGIMQVCVPVDRSKDNNRAFGAYTSDLHAISAWLRECGIKTVAMESTGVYWIPLFCRLQEDGMDVVLTNARDVKNITERKTDESDAEWLMLLHQYGLLKASFQPHNDAKRMRTLTRHRDTLSREASSIVLRMQKAMQQMNIKLTLVLSDITGKSGIRIIEAILAGERDPKKLADLADIQCKTPKEEIAKALEGNWEEDLLFVLRQNYDTFKHFCSQLDRCDTELEKLMENYRTEVAGTGRPSYSPTKKRRDYHKRKRNVGFDVERKAYDMWGVNVFEIPGISHLTALGLMSELGHDFTRKFPSSKQFCCWCNIAPNTKISGGKRISSHVPHRRNNVGLIFRSIASSLANAKNLLGNFYRRIRSRAGGKAAVIATAHKVAEIFFAMVANQTTYNPEKVGIDEKVLLEKRIARYKRELERITGMHIEIGNACVP

SEQ ID NO: 377326 - protein, 406 aa, unidentified
MQGPVITVDVSKGSCHYQPYLENGKPWRKPKVLHDTIEGFAELSEVIEKVKQKSACDCVPVVFEATGVYHRCLQKYLDDHDMTYYIISPLLSAAYRKTNINGNKTDALDCAHIAKAFYGESDLKPYSGPTDHYAFMRSLNRYYEQELGHLRKRKVSFRSALDIIYPRMDKCFKGKDSLYNPVSLEVLKIYPHPSLLLKHREETIVKKIAKRTNHSQIFVAPIVHKMYESAQHCYSGAHVYDFEVITLPDLITELQNQMERCEQLLDQLVEEAKKDANFRSVVSIVGIGENLAARIIAELGDVSRFPSRRAVTAYAGLNPKIQQSGDVDGIHLRISKKGNRHLRTLLYLGASCNYRLKKHDPIYEFNQRKRQQCSYPLKHKAANIAAAHKMLNIIYALSRSGELYRF

SEQ ID NO: 377327 - protein, 358 aa, unidentified
MLQLLKRRKGNDMEVYIGLDVSLASTAVCVLGEKGEIVTEARVASTPDALISFMHRLPCGIVSIGLEAGPLSQWLHKGLAVAGFEAVLMETRQVKAALKAMPIKTDRRDAEGIARLLQLGWFRPVHCKTVSSQEMRALLTSRKSVKETLTAMELSLRGVLRNFGLKLGVVSKGRWEARVRELIAGNPMLEAAGEPILRARAALRRELAGLEKLVRKLAGTDPVCALLMTMPGVGPVVALTFKSAIDDPERFRRSKDVGPWAGLTPRRHQSGERDIVGAITRAGDVGLRTALYQAATVMLHGGAPNWLKAWALRLAVLRGKKRATVALARRIGVVLHRMWRDGTEFRFTREAAMAGRAA

SEQ ID NO: 377328 - protein, 417 aa, unidentified
MNSPPETIVIDRYIGIDIHKHYVMVGGQNANQEWILKPRQVQMVHFRSWAEKNLKEGDAVVVEATGSVWDIYDIVAPLVSKTVVANAHKVRQIAEARVKTDKEDIKRLITLLIADIVPEVWVPPTHVRELRSLISFRWRLSKQITMSKNRLHSVVQRFNLNAPEGGLLTDKNRSWWEEQNFSDLTGFQVDRDLEIVANLESQKAAIDQKLAELSNSEPWASDMVYLMQIPGMGLIFSMVVLSAIGDISRFPDPGKLVGYAGLGAGVHISGEKHQEKSITKAGRKELRWALVEAAWVAVRFDPFWKAQYQRLRVRMHPNKAIVAVARRLLVSIWHILTKREPYRHFDEETIAYKMLIWAQAIGEEARNDMTKQQFAKYGLLRLGIGQDLERIVKGGGPRRIAPAEEVLALRPELAPPR

SEQ ID NO: 377329 - protein, 370 aa, unidentified
MKSIVYIGMDFNKKSYSLCAIDGDTVEILGETKISPDVKLIVKFINNARKKAQKDADVLVGYEAGCLGYSLYWQLKEKGIACDILAPSTMHRSAKNKVVKNDKRDAQMIATNLANKSYKSVYVPNDHDVEVKEYIRMMNDFKGESKKVKQHINAFVLRLGYRYEGKSRWIPSHIKWLKELKLDPMYREILDEYLSQLELLETKIGRFQHKLEELSQEEPYKEKIGELRCLKSIDTTAAMTLHAEISDFNRFPTANAFSSYCGLTPGEDSSGDKNKRLSITKQGNAVVRETLVECAQVLVRGTVGKKGKKVISKQKGQDVKVIDYADKAVIRLQKKYHRMILKGINRNIAITAIARELSCFVWGIETGHIN

SEQ ID NO: 377330 - protein, 369 aa, unidentified
MNKSSTIVGLDVHKKAITAAVLPPTMTRPREVLTIENERRAIARFVRRVIAHHTATFVYEAGPCGYEVHRQITALGCPAAVIAPALTPVRPGDRVKTNRRDAEKLARLYRAGELTEIRVPSRLEEAARDLVRAREDATADRLRARHRLDKFLLRQGRVFHETKAWTVAHRQWLRTQRFDLLLLQRTFDAYLRAVEEAEDRLASLDQQVLELAHTAPYQTPVKYLRCLKGIDTLSALTILVETQEFRRFPDAPAYMTFTGLVSSEDSSGDRIRRGPITKAGNAHLRRVLVEASWNYRRRNITGPALSARRHGCPTTVVQIARRAQDRLHRKFWRLTSRGKLAQVATVAVARELAGFIWAIAREFPTARVA

SEQ ID NO: 377331 - protein, 343 aa, unidentified
MRFYTKTHKHYCGIDLHAKKMFVCILDAEGTVVLHRNITTSPEDFLKVIAPFREDLAVGVECMFAWYWLADLCSREDIEFVLGHALYMKAVHGGKVKNDKIDSQKIAGLLRGGMFPMAYVYPPEMRATRDLLRRRCFLVRRRADLFAHVRSTAIQYNLPEIEVSLTYEGPRSTVPDHFPDPEVRKIVQIDAYDDVIGALEWELEKTSRRQDRRTLSLLCSVHGVGRILSMVLLYEIHDINRFESVQDFASYCRLVKCPHESAGKKKGTGGAKIGNAHLKWAFSEIAVSFLRHNPPAKQLVERLTQKHGKGKALSILAHKLARAIYYMLKSSVPFNREKFLATA

SEQ ID NO: 377332 - protein, 347 aa, unidentified
MARSTVHAVTAIGIDMGKTTLHMVGLDSRGAIVAREKVSRRRIASRLANLPPCLIGIEAGMATHYVARELAALGHDVKQVPPTYAKPFRQGHKNDFRDAHAVAEAVQRPTTRFVPVKTDEQLDLQALHRVRSRLVSERTAVINQMRGFLLERGIIVRQGLRFLRQLLPDILAKRTDVLSPRMIRIVIDLAGDWRQLDERIETVTDEIETLAKSDDSCRRVMTVPGIGPIISSAMVAAIGSGAAFAKGRDYSAWLGLVPKQMSTGDRTILGHISKRGNGYLRMLFIQAARVILVRPANWPKHGFGAWLVRAAQRLHPNVLAVALANKLARIAWTVLAQERSYEARVMK

SEQ ID NO: 377333 - protein, 359 aa, unidentified
MIPKKDGKKKLGQASFDGKDCWVGVDVHKVNYAVAILDEDGQRLEFSTVADPKRLLLKLFKMGMRIKVLAYESGPTGYGLAWACQENGIPVVVAAPSRIPRPVSKTGKTDRLDSMKLAEYLVRDMLKGIAVPSREEFALREMERARQRLVKRRRVARQIIRSFLLRNGLEEPSGLDSWSASSIQALRGMPLPVYLRLSLDSYLEEHATILAALSTITEELAKATIEQGHGERVKNLRSIPGVGVTIAHTFTSEVFRPERFTRAEDICAYVGLAPTTSHSGSGKERAWLRPVGQRYLRSILVESAWILVAKEKVYHDFYVRIRNKTGLAQKAIVAVARKLLVLLWRIAIEGRPYRPAMAQ

SEQ ID NO: 377334 - protein, 340 aa, unidentified
MDITTLGIDIAKSVFQLHGIDADGAVVVQKKLRRGAVLNFLGKVGPCLIGMEACATSHYWAREIAALGHEVRLIPPAYVKPYVKRQKNDAADAEAISEAVTRPNMRFVPIKTEEQQSVLVLHRARDLLMRQRTMILNAIRGHLAEFGIIAAQGPRQVMGMIARLRDDGDASLPEIARSALLALGAHLEALAGEIRTLERQLMVWHRADPTSQRLETIPGVGLITATALAASVSDPSVFKSGREFAAFLGLVPRQNSSGGKDRLGRISKMGDRYLRKLLVVGATSVIRRAGSNPTKTGAWVRSLMERKPARVVTVAMANKTARIAWAVMTRGEAYRASPIA

SEQ ID NO: 377335 - protein, 335 aa, unidentified
MQCKTIGLDLAKNTFQVCGVGEHSTPIFNRKLKRNQLVQFFAQQPPTTVVMEACYSAHYWGRELAKLGHYTKLIPAQHVTPFVRGNKNDHNDALAIVEASQRPHVRFVPVKTEYQQEILSLHRVRERLQRNRTSLVNQTRGILSEFGVIAPVGVKNLRAKLAHVIGDTSCSQGLRNIVANAYIELLDTEQRIEDIEQRLKAFLDEHPCRDIIMSLPGVGLINASAFLASIDKGQAFHSPREFAVWLGLTPQLYASGDTHRMGGITKRGDRYLRTLLVHGARAALSRARNKTDALSVWGNQLVHRRGYNKAVVAFAHRLARRRIIQSVSPTVVSHG

SEQ ID NO: 377336 - protein, 326 aa, unidentified
MEHELHYIGIDTAKEKLDVDVLRPDGRHRTKKFANATKGHDELVSWLKGHKIDHAHICIEATGTYMEPVAECLYDAGYIVSVINPALGKAFAQSEGLRNKTDTVDARMLAEFCRQKRPAAWEAPHPLERALRALVVRHQALTDMHTQELNRTETAREVQRPSIDAHLLWLEAELKRLEKQIKDLTDDDPDMKHRRKLLESIPGIGEKTSAVLLAYIGLKDRFAHARQFAAFAGLTPRRYESGSSVRGASRMSKAGHVSLRRALYMPAMVATSKTEWGRAFRDRLAANGKKGKVILGAMMRKLAQVAYGVLKSGVPFNASRHNPVAA

SEQ ID NO: 377337 - protein, 348 aa, unidentified
MRFYTISHKHYCGIDLHTKMMYVCILDSDANILIHKNIPTNGKAFLKLIAPYREDIVVGVECMFSWYWLADLCAKEGIEFILGHALYMRCIHGGKAKNDKVDSEKIARIMRGGDFPLAYAYPAELRPVRDLMRRRSHLVRIKSEIQSHISITNYQYNLEPFDKNIVHKGNREGIADHFDNASVRLNVETDIAVMDSLHDQIRNLENYIIRHAKDYDGRMLYRLKTVPGIGDILDLTIMYEILSIDRFPTVQNFCSYSRLVKCANESAGKKMGTSGSKIGNAHLKWAFSEAAILFIRGNDKAQKYVTKLSKKFGKGKALSILSHKLGRAIYFMMKRNDVFDMNYFFRNS

SEQ ID NO: 377338 - protein, 349 aa, unidentified
MWTRVMIVLGADTHKRSHTLAAINVATGQVLGDKTVQVGPRGFATLLGWARELDGQRVWALEDCRHVSGALERFLLGRGERVVRVSTRLMAASRRSSRQRGKSDQIDAVSVARAALAAGIETLPTAALAGVELDIRLLVDHRERLVRTRVALNSTLQWNLHDLWPELALPGGALFSKKWTSKIARRLARAEQTMRVRIARDELRRVRELTHTINALEIEIADLVAQVAPQLVAERGCGPLTAAKLVGEIAGADRFATDAKLARAAGIAPIPASSGRTDRHRLDRCGNRQINAAIHRMAVTRARCDPQTRDYIARKKAEGKTNRDAIRCLKRHLARRVWQLLRAPAPSRP

SEQ ID NO: 377339 - protein, 443 aa, unidentified
MSKIKNHFELTHPNAAGIDIGSSSHFVAVPPDRNEQPVREFPSFIEDLYAPADWLTACGVDTVAMESTGVYRIPLFELLESKGFTVYLVNARHVKNVSGRKSDVLDCQWLQQLMSFGLLSGAFRPQGDFCALRAVARLRDMLLRNQAKHIQHIQKALLLMNLLLTEVISDVVGEAGQKIIRAILAGECDGQVLAKYRNNHIKASEEEIAKALQGNWREEHLFALKQAVALYDAYAVQLLECDQQLEKMLKDLARNDLKVEKPKRRGGKSKNAPNFDARTLLMQMCGVDLTRIDGIDVTTAFKVLAEIGADLSRFKDAKHFASWLGLCPGTKISGGKKISAATSRTTNRAAQALKMAAVNLRASQSALGAYYRRLCGRMDKAKAVTACAHKLARLIYAMLTKGEDYVDQGQEHYEEKYRQRVIKNLTKHAEKLGFQLIPVPEGV

SEQ ID NO: 377340 - protein, 404 aa, unidentified
MKQIVSVGIDVSKGKSTVCAMIHPNTIIKESFEVLHTVEEMSMLADYIGSLDGEIRIVMESTGHYPVAQFLYQKGFFVCVENAYIIRQFSRIMLHGAKTDPLDAKKLAKYGLAYWSELKPYKFHPSCYTELSLLSKQYQTYIKLLIAAKQNVIHLMDEMLPGFKEALDTASSVQFSKVKYVDFAKEFYHVDMIKSMGKEIFRENYKQWCKEKGYRFQSEKADELFHLAEDGIPTLPTEFPSTRLCMEVATEQVSQLGYALEQILSQMQNLAKTLPEYQTIRQMGGMGEKLCVRFIADIGDVRRFHNGKALVAYAGIDAPPYQSGQYTGTKRRISKRGNSALRKTGYEVMKSLKSHPPKTDTRVYDFIIKKENEGKSKKQAKIAGLNKFLQIYYARVMEIYKNIA

SEQ ID NO: 377341 - protein, 402 aa, unidentified
MTYDYVIGMDVGKYFHHACVLDIDGAQVLSKRINQNEKSLRTLFSNFYSGNNKVLVVVDQPNNIGRLTVAVAQDLGIDVRYLPGLAMRQLSRIHAGNAKTDIRDAYIIAHAAKNLPESLRSVDRVQEAFLQLKVLNGIDEDLARSYTRLINQIRSALVGCYPQFEQALRGQIIHRKWVLHLLARYGGPTKIKRLGKAKAAAFARRYKARKPEPVLDAIFAAISEQTVTIAGAHYAEMGVAMSAKDALLKLEHRQQIEQEVIKLINDIPHTQILLSMPGIGPKTAAQILMTAGDMSDFPSVGRLASYAGLSPRTNQSGTSIMSNSLNRAGNKKLKNALWQSAFASIRFHERSRQFYERKRREGKRHNAAVVALACRRLNVLYAMMRNHECYHDPAPSQEDLAA

SEQ ID NO: 377342 - protein, 343 aa, unidentified
MTHYVGLDVSQKTTAICVVDGEGVRIWRGQCATSPEHIERVVRHRAGDDARIGIETGSMTPWLVHELRAGGLEVVCLDARQVNAALQMQLNKTDQNDADGLAQIMRTGWYRSVYVKSYDAHRARAVLGARLQLVGMTTRLSNHIRGVLKTFGLLPGAIRGVSFAARIEALITNRPDVAPIVMPMLTAWRRLREQIATFDKAVRSLVKDNRDCRLLMSVPGIGPLSVLAYVSAIEDPSRFRRSRSIGAHLGLTPRQYQSGEIDRSGRISKCGDPLTRTLMYEAAVVILTRVKRASPLKDWALKVAKRSGPRKARVALARKLSVILHSIWRSGEPFRWTEQTAAT

SEQ ID NO: 377343 - protein, 346 aa, unidentified
MMIIGCDFHPSWQQVSWLDTETGETGERKLVQASGDAERFYRQLAAPALIGMEATGNCHWLVDLLAELGHELWVGDAAQIRASCVRQQKTDRRDAEHIRILLQEGRFPRIWMPSSEVRDLRQLLLHRYKLVIIRARVKNELQHLCLNQGVQRKHKLWSQAGQKVLRELPLKPWAARRREDLLGLLAMLDQQIDPLDRAVKEEAQRDKMALLLQTQPGVGAVTALSYVLTMGDVSRFARGKQVASYLGLIPREHSSGGRQKLGAITKQGNRMLRMLLVEAAQTAVRLDPGLRKEYLHRCHQKPKAVAKVAAARKLAVRLYWMLRTEKPYPEVVRIESSPRVPLVGAS

SEQ ID NO: 377344 - protein, 355 aa, unidentified
MNEAKYIGLDVHQATISAAVRDSSGNLVMEATLETKAETILQFIRGLGGSLRVTFEEGTWSAWLHDLLKPHVTEVLVCDPRKNALLRVGNKNDREDARKLAELLFLNKLNTVFHGETGIRTLKELARSYLTLTRDLTRMMNRLKAIYRSWGIACGGQQVYAPRYRAEWLAKITEAGVRRRAQIYYQQFDVLAALRQEVRRELLAESRKHPAIRLLRQIPSIGPIRAALLIALMQTPHRFRTKRQLWAYCGLALKTYDSGEYRFVGGQLKRSKKNPAIRGLNKNHNHDLKNIFKGAATRAAAAAGPFQKFYEARIANGMKPPMARLTLARKIAAITLLVWKKGVRFDAEQLKQQAA

SEQ ID NO: 377345 - protein, 320 aa, unidentified
MMAQVDNVVAGIDVAKGKVDACIRKVAERPIFPSTAEGRRRLVAWLRKHKVTKAVMEASGGYEREWAKALRQADIEVRIVDPKRVRNFALSAGRLAKNDVIDAEMIAWFAETFSDGPSRMYDAAREELQALVKARLGVVDLRQRLQCQREHAAPGLAQKANTRVLKNLDKEIARFEAAICAKVKSTPELAARAKIIASVPGLGEISAANLVAGMPELGQVSGKIAAALIGAAPYDDDSGKRRGERHVKAGRRWVRNAIYMPCVGAATLNNPVLKAYYRRLIAKGKAPKVAIIACMRKLIAILNTMLARRQEWDPSRHAVS

SEQ ID NO: 377346 - protein, 331 aa, unidentified
MAKTLNNGLDVGASSVFHNGVDWRGREKQAEYKNTVQGREPLRQWVRQQIQRGCQVRFALEATGVYSLDLARELVVAGAQVMIINPRASHNFAEALMNRRKDDPVDAATLRQACAVLEFRPWQPPSGLHFAVRALVRHAAMHVKSLTAARNRRHAARATEVTPQAVIDSLEREIAHLESEIDTLRADALKLIAQDPELVRKLDLAKTILGVGDVIALMIVAELGMLPQDMSARQWVAFCGLDVREERSGTSVDHAPHISKRGNNRLRAVLYMAAQSLARDHGRVVKWCERLQGNGKEAQEAIVAVMRKLVHGLHAMWRTNTAFDAKRLFVI

SEQ ID NO: 377347 - protein, 430 aa, unidentified
MTKLHSTPPDAVLVAIDMSKHRQEVLLERPEGGRRRRMTVMATKADYDRLADDLTATGRPVVVGFEATGNYHRTLAHRLLSAGFELRLISSVALARTREALHNGWDKNDSKDAQVILHMLKIGATQRYVDPLAAGINDLQEMSKTHEAISKAKTQTWHRILTHYLPLYFPEIERFAGNSRSDWFLALIERFPTPGSITSIGREAFTEQAWPLIGRKVSKARVVNDIYETACASIALPIDEDSTAVAMFRMVIAQARTLIQQRNEIERIAHDALATNSDYQLLRMIPGIGPINALTILAEAGDLRRFSHHRQFLKFCGLDLATYQSGIFRGRTKLSKYGNARLRRTFWMATQAAIRQPNNSFRDKLSRYVDGHAGDPDRRRKAMTALTAKMARVVHAVIKTGTEYRPFVERADTRWKDPSLLCREGATATL

SEQ ID NO: 377348 - protein, 356 aa, unidentified
MNTTQVFEKRKIAVAIGIDLAKDHCDVVAYAYNADNKICFTKANWAYPHLMEWLANAQPAVVLMESCKGCHVRARDIADLGHDTRLVKGADVKALRNVCQKNDIRDADYIARLLYVPGTKFVFVKNQRQQSLQFLQNEYKSIQELRIQVGNQIHAGLEEFGCPGPKSKKFIQSRMMAHLEKNAEPIPDEVMSSFLRRREMWLNLFEQEEEAKKRMEEIAKTDDDAQRIMTVPGVGAQTAVGMLVHIGGDIGQFKNSGQFVASIGLVPKQNSTGGNTTLNGITKCGPKRLRANLVQCGQVILMHADKLKGNFGDWVRKLRDSGKKRGVIVCAIAAKIARIVYRLMKDKVDYTPVPSR

SEQ ID NO: 377349 - protein, 343 aa, unidentified
MKYIGLDLHKKSIFATVLGEDGKILSKVKIGPTTRDIRYYLKSQGKREELSVAMEASYNWPYYYRAVEEAADTIVLAHPLKTRIIGEAKIKTDKIDSKVLAYMLKADMLPAAYVPSRDTMEDKMLLRARISLVRIRTQIKNKIHAIVDRNQDSYIGLESVADIFGRTGKKILRDTKICPIDHKIITGYLDLMDEINKKIKNIESQIDKRSIKDRDIELLKTIPGIGTFTAFLVKSEIDDISRFPSKEKLSSYAGLIPSTYSSGERLHHGRIVKQGNKFLRWALTEATQTSVRCSEYFRYHYSKVRSRKNANSATIAVARRMLEIIYVMLKEGREYIEKPVDIK

SEQ ID NO: 377350 - protein, 381 aa, unidentified
MAYDKGILGYVMSLVDGDLTINFKKYMNTLNANSIVVGVDVHKYSHTAVAMNAWGEERGTLDFSNNNLETYTRWLEQLGLKENIVIGLEDVNSYGIHLVENLRSKNYHIRYVPAILTERERKVSTKRHKSDAVDAKRVGKVILTKYEDTLPAKESIADTRELETGKSLDLLLMERRDLVKWKTIIKNQLHCLIHQHYTESYRLHCPRSFSKKAIKWFQGDLKENQTILATSIVRRLKRLLFVEEQIYTISKEVAVIGETSKEALTLTSIHGCGMVTACSIMAEVITVKRFKDKHHFSMYAGIAPTPHSSGRKHKMHTNPFGNRQLNRAIHSIALSQIAIKGDPTGKEYYQKKLKEGKTKLWALRCLKHQLAKVVFQKLRYA

SEQ ID NO: 377351 - protein, 372 aa, unidentified
MEEIIKIHVGLDVHKDSIAIGVAEPGRLPGRVVGTIAHNVPKLLKQLTKLGGPARVHVVYEAGPTGYGLQRALADKDYECEVIAPSKMPRRPGDRIKTDRRDCVQLAECSRAGQLHAIWIPEPEDEAIRDLARAREDAVNSRTRMRQQLKGFLLRHDQRFSGKSSWTKTFYRWLGTLSFGHSAAQTAFTEYWQAVQSADERVQRLDQALRDAVRGWRFEPVVAALQALRGIALISAIGLVAEIGDFSRFAHPRQLMGYIGLVPCEHSSGDRVSRGSITKTGNSHARRLLIEAAWNYRFKARIGSDAQQRQRALSEQVRTIAWKGQLRLCKRFAVLSGRGLHRNKVCVAVARELAGFVWAVAAVAPASQAPSN

SEQ ID NO: 377352 - protein, 363 aa, unidentified
MMTSPVAGIDPHQDSFTVGIVTPNGVELAHATFPNSAIGFVEAIELLTTNGVRQVGVEGSASWGAHVAIALVAAGFDAREVPPQRSARKRQARRLDKTDVVDSVAVARALLAEPTLGPVQALEVYDPFVAKIEAVLEHRRMLVDVRTLALHHIQDQIAKLPTEIRDQLCATGKIESRLRRLEQLDIAEVSTLAGRYRLSWLTAFIDRDRQARREIRQLERDLDELLDEHGTTLRDEPGIGPIAAATLVVEVGDPHRFARESKFARWCGTGAVALSSGEGAGRPVRHRLDYGGNRRINSVLYIASVTQQRDLDEARRYIDRKVSEGKTRREARRAHKRHLANRVIRRMWSDEQQRLNRQLQPAA

SEQ ID NO: 377353 - protein, 430 aa, unidentified
MKSNTQNAKIEAITEKTLVLGIDVGSETHYARAFDYRGIEYSKKPFKFSNTEAGFVTFKEWILDLKERHEKDKVVPGMEPTGHYWFNLGKFLQDNEMKPVLVNPHHVKKSKELDDNNPTKNDRKDPKVIAGLVREGRYMIPYLPDGVYADLRTASNIRFQLQAELTRIQNRISRWFNIYFPEYKTVYGKPDAKSGMLILKAAPLPEDILTLGIDGVNQIWRDAKLRAVGKARAKTLIEAAEHSVGSKEGAVSARMEIRMLLEDYESRNTRLQEVMTLIEGLVKQIPMAEKLLEIKGVGIKTVSGFLAEVGDISRFNTPKELQKLAGLALVESSSGKHKGETTISRRGRKRLRYLLFEVAMSLVSKNQEFRELHNYYTTRRLNPLKKMQSLMAIAAKLIRVFYAMLTKGVDYDPKKMVSDIKRPAVYLQAA

SEQ ID NO: 377354 - protein, 425 aa, unidentified
MNYKQNEKINQVKESTLVVGIDIGSTTQYARAFDWRGIELGKVFTFSNSREGFEAFKAWMQHLQDKYRKSDVIVGIEPTGHYWFDLGAYLEDEGILLVMVNPYAVKQTKELDDNSQSKNDRKDPKVIAKLVTEGRYSAPYTPDGVYADLRIMVANRKRLIREMTQIKNRFARWFAIYFPEYTDVFGDYEAQSSMLLLKKVCTPEAIVELGAEKINQIWRDAKLRAVGMKRATTLCETAKRSIGLKKGSSAARYEMKLLLEDYEYKKAQLDAVMEEIEKLCRKIPESEQMLAIKGIGVITVAGFLAEVGDVRRFESPRQIQKLAGLSLRENSSGKHKGQTTISKRGRSKLRAVLFNAAIPLIAKNPEFKSLHEYYTTRANNPLKKKQSVIAISCKLIRVFYAVLANGVTYDAQKMLSDIHRQPQAA

SEQ ID NO: 377355 - protein, 325 aa, unidentified
MPQPARPSSPVFVDLAVRVADAPPTAVRDRWSVAHDEAGIADVVARLTALAPTLVVLEATGGRQVPVVAALAGAGVPVVTVNPRQIKAFAQAVGQLAKTDALDAALLARFAETVRPPVRPLPAATTQALSALLARRRQVQGMLVAETNRLETALSVVRPRIERLIAVLAEEQAELDRELARELARELARQIQASPVWRERDAVLRSVPGVGVVLATTLLADLPELGQLNHKAIAALVGVAPLNHDSGQHRGRRVIWGGRSRLRSVLSMAALVAKRCNPVIAAFAQRLAAAGKPTKVVLTACLPKRLTILNAMLRHGEPWRTASAA

SEQ ID NO: 377356 - protein, 412 aa, unidentified
MEVMHARCAGLDISKKDAKVCVRVAGAGRRKAIETVTTWSSMTSQILVLREHLAAEQVTCVVMEATSDYWKPFYYLLEDLPGVEVVLVNARHVKNLPGRKTDVADATWLAQLGAHGLVRGSFVPPEPIRQLRDLTRTRTAITRERSREIQRLEKLLEDAGIKLSSVASDIVGVSGRAMIEALIAGERDAGRMADLAQRRMRVKIPQLTEALVGRFNAHHAFLARVHLDLIDQHTAVINQLTERIEAVMEPFRGFHDLICTIPGIAAVTADVVVAETGADMSRFPTAKHLASWAGTTPGNNESAGKVKSSRTRPGNPYLQGALGASAMSIARTPGTYFNARYRRIATRRGPQKANVAIQHALLVAIWHMGVTGTVYDDPGSDYYTRLRPDRTRQRAIHQLEAMGYRVTLDQAS

SEQ ID NO: 377357 - protein, 453 aa, unidentified
MAVVMIGVDPHKASHTAVAISAAEEPLGQLRVRASAVQAERLLAWAQAWPERTWAVEGAGGLGHLLAQQLLAAGERVLDVQPKLGARVRLLAAGDTNKNDPNDARSVAVAALRSPGVREVRADDHAAVLKMWSKRHRDLGRTRTQVACRLHAVLCELLPGGVPKKIIAAHAARLLGSITPAGAVDAARCELAMAFIDDLRRIDGQLRDTRKKLATAVRASGTSLTGLFGVGPVIAATIIGDVRDVSRFPDRDHFAAYNGTAPIEVSSGGRKIYRLSRRGNRRINHAIHMAAVTQVRQPHSEGRAYFDKKLAEGKTRKEALRSLKRQVSDAVFARLRADARRAAGRAGGPGGQQGNDSVSSAAGLHPGDRLFGQATPGSRHHTTTAAGDPARGSWPRQSAARGRARHSSIAAIPPSAKPQVQVERPQRSEDERPGGAARRRPHSATRKARGQTA

SEQ ID NO: 377358 - protein, 473 aa, unidentified
MPSEYRRCCGIDVHKKSVNVCVLPPLGKDSSELKQETFRTFTRDLKRLRVWLLNCKVTEIVMESTGQYWRPVWNILEGAFTRLVLVNPQHVKGLKGRKTDRIDAHWLATKLQNEDLKGSFIPPREIRELRELTRLRVHWLQDLNRVKNRIGELCESGNIKISSVASHLFGESGRRMLAALVRGDRDAGWMADYARGTLRGRKYQLELALQGTFSDHQRSLLADMLQQFHTLEQQIADLTAKIECRAAVYEDVLKRIDTIPGFHRISAWTVLAEIGTDMGVFEDARHLASWAALCPGIRESGGKRMSGKTRKGNPYLRRALCQSAWAAARKKDSYLTGLFRRIRARRGEQKAIMAVAHQLLTILFHVIRDGTVYQELGAAHYDQQNQPKITRKLVERLQRLGYYVTLQPVENPIEPASTPCLDTPPAERPPSQRRRGRPCKCAQRGIACKHISSLAHLLPENPPNLPAAGIASP

SEQ ID NO: 377359 - protein, 387 aa, unidentified
MPQQLDDLSRSLTPLQQDSTIVAVIEMSQASWLVAGIVPGIERHPLKKLEPSEVELLRLLMRWRAEATQNGRTITRIAVAFEAGRDGFWLARWLRARGIEAYVIHPASVAVSREHRRAKTDRLDTGLLKRVFLGWLRGEPDHCHMVAIPTLAEEDAKRPNREREGLVRERTRLVNRMKSCLVRFGVRTFKPTLRNAPDRLATLRTPEGVPLPPNTLLELRRDMARLRFVMDQIKEVEEARAQGLNQAPPDKTHVMVRLLARVIGIGLETADMLVQEVLARTWRDRRAVARYAGLTGSPDESGSRRREKGLAKAGNARVRRGMIQLAWRFLLFQKESALAQWYRARTADARGSTRKTLIVALARKLLIALWRMVTTGEVPAGVVLRAA

SEQ ID NO: 377360 - protein, 254 aa, unidentified
MAGTEPHAWGTGRMDDITYVGLDVHKPAPRKRGATVCVAVAASGRSGEVRQIGVFENRPQILCKMAARLGKGGRRLSFCYEAGPCGYRLHRLLTGRGRSCVVVAPSLIPMKPGDRIKTDRRDAMMLAKLHRAGELTAIWIPDAAHEAMRDLVRARATAGRVRSKARQPLWRKWGDFRRFTNARQLMAYLGLVPSEYSSGSTIRRGGITTAGNALARRVLIEGAWTYRMNARVSRKLHDRLEPLSAAIRDIAWKA

SEQ ID NO: 377361 - protein, 430 aa, unidentified
MDVVGIDWSWNFHTCYSIEQDKVFKIKDGIAGYEKLLKTVSKDAVFVIEESFNRLGDFLLSRGKEVYLLPPKRSKEARGYHSNGVKTDSTDARCIALTYKEHPEYCIKATHDELGMLFRELLRHYRYYTDMVARLKNKLQNELHNYFPEYARVMGSSWTDCDGKIFLLTICPDITMLRKISDKEINRHFQANHLRYTSSLKRKVKELREKAVDWGMSKYTRDMIANVATQLLEAKREKKKITKEMEKELRKSKYNIILTLPGVGVATGVALVTAFLTHEFKNYRDFQKYCGTMPIVSQSGNFSVCRMRKNCDKKLRGILHMMAINAKKCGAWMKGYYDKKINKEGKKPSLALRALANILVKIAFAMLRNLKAYDEELFLSSRGNRSPRLNYTTRNSIPGTKKMKKEKLSLPVSVAQTNCHLGAVSGSLSP

SEQ ID NO: 377362 - protein, 413 aa, unidentified
MKPKFAPGEAIFVGCDLAKITHYVCIGNGIKTFTTKFKTLNNRSSFEELLKTIHGFQLTTKKMDVLIGMEPTSVYWLPFYHFFKEHFHTYLVSTVAVHHNRNTLNLSGVKSDPIDAKNIYDLLVRGKFMQPVCRTENKTNAYIHVKQAERYRRSSVTYILQLRTTLSIIFPELEIMIKDMRAKFFMQLLWDTPSPRLILQDSLEGFVLKWYGFNRTVTKNKLIKIYELAQSTIGITNGLDAYEIELKQHVANYNYFHQLEETHLGYAIAFVGDTIEYKLLTDIKGIGPKTASNLIAEIGNIEEYKHAKQMTKLAGLDIRVWESGKGASNKLPRISKRGKSNLRYWANQAALHLIKYPNTFSELYEKRLISSPGRGSNKRAQIAVADKFLRVAFAIMKKKEPYVEKLFDKPKED

SEQ ID NO: 377363 - protein, 369 aa, unidentified
MWVAPERTLGSAQINRFGSRRPLMDTGYAGQQVVGLDLHRRRTVMVRMTEAGERLEAVRFVSDPAVLAEQIAKAGPAPRVVVEATYAWYWVADVLDAAGAQLHLAHPLGVKGFAYRRVKNDFRDAADLADLLRMGRLPEAWIAPPPVRAQRELVRHRHKLRQLCSGIKAGAHAVGAKNALFIARSDMFGLDGRRRLSALNLPEVFRLRLDSQLRLIDTIEQEIDELDKRIRVMFADDLGYRALLRLPGVGPVFAAILRAEIGEITRFPSPGQLSSWAGLTPRHRESDTTIHRGRITKQGSRLVRWACVEAVQRARPGTPMRNRYDQIVARRGGNAKHLAKVAAARELCECVFYALRDGHVRRLGEHGAA

SEQ ID NO: 377364 - protein, 441 aa, unidentified
MSYRIAGIDVHKKMLAVAVSDVEVDGEYHFEQRRFGSNPEELRSLAAWLLEQEAEEVVMESTAQYWQPVWEALERYWKPIREKREGASRRSGTLHLAQAQSNRGRRGRKRDFPDAERLVKRLVARELTLSFVPDAEQRLWRTVTRRRYQLTRDKVRLQNQLESLLEEAHIKLSSLVSDLLGASARRMLKALADGETDPVALAALADQNLRATPEQLCDALGACTDLKLVYRRLLKMALEQLQFLEHQIGQLDQEIASLLSQHQDAVQRLAEVPGLGVDSAHQIIAEVGPTAATFPSEKCLSSWVGACPGDDESAGVNYSHRSPQGNRHMRRVLNQTANAAARTKGSIFEIVYRRSVARLGHNQAIGAIAHRQCRLIWLILHRGVRYQERGPAVTKRSKQKRTARMIRQLRSVGYRVELINSQQVAPGQARGFDPVDGRLAQ

SEQ ID NO: 377365 - protein, 415 aa, unidentified
MNRLIERCAMLDIHKSQITACVRVPDGDGGRRQEIREFAATTSALVTLADWLRSWGVTVVGMESTGIYWRAVFYLLEDEFECQLFNARHLRHVPGRKSDVQDAEWGCQLVEHGLVRPSFAPPRPLRELRDLVRYRKAKIQERTREVQRVEKTLQDAGIKLSSVASEVLGVSARRMLDALISGTHDPELLADLAKGVLRKKIPALREALQGRFTGHHALLVSQMLAQIDFLDETITALSARIEELTAPFSRELELLDTIPGVDRRAAELILAEIGPDMSIFPTDAHLASWAGMCPGQRESAGKQHSGKTRKGSKWLRGTLTESAKSVVRTKGTYLSARYHRIKSRRGHAKATIATAHKILTAAYHVLQQGVPYDELGEEFFYRRDTENTERYRRRLIKQLERLGHKVTIEPAPEAA

SEQ ID NO: 377366 - protein, 347 aa, unidentified
MRFYNNSHPYYCGIDLHARLLYVCIIDSKGEVVAHKKIGANKDDLLLILEPYIGNVIVGVECMHCWYWVSDWCAELGIDFVLGHALYMKAIHGGKTKNDKIDSFKIATLLRGGNFPIAYDYPREMRAARDLLRRRMKIVRHGAMLKGHVVNTNSQYNLPATDLNLKNISARQKLREQYQNPIVQRNIDLDMALLDCYAKELAQVEWFIEKQAKNHNPVYLELLKTVPGIGKILSLTILYEIGDVARFESVQKFASYSRLVKCKAESAGKTYGTNGNKIGNAHLKWAFSEAAVLYLRGNDKARHYLNRLQKRMSKAKALSALAHKLGRCVYFMLKNKTVFDEQRFLKG

SEQ ID NO: 377367 - protein, 388 aa, unidentified
MPYRIAGIDVHKRMLAVVVADVEVEGEYQFERRLFGSNPEQLRLLAEWLIEQPVEEVVMESTAQYWKPVWGVLERYWKPIRQKREDASPMSGTLHLAQALSKRGRRGRKNDFRDAERLLKRLVAQELTLSFVPYAEQRLWRTVMRGKYQLTRDHARLRNRVESMLEEAHIKLSSLVSDLLGVSACTELNPVYRRLLKMTLEELQFLEQQIGKLEQEMASLLSQHQDAVQRLAEVPGLGVDSAQQIIAEVGAEAATFASAKNLSSWAGACSGEEESAGVNPNHRSPKGNRHMRRILHQSANAAVKHKGSIFEVVYRRLVPRLGHNQAIGAIAHRLCRLIWLLLHRGVRYEERGPAVNQRSKQQRTARMIRELRRFGYRVEPLTVQLNPA

SEQ ID NO: 377368 - protein, 379 aa, unidentified
MKDIRYLGLDVDSEKIAVAVADPGGEVRSLGSIPNREDSVRRLVKKLGPASRLRVCYEAGPHGYSLYWHLSKLGVHCDVVAPTLVPVKSGDRVKTNRRDAEKLARCYRSGDLTAVWVPDAAHEALRDLVRAREVAKKDQLRARHRLGKFLLRRGLRAAAGVKSWTTKHLLWVKTLRFEHAAQEATFLDYVHEVEHAAARVTRLEQAIDQAIEAAPPEMRALIAGLQALRGIRRVSAATIVAEVGPLSRFARPKQLMGYSGMVSSENSTGSSVRRGAITKTGNAHLRRIVGEAAWAYQYRPAMSPVLKKRQEGLSEEVKEIAWKAQHRLCSRYRRLLAKGKLRQKVATAIARELLGFIWAIGMQVEREQQSYTKGGHRAA

SEQ ID NO: 377369 - protein, 256 aa, unidentified
MKEQQIKHNEVQIKKFIKKLKLEWNEIYCCYEAGVTGYPLYRYLKSLGVNCILVAPGKIPRQSTDKIKTDKRDAIKLARLMRSGELESIHVPSEEDEAVRDYLRSRDSLRLDLGRNRQRLMKFLLRKDIKYSTTKYWTVSHYKWLNNLHFNNEILQETFNDYYSRVRVQEENLKSMDKKIQEVAESEPYREKVGILRCFRGVDYLTAMFLLCEVNDFKRFKTAGSFMSFLGLVPGEYSSGFQKKTNRDNKNRKSET

SEQ ID NO: 377370 - protein, 420 aa, unidentified
MAPLSNQRFTAYVGIDWADTKHDICLQAAGNTRREFDCIPHQVARIDEWAKSLQRRFGGPVAVALELAKGPIVAALQKYDFLVLFPINPSTLATYREAFQPSRAKDDPTDAELALELLLRHPERFAPLRPQGVAMRSLLSLVEQRRELVGDKTRFTNRLCDTLKQYYPQALDWFEDRDTVLFCDFLTRWPTLLAARRARRTTLEAFFHAHNGRRARLIEARLESIRAATPLTEDPGIVAPCRLHVLALVEQLRTVLTAIDRFDREIATVAGTLPDYTLFQGLPGAGPQLAPRLLVAFGEQRERFHGADELQKYSGIAPVTERSGKKSWVHWRWQCPKFLRQTFVEWAGQTINKSFWAGAYYRQQRAKGSSHQAAVRALAFKWIRILYRCWQTRTPYDETTYLNALRKRGSPLIRNLGLPG

SEQ ID NO: 377371 - protein, 418 aa, unidentified
MDVVVERCAGLDVHRDNVVATVRVPSEDQHRYDRQTRTFKATLAGLAALRAWLEGWAVTLVGMEATGVYWMTVFQALEDRFECWLLNAHHLRNVPGRKTDVKDSEWICDLVAHGLVRASFVPPPEIRRLRDFTRLRKAQVNERARVIQRLEKVLQEAGIKLTSVASGPYSKSARAMLEALLCGISAPEQLAELAKARMRQKIPQLREALANRFQIEHHGILVAQLLAHIDTLDQAIANLDEKISAMLAPHQRIVELLCTIPGVAERTAQVLIAECGLDMSQRPTVGHFASWAGVCPGNRQSAGRQRSGHTRPGPHWLREALTESAKAAARTKGTYLAAHHAQLRGRRGEAKATGATRHDILVAYYHIVRDQVPFRELGPDWQRRRYSPEHRARRLQRQLEALGYSVVIEQRQEAEQPA

SEQ ID NO: 377372 - protein, 373 aa, unidentified
MPDVSSNQPADVRLWVSLDVHKLSIDAATLPPTGGQPEVQRIETTRVAIRRFIERLGSPEGLAVCYEAGPGGFDLLRVLTELGVACDVIAPSLVPIRAGDRVKTDRRDAKKLVRLYRAGELVYVQPPTPETEGLRDLMRCRDDLRRARTAARHRVSKQLLRHGRIYRDGKSQWTKMHRGWVARQRLDDEFAQAALEQMLIHLDGLDRQLDALDRDLEQIARTGRWAETVQILTRFRGIATRTALGLISEIGDFHRFGHPRELCAWLGIVPTEYSSGDQRHRGHITKTGNHHARRLLIEAAWSYQHRPRRPDRGPEPDARAWQAQIRLHRRYRHLTTERGKRSTVATVAVARELAGFLWAAATNQPFALEAAAA

SEQ ID NO: 377373 - protein, 354 aa, unidentified
MLIIGCDFHTRYQQIAMAREESGELLAERRLEHENGEAHAFYRSLQSSQEPVRVGIEATGPIHWFERLLAELGHELWIGNSAKIRASEVRKQKTDKRDAALILDLLLAKRFPRIWVPTPVERDLRQLLWHRHKLVRMRTMLGNQLHFLAMSQGLCRKQKLFTKKGRAELGNLMLGPWAGRRREELLKLLDQLDSPIAELDRAVLEEARRRNDAVLLMTHPGIGPVTSLAFVLAIGPITRFACSRKIASYLGLNPTEESSGGRRRLGSISKQGNTMVRWLLIETVHQAVRQDPELRQDYQRLKFRRGHAVAKVAIARKLAVRMYSMLRSGADYAQLVRRQGSPGATLVDANPSLG

SEQ ID NO: 377374 - protein, 402 aa, unidentified
MNAVGIDVSKGKSMVAIMRPFGEIVSTPFEIKHTTSDINSLVELINSVEGESRIVMEHTGRYYEVLAHQLSEANLFVSTINPKLIKDFDNDSLRKVKSDKADAVKIARYALDKWQNLKQYSVMDELRNQLKTMNRQFGFYMKHKTAMKNNLISILDQTYPGVNTYFDSPARNDGSQKWVDFASTYWHVDCVRKMSLNAFIDHYQNWCKRKKYNFSQSKAEEIYGKAKELVPVLPKDAITKLIIKQAVDQLNSASTTVESLRTLMNETASKLPEYPVVMAMKGVGTSLGPQLMAEIGNVSRFTHKSAITAFAGVDPGVNESGTYEQKSVPTSKRGSADLRKTLFQVMDVLIKTHPQDDPVYQFLDKKRAQGKPYYVYMTAGANKFLRIYYGRVKEYLASLPES

SEQ ID NO: 377375 - protein, 364 aa, unidentified
MKRSLKYVGLDVHQATTVTSVREESGRVIAQTVLPTDGRMLVEYFRGMRGSIHVAFEEGTQAQWLHDLLQPVVDQVVVCDRRGTTARGNKGDQPDADALSEQLRRGALRSVYHGSGERATLKEVARTYRNLVEDTTRVMLRLKALFRARGITTAGRSVYRADERADWLAQLDAAAGPGASRGVHFRAATLYAELAVLQALRPTARRALIVEAKRDPAWAVLRSIPFLGPIRVALLLATLQTPWRFRTKRQLWGYAGLAVVTRTTAEWALVDGRAVRRRRPPMTRGLNRNHNRVVKEVFKSAATAAATRSGPWQDWYQEMLKRGMREELARVTLARKLAAITLHLWQTGARYDPSHLMPSTVPAR

SEQ ID NO: 377376 - protein, 422 aa, unidentified
MHKYRRYVGIDWATQAHEMCVIDPDRHVLEERSFDHAGSAIAQCVEWLTRISDGDPSSTAVAIETPRGAIVEVLVERGFHVFSLNPKQLDRFRDRHTVAGAKDDRRDAFVLADSLRTDEPCFRRVVLDDPLVIEIRELSRMDEDLREEAGRLQNRLREQLHRFFPQMLKLSPAADEPWVWTFLEQLARTPAAAARLHEGTVEKLLRSHRIRRLSAKEVLAELKTPPLPVAPGVVEAATRHIAQLIPRLRLVHQQRADCGRNIDTLLDQLAPAGEPEGQKCEHRDVQILRSLPGVGRVVAATMLAEASQPLAERNYHALRAHAGVAPVTKQSGKRAQVIMRRACDTRLRNAVYHWARVSTQLDPHSKAQYAALRKRGHTHGRALRSVADRLLRMLVAMLKNATLFDPDRARRVPAVAPSPVAA

SEQ ID NO: 377377 - protein, 330 aa, unidentified
MNYRTKFYIALDVHTKKTQYAVRTWEGDMLLDGYCASMYKDIKDILEPYFHSCVVGMEACSGFYPLREGFMHDGIEVKIANVLRIRQLIVKNDKLDARRLSDMLRLGTFPESFIPSKEIQEMSDLVTVRHSFLVGLNSTQSRIWAALTRKGIKIPERSIFSKKGLAHLESIIREGKCSSDLKFLFTHYQDTGMSLKQSTNELIEYAKSNFPEEWKKLQDINGIGPLVSSYTIANVHPISRFENKKKLRRYAGVIPCFQESAGKFHGSFLPKTSSRALLRWALTQAAHGAIRTKNSKLSHYYRSKKKSKKHKAIMAVARSVCDLVFMKLNE

SEQ ID NO: 377378 - protein, 423 aa, unidentified
MPRTEHRAQAAAQADPATPFEMDAALFAALELSLPSWVVVASAPSEDKASKHKVDACDGPGLLSLLRRLQARAERRCGGPVTVVAMQEAGRDGFWVHRLLEADRVRSYVVDPSSIAVNRRSRRAKTDRIDAEAMLRTLMAWARGERQVCAMVRAPTREAEDARRLGREREALLAERIRHANRIKGLLATQGVFGFEPTGRNRHTRLAELRTPEGCALPPRLLAEIRRQVDRLELAMQQLAAVEDDRDAAFAAERVAVPAVHGVDEAEMANGGEDTSAAGEVLPGGEGSGARLLRLRGVGPETASVLACEAFFRDFRNRREVASYAGLAPSPWQSGGVDHEQGISKAGNHRVRRIMGQLAWLWLRNQPNSALSAWYRERVRNGRGRMERIAITALARKLLVALWRFVTHGLVPTGTVLKPARTG

SEQ ID NO: 377379 - protein, 345 aa, unidentified
MLYVGLDLSRKRLDWQALDQAGTWVASGAVPPDRDGLEQLPRRLGDAAEVVAVIESMSGARFVHDQLERAGWDVRIADALKARGLAPLACKTDRIDCWVLAELGRLDLVPEVWLPDPQVRGERERARFRLHLVRHRVALKNRVHAILFQHGIANPHRDLFGAGGRYQLTRLRLPEPWASTVAASLALIDALDDQISDCERELRRLGADHRYIPLLTTIPGIAWVLGYTIAAEIGEISRFPSPRKLIGYTGLTPRVDQSGERDRRGPLRKNGPNYLRWALIEAAHTAGRDPRYRPIVERMRSRHGRKRGSKIAAIEIGRRLTEAIWHMLTNDRPFAPAGAPTPVAA

SEQ ID NO: 377380 - protein, 401 aa, unidentified
MHDGFGVFIGLDVGKEGHHAVALNRDGKRLHDATLPNTEAGLRKLFDKLARHGRILAVVDQPASIGALPVAVARACGHQVAYLPGLVMRRLADLHPGTAKTDARDAYVIADAARTLPHTLRRVDTGDEALAELEVMVGYDDDLAGEVTRVGNRIRGLLTQIHPPLERVLGPKLQHPAVLEAISRCGGPTGLRRAGRAKLTEIVKARAPRMGARLVEQIFTALDAQTVVVPGTTAAETVLPRLADSLRDLLRQRDQVAEQVEGMLDAHPLAPVLTSMPGIGVRTAARILLEVGDGSSFPTAGHLAAYAGLAPVTRRSGTSIRGEHPPKGGNKQLKRAFFLSAFAALADPLSRAYYDRKRAEGKKHNAALICLARRRVDVLHAMLRTQRPYQPTPADEPRLAA

SEQ ID NO: 377381 - protein, 399 aa, unidentified
MTTEYSITLGLDVGKTAHHGCALTPEGQRVYDQELPQDETALRKVITDLQQHGPVLVVVDQPNTIGALPIAVARDLGADVAYLPGLAMRKAADLYPGRSKTDARDAFIIADTARTMPHTLRAVDRNSEVLSALKVLSGFDEDLACESTRAINRLRSLLVQIYPSLERVFPGVVLTRAIVLDLLIRYHGPAGLKAAGKAGVKRWARHHSRKDPGPLIDQVFAALSEQTVTVPGADAVELIIPRVAAQIKELKHQRDIVAEEVEKLVDDFPLSTVLTSMPGVGVKTAAQILLAAGDLSAFPTPGHLAAYAGIAPVTRRSGTSIRGEYPARAGNKKLKNALFRSAWVASCHDPVSKAYYERKRAEGKRHNAAIMCLARRRLNVMYAMMKTGTLYEPRTPAAA

SEQ ID NO: 377382 - protein, 339 aa, unidentified
MNITTLGLDLAKSVFQAHGIDASGKTVLVKKLHRKQMLPFFSKLAPCLIGIEACATAHHWARTLIAMGHTVRIMPPSYVKGYVKRGKSDAIDAEAICEAVQRPTMRFVPVKTVEQQSVLTAHRTRSLLVRQRTMAANALRAHLAEFGLVANPGIANLVKLSDTAFADAALPAYAHRALETLIRRITELTEEICELDKELRIWHAENEASRRLAAIPGVGVITATAIAATVTDPDQFQSGRQFAAWLGLTPQQQSTGGKTRLGGISKQGDRYLRRLLVVGATAVMRHAKRNPTPMTDWVNGLMEKKPFRLASVALANKLARIAWAILTRGETYRPYGQPA

SEQ ID NO: 377383 - protein, 420 aa, unidentified
MRNAGIHANSLLEVRRMYNAVGIDVSKGKSTVAVLQPGGTVIRKPFDVSHTSQNLNELADYLSSLDGTTKIVMECTGRYHEPMVKALSEAGLFISIVNPHLIKNFGNNSLRKVKSDPADARKIARYTLDNWTELRQYSGMDNTRTQLKTLNSQFSFFMKQKVAAKANLIALLDNTYPGVNKLFDSPTREDGSEKWVDYAYSFWHADCVRKIGLKAFTERYMSFCKKHHYIFQQDRPEKLFNASKELVAVFPKEKTYKLLIQQSIQQLNLASEHVERLRREMNELASTLPEYSTVMGIYGVGKTYGPQLIAEIGDVSRFTHREALTAFAGVDPGVDESGQHKSKSNRASKVGSARLRKTLFQIMTTLLQNAPEADPVYRFLDKKRSQGKPYYVYMTAGANKFLRIYYGKVKECLRNLEQTE

SEQ ID NO: 377384 - protein, 347 aa, unidentified
MSISMIGLDTAKSVFQIHAVNESGQMELRRKLRRSELIRFFEKQEACTVVMEACGAAHHWARMLTGLGHKVKLIAPEAVKPFVKKGKKNDAADAAAICAAASHPDVKFVPAKSLEQQGVLTLHAARSLLVKQQTMLANAIRGLATEFGLTVPKGIGKLGELMTLVDTDETVPETAREAVQGLFDQTHALAEGIEALETKIVDHARHNETARRLATIPGIGPITASLIVATVVDISLFKTARDFAAWLGLVPRQHSTGGKTRLGRITKTGNREIRKLLVLGATSMASRASQWNSAAGAWTRAAMERRPFRLVTVALANKMARIAWALMTRKEVYHAKGRVAAAADAVV

SEQ ID NO: 377385 - protein, 391 aa, unidentified
MVCVGIDVAKDKHDCCILDSDGMVRADCFTIPNNLDGFKRLLQTIKDCTQKSDKIKVGLEATGHYSYNILGFLLDNDLPVYVMNPLHTNLYRKSLSLRKTKTDRVDAKTIATMLLSDVDLKSYTDTAYHNEELKSLTRYRFDKVQERAKLKQSVSRLVTILFPELEQLVSSIHGTSIYALLSEYPGAKQISEAHLTRLANILVKTSRGHYRKDKATHIRDAARTSIGSVMPAKSLELKHTIKLIQELTSEINEIEDAIRKIMDELKPPILSIPGMGFHSAAMILAEVGDFSNFNSPDKVLAYAGCSPSTYQSGKLTNCYAHMEKRGSRYLRYALYTATKYVCYWNPVFTEYLTKKQAEGKHYNVALSHATKKLVRLIYALQKSGKAYLAIT

SEQ ID NO: 377386 - protein, 426 aa, unidentified
MFADSEDDEQIIERVAALDIGKAEVVCCVRLPAAVGKKRRVQEVTTHSTMVGSLSDLANHLVDLRIERVVMEATSDYWRPPFYLFEAHGLDPWLVNAKDVRHLPGRPKTDVLDAVWLCKVAERQMLRPSFVPPTEIRRLRDLTRYRADLVGVRTAEKNRVEKLLEDACIKLSVVASDIFGVSGREMLAAMIAGERDPKRLADLARSRMRPKISLLEEAFAGLKVGTFGEHHRFLLSRMLARIDQANTDIAALEDEIEEHLAPFADAVARLEEIPGIGPRAAAVIIAEIGLDMTRFPTPGHLASWAKFSPGIKSSAGKNKGNGSTGHGNRYLARVLGEAAVGAGRTETFLGARYRRLARRRGKKKAMVAVGRSILTIIWHLLADPNARYQDLGPDHYDQRVSTTAKKRSHVRGLEALGYHVTLEPAA

SEQ ID NO: 377387 - protein, 355 aa, unidentified
MNVKKYIGMDVHQETISIAVMTGDGKLVMESIIETKASTILQFIQGLQGDLHVTFEEGTWAAWLYDLLKPHVTELVVCDPRKNALLKEGNKSDKIDARKLADLLRGGYLRPVYHGEKGLRTLKELARSYLTISQDLTRVMNRVKALYRSWGIACGGQQVYAPRHRAEWLNRIAEAGVRRRAEFFYQQLDAVRGLRQAVRRDLLAESRKHGATKLLRQIPYIGPIRAALLIALIQTPHRFRTKRQLWTYSGLAIDTRDSAQYRYVAGQLQRSKKPQQLRGLNENHNHDMKAIFKSAAAMASRREGPFQDFYLELLTKGMKPAMARLTLARKIAAITLILWKKGAHFDAEQLKPQAT

SEQ ID NO: 377388 - protein, 408 aa, unidentified
MSVTHPPVVRYIGLDVHKHYLVAYGVDRDQNPLYGPRRVEYAGLEAWVLQDLRPTDALALEMTTNTWRMVDILEPFVHSVTVVHPPEVKAIVKARVMTDKKAARILAQLLAAGLLPAVWVPPQPVREVRSLVAGRRRMAALSTKAKNTLHAILHAHHLLPPPDVKDIFHPKVRDWWLALPLSPVEMTRVQVELDTLDFAVRQRERYETTLGQLAARDEHVPLLTQLPGIGLIGAMTILGAIGTIERFPSAEKLVGYAGLGAQVHDSGQTRWTGRITKQGRRDLRRVMVDAASHAVKMMGHWREVYERLKPRLGRPKALVAVARKLLIAIWHVLTGATADRFAAPEQVAAAFYALAYKMGVRNLPEGVGARQYVRDQLDRLGLGDEITHIPWGSKRFKLPPSRVGESAA

SEQ ID NO: 377389 - protein, 373 aa, unidentified
MPRYSTAFGMDVHLRSTTVCALDAETGEAVTRRFRGNPWGEVAEWMSGFPGPSLAAYESGYLGFAPQRELSGLGVDCVVAAVSKVPRSAADLSSKNDRNDAARMAKAILSHDVTPVWVPSPEIEGLRDLAAAHDAATARLAAAKQRLLAFLARRGYVYGGTTPAGNPRKYWTYGFLRWLDGIHPADDGGIRALAALRNEVEAADETRGALLAEYRAAVAAGPLSAEVEALQSIKGCGFALAAAFASEVGDFSRFRSGRQVTAYFGLAPKQRSSADSVRLGGISGAGNALVRKLAVEGSWCYAAARHQPKLMPRDTGVPLEIRMHGRKGSERLLRRREEMIARGMPQAKANAATAAELVRWLWALGTMCREGAE

SEQ ID NO: 377390 - protein, 341 aa, unidentified
MAVYYIGADVHSNNTELAVEDKGTIVQRHSVATTVRAIREVLDRLEGRKHLAMEEGPLSGWLYRNLVDYVDSLVVCDPRRNKWIACDGDKDDRISATKLAGLLRGNYLHPVYHSRDEQMVRLKRWVRLYEDRVREATRTINKVRACAREYGERVPGRAVRDVQAREVWFSSLVWADLVEQLRLLFKGYDVIGEQVRLARGQLSRQGQAFEVVGHWREVPGMGLIRSVTLLAYLDTPWRFKRKTKLWKYCGVGLQRATSGQDRHGREHPAQLELAWPEVDSCGLCVGAARQEFRPFGPEPGLWHFAGRFGGTPVFFLQIFCLRSEHCWRGGHSSITVVQEGG

SEQ ID NO: 377391 - protein, 349 aa, unidentified
MKVLKQVLGVDVAQKELVVTLGRINEDLSKELYSYRVFRNKETGFVALLKWLKKETQENVSVQVIMEATGVYHQRFAFFLTENGVDLSIVLPNKISNYIRTLETKTVTDKTCSEAIAQFGLERKLESWKRPNQLYKTLQQLTRERDQIVAERVVIKNQLHAENTEYIPNLNSIKRLEARLKLMNKQELEIKNDIQKCIDKDNSVKKTIENLQTIPGIGQLTAVTILAETNGFELIRNKKQLTSYAGFDVKEKQSGTSVKGKPKISKRGNKHLRKCLHLPSLSAIKRSEVHKDLYVRIVSKSGVKMKALIAVQRKMLELTYVIFKNNTVFEQDYEAKKRVLLIKEDTLTS

SEQ ID NO: 377392 - protein, 343 aa, unidentified
MKQVAAIDVDQKLLVTTLGRMYDDWSPELYAQKTFANTQKGFEAFLVWVKNNTVNEVSVRFVMEATGVYHEGLAYYLDDQGEEVTIVLPNKISNYMRTLETKTITDKTASEAIARFGLERKLELWKRPKDIFKKLRQLSRERDQLITERTMVKNQLHAEQAEAEPNKSSITRIKARIKMLVKQEQEIKAELSALVSSNDEIKKIVVLLCSLTGVGILTATSVLGETNGFELIRNRRQLASYAGFDVKEKQSGTSVKGKPKISKKGNKYLRKAMHLPALSAIRHDERFKAVFRRIVSRHGIKMKAAVAVQRKLLEMMFTLYKTNTPYNKEYLINKEMPTAALSA

SEQ ID NO: 377393 - protein, 375 aa, unidentified
MTMVTDPVAAAQVLAVTGGVDTHAEVHVAAAIDAVGRELGHASFATTPAGYAALLAWLESFGPLERVGVEGTGVYGAGLTRVLQAAGVRVIEVDRPDRKARRYQGKSDPIDAYAAARAALSGRAAGTPKTRTGSVEMIRTLRVARAGAVKAKAVAWNQLKALIKTAPEDLRERLRALDGAALLDACVALRAARGPAPEHGPHAKRHRPGVLADPTAACKRSLAVLARRVRALEAEITDLDNDLEPLIVATAPTLLGLYGVGLDVAGQLLATAGDNPDRLASEAAFAHLCGVAPIPASSGKTERHRLNRGGDRHANNALWRIAMTRLRYDPATREYRDRRAKEQKTNKDILRCLKRYIAREVHRALMADLTTPSPT

SEQ ID NO: 377394 - protein, 412 aa, unidentified
MNNDTNSVQRVIGLDSHPDSFTAALLRGATPASAVEEKVFNKVPMAQLKSWAKKHTTAQDVMVLEASGNSFQVVRALASVERKALVLESCQMGKLKEAHANNDKISAVRIGKAYLAGTAKVVWVPDQKTQERRDWFHAHRKASARTTQLTNRLKSYLSDNGVRLKKGVRLTQRTPAQDLLKKARDWSPRQWSVLEILLLELDHAHQQRQHWRRLIAQEVLTDPALLSIVRLCGVREMVAFALGALVGDIQRFAGPKKLVKYIGLNPAFDDSGAEQWRGGIGGHGRKDLRCLLIESAQAILRCSTNPLGRWGRKLFARKGCRNLAVAAIARKLAVAVWYLMMGRWTPLEEIDDLLCRKIGKIITQVGSPGLQQMGKTRQLFRQEIRQRLTSGKIYVLYPPGSNMPKSKTLLPA

SEQ ID NO: 377395 - protein, 350 aa, unidentified
MLIIGCDYHPGFQQIAYVDTETGELQERRLKHPEEAEKFYRDLWEQRITVRVGMEASGHARWFERLLEELNFELWTGDAAKIRAKRVRKKKTDREDARHILELLVENRFPKIWVPTWQNRDLRQLLWHRHRMVQTRTRIMNQLQAVAINEGVRYKKRLWREAGRKQLESLRLAPWASRRRQDLLEVLDRINPTIAELTLAIEEEAEKCPQARRLMTHPGVGALTTVAFVLIIGEAQRFDCSKQIAAYLGLVPEEDSSGERRRLGHISKQGNSLLRFLLVEAAQATARCDRRWRHQFFHLAQRRGRKIAKVAMARRLAVRLYWMWRREWKYEQLQSFGSHVGQPGNPHGMQ

SEQ ID NO: 377396 - protein, 353 aa, unidentified
MSKILAIDLGKNNSAVCIFDRSSLKCKYKTLRTRKQVMHDLFVEFADQIEIVLFETGSQMGWVADILWALDIPFKVANTNHAAWKWKNNPNKSDRKDAQRLAMMYHTGFFPAVHVPKREVRQKRSLINYRDDVVKRITKVKNSIRAILVREDIHLPIGKKGWTIKALRLIRDMVRPLKEITDLEDLWKGQLYSELNLLDEINQELKAVESKLDSLGEADEKVKLLRTIPGVGPRLSEAVVAIIDDPNRFKNGRHVSSYLGMVPRRWQSGQVDITGRISKCGNKLLRTLLVEVSWLGLREPWMREIYNKVKHGDKKRAKVAIVALARKLLVICWAMLKNGTTFDADYAKRFVKC

SEQ ID NO: 377397 - protein, 342 aa, unidentified
MTFVGCDLHTRMQQVAVLDTRTGEVSERQLAHDGSAVEEFYAACPGPVTVGIESTGYATWFHTLIQRLGHTLLVGDAAKIRAMVVRKTKTDRRDALHILDLLRHDRFPAVWVPDPATRDLRALLAHRMRLVRIRTMVKNGVHAIALNYRLARGSKLLRQAGLAQLHALALPPHTAQRRDQSLELLAGLTTQIRALDDAITTAALAHPDGPRLITHPGVGALTALATIVVLGPVARFHDSKHVVSYVGLAPTLNASADKYHLGPITKQGSPLLRFALGQAAAHAARMDADLKRTYFTLVHRRGRPKAKVAVARKLLVRLFIMLRDQIDYDEFRRRGRPAPASA

SEQ ID NO: 377398 - protein, 361 aa, unidentified
MAKVRSWAGLDVHARSVVAVTLNAESGELRSARLPGETAKVVEFLAKLPAPTRVAYEAGPTGYGLARALGAAGIGCVVAAPGKIERPAQDKLKTDQRDAERVLRLLMIDALCPVRVPTVEEEALRDLVRAREDVRGDLMRARQRLSKLLLRHDILYEDSASTWTQRHRSWLRAQQLGGGAQATLLDYLGAIDTLELRRSTLEKTISELVVASPYAQTVARLCCLRGIDTLSAVGLCAEIGDFTRFERASKLMSYIGLVPSEHSTGESRRQGPITKTGSRHARRLLVEAAWHYRKTPSRGLTLKRRQDGQPANIIAISWQAQQRLHRVWQRLAEQRGKRRTIVAVAVARELAGFCWALAHAD

SEQ ID NO: 377399 - protein, 415 aa, unidentified
MEIVYPRVAGIDVGKKLVAVAVRTPGSEPGQRHQQLRKFKTFYPVLQQMVGWLVAQGVTQVAMEATGVYWRPVFHALCEAEQLEVLLVNARHVKNVPGRKTDAKDAEWLAELCEVGLLRGSFIPPAEIAAIREVCRYRKKLTQARTSELQRLCKVLEDGGVKIDSVASSITTVSARAMVEALIAGERDPRVLAELARGVMRKKIPDLAMALAGRFGEHHALLARMHLEHIDHLSGMIGRLDGEIEQVVAPFAEQVGLLCTIPGIGERTAQVLIGEIGVDMSRFPTADHLASWAGLCPGNNESAGKHRSGKTRKGNREVREALVEAAWAAGRTGTYLGARFRRLHRRFGKQGGSKAAVAIAHNLLVIVWFVLHDRAGYRDLGADYFTRHDNPDATKRRLIRELQALGYTVDLTPAA

SEQ ID NO: 377400 - protein, 419 aa, unidentified
MSFKIFKFNCCGLDVHKTWIYACIGITDSNNRTEYKQARFSSFTKGLNELCDWLAKYNCKDVCMESTGKYWIPVFNILEQHSFWVTLSHPKYTKPMKGNKTDRKDAKWICDLYMCGMVKPSFIPPADIRELRDLVRYRFKLTCMITGEKNRAQNCLTVSNLKLDDVFSDVFGKSSRSITEHILQHPGEKFDIAPFVDSRCKTPITEIQAAVDGAISKEQVVKLRQCLDHIDELNKHISEVEQEILRLSDKYEAALNLIRTVPGFNKNPLTAIQVLSEIGGDMSVFPTAKHLVSWAGCCPRNDQSNQKIKSTRISRAGSYFKPVLVQVANALIKSKKHSEFTSRYKRIKARRGHKKAIIAICRMILTAIWHILTDLKPYTPEGFLESRPVKKEKILTISQALNLLKLRGYVIKDAPLPTS

SEQ ID NO: 377401 - protein, 341 aa, unidentified
MSDYSYFCGIDLAKNHFSLHAVDQNAKVILHKSVTRSKLLTTIANMPLMRIGVEACGGAHYWARTLNKLGHDARIMAVKYVIPYRTKGKNDLNDAVAICEVVQRPSTRFVPVKSPEQQAILSVHRMREHWVRERTALMNRMRALLSEFGLVIPVGRSSLMKQVPLMLEDAENELPHLARTVIADAYHHLGELNQRIADTEQVFDSFTKVSANVQRVMKVRGIGPQTATAILASIGNGSQFDKSRDFSAWLGLVPKQYSTGGKPRLGRITKHGDKYLRTLLVHGARTVIANLGDKQDKLSQWCRGVLERRGMNRAIVALAAKNARIIWSLLHNQTEYENYAA

SEQ ID NO: 377402 - protein, 325 aa, unidentified
MSKISKKVIGVDVGSKFLTVSFNDLENRDQVFNIENTQRSILSFLKKFPVEDYCLVIEATGNYSSRILHLSLAHGFDSSLINCMSVKHFSRMKNIISKTDAEDAKLIRLYGEMFRPDIYVAKGVEIEHLDQELKLFSDLEEEKRRYGVKLKSLRYNPQINPNTEKHYERRLQQLEKEIKEVASRLPKLQNEEFNETKELLQSVSGIGEKTSLQLMTATSGFKNFTSAKSLCKYFGLAPRIYQSGKKSYSPGKCRTSKTHIRGLLYVCSWTAIKHNKQCREFYERLVSQGKPKKLALIAVCNKLLRICFGVVKNKINYQPDYQKKL

SEQ ID NO: 377403 - protein, 399 aa, unidentified
MNAVGIDVSKGTSMVCVMRSFGEVVASPFEVTHTVSELGKLADLLKKLNGETKVVMECTGSYHLPVARALHAQGFFVSTVNPVLIHGFGNNTIRKRHNDKADSIKIANYALSNWLELPKYAPDEEIRQSLKSFSRQYTKYNKVKTMLTNNLISLIDQTFPGLKELFTSPARESDGHEKWLDFAARFWHCECVGGVSLNAFTEAYRKWCKRSGYYCVGADEIHALSRQCAAVMSKNDTTKSLITLAVAQVNAIAESLAAVAREMKRLAELLPEYSIVLGFRGVGEILGPQLMAEIGDVRRFYKKSSLVCFAGLEPTDNQSGKFDGDKRISKKGSPHLRKALFQVMGCLLQHSPTGDTVYQLLDRKRAENKHYYSYMNAGAAKFLRIYYARVTAHLDTLEG

SEQ ID NO: 377404 - protein, 410 aa, unidentified
MTKIIVAQNAPVLVAIDIAKARHEVLIAIPDKKRRRRLTVLNELADFNRLIDTLRDYGCPVRVAFEATGNYHRALAYHLATAGFEVKLVSSVALARTREALNNSWDKNDPKDAQVILHMMEIGNEQFYHDPLVHGTNDIQELSKTHDIVSKSKTELWHRVLTHYLPLYFPEADRFHRSSRSDWFFAFLERYPSPHFITAMGKDAFTTDAWDVIGRKVAKERLLADIYETAKSSVGLPVAPDSDAIRMFRLVLGEGRSLIAQRNQIEDRAVALLKDLPDYQLLTSIPGIGPINALTILAEAGDLRRFGHHRQFLKFCGMDLATIQSGTFRGQTKLSKYGNARLRRTLWMAGQVAILQRTNSFRDKFERYIAKDRQNTHLRRKAYTAIAAKMARTVHGIIKHGEPYRPFFEG

SEQ ID NO: 377405 - protein, 475 aa, unidentified
MNKIFLGLDVSKGFADCTIIDNNGTNLIKPMRLPDNNSGYNLLLKTVSGLKTDQELLCYAGMESTGGLETHWFNLLFNKKEIFDKTFVFNGYRTKHYQKALNERNKTDAVSSKVIAQYIRNNHENMLEAKPHLYHQYKKFLYTIKDYDVLKTKSINQLRQILYEFFPEFSSLMPDKFYDCHLRFLMAFPSRKAVLKAKKKTLMKIPYIKEDFVDRLVKLCKETILIAQPINDFAYVHIQKLARDIFNYKKDIDLYFEKLSQALPKEQIDLLCTIPGVGKQSAISLLILIGDVKNFDSGKKLSAYFGVHPVSNNSGNVEMSRMSKQGNPYARQILYQIVFQMFKQSSFFNPYFEKMIDKFQEKKKKAAGAMMQKVCRIIWSILTFNKPFDCERFKHDREMTAKSKEQTVDNTNLFFKDNNLKYEDWETSMPNKIKKKLIKAKKREPQDNKLSSTGSSRPSSKIENNETPKISQEFS

SEQ ID NO: 377406 - protein, 387 aa, unidentified
MYYIGIDISKFKHDCAVIDDSGEIVTPSWSFTNDAEGFSQLKLLLNSLDTETRIGLESTGHYGMNLKLFLESNNFSFMEFNPLLINRFVKSKSLRKTKSDSIDCMMIAHYLMTVEYKPYPPSFYTFEKLKSLTRFRDSLIRQRSRQLVELTNILDKVFPEFKPFFKGRFSATALYILSHYASPEKISNMNSKSYEPLRRLSRGRFSMVDFVELKTLVRNTVGSTSDYLLQEMEITIDIYNQLQSKVEEIELQIHDCVLALAPPILTIPGIGAASAAVILSEFGDLSKFNNPSKLLSFAGMEPGYFQSGTSESTGKMVKHGSSHLRYAMMNCAQTVINNEPTFAAYYAKKRAEGKEHRVALTHVAKKLLRVIYTLQTKELSYNPDLVR

SEQ ID NO: 377407 - protein, 462 aa, unidentified
MADSREEASRSERVRQIEGLPVVREKVAGIDLGSQRHWVCAPGLTGSGREVADFGATTAELMRMVRWLKARKVESVAMESTGVYWIAPQEVLEAAGLEVLLVDTRQLARVPGRNKKTDPTDCEWIQRLHSCGLLTGSFRPPEQVCMLRTLVRDKANLVAEAGDWVRRMQKSLDQMNVRVHRAVSDLDGVTGLAIVRAIVAGERDARKLAQLRDRRCQKSEEEIAEQLSGHWRKDHLFSLRQSLKMYEATQERIAAYEQEILRKLGEMAPEERGGESAPPLHNPHKARAIRRRGEEPRRQAWYRMSGVDVTQIDALGVETVEVILSEYGPDLSRFPTEKQFTSHVTLAPHVARSGGRAVKKKKRYSASTRVAAALRMAALSLRHSPTALGAYYRSMARRIGADVAVFATARKLAILIYRLLRWGRPYLDEGAQAFEKRYQQQRIRSLMARAKELGYKILPATT

SEQ ID NO: 377408 - protein, 343 aa, unidentified
MTVMIGVDPHKATHTAVAIDGSEVELAKLKLRASKHQSVQLLTWAGEFEDRAWAIESAAGLGYLLAQQLLAAGETVLDVPATLAARVRVLGTGRSDKNDPNDARSVAIAALRAPALTVVRAEDHVSVLRLLAKRNLDLGRWRNKVCCRLHALVAELVPGGIAKEIVVAQASQLLDTMVPMGAAAIERHRMALELVEDLTHIDVQARESRRRITAAVAASGTTLTDIFGVGPVIAAMLIGYTGDPLRFDTEHRYAAYNGTAPIEFSSAGRKTHRLSRRGNRTLNHAIHMAAVTQIRHAHSPGRGYYERKVADGKTGREALRALKRRISDVVYRHLTADAQRAGR

SEQ ID NO: 377409 - protein, 411 aa, unidentified
MEPKLVVAGINVHKRMLAGVVVDDDHPQQALDQRKFGSGPSELRHLAAWLLAHEVNQVVMESTAQYWRPVWLALEQDFEQHLAQAQSNAAPRGRKSDFVDALRLARRFLAAELRLSFVPDAEQRSWRALSRSKHQKRRHRVQVQNQIEALLEESQMKLSSVVSDLLGATGYRILKALACGESNPDKLVELAANNLKASPEQLADALSGCMAPRYRDIRALPLEELELIDKHIAELSRQLGAALKSHQQAVLRLCEMPGIREDAAWQLIAEIGPEAATFGTPEQLASWIGVCPGREESAGESKSNRSPKGNRTVRRLLNQIAWGAVRTKDCFFKELYHRLIPRLGIHKAVWAVAHRIAKVIWKVLHEQVHYLERGPLAMDPIAMKRRVSRLSRQMRRLGYIIEVKPVAPATN

SEQ ID NO: 377410 - protein, 355 aa, unidentified
MNDAKYIGLDVHQATITVAVRDSAGKLVIEAILETKAETILQFLHGVRGSLHVTFEEGTWAAWLHDLLKPHVTRVVVCDPRKNALLKAGNKNDRIDARKLSELLYMNKLSAVYHGEQGIRTLKELARSYLTVTRDLTRVMSRLKAIYRGWAIPCAGEQVYAPHYRAEWLAKISEAGVRRRAELYYVQFDTLAALRQGVRRELLAESRKHPATRLLRQIPSIGPIRAALLVALIQTPNRFRTKRQLWAYCGLALRTYISGEYRFVSGQLKRSKKVLAVRGLNLNHNHDLKNIFKGAATRAAATAGPLQDFYEARVAKGVKPHLARLTLARKIAAITLLVWKKGERFDAEHLKQQAA

SEQ ID NO: 377411 - protein, 320 aa, unidentified
MSDHSAIGIDANSKTLVVARHGTKGSARIANSASAIGKWLSSVPAKSRIGVEATNRHHELVVRAAQKAGHAVFLLNPRDIKHYAKGVACRGKTDSGDAQVIARYIAREADNLHEHIARSPEQERLHVLLQQRDSLVRNKATLHLSLGTDAAESAIFGPIFSGLKGAIAMLDREIQHVCRSGEQRDLYRRIMTIPGVGPTVAAFVTHHITRWPLANSDAWVACTGLDPRPNESGARIGRRRLSKRGNAGLRQILYMAAMGLTRCKGGKPLYTAIRDRGHSSTASFNILARKLARIAWGVFKSGRDFDPSMLKVGQACFQQT

SEQ ID NO: 377412 - protein, 356 aa, unidentified
MKRTTKYVGLDVHQASTVSSVREEGGRVIARTIMPTEQSAIVEFFHGMRGTLHVAFEEGTQAQWLHDLISPLVARVVVCDRRGQSRRQGNKNDVADADELSEQLRRGAVRAVYHGNAHGVRLKELAHAYQNTVGDATRVMLRLKALFRARGIRTRGQGLYHDLEQRPEWRAQLPEPGSRLRAEMLWAQLDVLRQLRPRAKAAMIAEARRDASWSVLRSIPFLGPVRVALLLATLQTPWRFRTKRNLWAYAGLAVVTHSSADYLIEEGRPVRRRRPPMTRGLNRNHNRLVKQVFKSAATAATARPGPLQTWYHHLLAGGMDEPLARVTLARKLAAIALRLWKTGEHFDPSYLTVSTS

SEQ ID NO: 377413 - protein, 411 aa, unidentified
MTPSIRYVGLDVHKHYVMVGAVDQTQQTVLPPRKVALTDLQSWAEKYLRPTDHVVLEATTNAWYVHDLLEPLVERVVVAHPPQVKLIAAAMVKTDKKDTMTLARLLAVNLIPTVWVPPVHVRDLRALLAHRRRLVSQQTQCKNRLQSVLHRNHIVPPEGKLYHPDRRDWWLGLELVAGDKLRVRQELVMLDQLDTLIDETSDELYRLSLSEPWLEQLPYLIQLPGIGALTAMVILSAVGDIQRFPSAKKLVGYAGLGARIHASGLTFHTGGITKQGRRELRAALVEAAWVTVRVDPTWREQFERLEQRIGRRKAIVAIARKLLVVVWHLLYHRRVDRQADPERVVRYFLAWGRQAKAFARLGLKASEFARQQLDLLGIGQDLPTLITFGVTYRLPPSSLPLPAEAHPPASA

SEQ ID NO: 377414 - protein, 338 aa, unidentified
MPRYIGVDLHTNCFTTCVVDTEAKQTFRDYKLSEVEEFAASLRDTDEVAVEATGNTRYFYEHVAAKVKRVAVVNPRAFEVVKRSSNKTDKRDAANLALFLSKELLPEARMKSQEQAEVASLVHTRDKLVKQRTALINKLHALAVAHGRRESKEAFASEAGLERVLQQAWSVVEQVEVEVIVAQVRSLNSGIKRLEGEMSEQGTKLEGHANLISIKGIGAKSATILLSVIGNISDFESADKLASYFGIVPSVRQSNETQHTGRITKGGSKLGRTTLVQCTLVAIRYSPYLKKYYERLKERRGAGKAIIATARKFLGIIYQTLKHQWVFADFPNFVLAEP

SEQ ID NO: 377415 - protein, 370 aa, unidentified
MSVRRILAKTINTDLEYEAIGIDLAKNCVSVALLTTDGEVVCIDRLDYSELEKSAQVLCPTTFAMEPCTEMNYLVQKLEAWGHRCLVIGGKNVQNYVENHYSGQKTDLNDAQALAFLAQDTQLRTIKAKDMEQRKYASLTTLREQYIKQYRQTIVSLKGICQAWGLNISKGISGKARLKDLIENHAAFPEELKESLVDMVTHAQTAQKALNKITKTLEELAKNDKLCQLIRTIPGLGLICSCRLRATIGDIKRFKNPKDFPAYYGLVPRSIATGHNEKKGRITHRGDKTMRSLMVQGAGSVVNMATKGKLKSKQLTKWILKKQKEKMPWGKLVCAVAAKLLRIVRAVLISSKPYNPQIAGVAKCSLPKGT

SEQ ID NO: 377416 - protein, 400 aa, unidentified
MTDETDIGVYLGLDVGKGEHHAAAVNRAGKKVFDKPLPNSEPELRELFDKLRAKHGTVLMIVDQPASIGALPLAVARDAGCQVAYLPGLTMRRIADLYPGEAKTDARDAFVLADAARAMPHTLRAVDPADETVAELAMIAGFDDDLAGETTRTANRLRGLLTQIHPSLERVLGPRIQHPAVLRLLEQFGSPAQIRRAGRRRLLTLIRPKAPRMAERLVEDIFTALDEQTVVVPGTDAAALIVPSLASSLRSVLDQRKLLAARIEELLEAHPLSQVLISMPGIGVRTAARILIDVGDGSGFATAGHLAAYAGLAPVTRNSGSSIRGEHPSRRGNKQLKRAFYLAAFASLSQPESRTYYDRKRREGKHHVAALVALARRRIDVLFAMLPDGTLYQSPTPATA

SEQ ID NO: 377417 - protein, 357 aa, unidentified
MQQRFYAGVDAGSTVCELVAIDEGGEQVAAIKFSTSERNFLSAIQEARRSHPGSWSLAVEEGELAQWIADVLRDQVDRLVVCDPKRNVWIARDPAKHDRIDAKKLAQLLKGGFLAEVYHPADPARVEFKRAVQHYHDLTRCQAGLKRQIKSRFRASGTIPRGLKVFGASGREQVIAQVSSPTSQHLVRHLYELMDQAVKTQEKARQLMVALGRAFPEVGRFQEVPGIGPVWACTFSAFIQTPHRFRSKRQLWRYCRLAITNRQSNGELLGRQRLDRNGVGVLKALSYQAFCSSRGADNEFNRHFEESLARTSNRTHARLSTQRKILTVLWTMWKHDEPYRPGGTQEQLNQMNRAEAR

SEQ ID NO: 377418 - protein, 343 aa, unidentified
MYFMGLDVHKKTISYCVKDAAGRVYREGKIGATRRELDEWIRTMPQPRTIAMEATIFTGWIYDHLLPHAEKVKVAHPLMLRAIAAAKKKNDRIDAGKIADCVRCDFLPECHMASTEIRDRRRTLRYRSLVIRQMVQMKNRVSGLLMETGVSYNKQRLHKVGYFAELMTTNEDVQESIRPLLKLSRDMIRRAQKLDYALVSSLERDPLLKERLGRLRTVPGVGPITALTWALEIGDFTRFSSIKQAISYCGLCGDEKSSAEKVMRMPISKQRNKHIQRVLIEAAKLAPRQSPELAIIHARELERGNPNRATLAVARKMVSYMLAVERRKQDFVPAEEFSRTAAA

SEQ ID NO: 377419 - protein, 355 aa, unidentified
MTFVGLDLHKRYITACALDAGGAVLAEAKRLPATLDALGAFLAALRGPATVAMEATLYWAWLTERLEAAGFTVQVAHAHQAKLIWQARSKTDPIDARKLAELLRTNLLPTIWVADAATRARRQLLRGRAFLVRQRTQLKNRIHGHLTAENQVCSTTDLYGKAGRTWLTSVALSPALREQVDVLLRLVDSLSQEIHALDQLVKRAARGNVVATQLQSLPGVGPFGALMLEAEIGPIARFRSSHELAAYAGLVPSTHSSGGRTTHGGVGPAGNRWLKWILIEIVQTLKLAPGPVGAYYQRLLRAKGKAKATVAAARKLCCYLYWMLKEGWSYAEWLRQHDGSPSSEVRPVQRMGAVA

SEQ ID NO: 377420 - protein, 458 aa, unidentified
MVFAKKGAPRYDGGVHRVKALKTHQGGALTMKFKQSHGQNQRIERITTSHLIIGIDMAKERHVAQATNFRGIVLSNRHLTFTNEQEGFIKLERWMNGLQQKHRLKNLIIGMEPTGHYWFNLANWLLDLGINVVLVNPATTKRNKENRDNTPSKSDPKDALVIADVVSRGYYSDYKRQGHVFQRLKTIMSDREFWITNSVRLQNRIIRWLDIRFPEYPSVFKDWTCPRSMATLKEFPTPLDLQSLTVEEVIQRWKKHMKRPGGVTGIQRASYLLHEAKQSIGDTTALEEAKQDLQRLLEQFERIDEILDKIEYEIITLLGEIPLAEQIRSIKGLGPIFTAAILAGAGDLKQYAHGRQLLRRAGLNLAESTSGKRKGQIILSKRGDATLRKYMYLATTQLVANNPAFKQWHEHNVQNKHMKKQRSIFKLLGKLARILIGIVHHGENFSPEKAAPVYDQAA

SEQ ID NO: 377421 - protein, 317 aa, unidentified
MTLSETFIGIDVARDSLEVVSRPAGEHWQVANDLAGIAALLPRLRALRPTLIVLEATGGLELPLLAAIGSAGLPVVAVNPRQVRDFAKAIGKLAKTDAIDAQVLAHFADAVRPDVRPLPDAATQALGALVTRRRQLVEMLTAEENRRKTAPTAIRADIQAHIAWLHKRLKGVDKELSQAVRTSPLWREQEDLLRSVPGIGPVVSVTLLADLPELGTLDRKQIAALVGLAPLNRDSGTMRGKRTIWGGRATVRAALYMAALVGSRRNPVLRALYTRLLAAGKTKKVALTACMRKLLTILNALLKHRTRWLQPAPAGSL

SEQ ID NO: 377422 - protein, 399 aa, unidentified
MLAVGIDISKSKSVAAILNQDGSMHTSPFEFHHTQPELDAFIKYILNSNQSATILMENTGHYHYPVLKAFREAGLPVCMVNAYQIKKFGDMDLRKAKTDKKDAVRIARYALEKSYSLVPYTSMEQKYEDLKFLARQYNQRMLTLKTNKVFLLNLLDETMPGITNILPLTTRTPETSLSVLFINRFKSYDRIKKMGKSRFLDAFEKIARKSRNRQTKTYGLVIYEAALRNITTRGENEYTLAAQDQCLELVCESQKAADSIIPKMQTLAETLPEYAVLRSMAGVGDRLGPLILAEIGDIRRFHSGKALNAYAGNDPPPYQSGTFESHNRHISKRGNAALRKYCFEVMQALKLTRPQDDPVYLFLLKKEQEGKPYNVAKMAGVNKFLRIYYARAMETLKQQ

SEQ ID NO: 377423 - protein, 345 aa, unidentified
MPIAGGLDIHRKQITFDYLDTATGEVRRGRIAPADRGHLAAWLAGRFTGQDAHFAVEGCTGWRYVAEELAAAGITVHVAEPADTAALRGRKRHAKTDRTDSRHLRQLLADGRLPECWIPPWHVLECRALLETYHDLRVEHTAWVQRIHAALFHQGAPQLGEGGLRTGEGLAALQAIAAAQLSPAGQLQVAVALGKLAELDRHLDLLRRRLLTEARQLAGARELHARLYGVGPITALALVCWLGGAGRFSSARKAVRFTGLDVTVYSSDGKRSPGHLSRQGPEVLRWCVYEAGKTHARSSAPDYRYYAAVKDRIDGKRAAISEARKIIRQAVHILAELGDGALAPA

SEQ ID NO: 377424 - protein, 430 aa, unidentified
MKFNTQNTKIEAITETTLVLGIDVGSETHFARAFDYRGIEYSKKPFKFSNTEAGFVTLKAWILDIKEMHGKDKVVPGMEPTGHYWFNLGKFLQDNEMKPVLVNPHHVKKSKELDDNHPTKNDRKDPKVIAGLVREGRYMIPYLPDGVYADLRTASNMRFQLQGELTRIQNRISRWFNIYFPEYKTVYGKPDAKSGMLILKRAPLPKDILTLGVDGVNRIWRDAKIRAVGKARAKTLVEAAEHSVGSKEGEVSARMEIRMLLEDYESRNTRLQEVMALIEELVKQIPMAEKLLEIKGVGIRTVSGFLAEVGDISRFDTPKELQKLAGLALVENSSGKHKGETTISRRGRKRLRYLLFEVAMSLVAKNAEFRELHHYYTTRKQNPLKKMQSLMAVAAKLLRVFFVMLTKGVDYDPKKMVSDIKRPAVYLQAA

SEQ ID NO: 377425 - protein, 346 aa, unidentified
MDYFAGLDASLETVNVCIVDGDGSVLLEQKVGAEPRAIVALLKRFGRPLKRIGLEAGPTSSWLFTELRTAGFQALCLECRHVKAGLSAMRNKTDRNDARGIAHLVRLGWFRVVHVKSEEAQQIRMLLVNRNLLLCKLQDIENSVRGSLKVFGLRLGQVTKRSFEARVIELIAGHTNIAAITEPLLRVRRVLLDEFCRLDRMARTAARNDAVCRRLMTVPGVGVIVALTYRTGIDLPERFTRSRDVGAHFGLTPRRYSSGQVDYDGHISRCGDEMVRTALYQAAHVLMHHGRWSGLRGWAMRIAKRSGAKLAKVALARKLAVVLHRMWINETNFRWTISEPAPAAAI

SEQ ID NO: 377426 - protein, 343 aa, unidentified
MEYYVGLDVSLKQTSICVVNQTGSIVQEGVVDSDPEAIASFVRSRAPGTVRIGIETGPTTTWLWTELKRLGLPVICIDARHAKAVLKMQINKSDRNDAAGIARIMQTGWFKEVRVKDLDSHAVKALLASRALLVKIKRDLENQVRGLLKNLGLVIGRAKFNVFAVRAEGLIENRPELVAAVRPLLEARKAIERQVEDLDRKVHKLARRDVQVRRFMTVPGVGPITALCFKATIDDPTRFKRSRSVGAYIGLTTRRHASGEIDWSGRISKCGDAMLRMYLFEAAGVLLTRVPKWSGLKAWGAKLTKRNGLRKAKVAVPRKLAVILHRMWIDGTEFNWPLKKAAA

SEQ ID NO: 377427 - protein, 461 aa, unidentified
MRIIGLDLALTAEHKALIADARGQPLAPIVSLRTTASDLARLFQRAREGASPDEPVWLIMEPTAMAWFPVAVFAQQHHVIPYLINSQQVADLRRYYKKHAKSDRIDVRVLVKLPVISPEKLHPLTLPSATLFACQRGCKELDHLMTLTTALQNRIHAIDVFAWPGLDAVLSEPFSPLARWFRQQWYQPPQVIAAGAAGLEQAWHAEPTAAEFAAPTDWAAALVRLAHQTLALYGTDAPYLDYSYLQAEVTREQTLLAVLELQHHTLQLKTVRPLYRQLHPSRNLETLKGVGQDGAAVYLSFIGDPQRFEDHSHFRSWTGMIPDSKQSGEREAKGLHISQAGPDLIKKFAYLGAETARQWDPQIAAIYYDQMVEHGKHHTQAVCACATHLLDRIWTILKEDRPYELRDVDGTPVTVERAREIIAACYTVPKAVRQRNNQRTRRERRERRSERKVERESRAGE

SEQ ID NO: 377428 - protein, 411 aa, unidentified
MEAAVITAVGIDVSKSKSTVAVRRPGGEIVLRPFEVHHTNSDLKKLASTLKKLGGDIRIVMEHTSTYWRPIALTLKEADFFVSVVNAMLIHDFSDNTIRKLKTDRADALKIANYALTFWDTLPPFNNEEETRLLLKMQSRANERITATATALRNGLIALADQTFPGVNIAFDPNTKNANGHEKWVDFFLRYWHKDCVCQYSMEAFTESYRGWCKRKNYKFRTDTAHKIYLLAQEGVATLPKCESTKMLITQACKSLNAVCEAKQSTQLEMQRLTVMLPEYEVVMQMEGAGPITGPALMAEIGDVRRFKNKKALVAFAGIDAPPFQSGAFESKSRHVSKRGSPHLRRTIFIVSNIILTRSNPENAVYCFMDKKRSERKHYYVYTVAGSAKFLRVYYARVTEFLRSQPSPDAC

SEQ ID NO: 377429 - protein, 347 aa, unidentified
MSICMIGLDTAKTVFQIHGVDEAGKAEIRRKLRRNDLIAFFEKQAACTVVMEACGAAHHWTRMLTGLGHSVKLIAPEAVKPFVKKGKKNDAVDAAAICEAASRPDVKFVPAKSVEQQGILALHAARSLLVKQQTMLANAMRGLATEFGLTVPKGIHKLDELMAVVDADEIIPKRAKQAIAGLHDCCNNLSDGVETFETEIVAHARRDETARRLATIPGIGPITASLIAATVGDINLFKTARQFAAWLGLVPRQSSTGGKTRLGRITKTGNREIRKLLVLGATSMVYRADGWNSAVGAWLRSVLERRPVRLVTVALANKMARIAWAVMTRKEVYRPKGGVAAVAQAAA

SEQ ID NO: 377430 - protein, 463 aa, unidentified
MQLRLGIDLACRAAHQASLADERGEFVWSGRSFRTRLRDLEALWAMLPAGTDPVDVTIVMEPTRNAWVVLAAWFRRQGATVVLVPPERAADLRAYYAKHTKSDRLDSRLLARLPLLHPDGLHPERGLGPGDALRRGTKLHSTLVLRRGKSLARLDALLEILGPGWHEAFSGDLANKTPLRFLAAGYAEPDTVRRLGRARLARSFARHSRGMWGDAKADELLAAAAETHALWAGDLDYPDLAEDIAIEARLALALTAEIKELDERITVLLGQRDPTGIVRSTPGVGAITGAAILGRLGDPARFSSLAAARSFTRLVPSLDASGQAGRHGGPTKRGDAVLREALFLAADHARRLDPSLAARYHRLMTEAGKHHTSAICHIAPTLLTRIIACWRRNEPYVLRDIDGRPVTPAEARAIIAARYTVPADVRARQTRVQRRPGTGRRRQGSRSAPSADPFARHAITARA

SEQ ID NO: 377431 - protein, 347 aa, unidentified
MDTIGVDLHKRESQLCILALDGTATEQRILTSRERFTAVLGDRPGARILLEASTESEWVARHLENLGHEVIIADPNYAPMYATRARRVKTDKRDARTLAEACRLGAYRVAHRVSPARRHVRAELAVREALVRTRTRYVSLAKALVRREGLRVPSSESHLVMQRIAALELSETLAAELAPLVHVLGPINTEIAAADRRIAALLDDDPIVALLATAPSIGPITASAVVATADDITRFETAHRFEAFLGLVPGERSSGEKRRIGRITKAGNSRVRYLLVEAGWRILRSKGDDTAALRAWALGIARRRGQRIAVVAVARRLAGILYAMWRDHSAYEASRIRAPRARLGATG

SEQ ID NO: 377432 - protein, 452 aa, unidentified
MTEKAKRRGRKALSPIHPNAAGLDVGATFHVIAVPGERDRQPVRSFRSFTGELHQMADWLKQVGVTTVAMESTGVYWIPVYEILESHGFEVLLVNARDVKNVPGRKTDVNDAQWLQQLHQYGLLRASFRPREAVVRLRAYLRHRERLIDYAASHIQHMQKALMQMNVQLHHVVTDITGVTGMKIIRAIVDGVRDPAALAENRDVRCKESLETIREALTGNYLPEHVFALRQALELYQFHQVKVTECDAEIEKALEKLTDCRKAPEAPLPKVRHVRGQNEPTFEVRAALYKLLGADLSQIHGFGPYTVLRLVAECGDDMRKWPTAKHFASWLCLAPGNKISGGRLLSSKTRRSSNRATGLLRIAAVNIGKTQTALGAFYRRLAARTGKAKAVTATARKLAVLFYNALRFGMAYADPGATYYEERYKQRLVHHLHRRAREMGYSLVPRQAMGVS

SEQ ID NO: 377433 - protein, 341 aa, unidentified
MKKSTVLAIDLAKTTLQLGKFEHDGKMVYNRALSRQQLKERLIKEPSAVVAMEACGGAHYWARFAQSCGHQVKLMNARSVKAFRTGQKTDRNDTLAIAIAAGQPTVRAVPVLSTEAQAAQSLDRARRLADNQCVSLSNQIRGLLSEFGIVFPQGYVALRRRIYGVLEDGENGLPATFRELVWSLWRMLERQRAHADELQRQLERRVTEIEPCRRLLALEGVGPVGAFRLWLSLGDGSGFASGKNAAACLGLTPKQHSSGGKERIGHISHVSADQPLRSTLYQGALAVIRHLKRRHPRTRKEQWLAALVQRRGVKVAAIALANKTVRTAHALLSQNTTYQPQ

SEQ ID NO: 377434 - protein, 426 aa, unidentified
MSITQNEKISQVKDTTLVVGIDISSETHYARAFDWRGLELAKVFKCESASYGFENFSEWLSELCKTNQKDNIIIGAEPTGHYWFTLAEYLKENGIKFVFVNPMHVKRTKELDDNHPSKNDRKDPKVIAKLVIEGRYLIPYIPEDIYAELRVMNESRMRINKELVAIKNRIKRWFAIYFPEYKNVFGNWECDSSIEVLLNIPLPADAVNMGADAINQLWRAKKIRAVGIKRAKLLVEVAANSIGVKQGVNAARCEISMLIEDFLKKKEQEQRVIEILETLCIQVPNADKLLNIKGVGILTVASFLGEVGDIRRFDSPKQIQKLAGLAITENSSGKYKGQSCISKRGRKLLRYTLFQAVMSMIMHLPEFKELHRYYTTRAKNPLKGKQSKVALCCKVIRIFYVLLNKGVEYDSQKLMKDIVRPEVIVA

SEQ ID NO: 377435 - protein, 377 aa, unidentified
MHSENIAAYVGLDVHKETLAVAIAAPERLGEVRYYGTINNEAQAVRRLFQKLQGLYGNILSCYEAGPCGFGLYHQLTAMNIKCQVIAPSRIPKSPTDRIKNDHRDAISLARLLRAGELTPVWIPDLTHEAMRDLIRARAAAKRDSRVARQRILSMLLRTDKHYAGKHWTGKHRTWLANQSFSQPSQQIAFQHYCQSLEQIEDRILQLDQEISRLLPEWFLCNLVCQLQALKGVGQLIAITLVAELGDFSRFSNPKQLMAFLGLVPGEYSSGNSIRPRGITKVGNSELRRLLYEAAWSYRTPAKVGAWLIYYRPDSVTQYSKDIAWKAQQRLCSRYRSLTAKGKKSQVAITAVARELTGFMWDIALAAQSSFSQQKQN

SEQ ID NO: 377436 - protein, 386 aa, unidentified
MPQQNDLSRSLVILEQDATLIAVIEMGQSSWLVAGIVPGVERSPLKKLAVDESALLKLLNRWREEAEKAGHRIERIAIAFEAGRDGFWLARWLRARGIEAHVIHASSVAVSREHRRAKTDRLDTELLKRAFLGWLRGERDHCKMVAIPTLAQEDAKRPNRERESLVGEQSRIVNRMKAALARLGIRGFNPKLKKAVERLDGLRTPEGEPIPPNTLAELKHDMERRRLVRSQIRDIEGTRLERLKQAPGDGPHGMVRLLARVIGVGVETADMLVQEVLSRNLRDRRAVARYGGLTGSPDESGKKRREKGLARSGNARVRRGMIQLAWRFLMFQKDSALAHWFYARTKNAPQTRKTMIVALARKLLIALWRLAREGAIPEGIVLRPAL

SEQ ID NO: 377437 - protein, 442 aa, unidentified
MKAQIFEFCGYDVHKKMIEVAWLDITGQVFLHGSFENSPEGNQRLWEECLRLGTTKVAMESTSIYWRAVYKSCPKIITAMVFNSATIKLKTRPKTDVKDAMWIARCLRAGFISPSNIELGKATEIKELCRLRNSIVEEITRKKNGIHKILDEYQRKPSTFSSSLNTHLALHVLTVLAQGGTIKDLKENCHTTRLKNSVRKKQEALKTFLSPPLPSEARLTLELALRGLLERAQACSKIDSQLAQKLKEPSIQESLGILNSIHGISGVSALHLLFEIGRIDRFPSKRQIVSWAGLCPRIYSSGGKTSRGHITKRGNVHVRRILFQAARASLRVKANPLKAWYQRLAARKPGRVALVALARKLLVIIYTLLKTRQTFLCAPLKTEVRVHSTAKKIVRGLTSEPIAPLLTVLVNWLDTPRQFRDSLSGVFDSMYKEVRQKRGVYS

SEQ ID NO: 377438 - protein, 371 aa, unidentified
MVWTAPYGIECARMRLLQSQTREPSVNQIIRIGMDTSKHIFQLHGVDAVERPVLRRKLRRSEVLAFFAKLPPTVIGMEACGAAHYWARELRKLGHEVKLMAPQHVKAYVKRNKNDGRDAEGLCEAMSRPTMQFVPVKTEEQQAALMLAGVGQQLIARRTHLSNAIRGYAAEFGLTAAKGLDKIEPLLARIAQDETVPALARELFAVQGQDYAQLQIELKAIEVKLMAWHRANACSRRLAQIPGVGPIGATALVMKTPDPRAFPSGRHFAAWLGLTPKDHSTAGKTRLGKITRAGDEVLRSLLVAGATAVIQQVRNGRGRPSAWLLALLKRKPPKLAAVALANKIARIAWKLMTTGESYDGARMPGAQAFAA

SEQ ID NO: 377439 - protein, 344 aa, unidentified
MWIIGCDYHPSFQQIAFVNQATGEYAERRLEHKGGEAERFYRGLAGQQVRVGVEATGGMRWFERLLGELGIELWIGDPVKVRAAAARKPKTDKEDARLLQRLLLEKRFPRIWVPTVEQRDARQLVLHRHRLVQTRTRAKNQLQDMARNEGLHPKRRVWSQAGQKELMALSLSPWATVRRQDWQELLGELNQRIDPLDRALKQEAAQRPEVQLLMTHPGVGPVIATAFVVTIGEPGRFQTSKQVAAYLGLVPIEKSSGKARQRLGHITKQGNSLLRGLLTEAAHIASRHDPEWRRKYMRLAMKKNRSIAAVAVARSLAVRLWWMWKLGLDYGQMKESRSHAEQLV

SEQ ID NO: 377440 - protein, 321 aa, unidentified
MNNQNSAKDNSIYIGIDISKPELEIHTYEASLKLPSATPNTKSSILKLIKKFAKNERIHCVFEATGGYEKLLLSLLQSEGVKASRITPSLARNFAKAQGILSKTDAIDAKVLTDYGFKFSPRETAPLDPVIEEIHALVKYRRHLNDELLRERQQLEHTPPKSIETMIKSRIKTLTKQVEKITKLMINLKSKSPEINAAVEILTSTKGVGDNSALSLLAAMPELGTLTNNQASSLAGLAPFNRDSGKYRGRRMIYGGRKDIRQALYMAALVASRYNPILKEFYQRLLANGKPKKLALIAVMRKLLSYLNLLMKKHLQEIEAK

SEQ ID NO: 377441 - protein, 348 aa, unidentified
MDHYAGIDVSLECSSACVVDGSGKIVREGKVASEPAALIDWFGSLGLRVERIGLEAGPLSQWLYAGLQQAGLAVELIETRHVRKALETMPVKTDRNDARGIAQLMRVGWFKPVHCKSLAAQETRAMLTARKLMQAKLHDVEMSLRGILRGFGLKVGKTTARSFAARIEELAAGHPNLETIARALLAVRAVLLREFNGFEKSVRIMARSDARARLLMTTPAVGPIVALTYACAIDDPGRFKSSKAAGAHFGLTPRKYQSGETDITGRISKIGDAGVREALYQAAHVMLTKAVKGCSQLKSWAMRIARRAGMRKAKVALARKLAVILHRMLADGKPFNEAAKAKTMAAAA

SEQ ID NO: 377442 - protein, 406 aa, unidentified
MDVVVARGAGLDVHKKTVVACVHTPSIRETRTFGTMTGDLKELGRWLQACEVTHVAMESTGPYWWPVYNALEEDLDFELVVTNAQHIKRVPGRKTDVTDAAWLCDLLRHGLAPASFIPDKAQRERRELIRYRKKVIQERASEVNRVQKTLESANIKLAAVASDVLGVSGRQMLEAMVAGITDAKVLAAMAKGRLRDKQDALERALEGMVGSHHRFILREQLRHIDELDARIERLSQEIEARTRPFEEALKLLDTIPGVGRATAEMIVAEIGVDMSRFPTADHLASWAGLCPGNNESAGKRKSGKTRKGDGWLREALVEAAWAAARTKGTYLNAQYHRLAGRRGKKRALVAVAHSIIIAIWHMLSDGEAYKDLGYGYFDQRDKDALARRMARRLEGLGYKVTIEAVA

SEQ ID NO: 377443 - protein, 404 aa, unidentified
MWYTGIDWADEHHDALTIDEKGHQMGSIRVDHTPQGFAKLDTFLMQIIGSASKEQMACIIETTHGLLIVHLLEAGWPVYPVNPRTVDRRRSASGAKTDTIDAYLLAKTGRADFADLHRLTPDSDKVAELKQLTRDQDSLIRTQTLLVNQLTACLKAYYPVALDLFSQLQQKSTLGFLQTYPTVEAARAASLKEIQQQLKHTRHPPPADTAASIVELLHHPQLQADVVLTRTKSRLMLALVSQLLPLMEQIATYDKEIHTLFLTHEDHAIFESLPRAGQHLAPRRLSEIGDDRQRYQDASSLQALAGTSPVLYQSGMYSKAHRRLGCIKPLRNALYQFAWQSTQSEAWAQDYYQRKRTEGKSHTVAIRALANVWVRIIFAMWTHRECYQTATFELAQQHHARRAA

SEQ ID NO: 377444 - protein, 351 aa, unidentified
MTTTSMADPHQLVTLGIDTHAEVHAVAALDERGRLLDSTTIPTSLAGFQALLEWAAGFGTIDRIGVEGTGSYGAGVARWLHAQGLVVIEVDRPERGERRRRGKSDPIDAEIAARAVQSGRASGTPKAGDGRVEAIRALRIARGSALDARSRVANQLHALRVTAPDQLREELRGLSLARLSLRASRFRVPTVVDTPLAATRLALRSLAQRFRQLSAEIARLDVQLVRLVAAAAPQLVARPGIGTQIAGQLLVTAGDNPTRLRSEGAFAMLVGTAPIPASSGKTERQRLNRGGDRQANSALYMLALSRLSRDPRTQAYVRRRTAEGKTKPEIMRCLKRYLTREVYRLLVLTPG

SEQ ID NO: 377445 - protein, 343 aa, unidentified
MKHYIGLDVSMKRTFICVINEHGKIIREGSESTEPHLIADYLEKLGLEEMTVGFESGSLTPYLLTGFKERAIDAICMDARKLSPILALKINKTDKNDARGIAEAIRSGMYTQVHCKPEESINRAILLTARRALVEQQTHLKNTVRGLLKGYGIRLGAISAKKFAAAVMKQIENCQEIVSLSIKCLLDAFDKLVEETGKIDKKMLELAYQDKEVRRFMTVPGIGPVTGLTYKAEIFDATRFKESRSVGAYLGMTPTQYASGETQKQGKTSKCGSKELRFLLVEAGIVILTRSKKWSKLKAWGLKIMRKKGLKKAAVAVGRKLAVIMHQMMLEEKDFIYGEPKAA

SEQ ID NO: 377446 - protein, 408 aa, unidentified
MEDTTGYDVYLGLDVGKTAHHGCALLTDGTKVHDKPLPQDEAQLTALFDQLKTHGRVLLIVDQPNTIGALPVAVARATDCGVAYLPGLAMRKAADLYPGQSKTDPRDAFIIANTARTMPHTLRAVDRNDEVLSALKMLSGLDDDIARDCTRTINRLRSILVQIYPSLERVLPGDVIQRPFVLELLIHYGGPTKLKKSGKNRVLTWARNHAKKNPDRLVEDIFKALDAQTVTVPGTAAAEVAIPMLATNIKSLKAQRESIAGQVEEMLDEFPLAQVLMSMPGVGIKTAANILLAVGDCSDFPPDAAHLAAYAGIAPVTRRSGTSIRGEFPARSGNKRLKNALFRSAWVASNCHAASKMYYEKKRAEGKRHNAAVMCLARRRCNVIFAMLTNGEFFRELPARAAGEAVAA

SEQ ID NO: 377447 - protein, 310 aa, unidentified
MEQICVGIDVAKDRLDVHVRPSGEAFTVPRDHEGLSALADRLQTLAPALVVMEATGGFEVTVAAALSVARLPLAVVNPRQIRDFARATGRLAKTDALDAAAIAHFGEAVRPQPRPLRDAQAQELAELVGRRRQVIEMMVAEGNRRRLLQSKRLRERIGPHPANLSKELTEIEHDLDETIRGTPVWREKEELLSSVPGIGNTTARSLIADLPELGTLGRKAIAALVGLAPFNRDSGTLRGRRTILGGRASVRTALYMATLVASRHNPAIAAFYARLRTAGKPAKLALPACMRKLLTILNAVLRDRRPWQNA

SEQ ID NO: 377448 - protein, 397 aa, unidentified
MYIVGIDIAKRKHEAAVIDGEGTVIIKPFSFTNNCSGYNRLLAMLTKAKLPLDEVSFAMEATGHYWLALFTRLQKEGFRVQVINPVQTNSIRSFYIRQAKTDPRDALLIAEVIRFGHFSESTLHPENIYELRELCRGRHAIVSMQADVKRKVVALLDQVFPEYETAFTNMFGDTSMAILQTCPTPKELSEMPLEELCHLIEVSSHKRFRMAKARELQELARNSFGFAMAGDVFSTMIRLYAKHLDFLKQQVREMDRKIAEIMDTLDTPITTITGIGPTLGAYILSEIGDISRFSSAAKLAAYAGIDPTMRQSGEYNGVRNRMSKRGSPYLRHAIWLAASSAVLHDPALKLYFQKKRDEGKPYMASVGHACRKMVSIIYAVMRDNKAYTPCIPNEISA

SEQ ID NO: 377449 - protein, 369 aa, unidentified
MAKSITYIGLDVHKDTIAVALAEASLRGEVRERGKIPNSPAALKALAVKLASTGRDLRFCYEAGPCGYGIQRQLAGMGHDCAVVAPSLIPRKPGERIKTDRRDAINLAKLHRAGELTAVWVPDQAHEAIRDLVRARQAAVRTLRQARQQLSGFLLRHGYHYHRPAWTQLHRRWLASLKFEQPGHHIVLEDCIATVEAATARRDRLETHIEAALPEWSLASVVQALQALRGVGLVAAATLVAELGDITRFTNPRQIMAYLGLVPSEHSSGGTRRQGGITKAGNGAARRMLIEAAWSYRFPARISREQLLRQERLAKPIRDIAWKAQERLCRRYRKLARAGKLPTVITAAVARELAGFIWAIAKQAQPTAP

SEQ ID NO: 377450 - protein, 354 aa, unidentified
MTTIADQRRGVILGVDTHADFHVGVVIDQLGRVQATTSTPATRTGDRQLLRWACRHGEVIKAGVEGTGSYGAGLARHLTNAGITVIEVNRPNRQHRRRHGKSDATDAEAAARAVLSGEATAIPKARTGIVEAVRVLRVARSSAVKARTQATNQIRDLVLTAPVALREDLKGLTARQRVARCARFRPGPTSDPDAATRRALRQLARRYQHLTEEIDELTTDLDTLVRQAAPNLVAQFGVGTDVAAKLLIAAGDNPQRLTNEAAFAALCGASPVPASSGKTTRHRLNRGGDRQANNALWTVAMVRLSHHPDTRAYADRRTKEGLSHRDITRCLKRYIARQLFPHLLEDLKHANALT

SEQ ID NO: 377451 - protein, 430 aa, unidentified
MKSNTQNAKIEAITEKTLILGIDVGSETHYARAFDYRGIEYSKKPFKFSNTEAGFVTFKEWILDLKERHEKDKVVPGMEPTGHYWFNLGKFLQDNEMKPVLVNPHHVKKSKELDDNNPTKNDRKDPKVIAGLVREGRYMIPYLPDGVYADLRTASNIRFQLQAELTRIQNRISRWFNIYFPEYKTVYGKPDAKSGMLILKAAPLPEDILTLGIDGVNQIWRDAKLRAVGKARAKTLIEAAGHSVGSKEGAVSARMEIRMLLEDYESQNMRLQEVMVLIEELVKGIPMAEKLLEIKGVGIRTVSGFLAEVGDISRFNNPKELQKLAGLALVENSSGKHKGKTTISRRGRKRLRYLLFEVAMSLVAKNPEFRELHNYYTTRRLNPLKKMQSLMAIAAKLIRVFYAMLTKGVDYDPKKMISDIKRPTVYLQAA

SEQ ID NO: 377452 - protein, 320 aa, unidentified
MTTKKNRTQEINVGIDVGKSQLDFFLHEIKIYFSVENNPKGICRALARLKPYRIARIVVEATGRYEHDFVEAALDKSLPIIIANPLQVRRYAGAVGLLAKTDKIDSALIAEYAATLKPQFRKHKSKIIIKIKDLLVRRRQITEMLTMEKNRYQIMPTFLKAEIKRSVQSLDRQLKKIELRLKTLVEQQEAWREKKKIMLSMPGVGPAVSYTLLGDLPELGTLGHKQIAALTGVAPYNRDSGRLRGKRRIRGGRSGVRTILWMAVMSAVQHNPEIRRFYQRLVENGKHKKVALTACIHKMVTILNAMIRDGVCWKNLQETP

SEQ ID NO: 377453 - protein, 422 aa, unidentified
MHKREERPFAAFIGIDWADKKHDVCLWVEGSEKRERLVLEHSPSTIQAWAEKLRERFDGAPIAVSLELAQGPIVSALLEHDFFVLFPVQPAMLARYRLAFSPSRAKDDPTDAELALELLLRHPEKLQRLEPESAAMRSLRRLVEARRSLVEDRTRLTNRVTSALKAYFPQVLGWFRDREAALFSDFLERWPTLAAAQRARRDTLVDFFRAGNVRNAAAIDRRIQAIGGERPLHTDAAVTEPMRLLVEALLPQLRAVCAGIERFDAAIAKLAPTLPDYQLFAALPGAGPALAPRLLVAFGERRERFPDAAALQRYAGVAPVTERSGNKSWVHWRYSCPTFLRQTFVEWVGKTIPRSFWAKAFYQARRARGSRHQAALRALAFKWIRVLHRCWVDRVAYDESRYLMALQKRQAPLLKFAAESST

SEQ ID NO: 377454 - protein, 436 aa, unidentified
MSASWSIGRLWLRAGESGPLRVVDCEAGPSGRTVCLIPGHLVSLSDVCDGRRRHGAGKLVATLGFVPVREIGPQRPSASRAERYPGRRRAGKPDYKEGRWEAGPSNWFGGSMDIVGIDISKAKFDAALLVGERVRHGTFSNTEAGFEQFLAWLARHRPDPASPLHACMEATGNWGLDLAAFLHGRGVRVSVVNPARIKAYGASELARNKTDRLDAALTARFCRAHNPSAWVPPAGALRELRELVRRCDALKAARVQEMNRRAAGFASPAVAASIKAHIGWLDEQVEAVMGEVRRLVASDPALSRNLALVRSITGFGEVSAVVLLAELPNIAEFTPKALAAFAGLSPSEHSSGSSVRRPGKISRIGNQRLRGMLYMCALSAKRTNKAMADFVRRMAEAGKAPKVILVAVARKLLVYAHAVVRTQKPFQPFPDAPSPI

SEQ ID NO: 377455 - protein, 342 aa, unidentified
MAVIIGVDPHKASHTAVAIGDDERELAVVKVRATRRQVVQLLSWEPFEKRTWAIESAGGLGYLLSQQLVAAGEEVVDVPATLASRVRVLGTGRSDKNDPNDARSVAIAALRAPSLRPVEVADHAEVLRLLAKRNLDIGSHRTRIVCRLHAALADLAPGGISKELNASDAVELLARIQPASPVEQTRYDLAVELLDEVRRLDVQLKVSHKRIRDAVLASGTCVTELFGVGPTIACSLIGYTGDVTRFTNRDQFAAYNGTAPNEHSSAGRIVHRLSRRGNRRLNHAIHMAAICQIRQINSEGRAYFERRVAEGKTKKEALRILKRHVSNAVYRQLLADARRARS

SEQ ID NO: 377456 - protein, 332 aa, unidentified
MNPDCVLTTMTIIGFDVAKHELVGVRTDHSAMEKESFTIPNNHEAIKLFLKSVKQKYPNLKTACEATAEYHRTLAKTCLALDVPLTLLNPIVTKQFIRATVRKKKTDHSDALVIARCAMNGEGSLITEDSLDTSKLVLRTMTRLGEIEGAIHRMEQRFCEHAPELEAVIRALKSIGETMHTESLAMRTAISPTDERFLNLLRSIPGIGQMLAPIFVGEIGSIDRFENPKKLTAFAGLDPRVKQSGISLKSNTHITKRGSPFLRRAAFIAASVAQRHDLEMKSYYAKKRAEGKRYREATIANARHILNRIYAVWKRGTPYIKNQGNHLSTAKS

SEQ ID NO: 377457 - protein, 489 aa, unidentified
MKAKPSQLQANSKTRRSKGRGKKRARTPQNLPVVRPDTAGIDLAVTSEIWVAVTPDREGETVKPFSPMSHGLDELVAYLQAMRITSAAMEATGVYWAALYTKLMEAEIDVTLVQPRDVRRLNKPKSDIADCQWLQYLHSVGLLKKSFVPPPQILAVRAIARQRERLINEATMHLQHAQQALDEMNLHVHHVLSDLGGASGQAILEAMLAGERDPHTLAALCHRNVRTSRAIIAQALTGQWRDEQLFVLRQAYESWKNTQHQMTECDARLWELAQALQVRVNEDEIAPQHPRRRPGRPKKQTPAKGQVRSRGNSRNGLDGSQDWTNRFHALFGVDLTAVPGVSLLLTLCLLVEIGPDWSAFPTAGHFAAWLGLCPHNDRSGKKVLRRRTPQGQTRLKGMLRVCAQSLCTNQSPLGDHYRRLKARLGPAAANTAMAHKLARILWHMVHNQVAYDESVFSQRDQQVTERLTRRLKKQAQSLGFDLTPLAKAA

SEQ ID NO: 377458 - protein, 365 aa, unidentified
MRKVSTAKQGRDCFEQKLTIGLDLGDHSSCYCVLDETGHILVEQKVSTKPKGLQAAFGAVPHCRIALETGVHSPWVSRLLSGLGHEVIVAHARNVRLIGESRRKDDRLDAQTLARLARIDPQLLSPVKHRSAKAQADLTVIRARAGLVRARTALVNSARGLAKSYGERLRGCNVRNMNPEKAEGLSPELQAALKPLLAALESLSEQIREYNERIEKLAQESYPQVALLKQVKGVGTLIALTFLLTLEDAHRFQKSRDVGCYLGLQPGRRNSGRSEPQMHISKEGDPYIRTLLVQGAQHILGPFGVDCDLRRWGLKLAERGGRNGKKRAIIATARKLAVLLHRLWVSGEVYEPLYNSRRVAIPAAA

SEQ ID NO: 377459 - protein, 424 aa, unidentified
MKVTYQTCCGVDVHKSFLVATSVKTTGGIEPSYQKKRFSTFNSSILEFKQWLLDNDCHDVCMESTGKYWVPVFNLLEDEINVVIANPKWVKAVKGNKDDTKDSKWIGDLFRLGLVKGSYIPCKIVRILREYTRYRYKLVSCRSSEKNRYQNTLTVCNVALDSVVSDIFGKSSMSIIDYLLEQSGTSINHEEIASKLLRSLKSKEDAVIESVEGYQMTDAPKYRVRLVRAHMDYITAEINDVDKMIENMIFSNPDFENAVQFLCTIPGVKRDSAITIISEIGTDMSQFGGSKRLCCWAGLTPGSNESAGKKKSVRITRAGVYLKPALVQCAHAAVKSDKSPYYKKKYESLVKRRGKKRAIIAIARMILTAIYQMLSTGEQWNPSDLYKIDMPVALVEKQKAKAIKQAKKLLQREGILPPDEPLAS

SEQ ID NO: 377460 - protein, 341 aa, unidentified
MKLIRVGVDLAKNVFQLHGVDRSEKTIWRRKLVRGDWIKALLDRIEPGCEIGMEACSGAHHWARLLQARGYTVKLVAPQFVKPYVKSNKNDANDAEAICEAMSRPHMRFVAVKTVEQQDVQAVHRVRASLIDQRKAKGNQIRGLTSEYGLVAPKELLHLRAAIPRWLEDQENGLSERFRRLLRGLWQDLLALDERVQQLDQEIEQIARQDPVAVRLQQLRGIGPVTATALLATVGDASQFASGRQMAASFGLTPKRSSSGGKERLLGISKRGDAYLRSLLVHGARAVIRTAQAKTDRLSTWVMRIATTRHPNIAAVALANKTARIAWAMMTKETDYQPELA

SEQ ID NO: 377461 - protein, 336 aa, unidentified
MAAVLDHLGTLLDARSFPATADGYRGLLAWARTFGQVRRAGVEGTGSFGAALTRYLRGEGVQVVEVHQPNKALRRRRGKTDAVDAEAAARAVLSAQATAVPKAGDGHVEAMRIYKLARDSAVKSRSQAINQLKAVLVNADPTLRESLAGLGTKTLIRTCAELPDPSPASTPAFAAAVHTLRLLARRIRQLSAEAYELEKQLRAAVLEHTPQLLERPGIGPDSAATLLITMGDNPERVRSQASFAALCGVSPVQASSGKTQRLRLNRGGDRQANAALYRIVLTRLRRHDPTRDYLERRTSQGKTRREIIRCLKYYVAREVYHLVRPQTNAAELTQAA

SEQ ID NO: 377462 - protein, 346 aa, unidentified
MEHYAGIDVSLELSSVCVVDGRGKIVKEAKVASEPEALVYFLKKLGFPVNRIGFEAGPLSQWLHAGLTQAGFETVLLETRHVKAALSAMTVKTDRKDACGLAQLLRMGWFQQVHAKSIGSQEIRALLVARKQLLGRLLDVELSIRGILRGFGLKVGQVTRKTFEARIRELVTGHTTLERIAEAILSARATLKAQYEKLHKAVLAIVREDAVCRRLITVPGVGPVVAVTFKSAVDDPSRIAKSKAVGALFGLTPRKYQSGEKDVTGGITRTGDEMVRTALYEAANVLLSRITRFSKLKRWGMDVAKRRGSKRAKVALARKIGVILHRMWIDGTTYRWAEAKPIAAQG

SEQ ID NO: 377463 - protein, 374 aa, unidentified
MDDHSVAYVALDTSKLRNAVAIAEAGRDGEIRYLGEIDNAPAATAKLARRLAKKHAALTFAYEAGPTGYGLYRQIKSLGHDCIVVAPSLIPQKPGDRVKTNRRDALSLVRQLRAGDLTAVWVPDPHHEAVRDLTRARGAAVREQRAKRQQVSALLLRLGLHYPGKTTWGKAHMAWLAGQKLAHLEQRIALEEMLHAVRQAGDRIARLEQAIHAAVPDWSLAPSATALMALRGIEFIAATTLLAEIGDLTRFRTPRELMAWLGMVPSEHSTGERTRRGPITKTGNRRARSVLVECAWSYRHPPRVSRDKLARLEAAPPAVRDIAWKAQSRLTARYRALRRAGKLDVVAITAVARELAAFIWAVGLAVGSGRTPEV

SEQ ID NO: 377464 - protein, 333 aa, unidentified
MNQIKWLAIDLAKRFFQLHGVDDRGVVVLRKQLPRHKLLSYLAQLPACIVAMEACGSSHYWGRQFQMLGHSVRLIPPQYVKPFVKGNKTDRNDAEAICEAAQRPNMRLVSVKSEEQQALMAAQSSRELLVKSRTALSNHLRGVLAEFGLQAPKGLSALRALLREVAELQTLPSLLREVCASLTEHLALLDAAVTQAHSRLERFAAQNTTCRHLMQRRGIGVLTASALVAQIDPTQFRNGRHLAAYIGLVPKQHSTGGKQVLLGISKRGNVQLRTLLIHGARALVRTAAGKSDPLSRWIVQLLARRGKHKAFVAVANKLARYAWVDLRDARKLA

SEQ ID NO: 377465 - protein, 345 aa, unidentified
MKNLFIGIDFSKEKIDVTIITAQGLEELSARMFETFPTTTSGYNKLVRWVEKNSLGMERDTWLFCGENTGDYSKPLCNYLYGKGLDMWLENAKCIKDASGLRRLKSDRADSAMIAEYAMRNHDRAEIYEPLSQSLTELRELFMYRQKLVKYKAGLQVRRGEKKLTMEKSSSKTTISQSGRHMINVLDKEIEKIEKKIQELIKSDEELKQTYELITTVPGIGMQNALCLLIFTNNFKRFNLNPRKIACYYGVAPFGKDSGTSVHSDPHVHYMANKMLKAMLTQAALASINYCPIIKDYYNRLLTRGKNKKLARNNVKNKLIHIISAMVKNNLPFNPAYINIHKSAA

SEQ ID NO: 377466 - protein, 409 aa, unidentified
MLYVGIDWASDHHDVCLTNDSAQTLAAFRIAHGSEGFERLHRVIKDHEPEPQQVLVALETTRGLLVHDLLRSGYQVYAINPKAVNRYKDRHVVSKAKTDSLDASCLAHLLRTDRHRFKPLVLPPEDYRLLDRLCLDLRKLVDDRTRVVNQINDCLKEFYPQALELFYKMDSAISIAFLGTFPDPKILLATTKRRFRAFLRAQNYPYLEKADQLYGKIHAPAPQADPVIIQTGKVRLEALLDQFLAVRRHQKAYEHQIRAVLRKLPESKPIRTLPGLGKRLVPELVAILGPRQSHRRFDSARALSNLAGCSPITQASGKWQTVRIRTACVKPLRRTFRHWSFASLTCSKWAWAYYQYRRSRSHLHETILRSLAQKWTKILFAVWATGQAYDEELHIQRLKRHGVAWALSL

SEQ ID NO: 377467 - protein, 340 aa, unidentified
MNEVSIIGLDLAKNVFQAHGAEADGSVLIRRKLSRAQLLKFLSEQPPCIVAMEACASAHHWGRAIGCLGHEVRLIPPAYVKPFVKRQKNDTADAEAIAEAASRPTMRFVAVKSEEQQAAMMAYRTRDLLVRQRTQTINALRAHLAEQGFVAPVGPAHVGRLAAVINGDDGALPAAVRDLARLLLDQIAGLSEKVADLDAELRRRASTTVRRLTTIPGIGPITAAAITTFAPPMEIFEKGRDFAARVGLTPRQHSSGGKERLGRTSKMGQRDIRRLLIVGAVAVVRWAARKGAPEGSWLARMLDRKPKMLVAVALANRMARTAWALMRRGEDYRDPAMATA

SEQ ID NO: 377468 - protein, 454 aa, unidentified
MAKSKRSSSMPSIHPNAAGIDIGSRFHVAAVPLDRTEEPVRTFKSFTGDLHELARWLKSCRIETIAMESTSVYWIPAFEILESYGFEVFLVNAREAKNVPGRKTDINDAQWLQKLHQFGLLRASFQPSENIAELRAYLRQRERLNDYKASHIQHMQKAMMQMNIQLHHVVSTITGRTGIEIVRAIVAGQHNPDELVKFRDIRCHNSVEVMKAALTGNYKAEHLFALTQALELFDIYTEKIENCDRIIALVLQRLQQLTPDPQQTMPKAKHQESNKNAPSFDVRAALFNFMGKDLTPIHGLGPYLALKLVAECGTDMSRWPTSKHFTSWLCLAPGNKISGGKVLSSRTRRTASRATALLRLAATTIGKSDTALGAFYRRLASRTGKAKAVTATARKIATLFYNTLKYGMDYVDKGADYYETQYRDRVLINLRRRADAFGFTLQEKVLPGIAVEVS

SEQ ID NO: 377469 - protein, 349 aa, unidentified
MSNVFCGVDFHKRTCTIFTCDKEGKQIGPAKRVPTDQLAHHLRNIKSAVVGIEGSGGVNHTVKNLRAEGIDVRILNASKSRAIGHGGKKTDSKDAETIANLLRSNFAPEVILRSQRARDMSMLITARQHVVDSRVTGINHIRGLLREYGIVMDAGAEKFLVNAKKAIEDLKKQNPILSEQLLKSFEQVKDLKKREEEIDKIIEEQSSEDVRIKRIRTIPGLGPLGAYLMVAVIDDITRFPNSSKFASYLGLVPRENSSGDKRRLGSVTKAGNETLRRYLIHGARAVLKRSSRYKNDPMFLWAQRIEAKRGTNKATVALAHKLARIAFAVCRDGVEYTDGSRLQKAKKAA

SEQ ID NO: 377470 - protein, 457 aa, unidentified
MAKRKRKQGKLDRTLPTLKPNAAGIDMGATEVVAAVPADRDSESVRTFATFTPDLHALADWLQQCGINSVVMESTGVYWIPLFQILEARGMEVYLVNAQHVRHVPGRKSDVLDCQWLQYLHSVGLLKASFRPEQDICAIRSLLRHREGLVQMAAVHVQHMQKALDQMNVQIHHVISDITGVTGLAITDAIISGQRDAQELAKLRDRRIKAPFETVAKSLVGDYRAEHIFTLKQSQTAYRYYQQLIADCDREIQDRIETFQNTHAGPGTPAESSNPSPGTADSPFNLRSHLERVYGTDLTAIPGFECLRIRTIFSEIGVDLCSQFPSSENFCSWLNLSPKDGTSAGRRIRAPRIKNNNRAANAFRLAAQSLHHSRSYLGDFYRSQRARFGAPIAIKNTAHKLARIFYHLVTTRTAYDETVFAKLEAKNQNRRLRKLQSFAQRMGYSLVPANVPSLQVP

SEQ ID NO: 377471 - protein, 347 aa, unidentified
MRFYTKQHKYYCGIDLHTEKMYVCILDERGNIRVHQNIRTDPEVFVSVITPFREDIVVAVECMFTWYWIADLCVEQNIPFVLGHALYMKAIHGGKAKNDKIDSHKIATLLRGGMLPQAYVYPARMRATRDLLRRRNHFMRKRAELFAHIQNTRSQYNLPDPLGCIAKPQNRQGIAQRFDDPSIQKSISANLLMIEAYDRLLTQLEHDIIASAKEHDLRSYALLQTIPGVGRILALVILYEIESIERFPSVQDLVSYCRLVKCIKESNGKIYGTNGNKIGNAHLKWAFSEAAVLFLKGNEPGKKYLLRLAHKHGKAKALSILAHKLGRAVYFMLKNKEAFNQKKFLGL

SEQ ID NO: 377472 - protein, 399 aa, unidentified
MAAQRDTAWVGIDIGKTHHWACVVDAEGKILLSAKIANDEAQIMALLTNTGSLAAQLIWAVDIIGAPSALLLALLAQAGQSVRYASGRVVAAMSAAYAGEGKTDAKDAAIIADQARMRRDLHPLRHRDKTAADLRILCARRTDLASDRNRAINRLRAQLLEYFPALERAFDYAHRKAALVLLTGYQTPDGLRRMGVARLEKWLRDRHAYHAGDLAARAIAAANAQRITVTGQAVAASVVARLAQTVLDLNAELVDVDAMIEAKFEQHRLAGIITSMPGFGSLLGAELLAATNGDLASFNTADRLAGIAGLAPVPRDSGRISGNLKRPRRYDRRLLRVFYLAANNAVKNCPESRTYYDRKRSEGKRHSQTILCLARRRLNVLWAMQRDNTSYQPGLPRAA

SEQ ID NO: 377473 - protein, 428 aa, unidentified
MHVEENTRIKEFRQIREEIRGSEKYLIVGIDVAKEKHHAFYGTSNGKTLKRKLIFDNSFSGIEMLMDFAYALKTEHSLEKVVYGVEPTASYHKPLAEYLIKSGCNVVMVSGLAITKNRELLDGRWDKNDDKDAANVADLISQGKCQYYDYPSLEIRDLRGLLSLKRMLRKQEHSMRVRIRNNVIAQYFPEFDTHFAKGRFESLAVVKWCIRPKEINDMEFEEFEELLAPCRRTRTQIERLKLIWEDANESIGCEAGDAIQFGAKLMVEELKKIMESISAVDEQIEKLCMGFPEYQYLLSIPGFGPDVSSKVLGAIGNPSRFDNGKQVLKLAGYDLSASRSGKPSDFAIPRISKRGNAYLRYALYQAALIASTRNKYFMTYYSNQLKGRERERGIKTKMKVKLAAKMLIIAWTLMKNKEPFDPAYLNVE

SEQ ID NO: 377474 - protein, 367 aa, unidentified
MKKGSTVAAKQSRKTSEQKLTVGLDLGDRSSWYCVLDESGTVVLEQRLSTTPKAIGEVFGRMPRSRVALETGMHSPWVSRLLSKLGHEVIVAHARNVRLIGESRRKDDRLDAQTLARLARIDPQLLCPVKHRSAKAQADLTVIRARAGLVRARTALVNTARGLAKSYGERLRGCSVRNMNPEKAEGLSPELQAALEPLLAAIEALSEKIYETNQRIERLAQESYPQVALLKQVKGVGTLIALTFLLTLEDPHRFAKSRDVGCYLGLQPGRRNSGQSEPQMRISKEGDPYLRTLLVQGAHHILGPFGVDCDLRRWGLKLAERGGRNGKKRAIVATARKLAVLLHHLWVSGEVYEPLHNNPRSAMETAA

SEQ ID NO: 377475 - protein, 363 aa, unidentified
MKEYIAFDSHKRYTLAEREEVESGRAVQHRIEHRRGAIRDYLKEGEAGTAVAVEATGNWYWIVDEIEQAGKSPRLVHPRKAKLMMGMINKTDKLDVHGMNRLQRNKSLPTVWIPPAELRDLRELTRARMVFSQQRARLKNRLHATLSKYGLMLEGVSDLFGQAGRKVLKRLMEELPNQTAWASRMVLEQLDLVEKHLEEQENRLKDLLKVTPEMKWLSSLPGVGLILSGVMALEIGEVERFGDAERLASYAGTTPRVISSGGKTRYGSLRPDVNRYLKWAYMEAANVVSIHHHRWSRGNGPNRHAGRLYERIKERKGHAKAIGAVARHLAESSWHVLRRKESYRPPGVPARGLCQQGVSAVSS

SEQ ID NO: 377476 - protein, 355 aa, unidentified
MELRAIGIDLGKSIFHLVGVDGRGQVMVRKKLSRTQLLRFTVNLQRCLVGMEASCGANHLGRQLGAQGHDVRLMPAQYVRPFVKSNKNDFLDAEAVVEAVQRPTMRFVPLKTPEQLDLQALHRVRERLVGRRTAVINQLRAFLLERGLTVRCGRIHLARHLPGILEDADNGLSGRMRGLLQGLREEWRQLDTEIERLDAEIDQVAVHDDACQRLVTIPGVGPLVATALVAAVGQGAAFARGRDLAAWLGLVPRQHTTGGRPRLLGISKRGNVYVRRLLITGARSVVIAGRRDRHRFGRWLDGLEARADHNVVVVALANKLARIAWAVLTKKAPYRAMGPASRAAQTPCGGQLHAS

SEQ ID NO: 377477 - protein, 348 aa, unidentified
MKELMAGIDLHSNNIMVGIVDGEGKRLAHQKLPCELKRILEFLAPFKKRLQRLAVESTYNWYWLVDGLQGAGYPVVLANPAKITQYSGLKHADDKNDAFFLAELLRLGILPTGYVYDAQRRPVRDLLRRRMSLVHQRTALMLSFKSLFTRTTGEQMSLSRLKTLAVAQAQALYEHPANQLIAGLQIHHIEQLDASIGRLEKAVLNVARELPYYPQLKTLPGVGIILGLTITMEIGDIQRFAGPGPFASYCRTVAAQCTSNGKPKGENNGKCGNKYLSWAFVEAANFAKRYDEPCRKWYDRKAAKTSPVVATKALACKLAKAAWHLVAEQTDYEPERMFPQLAGAAMSK

SEQ ID NO: 377478 - protein, 400 aa, unidentified
MLSIGIDVSKGKSTVCGMKPGGEIVYTPFEIQHTREGMSELVSLLHNSGEEVRVVLESTGSYHCPVVAALLENGIFVSVVNSLRMKRFCSQSIRKGKTDRIDAMQIALYGLAYWQELQPARLPEDTYRELQLLARQYYQMTSMLIKAKVDFNALCDQVLPGMQELMSDHAGRHKLSDFVLRYHHTAHILEMGETRFRKDYCKWAEKKGYRNHERMAVLIFATAQNGIPVLPNAPSTQIVITEAIRVLHTVEASRDAILTQMQALAKTLPEYSLVREMPCIGDTLAPRLIAEIGDVRRFHSKRALIAYAGIDAPPYQSGKFCANNRHISKRGNRYLRKTGYEVMQSYVMHKPANDPIFTFIEKKRGEGKSGKLAMVAGLNKFLRIYYGKVTELYRSLPAIE

SEQ ID NO: 377479 - protein, 350 aa, unidentified
MFIIGCDFHSRFQQIAMLDPTTGEVIERRLEHENGEAKDFYATLPSPARVGMEATCDAPWFEKVLLEHHHELWIGDAAEIRAAMVRKQKTDARDALHILDLLLANRLPPIWVPSPPERDLRQMLRHRHKLVRFRTSVMNQLHALAMGQGLCRRKKLWAQVRRKELEGLVLDPWASLRRKQLLQLLDQLGPWIDQLDAAVILAAESRASAVCLMPQAGVGPVTALAFVLTIGPVSRFANSKKLVSYLGLNPSEESTGGRQRLGAIRKQGNPMMRYLLVEAAQTASRLDPELRRDYQRLKFRRGSAVAKVAIARKLAVRLYGKLREAAQPVPSARMQGSPVGPVVGESLAPY

SEQ ID NO: 377480 - protein, 316 aa, unidentified
MERCQSNTKVGGVDVGKHRLDAAVHGQPQGVAVANTGAGFGELIGWLHARQVGRVGLEATGGYERGVRLALEAAGFEVVVHQPLEVRLFAQLKRRRAKTDALDAHLIAAATAQVDTVRAAQDRRLVELSERLTAYEHLSGRIVQEKTFKESLTLPDLIALSQAQIDALEQGKKALKEQIVQAIKAHEDLSARFDLLMSLPGVGPVVAASLVIRMPELGSMKPGQAASLLGVAPFDRRSGKWIGQAFISGGRGRPRRMVYMAALQARCCCPSLKAFAQRLLAKGKGGKVVIVAVMRKLIEAANLVLQRGQPWVKQPA

SEQ ID NO: 377481 - protein, 375 aa, unidentified
MINYTIFVGLDVHKDSITVAMARAGKQDVESIGFINNDSASVVKMVKRLEEKGGELSFCYEAGPCGYGLYRQITSMGHSCMVAASSLVPQRPGDKVKNDRRDARKLARHLRNGDLSPVWVPDEDNETLRDLSRARQSAKEDLHRNRQKLLKFLLRLGIRSPQGIRNWGSKHGQWLKALKLDNSIQQMILSEHIYAIEECDSRVSRFEKEIEAQSQDGPHQKTMAALQGLKGVALITSATIISEVGDLTRFKNPRQLMAYAGLVPSESSSGNSIKRGSITKSGNSHLRKVIVEAAWHYRHRPTLGTGLKKRQEELPEEIKQISWKAQHRLNLKFRRMTATGKPSQKAVVGVARELLGFIWAIGQAVGIENEFLKAV

SEQ ID NO: 377482 - protein, 351 aa, unidentified
MMIIGVDYHPSFQTIAFLMEETGECGEQELNHSDGQAERFYRDLQQRGIRVRVGMEATGYSRWFERLLAELGFEVWMGDPAEIKAKRVKKQKFDREDARLLLRLMRENNFPQIWVPDPENRDLRQLLWHRHRLVQMRTRIMNQLQALAMNEGYRWKKKLFSEQGRAQLEKLELAPWASRRRQELLELLDRINPTIEELTAAVEREARKRPEALRLMTHPGVGPLTALAYVLIIGTPTRFPRGKQIGTYVGMIPCEESSARKQRLGHISKQGNSLLRFLLVEAAQAATRVHPDWRRRYMHLAMRRHKSIAKVAMGRRLAVRLYWMWRNGCEYSQSLEFGSYAGQLGIGHGVK

SEQ ID NO: 377483 - protein, 354 aa, unidentified
MPEVAEVFPCSQWAGQWQGAGRRACREFTWALEPAVVFGRPPPASRPHGIRIGKPVQVYVVRIAPRCHFLRRLGGRSEEGGQYMPRYLGLDLHRRYMHGCEWTPETRQERHFRFPNTRNGWSQFVATLDSSCWVAMEVTGNAFQAYDLLSPHAEKVLLANPIELKRLGSGRHTDRVDAARLAKMLALGTLPTIWVPPLEVREVRILLRYRERLKSTRARFLNQIRAALRRNGYDLPARANPKLHLTQEQLEVLPPAEKALILSACRQADALNDEIASIDGEIARRLQGTAEVELLLTMTGFGPIAAAAIWAYIGDPRRFQSPKQVARYAGLDPSVYQSGDLSYHGRVSKNGKCE

SEQ ID NO: 377484 - protein, 359 aa, unidentified
MQRNKISFKGQKIYIGIDVHAKTWEVCVLTESGYKERHPQQASAKTLFDFLKKHFPDGEYHAVYESGFSGFSTYYALTEYGINCVVTHAADVPTTQYEEVMKTDKVDAAKLARSLRAGDIRPIYIREKENIDDRSVIRIRKTIQKQLSGYKARVKHLLHCNGVEIPEQFARPGTHWSRAFIKWLKEDVVLLSSSRLSLDLLVKQVETIRQTLLDATKSIRRLAQTDRYRNNYELLMSIPGIGVSVAMCILTEIYDVKRFRNENQFASYLGLIPTCHNSGEKTASGEKTFRGNKHLGPMIIEAAWIAIYRDYGLGMAYARYKQSMKPQEAIVKIARKMSNIIFSVLKNSRKYEPYRWDKE

SEQ ID NO: 377485 - protein, 360 aa, unidentified
MKKDTRDGSGLIVGVDLGDRFSRYCVLDQKGQVLEEDTVATTGRAFRKLFGDRPAARVVIEVGTHSPWVQRLLQELGHETITANPRYVRLIYSSGSKNDQLDAERLARLARVDPKLLHPIQHRGGTAQADRALLRSRNALVECRTKLVNHTRGVVKSIGGRLPTCSTSSFHKRVRQDLPEELKPALTPVLDTIAALTLKIQKLETRIERLAAKRYPETGLLRQVSGVGPLTALSFVLTVEDPQRFKSSRAIGPYLGLRPRQSQSGDVDPELRITKAGDSDLRRLLVGSAHYILGPFGPDTDLRRWGLALAARGKKNAKKRAVVAVARKLAVLLHRLWVTAEVYEPLRTNQPAIVAEAISA

SEQ ID NO: 377486 - protein, 415 aa, unidentified
MALKIVYKICCGIDVHKTFVVACIASTDNNGVTTYETHRFSSYTSGLKNLLQWLLTRNCKDVCMESTGKYWIPVYNILEDDCTIVLAHPKYVKAIRGKKTDKKDAKWIADLFKHDLVAGSFMPPADIRQLRDLMRYRFKLTCFRSSEKNRLQNCLTVSNIQLGNVVSDTFGKSAQAILDKLLENPADTSFELEPLVFKSLKKKLPELRDAIDGYITPEQAGKLKVIKAHYEDLESRKSELEELILALAAPYQQELSILQTAPGIRSDFTAIGIISEIGTNMEAFPSAKHLCSWAGLTPTNNESAGKRKSVRVSKAGCYIKPLLVQCANAVVKSDKHPEIRNRYLRLKKRHGHKKAIIAIARMLLTALYHMLKNGENYNAEFYRKSDLPPVDREITVEQALIIARNQGYKIKSATA

SEQ ID NO: 377487 - protein, 366 aa, unidentified
MGWPAPSASYVIVAGDSKGGRNQMKIAILGIDLGKNSCSLVGLDGRGKVVKRRHMRRASIVGFTKSLPPCIIAMEACCGAHHLGRLFKAQGHEVRLMSPEYVRPYVKAQKNDDRDAEAIAEAATRPTMRFVELKSEEQLDMQTLHRARDRLVGERTALINQLRAILLERGIVIAQGRRNLERELDAMLFEVDGLAVSPRLRKLIEGIREEWRDLDRRIAAFDDEFAARAKTDEAARRLATIPGIGVLNATALAAAIGEGQTFARGRDLAAWLGLVPRQITTGGKPRLAGITKRGNCYLRKLLIHGARAVLPTLCKSETLLGGWLRALLARVHKNAAVVALANKLARIVWAVLRRKETFNPSATALA

SEQ ID NO: 377488 - protein, 410 aa, unidentified
MQITCGIDWAEQHHDVAVLNADGSVLARARIDTGATGFSRLMSLLAEHVDDADQLASVPIGIETDKNLLVVALQAAGMTVFAINPRAVARYRERHGQSGKKSDPGDAFVLADLLRTDRHQHRPLPSISVHASAIKTLARQHQDAIWSLNQTVSRLRSLLLEFYPQALHAFPNLKHKAALAVLSATPTPEAGLRLTARRLATLLRRCRRRNDPSLAEHVLSALHSPALRQPTAVEAAYGVTAQTLTAIVVAMQTAVEELEQALAAEFDQHPLATILRSAPGLGPVLAARVLAEIGDDPTRFTTTAGLRAFAGTAPVTRASGRSRYVKARKVRNKRLGDACHWWAFVTITKSAGARAHYDRRRAAGDHHNAALRNLANKLIGRLWWCLQHDETWNENTAWNIDIATPDPRTA

SEQ ID NO: 377489 - protein, 405 aa, unidentified
MGKVFVGHDWAEAHHDVHIEDEQGRRLAKARLPEGVEGVARFHELVAPFVEDPAEVVIATETDRGLFVGALVAAGYTMLAVNPLSTSRYRERHSTSGAKSDPGDALVLAELARTDAHNHRPIAGDSDLAEAVKVLARSHQSMIWTRQRQTNQLRSTLREFYPGALSCFDDLDGRDALAVLAVAPTPVLGRSLSRSKIASALRRGGRQRRVEERTAEIQAALRADQLAAPDLVSEAMGVTVAALVAVIVELSAQIARLEESLADRFEKHPAAEVIRSLPGLGMILGARVLGEFGDDPNRYVDAKSRKNYAGTSPITKASGTRRVVLARFVRNRRLADACYMWAFASITASPGARAFYDQRRAAGDTHHRALRALANRLVGVLHGCLRHGVMYDEDTAWGHRMEQAA

SEQ ID NO: 377490 - protein, 405 aa, unidentified
MDVLYSHCCGLDVHKKNVVACALTPEGKEIRTFSTMTRNLHELRDWILSKGCTHVAMESTGVLWKPVYNVLEPENLEIMVVNAKNIKNVPGRKSDVKDAEWIAGLLRHGLLTGSFIPKREQRENRELGRYRQSLIEERTRAINRVQKVLEGGNIKLSSVASNVLGKSSRAMLEAIIHGENDLDTLTDLAHGNMKASPEELKQALTGVIGSHQLLMLESLLRHIDFLNEEIEKLDKEIGERLRPFELELELLDTIPGVGRRTAELIVIECGTDMGQFPSAAHFVSWAGFAPGQNESAGKKKPAKTRKGNKKLRSGIVQASRAAARQKNTYLSSFYNRLARRVGKKRAAVATGRKILTIAYHVLKDKEPYKELGPNYYDERIKTRVINQAIKRLESLGCKVTIESVA

SEQ ID NO: 377491 - protein, 341 aa, unidentified
MKTFIRIGVDLAKNVFQIHAIEREGAPPLIRKLSRAKFREFFSKIAATRVGMEACGSAHYWARELRAMGHDAVMMAPAYTKPYVKRGKNDAVDAGAVCEAMSRPDMRFAPIKSADQQAVLMLHKTRDLLVKQRTMSVNALRGHLSEFGLVAAKGIHRVKELLALALADASLPEEAREAVTILASHGETLDAKIDALEKKIAKASAKNPMSALLDEVPAIGPLISSAIAATTPDPSVFKSGRDFSASLGLTPSQHSSGGKEKLGAITKKGNRYLRKMLVVGCTSVVRVAHKYKGSLAEWIVAMRAKKPERVVAVALANKLARICWAIMSTGESFRAETYSRA

SEQ ID NO: 377492 - protein, 344 aa, unidentified
MAYHTALDVSLRSVSICIVDDDGTIQYEGKAASDVSDIVGCLKRFDPSIDSVGFEAGALTQYLTYGLQAAGYEVICLETRQVNAALAAMRNKTDKNDARGIAQILRTGWYSRVHVKSMESHLIRALLSSRKMVLKQCVDMENEIRGLIRLLGIRLPSPLKHRAFDATVRQSIEKNTTLAHSLIPLLDARLVLYQTFLKLDNQAKALVREDTVCQRLMTAPGVGAITALTFKAGVDDPTRFKRSRTVAAHFGLTPRRFQSGEIDNPGRISKAGDPDVRSALYAAAHSLVVRSAEWSSLKVWGLRLVKTKGHRRAVTAVARKLAVILHKMWLDGSDFRYGSTEATS

SEQ ID NO: 377493 - protein, 338 aa, unidentified
MEYGAIDLHKQRSVIRIVDAAGTVVLDRTVPTSRAGFASVFRGRARLRVLIETGTESEWAAQTIEADGHAVVVVDPNYALMYGVRQRVVKTDRRDVAALAEANRLGIFRAAHRVSAAQRERRRQLRVREQLVRVRTQAINLLRAQLRQEGYRLGSGSAETVVARYGRLQLPTTLQTSLQPVIALLTHLRPALAALDTTTAAQALADPITRQLMTAPGVGPVTALTYRAVLDDVGRFADAGRVTAFLGLVPKEDSSGARRRKGGITKAGPARVRALLVQAAWTIWRQRHAGDPLQRWVHAVADRRGRGMAIVGLARRLARVLFAMWRDGLPYRVMPLTA

SEQ ID NO: 377494 - protein, 417 aa, unidentified
MKRLLERCAALDVHKKQVAVCVRLLGAAGEVEELAAEFSTMTSQLLALRDWLKGFGVTHVAMEATGVYWKPVYYALEDDFELLLVNAQHVKNVPGRKTDTRDAQWLCQLLECGLLRASFVPPKPIRELRDLTRYRKSLIQERTREANRLHKVLEDAGVKLSSVATDVLGVSGRLMLEALVSGTTDPKVLADLARGLLRKKLPALQEALTGDFRGHHALIVSHILAHLDYLDETIAEISAEVERRLVPFASKTELLATIDGVAARNAQVIVAELGPDMSRFPSDRHAASWTAICPGNNESAGKRKTGRTRRGNQHLRAALIESANAAIRKRDTYLRAQYEQIKRRRGHKKAITAVAHSILIASYHVLKDEVSYQDLGGDFFARRADPARITKRLIAQLERLGHSVTLQTSTAPAAATT

SEQ ID NO: 377495 - protein, 343 aa, unidentified
MDHFAGLDLSVKETSVCIVDDTGRILREVKVASEPEALLQVLRNPAYRFKRIGLEAGPLSQWLFSALAEAELPVVCVETRHMQALLKAQINKTDRNDARGIAQMMRVGLYRPVHVKTLRSQKLRMLLTHRKLLQSKAIAIENDLRGTLRNFGLKVGMVGTVKFEARIKELVENLPDLAELVEPLLIVRRALSEQTLILHRRLLAIVRDDEVCRRLMTVPGVGPVVALTYRATVDVPARFRNSKAVGAVFGLTPSKYQSGEIDRSGRISRCGDEMMRMMLYEAAQVMLLRSAKWSWLKAWAMKIARHRGMKKAIVALARRLAVIMHRIWVDGTEFRWTREVTVA

SEQ ID NO: 377496 - protein, 324 aa, unidentified
MSSHEIVGIDVAARKLVVIGERLALAEYENTAAGRSKLVNALSRSPQPVRVVLEATGMYFLDLACELAAAGIAVMVVNPKATHHFAEAILQRRKNDPVDAAMLREYGRRMDFVSWQPPRHELFGFRALTREVQALSKTVAAARNRLHAITATQLAPAVLIGALERQIAHNQALINELVAAAVAQTESDPELARLLARTDSVPGFAAKAAVLVIGKLSVLPPMTARQWVAQAGLDVREETSGSSLARRPRLSKRGNKRLREALFYPALTAARCCPAAAAFVDRLVAHGKTRLQAIVALMRKLLHGPHAMWRNDEDFDAEKLFAPA

SEQ ID NO: 377497 - protein, 461 aa, unidentified
MSVKKKAGQPHRAGRKRVDWKALEIVHPDAAGIDVGGSEHWVAISPDRDPEPVRRFGCFTADLREISRWLIEKGVRSVAMQSTGVYWMPVFEVLEQQGLEVYLVNAQHTKNVPGRKSDIQECQWLLKLHAFGLLNNSFQPTDEIRIARTLWRQRSNLVAEASSVIQRMQKVLTEMNVQLSNVLSDLSGLSGMKIIGAILEGERDPWKLATFVEPEVQATAEDIAKSLEGNWREELLFVLRQHVEFYRIYQQKITDCDLRLRKHLESLGSKVDLKTQPIGHRPKGKKKSKNAPGFDLRTELYRITGIDWTQINGIDVLTAQTVIAEAGADLSAFPTEKQFASWLGLSPTNEQSGPRILNRRTRKVVNRATVAFRNAALTLLRSQSYLGAQYRRLRTRLGAPKAITAMARKLACLFYKLIKHGQPYVDKGTEYYEAKYREQQIRSLAKRAQKLGLQLVIPKTA

SEQ ID NO: 377498 - protein, 337 aa, unidentified
MSLYIGVDGSRDTLAVALFRAGQDSSPQYLGSFPNRLEKFETLFRQVQQQSRGEEVIWVIEPCGGYERPLMYWLYEHRQCILYPNPRQVRQWQQGRGYRAKTDPLDSQMLALYGAEHRQDLHPWKPWPEPAGHLLRLAERWRELEVERQREQNRLEAYLSQGISPDAPEVRDLQEHIQFLEGLIRRTKKHIGRLYRDFPDLDGLRRRLLSVPGVGEKTVHALVALLIRWAQLGRRDAKGLVAYLGLDPRIHQSGKRPPRGRISKQGDTRWRSLLVAAARGGLKGTSSPLARFYRRLRQRGKPHMVALVAAARKIVVWAWAVYCCGEPFDLRRHIARV

SEQ ID NO: 377499 - protein, 344 aa, unidentified
MKVTAVGIDLAKNVFQLHGVNEFGKTVIKKQIRRDQMAEFFVNLPACLIGMEACGSAHHWARKLQGLGHTVKLMAPQFVKPYVKTNKNDAADAAAICEAVARPNMRFVPTKNIEQQAVLALHRVRQGFVKARTAQANQIRGLLGEFGLIVPQGIGYIASRVPELIEDASNELPGSFRLLVQRLLDHLKELDRQVDELESQIVKWHRQSDASSKLAQVPGIGPITASALVASLGDAKNFDGGRQVAAWLGLVPKQHSSGGKQNLLGISKRGDTYLRTLLIHGARSVIYRAQQKPESCSWINGVVNRRNKNVAAVALANKNARIVWALLAHDREFRSDYAAAKAAP

SEQ ID NO: 377500 - protein, 388 aa, unidentified
MQTVADRPEAPTAIRTDLGAIFVSLELSRSTWLITSLSPGGGEKMSKQVVRGGDVAGLLERFARLREKTRARTGKVFPFVVIQEAGLDGFWIDRALQNEGIESHVVDPASIATSRRRRRAKTDGIDGEALVRALLAYKRGEPRVCAMVKAPTPEEEDRRRLCRERKVLIVERVRHVNRVKGLLFSQGISGYEPLRHDRRERLDTLQTGDGRLLPDHLKAQVRRELDRLELLLEQIKAVEAERDVLLAVQQGAAPAPAAMLLNIKGIGPEFAAILWSEGLFRHFDNRRQVASYAGLAPTPWQSGSVDREQGVSKAGNPRLRTTLIQLAWLWLRNQPQSALALWFKERVNRNGGRLKKTTIVALARKLLVALWKYVTAGVVIEGAIVKSA

SEQ ID NO: 377501 - protein, 412 aa, unidentified
MLFVGDDWAEGHHDIEIVDDNGKRLVRRRLPEGLEGVTRLHSLIAAQMPDDWLDRDPNEVAGLVKVGIETDRGSWVAALVAAGYEVFAVNPLSVARYRERHSTSGAKSDAADAHLLAEMVRLDRAHHRPIAEDTDLGEGIKLTARTHQSLIWDRSRHAARLRSTLREYFPAALLAFEDLDAPDALELLARAPEPDQAARLSKAVIIAALTRARRRRVEDRTQQLQNILRAPELRQPPTLQSAYAAVVASEVAIITALNTQIDRLGAVVGEHFGRHRDAEIYLSLPGLGVILASRILGEFGDDPDRYADAKSRKNYAGTSPVTEASGTKKIVSARYARNRRLGDALQQWAFCSLRGSPGAKAYYQQLRDRKIGHEAALRQLANRFVGILHGCLKTHTTYDENTAWAHHTTTAA

SEQ ID NO: 377502 - protein, 354 aa, unidentified
MRIVCALDVHRRQITYAIVDVRSGELSRGRITPATRESVREWLARFDSLHDVHFALEGTTGWRFVAEEVARAGHRAHLADPAETAVKRGRKRRAKTDRADCDLLLRLLSARELPESWIPPAQILELRTRVRLRKTLVDERTAWQQRLQAQLFHQGVPAGVRPRTRAGREALASVELSPAGRELVALALRMIDRIERELEPLDRALSLYARRQPGCRELITRLYGVGPVTATAIVAELGDARRFGCSDDAVRHCGLDVTVHQSDRKRAPGHLSHEGPELLRWALFEAAQQACRPASPDYDYYRQVARRIDHNRACLSVARKLCRRAFHILRELGAEALAPIEPAPPGEGVTPAAA

SEQ ID NO: 377503 - protein, 312 aa, unidentified
MTSKIFVGIDVSKRWLDVHVHGTVHSWKVGNDPEGMISLVEQMKKIQVTLIVFEATGGYERRAAKALREAGLPVAVVNPTRVRRFAEAMGILAKTDKIDSGVIAWYASVVHPPVNGQQTTLEEQLAACVERRRQLLVELVAEKNRLSTCPTWMKPGIEEHVGWLEEHIERLAAEIQAFIAQDPQWKERAEIIDSVPGVGEVTAATMVAELPELGSLNGKKIAALVGVAPFNKDSGPKRGKRRIFGGREDVRRTLFMAALSATRHNPVIRAFYERLLRYGKEKKVALVACMRKLLVIINSMVKKSEKWRYIPA

SEQ ID NO: 377504 - protein, 311 aa, unidentified
MDQIYIGVDVAKAWLDIYHPARGAKRIENTPLSVRSFARKAAREGVWVIFEASGGYDRVLRDGLEAAQASFSRVNPRQARDFARAMGVIGKTDRVDARMLATFGQRLQPPQTPPGSPTRQALLAQITRRRQLVEMRKQEVTRLQQTTDCDSRSDIKSLIQLLERRIEKVETRIAEIIRSSPELAETDRQLKSVPGVGMIVAATLMAELPEIGSTDRRKIAALAGLAPIARDSGQRNGRRVIGGGRATVRTVLYLAALHASRHSATFRAFRQKLQDAGKPVKAALTATARKLLSVLNSMVADGSYFREVQPI

SEQ ID NO: 377505 - protein, 354 aa, unidentified
MRTVYCGVDFHARMQTIAYCDSADGEIHLAQLDHRKDDVREFYSKLTGQVIVGLETGGYSSWFEAMLEELGHTVWIGHANEIRRRANWRQKNDRRDAELILEIMLKGDFPRIHCHNRESVEALRMLRYRARLVKMRTMISNNLQAIAISSGLTQRSRMLSRAGQQRLRNARMTPAIKHQSEDLITLLVPLNERIAKVDRWLKEQASVDDRVKLLMTHPGVGVLTALGVVHTLEPFNRFSRQRSVVAYVGLEPRERSSGERKRYIGISKAGSRLLRFLLGEAAHTAVRLDPELKQFYERVGKRRGKSKATVAVARKLLIRCWIMLRNNIDYVEFRNRGVEARLARNINRPSVPVE

SEQ ID NO: 377506 - protein, 343 aa, unidentified
MEYYVGLDVSLKQTSICVVSGTGSVVREGVVDSNPDAIAAFVRSKAPGAIRVGLETGPTSTWLWTELKRLGLPVICIDARHAKAVLKMQINKSDRNDAAGIARIMQTGWFKEVRVKDLHSHTVKALLASRALLVKIKRDLENQIRGLLKNVGLVIGRAKFNVFAVRAEELIEDRPELMPVVGPLLKARQAIEQQTEDLDRKVLRLTRNDAQVRRFMSVPGIGPITALCFKATIDDPTRFKRSRSVGAYVGLTTRRHASGEIDWTGRISKCGDTMLRSYLFEAAGVLLTRVPKWSALKAWGMRLAKRNGLRKATVAVARKLAVILHRMWIDGTEFNWSTKQAAA

SEQ ID NO: 377507 - protein, 351 aa, unidentified
MYTLGIDLHKKSSVWVLIDEQRTELWKDNVLCHPKYINIAVEKIPVPHTEIQVAIEPVAGWRWVSKLLEEAGMKVHIAHPRKIQLIAKSTKKTDDEDSRTLANLLHSGFFPEAHRSREEIYQLRLLLRERTFIVRQRTSVKNQIHGIATTQGLHHIVGGNPLFKRGKTGIMNGENFVLKELHHLDEDLEKRIKPFDEKLQIEVSRYPEAKILQTIPGVGVVTALTIISEVDDFKRFKTGQKLTSFAGLVPRQRSSGETIRYGSITHAGSAPLRTALVETAMRIREGNAPELFAFVKRLTPICGAKKARVALARKLLVIMWKMVVNNTPYNPNILFSSCTTNVSDLDTGSDN

SEQ ID NO: 377508 - protein, 412 aa, unidentified
MDVIHPRCAGLDISKRDAKVCVRINGAGRRKTTETVATFGATTRQIMAMRDHLAAQKVTCVVMEATGDYWKPFYYLLEDLTGVEVMLVNARHVKNLPGRKTDVADATWLAQLGAHGLVRGSFVPPEPIRQLRDLTRTRTAVTRERTREIQRLEKLLEDAGIKLSSVAADLNGASSRAMLDALLAGETDPATMADLAKKQLRRKIPQLTEALYGRFNAHHAFLTRMHLDLIDQHTAAIEALTERIEVVMKPFRRFRDLICTIPGIGGYTADVVVAETGADMTRFPTAQHLASWAGTTPGNNESAGKVKSRRTRPGNPYLQGALGTAAMSISHTRDTYLAAKYRRITARRGPLRANVAVQRALLVAIWNIATTNTAYHDPGGDYFTRLNPQKARSNAVRQLEAMGYHVTLEQAS

SEQ ID NO: 377509 - protein, 282 aa, unidentified
MDQVIIGVDPHKLSVTIEARDRREVLRVTGRFGTGTAGYRQLLRAACQWPQRVWAVEGANGIGRPVAQRLLAGGERVLDVPAKLAARARVSGTGQGRKTDATDAHAIVMVALRDTGLRELSSDPELMVLRMLCDRRDEISRGRAQALNRMHRLFLELLPGGAPVKKSTGQYKALLARVRPRDLAGKTRRRMAAEELADLARYDARLKTMKAELKAAVQARGSHLMNIHGIGPAGAARILADVGDIARFPDRNHFASWTGTAPIDASSGEHTRHRLSRAGTAG

SEQ ID NO: 377510 - protein, 344 aa, unidentified
MKVTRVGFDIAKRVFQVHGVDENGKVKARKTLTREKVLEYFAQLPACLIGMEACGGAHYWGRELSKLGHTVKLMAAQFVIPYRKGGKNDANDAEAICEAVGRPNMHFVAIKSEEQQSVLMVHRARTLVMANRTAQVNQIRGLLGEFGIVVPKGVARLRRELPGILEDAENGLPVLAREVLAGLLDQFREFDAQVSGYDRQIRALAEASEPARRLMQVEAIGPQTATALVASMGDPHVFKSGRSYAASLGITPRQHSSGGIDRLGQITRQGDRYVRTLLVHGARAYLRVVDKKTDGKSAWARRLKERRHINVVAVALAAKHARIAWAMLAKGTEYRPVGTEEAAA

SEQ ID NO: 377511 - protein, 450 aa, unidentified
MSPLALDVVTKTDKTPVLGRMLSKYVGRKTSSIENGITKARNHSRQRGNIMRVVFGIDVSKASSEVAILVNGEKVHGYTIPNDAIGFNRLLGDLKTVHQPEIVFEATGVYSRRLQAFFEDNSYTYTRLNPLESKKQLDSLRVRKTDKIDAEKLAMSQFILNRKPSYVQEALYQELRDLSRFYQNLTEDIVCAKNRLHKVLQITFPELENILSAPTGEQYWNLVITFPCNSFVLESDDATLTAIIRQSTAKRISEKRVTYLVDKLTKLANQSYCAVKKTSPVIEEVKYYAGELLRLSEHRQGVVEEMVTLAQSLPEYEILLSIPGIAETTATSIIGELGDIRRFHSANQINAFIGIDLRHYESGNFLAKEHITKRGNPYARKILFKCIHNIASASHTNPCHIADFYEKRKRQSQVTSTKPHTIASIHRIIRTMYYLITHNKLYDYTSIQNR

SEQ ID NO: 377512 - protein, 428 aa, unidentified
MAKFRAAPTTPAWLAIDVAKNRHAALLEDHAGHRRRLTVSNTQAGFEELARILAPHLPCEVALEPTGDYHRPLANFLLRQGHHVHFVSSIATNRTREALFNSWDKNDPKDAQVILHLLKSGTTQVFADPLQRGNQDLQELLGTHRQIADRKTRVYHSLMTHYVPLYFPEAEPFLSNPRCEWFLEVMRIAPCPSAVLQYGKKTFVKRFTAVGGHFTSRQSLVASYYESAKESVGIPVAADSQAVQMFQIAVEQYIDLIKLRRKLQERIDAQLENNVDYQRLRSIPGIGPIVALTVLAEGGDLRRFSHHRQFLNYCGLSLSTMQSGASRGRPQLSKRGNARLRWAFWVAANAAINQRRKLVSEKVRRLRSARSTGCRSQKKSVCRRRSEGCAGGIRLDQIWKRVPPLSRSGGARRENPLAGPLRRPRPRR

SEQ ID NO: 377513 - protein, 346 aa, unidentified
MENIALDVHKHYTWARVENREGQQLYASRLVHSRGSIKNFIRRWTPGSSVAVETVGNWYWVVDEIEAGGGKPQLVNARLAKLMIGNVNKSDKLDAKGLNMLQRTGTLPTVWIPPSGVRDARELPRTRMVFSRQRTQLKNRVHATLSKYGYSVDEVSDAFGKRGRQIIEELSSKLPPHTKQALDHVLDQLDEIIENLKAIEANMIKVFAPCPQTIWLQSLPGVGQILAVVIWTEIGSIERFNRAEQLASYSGLVAREHSSGGKFRYGAVRRDVNVYLKWAFVEAANSAILNRERCDYQHISRLYQRIKPRRGHNRAKVAVARHLAEASFWMLKKGESYREPVLSTQR

SEQ ID NO: 377514 - protein, 354 aa, unidentified
MLYIGADIHKKTTTMAVKNSRGDVVLHKKLPNDKIVLRQFIKSIDDEKKLVVEATFNWYWFVDLMEKYVDEVMLANSQKAKILMEVNKKAKTDKLDAEGLAELLRRDMVPKVFIPPKEIRDIRELLRCRISLVRIRTSVKNRVHGILHKNGVNSPFSDLFGKGGRVYIASLSLHPCYTHILTGYLALVEFLDELISNVGKEIYKKPLVKTKDIQLLLALPGVGELSAFVIKYETIDIKRFASDKKYVSYCGLAPSTSESADVKRHGKLIPQANHYLKWVFIESAHHARWHWWFKPTYQRALKNHGKNIAKIAVARELARITYFMLSRGEPFRGSESKKAPPKQVSPRGHDPKRS

SEQ ID NO: 377515 - protein, 341 aa, unidentified
MWIIGCDYHPRFQQIAMVNTEGGECGERRLEHVEQAEQFYRSLRGQAVRVGMEASGHARWFERLLAELGMELWIGNPAAIRAAEPRKQKTDARDAEHLLRLLMEGRFERLRIWVPRAEERDLRQLVLHRHRLVEMRTRVKNQLRAVALNEGVGRQPGLWSRKGQEQFRALALPAWTDRRRADNLELLAELMRRTDPLDQAVEQEAARRPEVVRLRTHPGVGPITGLAFVLTIGDPTRFQCGKQVASYLGLIPAENSSGGRQRLGHITKQGNALLRGLLVEAAHSAVRGDVELGRCYRRLAMKKNRSIAAVAVARKLAVRLWWMWLRGLDYGQWRESGSHAG

SEQ ID NO: 377516 - protein, 399 aa, unidentified
MLAVVVGHPSQPRETEWKRRKFGATVPELQRLREWQGAEGVQEVVMESTAQYWKPVWIALEGEFELQLTQARSNKAPRGRKSDFADARRLVKRWRAEDLTVSYVPAAEQRRWRAMTRFRRQAIRQRVQLQNQIESLLEEGQIKLSCVGSDLLGMSGRRILRALADGETDPQKLAEMRDARVRASEEEVKAALGGQLHSLHCRLLRLSLDRVEQIDQQIGELDMDLGQAMQAHQEAIARLVALPGLGVDSAQQVIAQIGPEAAAFPTPEQLASWVGVCPGRQESAGVSMSQRSPQGNRPMRRLITQLAWAAVKAKESYFQILFRRWVPRLGAKKAIWAVAHRLLRLIWKVLHKGVSYEERGPLGLNKNALHRRKRRLLRDLRALGYKVILEPLPTQGSTV

SEQ ID NO: 377517 - protein, 338 aa, unidentified
MSELATVGIDLAKSVFQIHGVDENGLVLVRRQLRRSQLLAFFEKRPRCLIGMEACAGAHDWGRRLQELGHDVRLMPPSYVKPYVKRGKTDAADAAAICEAVTRPSMRFVSIKSEACSSILVLHRTRDFLVRQRTQIGNAIRGHMTEFGIIAAKGVQNVERLEEHLDRLPEAARMPVSLLFDQLSETDKRIEQLTEEIAETHAHDETSQRLATIPGVGMLTATIIAVTTPDVDNFDCARDYAAWLGLTPKPHSTGGKQRVGRISKMGNRYIRRLLYLGAMAQIMVRRRLKCGPGSDWLSNMLMRKKAKVVAIALAHRMARTIFAVLRDGTRYKPQATAA

SEQ ID NO: 377518 - protein, 356 aa, unidentified
MSSDIKYIGLDVHKEAIAIAVLNGAGKLVMESIIETKAATLVQFLQGLRGELHVTLEEGAWAAWLYDVLQPHVHELVVCNPRRNALLKEGSKSDKVDARKLAELLRAGMLRPVYHGENGLRTLRELARSYQTISKDLRRVMNRLKALYRSWGIPCGGTRVYAPRDREQWLNKIAHAGVRRRAELFYQHLDGLQVLRRQVRGEFLAESRKHKAVKVLRQIPCIGPIRAALLLALMQTPHRFRSKRQLWTYSGLGVETHDSAQHCYVDGRLQRSKKPQQVRGLNQNHNHEMKEIFKSTATSASRCGGPFGDFYAGLLAKGMKPEMARLTLARKIAAITLTLWKKGGRFDAEHLKAQAA

SEQ ID NO: 377519 - protein, 347 aa, unidentified
MNFYNRQHQYYCGIDLHARKMYVCILDQKGKTMVHQNINTEPEAFLQSISPYMEDIVVGVECVFCWYWVSDLCAKHQIPFVLGHALYMKAIHGGKTKNDKIDSYKIALLLKGGNFPTAYSYPAPWRATRDLLRRRMYLMRRCGELVAHIQNTKTQYNLPGFTKRLARKYNHDGVAEKFENPEVRKSVEVDLAAIAALNRILNQLEWHIEKTAEQHDYHTLYLLRSMPGVGLILALVFLYEIEDIKRFPSVQDFSSYARLIKPVKTSDGKWAGKSNGKIGNHHLKWACNEAAILMLRESQQAKQYVAKLERKYNKGKALGIFTHKIGRAIYFILKNKEAFDMEKFFSQ

SEQ ID NO: 377520 - protein, 350 aa, unidentified
MKKITSPRPARKGVPSESVQALAAVRPAAEECYAVMGLDVGDKETHFCMLDPGGEFVAEGAVVTSDKGLRSLLAGRPRLRVVLEAGTHSGWIGRSAQALGHELIVANPRNLRLISRSDSKNDRNDARMLAHIAAAGPELLAAVQPRSAKTQQDLAWVRAREVAVEARTKIVNAVRGIVKTSGARLPKCSTAAFAARGRELCPEGLKEALSPLLRMVEELTREIQLYDKLVAKKAKEEYPETAAIETIDGVGPLTALTFVLVLDNDRTRFRRSRDVGCFIGLRPKQRDLGPFGRDSALRRWGLGLITRGGKRAKQRAVVAVARKLVILMHRLWVRQESYDPLHGVPAVAAA

SEQ ID NO: 377521 - protein, 485 aa, unidentified
MVQGTSGPSGGGASATPFRKVMHRPASPFGHSLLEMRMTRRTKAAGLPIINSRAAAIDIGSRFHVVAVPPDLCDEPVQTFQAFTGDLHRMTAWLTDTGVTTVAMESTGVYWVAVYEVLQAAGLEVVVANAREARAAPGRKSDVNDAQWLQRLHACGLLRASFRPDREIAALRSYLRLRERHLDYAAAHIQHLQKALTFMNLQLHHVVSDVTGATGLRIVRAIIGGERDVKVLAAMRDMRCKASPEVIEGALQGNYQPEHVFALKQALELHDFYHREIEQCDRQIELVLGALAGKAQTPAAPLPIPRHRTKQPNAVDFDTRPLLHQITGTDLTQIHGIGPYLGLRLISECGTDLSRWPSVKHFTSWLSLAPGCKISGGKVLSSRTRKSNNPVAAHLRLAAVTVGKTDTALGAFYRRLAARIGKAKAVTATARKIAVLFYNTMRFGIDYKDPGADYYESAYRDRVVKQLQRRAANFGFKLEALEGVS

SEQ ID NO: 377522 - protein, 393 aa, unidentified
MYYCGIDIAKHKHAVALLDEHGHAHKAVFMTENTQRGMDILLAELKPLEDVRIGLEATGHYWLNLYDVLTRNGYPVSVINPMQISAYRKSGLRKVKNDRTDAVWIADFLRITNLPVSNRDLPVLMQLRELTRFRFWLSEQIGDCKRKLLTILDRVFPEYETLFSNVFLTSSRALLQEVVSAQEFADFDLDELAELLATSSRRRFGLEKAKQIRQQAQHSIGVNFLTDAAHVEMRCLLAQVDLLEEQQLEVEKAVEGLMQQIPQHITSIPGVGAITGAAILAEIGDIHRFESPEKLVAYAGIDATVHQSGQFEAKQMHMSKRGSPYLRLGLWQAASMSIIHNEELKLYYQKKRSEGKPHRVAIGALCRKLLIRIYVILKENRPYQTTKLVPQHP

SEQ ID NO: 377523 - protein, 330 aa, unidentified
MRKVTEAGIDVSKDVLDVAARRDERRLETARFANDAAGHTKLIRWLTKGGRTVRVVLESTGTYSLDIALALHRARGVTVMVANPRAIKQFTGALMQRSKTDQTAAVALRDFVIRMPFVAWEPPAAHVLELRGIARRIAALVVERTRERNRLHALHATAETSPIVCNDIEVNVRHLERRMELLSAQAMALIGDRAELQTAFELLVSVPGIATHTAIQLLPELLVLPETMTVRQWVAHAGLDPRAHQSGTSVDKPARISKVGNAHIRRALYMPALVAVQNNAHVRAFFEKLVARGKTPLQAYVAVMRKLLHAIYGMFTTRTTFVAAKFHAAA

SEQ ID NO: 377524 - protein, 402 aa, unidentified
MGRTLPARMFKLAGVRNQIGEPATMPSESTVHIAIELSVSSWLVAARLPGAEKSRLHRIEGGDTAALLGLFAELRSRASAKLAGEADVVCCFEAGRDGFWLHRLLTAHGVAAYVLEPTSILVSRRARRAKTDRLDAEGMLRVLVAWLGGDRQVCSMVRVPTPDEEDAKRTHREREHLVQEKLRIENRIQALLFTQGIRARSSLRSWARDMAELRTGDGRALLPLLRTELNRLRRRLVLILELIRELEAERAEAMAAAVNDAMVRKITALQRIRGIGSNFAAVLVREVLYRSFANRRQLASYVGITPMPYQSGGMDRDRSISRAGNPRARTTLIQLAWLWLRYQPGSALATWFRERVGLLQGRTRRIAIVAMARRLLIALWRYVETGVLPEGVEIRAEAAPMA

SEQ ID NO: 377525 - protein, 406 aa, unidentified
MQTVYERCCGIDVHKKLIVACLRNGKKAELRKFDTLTSSIKELGNWLLENKCEMVAMESTGAYWKPIYNILELLDIDVIVVNAHHMKNVPGRKTDAKDAEWIADLLQHGLLKASYIPNKEQREIRDVVRYRKSLIEERAREINRLEKTLEGANIKLSSYVSDLNGVSSRNLLNEAIEGEVTPDNIGDLIHSSMQEKIPILLKAMDGVLTPIQKKLVRAILDHIDDMTRRIKDLDDIIDSEMKGYEDAIKKIDELPGIGKRSAEVIIAEIGIDMSRFPTDAHLASWSGLCPGNNESAGKRKSGKTNKGSKHLKSILIQCAKSAKTNKDSFFYAQYQRLVVRRGANRATVAVAHSMLIAIYHMLKDNVPFKNLGNDYYTKFNTESKAKYYLKKLQELGAQLPVSLVTA

SEQ ID NO: 377526 - protein, 343 aa, unidentified
MERYYYIGLDIHKRIIAYCIKAIDGHLIDQGKIGADRQSLGAWVKGLPGPWIGAMEATMFTGWVYDFLRPHAVTLKVAHPAMLKAITAAKKKNDRADAEKIADLLRVNLLPECHMLSEEIRELRRILRYRNHIVRTAVKMQNKMSGLLMEVGVSYSKKRLHGKKYFRELLERVDEIPASVKELLLLSRSSYEMFRSFQKRLVETLRTDSLIRDRVHRLMTISGIGEITALTWVLEIGDPERFSSIRKAVSYCGLCSAQKESAGKEQRGPISKKRNKHLQTMLIEAAKLAPYWNEQLAIVYDRELKKGNRNRATLAVARKLVAYMLAVDRQQADFKLSTDMQAA

SEQ ID NO: 377527 - protein, 422 aa, unidentified
MLEETQDEQEIIARVAALDIGKAELVCCVRIPDPGGGSRRVQEVATYSTMTRSLQVMADRLMDLGVTRIVMEATSSYWKPPFYLLEAHGFQVWLVNAKDVKHLPGRPKTDRLDAVWLCKVAERQMLRPSFVPPVPIRRLRDLTRYRIALVSDQGREKNRVEKLLEDAQIKLSVVASDIFGVSGRDMMAALIAGERNPEVLAQLARSRMRTKIPQLQEAFVGYFTEHHRFLLAKMLARIDALDADIADVETQIEAQIAPFAPAVARLDEIPGVGATAAAVIIAEVGVDMSRFPTPAHLSSWARFAPGVKESAGRKKGTGSTGHGDRYLARVLGEAAVGASRTNTFLGERYRRIARRRGKKKAVVAVGRSILVIVWYLLSDPETRYHDLGSGYYDSRTNPERKKRNHIRELEALGYRVTLQPAA

SEQ ID NO: 377528 - protein, 343 aa, unidentified
MELHAIGIDLGKTVFHLVGLDSSGNVMVRKRCSRTQLLKYTANLRVQRIGMEACSGSHFLARALCEQGHDARLIPAQYVKPYVKTNKSDYIDAEAIAEAVQRPTMRFVPIKTEEQLDLQTVHRVRERWVMRRTAVVNQIRGLLLERGLTLPKGRSHVDRILPEILTDPALRLAGSFRVLLGQLQLELEQLSARIEQMDAVIQQKAKENEACQRLTAIPGIGPVTATALVAAIGNGAGFRRGKDLAAWVGMVPREYSTGGKQKLLGISKRGNSYLRRLFVQGARVVMQYRTKQAPGLSCWLSQLMARTHQNVAVVALANKLLRMAWAVLCKNERYRIPALATAP

SEQ ID NO: 377529 - protein, 422 aa, unidentified
MQNTAARKLKQVPEGYLIVGIDPHKKKHAAVAITQDLTIRDRFKLDNTREGLEFLVRRVRTEMVKSNCQGVMFAIETGGHYWRNIAYFLEEQGIPFRFINQYTLKRRREGKDLNHRKNDYRDSEVAAQLLCTGEFVESTVPQGVYAELRTAHNAYRRLVKERTRITNLMKGLLDGLFPEFVQVFKDPCAVTALCVLSCCAVPSVIAGMKEDEFVAIIEAHYQGRRLMRRKLEALHHVAKASIGIAAGARSVASEITFLVEKLELIKGHVVIIERTLVKLVDETEEGKYLLSITGLNYIAVAGLLAELGCFRSYRTAKQMIKMAGSNPTESESAGKRGAHTPMSKQGRPVLRYCAWTSVIPMLRFNADFRAWAKQRRERPVHANPLGGREVVGAALNRLLRLAFALVKYKTFYQSPQLILATI

SEQ ID NO: 377530 - protein, 329 aa, unidentified
MADVVVGIDVSKNKLDVNLCGGGREKVKAFDNSSAGWRHLDSWLRDQKLRCALICLEATGRYSLGVALALHEAGYVVSIVNPAQIRDFARSKLGRNKTDDIDAALIREYGEKFSPRPWTPPTPAMRRLRELQTVRAGIVASLTEWKNRDGSGLEDQAARVLTGEMVRHLAIQLEAVDKVIAETIEGDNELRAKRDLLLTINGVGNILASIVLAELPGPEILRSGSEVAAYAGLNPAQHRSGSSINRPTRISRIGDAVLRAALYMPALTAMRFNPAVKALAMRLRAQGRLAPKQIVVAAMRKLLVLCFGVLKSGMPFIAQVAMPEAPSKP

SEQ ID NO: 377531 - protein, 370 aa, unidentified
MAQPTPLFVGLDVHKDSIAVAHAQGQSADPPVFVGAIGTRQADLDKLIRRLKAKTPTLVFAYEAGPCGYTLHRDLTGQGFTCHVVAPSLIPKKPGDKVKTDRRDAVELARLLRSGDLTHVYVPTVEDEAIRDLCRARDAARLTLKNAKLRLQAFLLRLGRHYVGRADWTDAHRRYLAKVVCPTAAQQIVFQESVRAVDEQVDRLHRLEAELHERGPAWRLYPVVQALQALRGVQWLVAITVVAELGDLTRFDTPRQLAAFVGLIPSEYSSGPARRQGGITKAGNGRARRALIEGAWAYRYPAKVSEHIQRRIDGLPKSIQDIGWKAQVRLCKRFRRLTARGKHPNVAVTAIARELIAFMWAIAKELPLTA

SEQ ID NO: 377532 - protein, 404 aa, unidentified
MTTRAEYYVGIDTHKFSHTVSVINYDTDKILTFSFENTPEHFESALGRILEVTENEPLIFGLEDVKSFGFMFSEFLDARDYTVHHVNPALADYLRRSSPNYKKSDDYDAYCVARVLKDSHKELPLFKHKEEQELFSNIRLLTNLRNMLSNQKSINYRVLHQQLEKVYPGYEKYFCNLQTKSAQAFYKQFPSPRHLDGYTTDQLVQEIKQYTRIFRATTADKILTSIKANITAHRSIYIEESIVTLIETIQRTSEEITSIESKLDVLIHETGLKLQTIPNINTATAGRLISEIGDINRFKNEKQLAKFCGIAPVSLGSGGKDRDFVSKTGNRKLRSTFYFLAVGMISTDIHSNAKQPQFRTFYEKKLKEGKSKSQALVCIMRQLVRIVFIMMRDKTEWRPLESNN

SEQ ID NO: 377533 - protein, 340 aa, unidentified
MNSMAVGVDVAKQVFQVHYVDRETGGIVNKAIKRAKFLEFFANRAACLIGMEACGGAHHWARQLTQMGHEVRLMPAEFVKAFNIRNKNDAADARAIWLAVQQPGKPVAVKTEMQQAMVALHRMREQLVKFRTMQVNGLRGLLTEYGGGVMSKGRAKLDKEIPAVLGRIAERLPAALIDTLREQWNGLAKLDEQIAEIERRMREWKKEDKAVKAISEIPGVGLLTATAAVAMMGDPKAFSSGREFAAWAGLVPKQTGSGGKVNLHGISKRGDMYLRTLLIHGARSVLTHAKEPGEWIEQMKKRRPPNVVIVALANKMARTIWAVLAHDRPYQKGYVSVKPA

SEQ ID NO: 377534 - protein, 405 aa, unidentified
MHFVGIDWADDHHDCVVLDATGKRAGSLHVAHTADGLEKLVAFLQGVGGEEADLEQLACIVETSHGLLIGALLEAGLPVYPVNPETVDRHRKPSGAKTDAIDAYLLARTGRSDLADLRRLTPDNPLIAELKLLTRDQDGLIQSQTRLVNQLTACLKAYYPTALTLFTKLQQRCTLAFLRAFPTLQQARAASKEQMVAVLKAAGHSGAEAKAQEIQQKLAQPALQARAEVTRAKTRLMLSLVGQVELHLQDLDAYDAEITRLFLSHSDSKVFASLPRAKTRIAPRLLAEWGDDRGRYAAVASVQALAGTSPVVFQSGRLRKVHRRYACSKPFRNVLYQFARQSIQKEAWAAEYYQHKRAAGKSHSMALRALANQWVRIIFALWLKQEPYDAAVFLAAQEAHAPRAA

SEQ ID NO: 377535 - protein, 366 aa, unidentified
MSISLPHRGVVHLGLDVSKDWIAVGVLRPEEVVPDTEKVFHDEESVRRLIARLGPPAGLRACYEAGPTGYELHRLLTSLGVRCDVIAPSMIPRAPGDKVKTDKRDCRRLARLHRAGELTAIRVPTPAEEGVRDVCRARQVAVEDLARARHRLGSFLLRHSVVWRGGTNWSMRHRQWVATRSFDDAATRSAFSFYLAEVTTREASLDAMDAELTQWCSNELFADAVGRLGAYRGIDTLGALTIVVEVCDFRRFATARSFMGFCGLVPREYSSGNSTWRGQITKAGNVHVRTQLVESAWAYRFQPNVSASLRRRQQGIDPAVAARAWAAQLRLCRRFRHLAAHKQSQSTVNAAVARELAGFVWAELTA

SEQ ID NO: 377536 - protein, 327 aa, unidentified
MKKVSVLGLDLAKQVFQVHGVDERGHRSVSKRLRRASLPGFIAQLPPCLIGMEACGSAHYWARKFQGYGHEVRLISPQFVKPYVKSQKNDANDAEAICEAVSRPHMRFVPIKTPEQQDMQAEHRARQLLVKQRTALVNQIRELLGEYGIVIAQGMTAVRKRLPEILEDADNGLNPLVRVLFARLHEQVQALDAQIADSDQAIKQAVHSDERCQRLQSMDGIGPLIATALVAAVGDAQTFSNGRQLAAWLGLVPRQHSSGGKPTLLGISKRGDRYLRTLLIHGARAVIYRVKDASSRRALWLKQMIERCGINRATVALANKMARIAWA

SEQ ID NO: 377537 - protein, 362 aa, unidentified
MVYIGVDLHRKVSHVVALDEAGATILSRRFDHSRDAFRRVFGELEPEPMSVAFEATYGWGWFADLLADVGIEAHMVHPLAAKAIGAGRVKNDAVDAGTLAHLLRTNLLPEAWIAPPDVRERRRLVRMRASLVRIRSRLKCQVHALCADAGVAIPVSDLFGVRGRDLLATLELPPVSAGRLAACLRLIDDLAREIIAADREIVVAFRDDDRVRRLLPIPGIGILNAATIIAEVGDVGRFPSADHLASWAGLTPVERSSADHVRRGHISKQGSRWLRWAMVEAAARIGSSRSAQLHRFADPIAERRGTKIARVALARRLLVLAFYALRDEQGCREYPALPRPSHRPVTARSHVGMASPDGRASD

SEQ ID NO: 377538 - protein, 348 aa, unidentified
MTMVCGLDLHRRQITFDALEVESGQVWPGRVWQPDRERFRRWLRDDVTERAHGGAVSMAVEGCTGWRYVVEEVVAAGFDAHLAEPADTQAARGRKRRAKTDRSDCRLLRELLQDGRLPASWIAPTIVLEWRERARLYKTLVDQRSTWVQRIHAELYQHGVTLPETSIRWAKTRELLQDDRLEISPAGRQRVLTAYRMIDAITVESHPLKADLQRFGRRQPGCRALVEHQYGIGGLLAVVMWSELGDCQRFARSEQVVRHSGLDVTVDQSDRRRAGGFISRQGPQALRWALYEAAKNASHLRSPDHDYYADVKDHLNGKLATISMARKLARRCFHVLLSVDPDEVYATP

SEQ ID NO: 377539 - protein, 392 aa, unidentified
MFFIGIDIAKRSHQAAVTDVSGNIIVKPFNFKNSAAGFNQFLSILASNSIPKDDCVIGLESTGHYWYPLYFFLVEQKFNVKVFNPIQTAAFREITIRKVKNDNLDSIMIADFTRFGRYSETHIPSENMLALKNLSRFRLSVCDICGSLKKRTIVLLDQVFPEYDTVFCDIFGTTSKLLLEKFSTPEEFSEISTTKLANFIHKVSRGRLGREKAELIKAAASNSIGISYAIDTFSFQIKQLIEQIEFMENQLSEIDAEMAKFLALSEYSVITTISGIGPTLGSIIVSEIGDIERFETSSKLVAYAGLDASVKQSGEFNSSQNKISKRGSPYLRRALWMAAFMSLQCDPALYDYYSRLRARGKSHRLATTAVARKLCIIVWAIMKSKQPYSPNI

SEQ ID NO: 377540 - protein, 374 aa, unidentified
MRDYSEAFVAFDTSKSRNAVAIAEGGRRGEVRFIGEIENSAAATAKLVRKLAGSHGRLTFCYEAGPTGYGLYRQIVSLGHDCIVVAPSLIPQKPGDRVKTNRRDAVGLAKLLRAGELTPVWVPDPRHEAMRDLTRGRGAAVEDLRRKRQQVSAFLLRQGLSYAGKKAWTKAHMSWLASQKLEYPEQRIAFEEMLLAVRQAQERIERLEEAIRVAVPGWSLAEVVTGLMALRGLDLISATAFLAEIGDLSRFRTPRELMAYLGLVPSEHSTGDKVKRGPITKAGNRRARRTLVECSWSYQHPPRIGKKKQEKVAAAPPAVREIAWKAQCRLNGRYRMLIRKGKLKTVAVTAIARELAAFIWAINREIATARAAAI

SEQ ID NO: 377541 - protein, 373 aa, unidentified
MEESTKVHVGLDVHKDSITIGAAEPGRAPARVIGKTAHDVNKLLKVLVKLGRPEQLHIVYEAGPTGYGLQRALQARGYLCEVIAPSQMPRRPGDRVKTDGRDCVQLAECSRAGQLRAVWVPDPADEAIRDLSRAREDAVNSRTKVRQQLKGFLLSHGVRYTGKTSWTKAFYRWLATLSFGAGASQTAFTEYWLAVQAADDRVQRLTQALQPSIAGWRFEPVVAALQALRGIDVISAIGLVAEIGDLNRFDHPRKLMGYLGLVPSERSSGERVSRGSITKTGNTHARRLLTEAAWNYRFKARIGRQAQRRQEPLSEQIRSMGWKAQLRLSRRFAALLERGVQPNKACVAVARELAGFVWAIGMRVSREQTATQQ

SEQ ID NO: 377542 - protein, 472 aa, unidentified
MMIHTVGIDLHKGKHRAYCLDEKAQLVDSFSFHTTPEGFAELEKRVFQNGSNPIVVFEPAGLTWLMVASYLRSKHPECHIVRAKGQKVAALRRYLRGPVKSDRIDALTLAKMPFIDPERLDELYLAPAETHALQRLTRQRKRLEDRITTQKKRIGAIIDGYLPGVRQAFTHCWSIRARAFFHSKINPFAVVREGEEALCKLLAEAKPRKRDGRMESHYVYRACQNVLALQELCQEAGSFDEDFFIDLRDEIDRELRLMEAEEAESKALDRRIEELYKKLHPSDNLRTIPGVGEHTAPVFVATIGDAKRFPCQSAFANWTGVVPAAKQSSDLESKGRRMTKAGPAIMKWALYQAAQIGRQWDPQLAAVYYRQMVHHGKNHKQAMGAVMSHIGARVFKVLREDRPYELRDTEGKPITNTSARSLILARYHVPEDIRQQRRKGKGKRPGMVASSVREAALAPQTAKSYHPQELSV

SEQ ID NO: 377543 - protein, 405 aa, unidentified
MPYILALDVSMGHSYSVLYKDDTCLFEDEIEHTQRGFHALLEEIQHLPERPLIVFEATGIYSRPVEKFFQDHHFSYCLLNPLEAKKQMEESTLRSWKTDKSDAHRLAQTHLKNQRQPKEVQSNFYLEMRDLARFYQEIEKKITRLRMDLHNCLQLTFPELEQFFSNRLTPYALTLIRLFPHPDFVLASTRTKIKNKLINETRKKISTNRAEQKADQIIHYAQCAYPAVEKDSIHCQKTIYYAELLQDLLEQKEALATQMIKKAEGSPCFLLYQTFPGIGALTAALLLGELGDITRFKTHKQLNAFVGIDIRRYHSGKYTGQDRINKRGNPKARKIIFFTIRNMIRQQRAAPNHIVDYYYKLKKQPIPKKEKVATVACMNKLLKCMHAMVRAHTEYDYAYAVSVDH

SEQ ID NO: 377544 - protein, 379 aa, unidentified
MNVAYSIALPENALPCALELSKNTWLLGVQFPDRLQPSLYPVKGGDTTGLLTVLATARNRWAKVSGKPVSIIVCYEAGYDAFWLARFLKSSGIECLVVDAASLQVNRRGRRAKTDRIDVGMLLRALIRWSQGEQHVWSIVRIPSVEEEDLRRSHRERERLIGERTAHVNRIKGLLFAQGIRDINVKAKFKTLDLGKLVTGDGRPLPTRLANEIAREIERLDLLQRQLARLERESVDEPTPCRTTEKKRCQLLLLNGIGSTISAVMAREVYYRAFDNRRQIAGFLGLATSPWRSGQIEHCQGISRTGRASVRTTMIQASWLWIKHQPKSAITRWFLQRTEGQSGRIKRIMIVAVARKLAIALWRYLEQGLVPEGAKLAGR

SEQ ID NO: 377545 - protein, 316 aa, unidentified
MAELTSRTTVGIDVSKEWLDIAVLPSGETWRTKNEEASIQDLVQTLKQIKPERIVVEATGGYEQLLAAQLYLARLPLCRVNPRRVRYFARSLGLLAKTDKLDAKVLALFGERVQPPLTRLASQQEQVLSALIARREQISSFLVAERNRLQTAPQTLHASLNEHITWLKQQLKQLERQIDEFVNNTPDFKEKDELLREVQGVGKKTAAKLIADVPELGECDNKQIAALIGTAPFNRDSGHKQGQRSISGGRPDVRAVLYMATLTATRCNPVIRAFYHRLLKAGKLKKVALVACMRKLLTILNAIIRDRVHWNPAFSS

SEQ ID NO: 377546 - protein, 341 aa, unidentified
MQAITVGLDIAKSVFQVHGVDAHGQVVIRRQLKRRYVLAFFEKLAPCVIGIEACASSHHWSRRLQALGHTVRLMPPAYVKPYVKRQKNDATDAEAICEAVGRANMRFVPTKTPEQQSGLVLHRTRHLFIRQQTSVINAIRAHCAEFGIIAPVGRRGVEELLRGIANEKRVPELAHACLLALGAQLRRIKEQILEFDRMITAWHRGCETSRRLDEIPGVGPALATAVVASIADPRAFRSGRDFSAWIGLVPKQSSSGGKPKLGSISKQGDRYLRGLFTAGALAVIRYAKIRGTGHRPWLTALLARRPIKVAAIALANKIARMVWAMMARGERYREPVALVAY

SEQ ID NO: 377547 - protein, 398 aa, unidentified
MTRKNTLKSLPTDTEFRVVGLDLAKSDVSVAAIPVDDNTPSLVDRMTYADLLDWAGKISPTLFAMEPCNGYSLLCLQLENLGHEIKVISGSTVSMWINTHLSGQKTDLNDAIALARLAVSDAELTPIRHKSITEIRIQTVQAVRQQLMSQRSKSIVSFKALAQQWGIPCAAGHRNLKKLRESIEAKVDLITRPVANAMLFLLDAVKSLDRQIGQLNQTLQELVMSDERGRLLQSVLGVGTQISARVITVVGNVERFNSPRSLVAYVGVAPRNFITGHKNLTKKKHGNCPDLSHKDQGKISRRGDKLLRSLFIQGAACLYMQFCKDQLPECQLKRWILKQLARQKPYGKLIVSLAAKLIRIVWAVLTYGEKFNIQKAGMTRSMWSEMALETPLNKEVPA

SEQ ID NO: 377548 - protein, 408 aa, unidentified
MPVIIGMDSHKRSATIEVITELGDVVTVEKFGTDQSGYGEMLSFGRRFPERTWAVEGCNGVGRHVAHRLVHDGETVLDVPAKLSAQVRVFATGNGRKTEPVDSHSVALVALRTSNLVRVRADPELVVMGMLVDRRDELGRARTQAVNRLHRLLLELFAGGAKKFLPAAQACALVATIKPRDIVGKTRRRLAVDLITELEIIDKKIKVADKDLRELVMARGCTSLDGIGPSGAAWLLADVGDIHRFGNRDRFASWNGTAPLDASSGEQQRYRLSRAGNRRINRTLHIMGVVQLRNPTAGRVYFDSKKAAGKTSMEAMRALKRRLSNVVYARMLADQKRGEAAGPGGHSGTTLQSSVTGLPPDTGPSDKPNPNLPPASLPPPRPPLGIKGSLLVGKGTTFQLPYPAPASG

SEQ ID NO: 377549 - protein, 349 aa, unidentified
MIIGCDYHPGFQQIALVDSETGELNERRLEHRQEAESFYRDLRAQGVSVRVGMEASGHARWFERLLGELQFELWIGDAAEIRTKRVRKQKTDRQDAQLLLRLLLEDRFPRIWVPSWENRDLRQLLWHRHRLVQMRTRVMNQLHVVALNEGVRRKKALWRPAGRAELESLVLARWASQRRQDLLELLDQLTPKIQELTRALEQEVEKRPVTQQLMKHPGVGPLTALAFELVIGTPERFGCGKQIASYVGLVPSEESSGDRRRLGHISKQGNSLLRFFLVEAAQVTVRSDPEWRSRFFHLAMRRGRKIAKVAMARKLAVRLYWMWRKGWDYEQMKKFGSHAGEPGNRQGVQ

SEQ ID NO: 377550 - protein, 321 aa, unidentified
MSRILIGVDVCKDFLDAHARPAGVKQRFDNTPAGIEQLVAWVRTLAPERVVFESTGPYQKAAVGALLAADSPAVVVNARQVRDFAKGTGQLAKTDAIDAGILAHFGEVVATVVRPLPPKEVLEFRDLCDRRGQLVRMLAAEKNHRHAARGAFPKVQKNIEKHIAFLERQIEDLEERMDRIVADSETFKARDEILQSITGIGPQVSRTLLVHLPELGSGSRPSIAALVGLAPFADDSGTSSRIRHIRGGRGKVRIALYQAAVAAIRYCATMKAFYASLKARGKATKVALIAVARKLLVLANALLRTMTPYDNRANSVCPKNA

SEQ ID NO: 377551 - protein, 412 aa, unidentified
MELLHRRCCGLDVHKETVVACLRLVSDGKVTTEVRTFQTTTAELLRLSEWLATNDCTHVAMEATGVYWKPVWHILDDGEFELVLANAAHVKNVPGRKTDVNDAMWLAELLAHGLIRASFVPDTQTQEMRNLLRTRKQLVREQSSHVLRVQKTLEDANIKLDSVLSDVMGKSGRAMIEALIVGETNPVKLAGLADRRVKASPEELREAVRGRVTKHHRFLLRLHLNQIDALDAAMATLDAQVEANLGPFRTAVDLIMSVPGIKNLGAQAIVSEIGIDMSRFPSDAHLISWAGICPRNDESAGKRRSNRLRKGAPWLKTTLVQCAWAAVKKKNSYLQAQFYRIKARRGPNKAIMAVAASILTAIYHMLKDGTMYQDLGRDHFDRRSTDQQKKSLIKRLADLGYAVEIKPLAATA

SEQ ID NO: 377552 - protein, 340 aa, unidentified
MGRYVGIDLHKNMFVACFWEAEDCHSLVRYTTGQIDQFVKALRADDEVGVESTGNTAYFVRQVEGHVASVKVIHPGKFKVIAESTSKTDAKDARTIAWYLAKGMVPEVRMKDQAHAELASLAQTRDRLVKLRTALMNKIHNLLSAQGILLRRESLGTQKGLEEALKRPVSEVGAIELKVLGKEIRSLNESIAELDRELAERGKNLPGHRNLSSIKGIGDKSATILLSVIGDIQDFASAKRLASYFGMAPRVEVSNDTRHYGRITKKGTKIGRTTLVQCTWVAIRYSPYLRGFYERIKAGKGSGKAIIATARKLLGIIYDTLKHDWVFKDFSRFEIEPKVA

SEQ ID NO: 377553 - protein, 373 aa, unidentified
MGDGVDGPRRHRLCQNEVVADLKQRGPSVEQISRIGMDTSKHFFQLHGVNAAEKVVLRKKLRRKEMVVFFEALAPTVIGIEACGASHHWARILRSFGHEVKLIAPQLVKPYVKRGKNDTADAEALCEAMSRPTMRFVPVKTAEQQAALMMAGLRDRLIRNRTQLSNAIRGYAAEFGFTSARGMAHIDPLLDRIQADESVPVLARELFAAQAEEYAQLQAQIVEADAKLMAWHKADECSRRLANIPGIGPIGATLLLLKTPAPEMFRSGRQFAAWIGLTPKDHSTAGKVRLGVITRAGDEALRGVLVVGATAVIQHVRRGGRGSPWIVGLLKRKPPKLAAVALANKMARIAWKLMVTGNGYAAKSAPAALTGAA

SEQ ID NO: 377554 - protein, 405 aa, unidentified
MSNDVFVGLDWAVHTHAVCVIDAAGAVLDRFEVVHDRDGLAELMRRLARWGERLRIAIERPSGLIVDALVDAGHEVFPIHPNAVKASRPRYRSHGAKSDASDAYLLADLLRTDGHRFKPLSPQSDEIRALRALVRGRDDLLASRVALANQLRSLLQSFWPGAAEVFADLDSPIALAFIKRYPTPESASRLGRKRMAAFCAQHGYSGRRSPQELLQRLHQAAAVTLGELETEAKGELAMALVRTLSLLVEQIRLMTSRIEHHVGEIDDGRILMSFPRAGRLCAAQILSELGSVRERFDSDEHLAGEAGVAPVTYASGKSKAVVFRWACNHRLRAALTCLADNSRHASAWAAHVYAKAKARGCDHPHAIRILARAWLRVIWRAWQDRQPYEPTRHRAAAALLQTARG

SEQ ID NO: 377555 - protein, 368 aa, unidentified
MLRFRLMVKRGPCHGLKHQKEKRSMDHFGGLDVSVKETSICIVDDTGRIVREVKVASEPEALLKVLENPAYRFKRIGLEAGPLSQWLFSALAEAGLPVVCVETRHMRAVLKAQINKTDRNDARGIAQMMRVGLYRPVHVKTLRSQKLRMLLTHRKLLQSKAIAIDNDLRGALRNFGLKVGMVGTMRFEARIRKLVEDLPDLAALIEPLLIVRRTLREQIVILHRRLLAIVRDDEVCRRLMTIPGVGPVVSLTYRATVDVPARFRKSKSVGAVFGLTSSKYQSGEVDWSGKISRCGDEMMRTMLYEAAQSMLHSKKWSWLKAWAMQIARRRGMKKAVVALARRLAVIMHRMWIDGTEFRWSREQAAAVA

SEQ ID NO: 377556 - protein, 410 aa, unidentified
MKIAGIDVHKKVLMVVVIDASTPQEKPWRRRFTTMPSELHRLLIWLREQGVEEAVMESTAQYWRSVWLELEPHMRLHLAQAFSNRAPRGRKHDFKDAERLVRRLIADELILSFVPNGEQRIWRSMTRMKVQLTRDRVRLQNQMECLLEEMRIKLSIVVSNLLGASGLRILQALARGETDPKMLAQLGDERLQCTEEQLEDALTGRVQPMHRTMLALQLQRLQLIDQQIAQLNGLIAQAMKPHQEAVMRLAEVPGLGVDSAQQIIAEVGVQASTFPSAAELTSWVGTCPGKEESAEQNHSSRSAKGNKYLRRVLNQAAHAAVTKKGSHFQVVFRRLLPRLGYQSAIWAVAHRLCRVVWKILHEGVRFIEQGREPDPQAKKKRAQVLARALRKLGYEVVLTPINQVAAPNAT

SEQ ID NO: 377557 - protein, 397 aa, unidentified
MPRLWAGIDAGKTHHHCFVIDDDGNKRLSRRFANTEADILTLMGDVAAVADGGQLLWATDLNHGGAGLMKAVLADHGQTLCSIPGRVIHHASQTYRGEAKTDAKDASIIADQARVRRDLEAIRVPDDITAELKILSHRRADLVHDRTRAINRLRALLLHYFPGLEAAYDYAATKGPLILLTRYQTATAIRASGQIRMTGWLKKQGVRLPDQLAAKALEAANAQLTVVHGETAAAALVATIATDLLRLREELLQLDLQLEARLAEHPFAHQLMSVPGFGKRLVADFLASTGTDLTAFGTAARFASFAGLAPAPRDSGKINGNHHRPRRYDRRLMNACFLAAFIASTNCPASAAYYARKRKEGKTHKQAIISLARRRMNVIWAMLRDGTTFNPGQPQLT

SEQ ID NO: 377558 - protein, 405 aa, unidentified
MIAEVYVGLDWAVHTHAVCIIDAAGKVLDRFEIKHDREGLSELMRRLARFGTRLRMAIERPSGLIVEALVEAGHQVFPIHPNAVKASRPRYRSHGGKSDASDAYLLADLLRTDGHRWTPLSPQSDSILALRALVRARDDLVGARVALGNQLQSALEGFWPGGACIFADITSPIGLAFLHRYSSPISAVRLTEARLARFCHAQHYSGRRRPAELLARLRAAAQGLSGPVTTDAMSTVVRSLVTVLKPLVAQISDLTRRIERFVESLPDGQIIMSFPRAGRVCAAQILAELGDVRERFPTLDRLTAEAGAVPVTYQSGKTRSVSFRWACNHRLRQAVTCFADNSRHANAWAHAIYVAARARGCDHPHAVRILARAWLGVIWRAWTDRKPYDPAIHRAAQKLASAGGG

SEQ ID NO: 377559 - protein, 345 aa, unidentified
MEQISRIGTDTSKHFFQLHGVNAAEKVVLRKKLRRKEMVAFFKALAPTVIGIEACGAAHYLARLLGSFGHEVKLIAPQLVKPYVKRGKNDGADAEALCEAMSRPSMRFVPVKTAEQQAALMMVGLRDRLIRNCTQLSNAIRGYAAEFGFSAAKGKAHLVPLLERIQADESVPVLARELFTAQAEEYARLQAQIDAVDAKLLAWHKADESSRRLVKIPGVGRIGAVLLMLKTPAPELFRSGRQFAAWIGLTPKDHSTAGKVRLGGITRAGDEALRSVLVVGATSVIQHVRRGGRGSPWIVNLLKRKPPKLAAVALANKMARVAWKLMVTGERYAAKSVPAALANAT

SEQ ID NO: 377560 - protein, 314 aa, unidentified
MMASQGMFVGIDVSKARLDVHVRPLGVGFSVGNDAAGYGSLIARLRPLRTKRIVLEATGGYERALWLALSEAGLVAAVVNPRQVREFARASGRLAKTDRLDAAVIAHFAETFSPVAIRNPDPVADRLGEHVLYRRGLKQEIVALENQLRRLETPVLRARAERRLAGLATEVKQIECEMRAIVDGDPAKRALFACLTSLKGVGLVLACTLIANLRELGRLSRHQTAALIGVAPINHDSGKWHGYRAIGGGRAGVRNVLYMASLSAVRANPAIREVYRRLRANGKPAKVALVACMRKIAIILNARVRDHLAASAML

SEQ ID NO: 377561 - protein, 404 aa, unidentified
MEIVHTCCCGMDVHKKTVVACLLSQSGKEVKTFGTMTADLLAMNAWLREQGCQMVAMESTGSYWKPIYNLLEADQMPAMVVNAQHIKAVPGRKTDVKDAEWIAQLLQHGLLRASFIPARAQRELAELVRYRRSLVEMRSAESNRVQKVLEGANIKLGSVLSNVLGVSGRAVLERLIAGEEDGAVLAGLVHRTVRAAREEIARAAEGRMGAHQRFLLEHQLELIDTLTQQIQEIEAEIGRRLAQDRAVVERLQTIPGVGQRTAHEIIAAIGTDMTRFPTHRHLASWAKVCPGLHESAGRQGHGGIGQGHKLLRAALTEAAQASARSNTYLAAQYKRIARKRGARKAIMAVAHSILVIAYHLIKDGTTYTDLGPDYFDERDKEKAIRRYAERIERLGKTVTITDAA

SEQ ID NO: 377562 - protein, 396 aa, unidentified
MSRADADQGRRDRGFEVFCGIDVARETHHVVVLDRQGRRLIDRPLPNGEPQLVALFNELESRGRVLVVVDQLASIGALAIAVARSRGIAVGYLPGLAMRRIADLYPGETKTDARDAHVIADAARTLPHALRRVGPDEQTTVELSVLAGYDADLAAESTRLANRLHDALLHIHPALERLLGKHFRRPGVLRLLAAAGTPQAIAELGESGIRELIANGSPRMSKSLPTLIVAALAEQSVTIPATEQYGRVIRGVAQQLLTIMDQREVLGSELEALLTDHPLAEILTSMPGVGPRTAIELLRTVGDGSTFANAAHIASYAGLAPATRQSGRSIKGEHQARRGNRTLKGALYLSAFASLKHPPSRAYYDRKRTEGNSHTAALRCLARRRVDVLHAMIRDR

SEQ ID NO: 377563 - protein, 357 aa, unidentified
MGKSIRNFAAVTRVGLDLAKRAFQVHAVDAKGEIVVARKLTRNQLIPFFAELPPCVVAMEACSSAHHWGRALIELGHEVRLLPPAHVKPYVRRNKSDQVDAAAIYEAMSRPGQRYVAVRSIENQAALMRHRARELLAGQRTAALNALRGHLAEIGLVAPQGAQHAYGLKRMAADGFNENGEIVVPDCVRGALGPLVGQIDALDEAIGAIDRELAASVKADETAKRLMTIPGVGPVTASAIVATIQDAGAFASGREFSAFLGLTPRQNSTGGKTRLGRITKMGDRYLRKLLVVGACATLRHRKGHNDALRRWASGMLERKTVKYKFNLTAVALANKVARIVFALMTRGGQYDDRPVAA

SEQ ID NO: 377564 - protein, 338 aa, unidentified
MTILTVGIDLAKNVFAVHGVNEAGKAELVRPTVPRDKLHELIASLPPCVIGMEACSGAHHWARLFQASGHTVRLIAPKFVTPYRMTGKRGKNDAADAAAICEAIQRPHMRFVPIKNLEQQSRLMVHRARQGFVEQRTATFNRIRGLLSEFGIVLPLKAATVRRRACECLEDLPAYANTVIGDLLSEVTRLDERIAQYDANIQAMAKDDERARQLMQLGGVGPTTATCPLAMIGNGHDFACGRQFAAWLGLAPGQYSSGGKTRLGRITKAGDAYLRSLLVLGAKALLAAAKKKTDPIGRWAVALAERRGYWRALVAIAAKNARMAWAVLRRGEAFALPA

SEQ ID NO: 377565 - protein, 436 aa, unidentified
MAKVFIGVDPHKLSATIEVVDERETVLATGRFGTDKAGYAAMRKHVAAWPERVWAIEGSNGAGRPLAQRLLADGQDVVDVPAKLSARARLFDTGHNRKTDAHDAHAVAVVAVRTQGLRVLSYDEALEALRMLADRREELTRQRVQTVNRLQRLLSELVPGNGKKDLTALQAKAILASVRPRDLPGKTRRRLAVEQLAELVAVEKRIRALTAELKQMVKASGSGLMDLRGVGPVVAARVLADVGDIARFADRNRFASWTGTAPIEASSGEIVRHRLSRAGNRRLNHMIHIAATTQIRLETPGRAYYRRKLAAGKTQAEAMRCLKRRISDVLYRQLLADAKTVDAAGPDAGPRGHRGATLHSSAAGSHPHTGTSDQPLPGPAHPTLPATKPHANPCAASAPRPSRRRAGAGKVERPTGRTTLTATSAGAHSAAPKPPS

SEQ ID NO: 377566 - protein, 360 aa, unidentified
MKTLRNSEAKTIPSRTTVGLDVGDRHSWFCILDEAGEVVAEGRVRTTSEALNEHFTRWARSRLVLEAGTSSAWISRLAMTAGHEVIVANPRELRKIHQSDRKNDRSDALVLARMARFDPQLLAPITHRSAAMQNDLAVVRARDVLVRARTQCVNAVRGLVKTAGGRLTTCGTECFARKAVAQLPSGLESALGPMLKTIESLTEQIRAYDRVIDELASRYPVTEVLRQVTGVGALTAVTYALTLADSSRFGSSRDIGAYLGLVPRQHDSGNHVSQLSITKAGNTLLRRLLVGSAHYILGVHGPDCDLRRYGERLMTRGGKNAKKRALVAVARKLAVLLHRLWVNGEVYDPLHSEREDRQAA

SEQ ID NO: 377567 - protein, 343 aa, unidentified
MGGSRVYVGVDVHKNFSFVCVMKENGETILEEKVRTEELEKFLEKIENKTIILEPTTTAINLARKLRKNNQVLLSHPYKTKLIAESKKKTDKVDAKVLADLARTNFLPTAYLPPDEIMELREIIRERIRLKKLSTSTKNRIHSILAKNGIKYEGNLFNSEGREFLYSLNNKWIDHYLRILSSIENEIKEIDKEVRQKCLENEETMLLTTIPGIGFFSALPIYAEIGNINRFPNSKKLCSYAGLVPSVRQSGNKTITGKITKEGNRLLRWVLVQCAFVAIRNDERFRKFYERIKRKKGTQKAIVATARKLLTVVYAVLKNKNPYIGYQAYYGEECTPVTNWAKV

SEQ ID NO: 377568 - protein, 420 aa, unidentified
MSKRRYGSVEFKRVDWSGLAEGFGGGRAVLAVDVAKEDFVAAVLGPDAGVRVTFKWRHPGQTLEVLECLEGLAGAVALEVVLEPSGTYGDALVGQLRRRGVAVYRVSPKRVHDAAEVYDGVPSLHDAKACELIGRLHLQGVSRVWEALGQERRELNAWLRRLEVSKGRLHAGLNRLEAHLSRHWPEVLGLLELSSVTLSELVAAYGGPAAVAADPVGAEALMRRVGRAGLSEEAIAAVLASAHENLGLPCVAAESGLLQWLAADNNATRRELHAIEQEIQRRVAASAVPARLGNVVGKVSAAVLVAAVGDPQDYPDAASYTKAIGLNLKERSSGKHKGQLKITKRGPAVARFYLYFAALRLIARDPEVRRWYDRQNARPGALKGKTIVTLMRKLAQALWHVGRGATFAVPRLFAPEPRPA

SEQ ID NO: 377569 - protein, 345 aa, unidentified
MKKIAIGIDFAKEKFDVTVKNVETGASEYGQYPNTPAGGRSMVRMVRKFAKGIDSSEWLFCGEDTGYYSQTIARYLTEKGYFMWLQNPYSIKHSEGDIRRGKDDKADSAAIADYAHRYEDKARKWELPSKVSEELHLLLTRRDAYVRAKRVIQSGASEIPKRDKQGESVSLIKSSAKRLLREIDEEIERLEEQMKKIVKEEEAMQKNYEILRSFTGIGLVNSMCFITYTDNFKKFDLNARKIATFWGVAPFGKDSGKTVHVDPHVSQFCNHWLKAIISNAANSALKWNPIIIAYNERLVKRGKCEGIRRNNVKNKIIQTVVAMIRKGEKFDPEFKFTNKMVPVEC

SEQ ID NO: 377570 - protein, 316 aa, unidentified
MQDLLEICCGLDVHKETVVACLLKGSVNDDKPQKTIRTFSTLLPGLEELKAWLESENCCHVAMESTGVYWQPVYNIFESALDGTMVVIVTNARHMKNVPGKKTDMKDAEWIATLLRAGLLSGSFIPPQTIRELRDLTRYRKSIIEELSSQKNRIEKHLQSCGFKLSNFLTDIFGVSGRAIINHIAEHGSITAEEVENYVKTRTRNKLQEIKLSVNGRMNRHQREFLRLLLKHLDETYEHLSEIEGNINSELEKFKRQIEQLDSIPGIDKTAAAAIIAEIGIDMSKFKTAEHICSWAGLSPGNNESAGKKVHSSDKR

SEQ ID NO: 377571 - protein, 398 aa, unidentified
MTEYSDYESVQVFIGVDVGKDTHHAVAINRSGKRLFDKALPNDENKLRSLISDLKQHGQILLVVDQPATIGALPVAVARSEGVLVGYLPGLAMRRIADLHAGEAKTDARDAAIIAEAARTLPHALRTLKLADEQIAELSMLCGFDDDLAAQTTQASNRIRGLLTQIHPALERVLGPRLEHPAVLDLLQRYPSPEKLASLGEKKLAAQLCKLAPRLGKRLAADIAQALAEQTVVVPGTNAAAVVLPRLALQLITLRKQRDEVALEVEQRVIAHPLYPVLTSMPGVGVRTAARLLTEVACRAFASAAYLAAYAGLAPVTRRSGSSIRGEHPSRRGNKALKRALFLSAFAALRDPLSRAYYTRKMSQGKRHNQALIALARRRCDVLFAMMRDGTFYTPQGS

SEQ ID NO: 377572 - protein, 338 aa, unidentified
MMYGAIDLHLRYSEIRVVEADGRVVRERRVATSRETLTAAFAGLGVLRVLVETGTESEWVAQTLEAAGHAVVVADPNYAPMYGEVRRRVKTDRRDVAALAEANRHGWYRATHRRSRAQRTLQQILRSRRQLVAMRTGSISVVRALLRQEGYRLPSGSAAQVPARLARVPLPEGLAATLAPLRQVIDTVTRAVAEIDTRLRTYAAADPVVTRLQTVPGVGPVVALTFRATLDEVARFQAAGQVSAFLGLVPREDSSAERRHRGHITKAGSGELRSLLIQAAWACWKSRGSGTLRAWAERLAGRRGRRIAVVALARRLSRILYAVWRDGTTFDGARVAAA

SEQ ID NO: 377573 - protein, 351 aa, unidentified
MSHKSAPPTVSTIGIDLGKNSFHLIGLDQRGAIVWQLKCSRAQLERRLVNIPCCLIGMEACSGAHHIARQLAALGHDVRLIPAQYVKPFLKGHKNDYRDAEAIAEAVQRPTMHFVAIKTPEQMDLLALHRVRSRLVGQRTGLINQIRGFLIERGIIVRQGVVPLRKALPDILSSNDDALSPRMVNLIAELIQDWRRLDERIAAVSAEIESLAEQDEACQRVMTVPGVGPIISSAVVAAIGNGAGFTQGRDFGAWLGLVPKQESTGDRTILGKISKRGNKYLRTLFVQAAHVVLARRPNAAMRGLWPWIEQLSRRLHRNMLAIALANKLARIVWAVLARGRPYQPRIAADVA

SEQ ID NO: 377574 - protein, 287 aa, unidentified
MKQNSSAPQTLYIGLDVHKEETVIALLESDRDAEPRHYGSVGTSQHALERVMRRIAKSQGLQLADLHVCYEASGCGFWIARRFLQMGVRCEVIAPSLIPTKSGDRVKTDKRDAMKLAKHLRSNDLVSVNIPDSTDEAIRDLCRARTDAVDDLRRAKTRLLALLRRLGYHYDGRTHWTEAHKRYLRHLRLPDTAHNIVLEDHLKLVDDHHERIARLETAMLTLLENWQRKPLVEAMMAFKGFKLVAAMVTVSEIGTFSRFEHPKKLMAYLGLVPTENSSGNKTSRGGI

SEQ ID NO: 377575 - protein, 460 aa, unidentified
MNPKRSKSKGGGNMPMVHPNAAAIDVGATMHMAAVRADRAPEPVHSFGTFTADLHRLVDWFTECGVETVVMESTSVYWIPIFELLDARGFTVFLVNARDAKHVPGRKTDVSDAQWLQRLHSFGLLRASFQPKGQIAELRAYVRQRERLLEYAASHIQHMQKALTEMNLQLHHVVADITGATGLRIIRAILAGERDPEALACLRHYSCHSSAETIAKALTGSYRAEHLFALEQALALYDTYHEKASACDARIEVVLKELSNHRGRGHGPAPWASLRRNRTDQANALAFDVREALFALLGKDITMIDGLGPYLSLKLIAECGDDLSSWPSAKHFTSWLGLAPSNKVSGGKRLSSRTRRSGGRAAALLRLAAVTVGRTDTALGAFYRRLSSRIGKAKAVTATARKIAVLFYNAVRYGMDYVDPGASSYETRYRTRVVNNLHRRAKAFGFVLQPLEPTVGDAVS

SEQ ID NO: 377576 - protein, 319 aa, unidentified
MGTIPQTEIIGIDVSRDWLDIHCLPQGQWGRLPNKPEGHAQVVQLATEQGAAVCFEATGGQEWKLWAALDAAGVATRQLPPAQIKAFAASRGTRAKTDRIDAELIARFMAFRPDAGRTLPHEKIRLLRALVSKRGQLVETRKRLLAQIKAHGKLGSADTFEAMDAELKGLLDRQIAKLEIQIEQVIATDAGLAAATSILRSVPWIGPVASTMLIAEMPELGQITGEQAAALTGLAPIAHDSGAMRGKRAIGGGRRLLRHVMFQAALVASHHNPVLKVFAKRLRTAGKPHKVVITAVARKLVTIVNALVKSGQKWSTQTV

SEQ ID NO: 377577 - protein, 423 aa, unidentified
MMKLKYSICCGLDVHKNVIVATIVITNKDGVSEYKQKSFSTISSDIQKFHNWLIENHCYHVCMESTGKYWIPIFNYLENDIEVCLTHPKYVKAIKGKKTDKKDSKWIADLYKFDLVRCSFIPPKDFRQLRELARYRFKLVCMKSSEKNRIQNCMTVSNVGIASVLSDPFGKTATEIMSYLLEHTADSIDEKAVRKLIKKGAKAKSDEIIEAIRGYNIETDQAKKLELARAHLDFLDDMITQTEVELYVRIKPYYEFVEFVSSMPGMTGLSSTIVLAETGVDMNIFDNAKHLCSWCGLSPANNESAGKKKSVRIAKAGDYLKPMMVQCALAAVKSRKQPYFAIKYGRIKKRRGHKKAIIAIARMMMVCIYHMVSEKKPFTPTDYEELMDPQNHVERVVLNENNVFAYLETLGYDNSKLVKRSDN

SEQ ID NO: 377578 - protein, 431 aa, unidentified
MDIVHPRVAGIDVHKKVIWVAVRLPGKAPGHREVTVRRFKTFWRSLQEMAAWLAELGVTDAAMESTGVYWWPVYHALAGAGIEVCVCNAAHMRNVPGRKTDLRDCQWIAELHEYGLLRASFIPAAEVAALRQRTRYRKKLIGQRSSELQRLSKVLEDGGVKIDSVASTLTTASARDMIEALIAGQRDPAVLAQLARGVMRKKIPELQMACDGRFTDSHAQMCRLHLDAYDHLAAKIAELDLLVAKAAEPFAAVITHLITIPGIGQRTAQVIVAETGADMARFAGPARLAAWAGLAPGDNESAGKRKKAAARQGDRHLRAAMVEAAWTVSRTATRPGARFRRLARRFGRGNEKKAAVAVAHTLTCIAWAVMRYDRDYAEAGADYYDHRDARNRDHLVRHYQQALARLGYQVTLIPPGDGSPPPSATSQQPAA

SEQ ID NO: 377579 - protein, 467 aa, unidentified
MLSDAMQTLAGRDADMWAEAPDATSQRRVASCPVRERPRISWMRGDAPPRISFGRLRSRALGQAPPHRRREQGMIYAGVDIAKTDHVIGAVDERGAEMCPPMPFKNTEAGLERAVAWLEGLAGSPSDVVVGMEATGHYWMACYSFLVARGYSVAVINPMQVKAVRKLKKLDKVKNDRIDAWLIAETLRIGQYDETRLATDEVASLRSLSRYLQSLRGMVAELKTQCICLMDAHFPEYAGIFSDMFGAGSRAVLSKSPLPFELARRRADSLARDIAEASRSGGKSSGYAAKIKAAAKSSIGVRLGQEAASFQVKSLIRQIEFADSECAGVEARLRSLLDEVEPLVLTIPGVSYVTGAQIVSEIGDVSRFRNAPALVSYAGLNSSVSQSGQFDSGGGPITKHGSPYLRRALWLAANRARQYDPGLRAFYDRKRAEGKPHRVAVTAVARKLCHIVFAVMRDQVPYDPGRE

SEQ ID NO: 377580 - protein, 421 aa, unidentified
MKKRFYKQIPVNSFLASSIDLGALAGKLVFAIDVAKVDMVAAIATGSGQVLSTISWKAPMQNAKIIELLKGFKASGLNVQTVLESTGTYGDVLRFALETADIPVYRVSGKRTFDAREVYDGVPSLHDAKSAAILAKLHAEGLSSLWTQDHGDRRQLTAAIAIMDLHQERYLQLVHRLESWLARHWPESTSIFELTSAALLALLARIGPPADVAMQKKASFKLMKGMGHGLIDESKIESLLDTSVTTVGVPCEGLERDALMAIAGEAHKSIRAYKGAKLVVERLSVTTAANAMAPVVGKTTAAVVFAEAGDPRDFKSAGAFVKAMGLNLREKSSGTIKGRVSITKRGPNRVRQFLWLAVHRWVQSDPLAAQWYARKKQRDGGFGSKATVALMRKLAKALFHVARGAAFDSRMLFDRDELTAA

SEQ ID NO: 377581 - protein, 351 aa, unidentified
MKKQGKREQPSEAIGLDLSDRSGQYCHLDVDGEIQAEGKVILTAAGLKRAFGHLPRTRMAIETGAQSGWVKRCLEELGHEVIVANARELQAISGSARKTDQRDAQQLARLARVDPKLLSPVELRSAEQQLDLIPIRARALLVEARTKLVIGVRGLAKIEGIRLPAASTAYFSPRARQALNEQLQRVLGPLLTAIEQLTEAIEASEETITQTAEQRYPETRWLKQVPGVGSLTALTFVLTLGRKERFVHSRDVGPFLGLTPRRQQSGEEDPELRITKCGDKYLRKLLVQCAHHLMGRFGPDSALKQWAVMHAGGSKRAKKCTVVAVARKLAVLLHRLWSREEEYRAFPAVAA

SEQ ID NO: 377582 - protein, 376 aa, unidentified
MRTIGAEGPDTELAVILGVDTHLHFHVAVAVDNLGRRLGEASVPTTAKGYEKLLRWAEGIGSVRCAGVEGTSSYGAGLARHLRACGIEVLEVERPKHRRRSSRRNRQKSDPSDAEAAARAVLAGEASGVPKSADGTVEMIRTLRAARRSAVKARTQAANQLQGMRVTAPEQLRNRLRGLSTKELVSVAARFRLGGNPSDVHGATRFALRSVARRYEVLSREIEELEEHLDRLVGQAAPELVSLPGIGTDNAATLLIVAGDNPQRLSNEASFANLCGVSPIEASSGKVVRHRLNRGGNREANRALYMTCLARMRRDQRTKEYVARRTAEGKSKPEIIRCLKRYIAREVYRVLISCGARCSPTGLREAVHIASGSSAA

SEQ ID NO: 377583 - protein, 359 aa, unidentified
MPTTRKQIDFSGQNIYIGIDVHKKHFTVSIQGEDLAYKTFNQPPDPEVLAKYLRRNYPKANYFAAYEAGFSGFWIYESLQNHGVNCIVVNPCDIPSTDKEKKQKRDALDSRKIARSLRNGELTAIYVPPLEQQQDRSLLRTRQRLIGNQTRCRNRIKGILHFYGIRQPECFIHPGTHWSKRYMDWLKGIDVGQVSGNVTLKLLLQEASGIKELLSQTDKEIIKLSREDRYLKNLKLLLTVPGIGRLTAMIILTEIGDIARFKRFDQLCAYVGLMPNIYSSGEKERTGDITKRGNGHIRSHLVESSWTAIRHDPALSLAYQQLCSRMNGNKAIIRIARKLINRIRHVLLNNEAYELSVAA

SEQ ID NO: 377584 - protein, 396 aa, unidentified
MATIGIDIGGRSHAVARCRSGNGRADREILRVSQSRAGFTALDAWLDRQAEPATLVTMESSGHYWMGLASHLRRREIPVAVVNPLAAKYFARSRLARTKSDPADARSLAEMAMRDQPPVREPLAGAELRQAARFAMTLVEEQAKVCQRLIRLVELGFPELGELFDDPTCRTAREVLRIAPTARAATRRRTSTLANANAGPGHRRLGQAKAERLQAAAADSIAVPELDAEVAFEVGLLLDQYDLLERQIADADARVASLLDGELARRLQTIPGVGPSITASLLAEIGDIDRFTDFDQLLAFAGVHPAERSSGRKGSNPETAWHMSKAGNSHLRAAAYRMAVVGVQHNPVIAAHYARKRAAGKSKMNALGHCMRKALSIVWGVWRNGRDFDPNWGLET

SEQ ID NO: 377585 - protein, 369 aa, unidentified
MGKYSEAFVGIDVAKARNAIAVAEAGRDGEVRFLGEVDATPLSMRKIADRLAARYERLHFCYEAGPTGYGLYRLLTERGHDCAVIAPSMIPRRPGDRVKTNRRDAVALAKLLRSGDLTPVWVPDEGHEAIRDLVRSRAAAVETLRVHKQQVSAFMLKHGRHFPRKTTWGARHMRWLQEQRFEHPAHQIVLQEAVEAVRLSKERVERIEGTIQEFLPKWSLAPIVEALQALRGVNLIVAVTIVAEIGDLRRFESPRQLMSYLGLVPSERSTGETVRRGAITKAGNGRIRHLLVESAWTYRHPPRIGKAKLYKLERVPPKVREIAWKAQTRLTARYRALANRGKKTTVVCTAIARELAGFIWSVAREVRAA

SEQ ID NO: 377586 - protein, 403 aa, unidentified
MRSVLSIDVANGKSEVLLITEHGEVLIEPYEVKHCLSDFNLLKNKIDNFNLDNLTIFMESTSTYHLPIQRFFIKNNYNVQVINPILGKNNTRNLRKTKTDIEDCYNLADLFFKNTVKIHTKTMNDIYSSMIELSRQEKHLTESLVRSKNRFKQIIANAFPEYLKCFTASDIYGETSLNFIKEFPHADIIRSKRIDALANNIYKSTKGYLPYSKCLNKAKKIKELANNSYPGIDMDSCEVKNLINIIEIISYSDTKLSEVKQDIIKLAKQTPYFNIINSIYGVGETSTAQIIAELGDINRFENIKQLNAFCGLDPTIIQSGKSINHNGPISKRGNRNARKILFITCCSIIRSSVLHNVDNDLLLYYRKKQAENKHFKECIIACSTKLLRTIFAMCKNNSLYVQK

SEQ ID NO: 377587 - protein, 329 aa, unidentified
MFIGLDVGKSDHHAVALDTTGKRLYDRTLPNDEAKLKQILTELGGHGRILLVVDQPATIGALPVAVAREMGATVGYLPGLAMRRIADLHPGQAKTDARDAAIIADAARTMPHTLRSIALGDEAIAELGVLCGFDDDLAAQITATSNRIRGLLTQIHPALERALGPHLDHPAVADLLTRYPTPAALKTAGRGHVRARLKKRAPRAAERLTDAVFAALAEQSVVVAGTDAARIVIPRLAEQLLSLRTQRDDVAAQVESIVEAHPLHQVLTSMPGIGVRTCARILTEVVGKDFKDAAHLASYAGIAPVTRRSGTSIRGDPEPARQARGRTLP

SEQ ID NO: 377588 - protein, 403 aa, unidentified
MQDEHFDVTGGVDTHGEQHVAAVVDAVGRVLGVATFAACGTGYCRLLVWMRSFGRVARVGVEGTGSYGAGLARHLATEGVAVVEVDRPNRQRRRRRGKSDTTDAEAAARAALNGEAAGAPKAGNGPIEAIRALRVARRSAIKARTQAANQIRDLIVTAPEELRARLRDLDTDSRATACARFRPGTVLDPTEATKTALRGLARRHQALTVEIGELDSAISQLCATENPALLAARGVGPEVASALLVTAGDNPERMHSEASFAALCGASPIEASSGKIVRHRLNRGGNRQANQALWRIVMVRLTCDQRTQDYAARRHTEGKTNREIMRCLKRYVAREIYGLLTDPPAVPNGADLRARRTAAGINLTVTAEALGSWPNRISELERGLNHNADLATRYQLWLTQQTT

SEQ ID NO: 377589 - protein, 312 aa, unidentified
MERIFVGIDIAKDQVDVHVHPTDERFQLSRDDAGLAGLVARLQPLGPRLVVLEATGGYEIPVAAVLASAGVPVAVVNPRQIRDYARATGQLAKTDALDARLLARFAEAVQPEVRPLPTPEAQALGDLVTRRRQLVDMLGAERNRHHQARDLRLQRRIATHIRWLTKALAEIEADLDTLIRSSPIWRERDTLLHSVPGIGDITAYTLIADLPELGHLDRRKIAALVGVAPFNRESGHWRGRRTIAGGRPAVRSVLYMATLTAVRFNPALAHFYQRLTAAGRPKKGALTAAMRKLLTTLNAMLRDQRPWQPQSA

SEQ ID NO: 377590 - protein, 409 aa, unidentified
MSVHAAPVTSSTVSLAVDVGKSSFAWSLTDAARVRLLGPVECSMTGPSMREVVSRVERVLPPGAQVKVGVEAAGHYHRPLLVPTAWPAGWEVLELNPAHVTEQRRVMGRRRVKTDAIDLEAITELLLAGRGVPTAARTAVLDELAAWSTHRTRRVAIRTATKNQLLGQLDRAFPGLTLALPDVLGTKIGRLVAAEFADPARLAALGPTRLIRFAATRNLRLRRPLAERLVSAARDALPTAGAAVARQVLAADLGLLTDLDAQIGAAEAELGGLLPVSPFATLTSAPGWGTVRVGNYGAALGDPARWPGARQVYRAAGLSPVQYESAGRRRDGGISREGSVQLRRALIDLGLGLWLTDPSARGYAAELKARGKRGGIIACALAHRANKIAYALVRDQADYDPGRWNSPHR

SEQ ID NO: 377591 - protein, 470 aa, unidentified
MSKVKAKKTKAQDIISMQVVNPYSAGIDVGDKEMVVAVPEGLSEPRVRTFGTMTCDLHEIAAHLKVCEIDSVGMESTGVYWKPLFRLLIHEGFEVNLVNAAHVKNVSGRKDDENDAMWIQKLHSCGLLKSSYLPDEEQEALRTLVRHRKTLVQDSCRFVNRMQKSLELMNVKFHTVISDIVGETGRAVVEAIIGGERNAANFLPLISKRIKADLSTIEKSLQGNWLEEHLFTLKQNYEMYKIFWEKIAVCDQQIEKQLQQYEAKCNEGVIEEPKKVKEEPTVTPAGKKGKVVKKYGDKNRPRFDVHGYLERIYHVDVMAIHGINSTSALDIFAEIGTDLSKWKNEKHFVSWLNLCPNNKISGGKLISSKLFHKKPNPASLAFRAAANGVQKSDNWLGDYFRRKKAKGGNKYAIIATANKIATIFYKMVRHKEDFKPVDLEQYQQKYKQVKITFLKRKLAQLEQETEKVAA

SEQ ID NO: 377592 - protein, 342 aa, unidentified
MDQIIRIGMDTSKHVFQLHGVNAAEEPVLRKKLRRQDMVAFFERLPPTVVAIEACGGSHHWAQLLQSLGHEVKMIPPQLVKPYVKRGKNDAADAGALCEAMSRPTMRFVPVKTPEQQAALMLVGVRDRLVRQRTQLTNAIRGYAAEFGLTAAKGMSKIEPLLERIRADDTLPALARELFEVQAKEYAQLQARLEEVEDKLMAWHRDDECSRRLARIPGVGPIGASMLVMKTPTPEAFRSARHFAAWLGLTPKDHSTAGKVRLGVITRAGDEALRSVLVVGATAVIRQLRRGQSAAASPWLVELLKRKPPKLAAVALANKIARIAWKLMVTGEVYKAQSAASA

SEQ ID NO: 377593 - protein, 348 aa, unidentified
MAHFVGLDVSVKETSVCVVDDAGKVILEQKVPTEPSDIVALLSSLGTTFGRIGIEAGPLSQWLVSALIAADLPVICVETRHMKALLTAQQINKTDRNDARGIAQMMRVGLFKPVHVKTLVAQEQRMLLTSRKLLQRKLLDLESDLRGTLRNFGLKVGVVSGSRYEARVHELVAGFPGLAAIAEPLLNVRRVMRQQFAVLHKMLLDTVRGDLVCRRLMTAPGVGAVVALTYRATVDQPQRFVHSRAVGAHVGLTPKRYQSGETDYDGRVSKCGDALLRTMLYEAAQVLLTHSGKWSWLKAWGMRVAQRRGIRRAIVAVARRLAVVLHRMWVDGSEFRWSKGGAAVPTVV

SEQ ID NO: 377594 - protein, 348 aa, unidentified
MSKHTHMDKEIKVLGIDLAKQSFQIHGVDGNGKVVVQKTLSREKLLEYMAQLKPCLVGMEACGGAHDFARKFRQYGHTVRLMAPQFVKPYVKSNKNDRADAEAICEAVQRPNMRFVPIKSVEQQDLQSLHRVRSMVIAHRTALINQIRGLLMEYGIIIPKGASQVRSHLPDILADPANGLTAEMRELLIGLSSELLHLDERVGKHDANIKVIAEHHPVCLVLLAIPGIGPMIATALVAAVGDPSVFKNGREMAAWLGLVPRQHSTGGKDRLLGISKRGDVYLRTLLIHGARAAIRVADKKEDWRSRWMLDVMARRGENIAAVALANKNVRIAWALITKGEKYRSDKAA

SEQ ID NO: 377595 - protein, 466 aa, unidentified
MSKRRKHIQGQRGEAFVKLIRGIPRERIACVSIDVHKYYHQVMIHNEYGEILEPSFRIGIFREGFEHLCQVIDDVVGEHSVQVLFIGMEPTGHYFENLARHLGKRYPHLCLVNSYAVKENRKQSMLRTEKTDDIDLGAIGELVLRNKCFPYQPLSEDHLHLQHWVRYREAKVKARTALRNQVIGHLDRIFPGLVRPNHRAELGGPPKLFARFWECQTAQRLIRLCPNPHRLTEMDAQDLCQLFQAHHWRIGRATAQRIIRFARQVLLPDEEMIAARLPMLQLDLTLLDQLDQTIVQADQQIAHYLSKTKGQVLTHVKGIGPLRAAAYVAGIGNPDHYEHAGQTFKRSGLVSGRNDSGLRQRQGAGQRVTKVGDPHLRKALVEITRGICQWQPYFGQYRERLEQRGKHPGVATVATARKVNGVLFALMRDQSEFRPTNAQGDVLPPLSSIRGKQKAAPDIGSRKDSS

SEQ ID NO: 377596 - protein, 350 aa, unidentified
MVTIIKWSLGIDVGSKQIRCCLSWIDSAQTVKVKASRKFSNAPVGLQELLLWIKKHYTDPLVPLSVTMEATGVYYERCALLLREKGFRVSVILPTKAKRYLQAVGLKSKNDKIDAEGLARMGAEQHLAQWSAASADMYALRLLTRQHEDLQKSITSFSNQLHAIQNGMYRYEDIENSYEQTISNLKEFLAKVETAITESIKKNESLKEKIDILSSIKGAGELTAATIIGETNGFALFENYKQLVSYAGYDVIENQSGDHVGKTKISKKGNSHIRRILHMAALNVVTYKVKPFVDLYERVYQRTNVKMKGYVAVQRKLLVILFALCKKNQKFDPQHQSSLSEKGSRGLLLA

SEQ ID NO: 377597 - protein, 424 aa, unidentified
MNESNQFKATIGLDWADQKHDLWIRPADGSKSEHLRLEQSPEALHEWAAKLRKRFDTGQVAIGVETSRGPVISALMSYDFIVLFPINPKALKDYRAAFSVSGAKNDRTDAQLIEEFIRLHSEKLKALQPDTELTRKLSGFVQDRRHLVDERTRIVNQTHAKLKTYYPLAETLVGSEMNSLMAAEFLSRWPDLESLLAAQAPTLRAFFYKHNSRSAKKMEQRLEAIKTAKALTTDPGIIEPARELVLALAGMLKCLHKSVARLEKTIALAMDQHPDAPIFRSLPGAGPALAPRLLVAFGTQRDRFQSAQEVAQFYGVAPVVIQSGNSELVRIRRRCPKFGRQTFHENASCVAKSEPWGRTYYQQQRKKHDDKHHQACRALAYKLIRIYFSCWKARTVYRSNIYLNALQKHGSPLHNKLNMIVNNS

SEQ ID NO: 377598 - protein, 315 aa, unidentified
MPNSVAQSVGVDIAKDTLDVHLHPAGSSRRFGNDATGCAALIAWLEGFVIARVAFEPTGAYHHTFERRLAAAGLPLVKVNPRQARRFAEAIGRQAETDAVDAAMLARFAALLEPPVRPVVSAALDAMKELHGARRALVKGRVAARNRDHTHRAALLKRQARERLRQIDRQIAAIDAALHVELAADPALQARFDILVSIPGVGEATAFAMLVEMPELGALEHKCAASLAGLAPIARDSGQRSGKRFIRGGRAHLRHALYMPALVAVRFSAAMKAKYDALRAAGKPPKVALTAIMRKLIILANALIRDGRIWSPSPA

SEQ ID NO: 377599 - protein, 427 aa, unidentified
MPYRIAGIDVHKRVLAVVVSEVEVYGEYEFERKQFGTSSSQLRALAIWLLEQKVEEVVMESTAQYWRPVWEALERYWQPACRKREGAPATAGALHLAQAQSNQGPRGRKNDFADAERLVKRLAANELRLSFVPEPEQRLWRTVMRTKYQLRRNQVQLHNRLEALLEEMHLKLSSVVSDLLGVSGRRILAAVGKGETDPGALAALADPNLRATREQLGDALEACRDLHPLYRRLLQTALEEWEEIEKRIQQLDQEMATLLRAHQDPVQRLAEVPGLGVDSAQQIIAEVGAEAATFPSAGDLASWMGACPGDNESAGVKSSTRSPKGNRHLRRILNQAANAAVKMQGSIFALLYRRYVPRQGHKKTIAIIAHRLCRLVWMVLHRGLRYDERGPAVSKQSAQKRAARMIRELRSLGYRVESANSPAVSLA

SEQ ID NO: 377600 - protein, 375 aa, unidentified
MDYCTTIGIDVSDRTSKVCVMSREGGGRRVLVETTCATTKEGFGECFAKFDRAWPVVFETGTHCRWMKRHFEALGFKTIVANPAEVKLITDSNSKNDRGDARKLARIALADAELLKPVQLRGEGFQRMLRLHESRLLLVKCRTSMVVQVRCFAKSCGFRLPDCPAERFHELDRSSWPSDFEQMVWPMMDMVKTANLKIAAYESMIRKLAATPEFKAKVERAREVYGVGFIGSTVVVAAIDGDATRFAHARDVGPYFGMTPKKSQSGESDPQLGITKAGNNLVRKVLVECANVAMMETAPDTDLKLKGLRIGARGGNVARKKAKAAVARGMAVLIVALLKDPGRKYVPLSEEGRKGFERYRAERQYLPRKAAEKAL

SEQ ID NO: 377601 - protein, 408 aa, unidentified
MLLLVGDDWAEDHHDVELMDSSGRTLAKSRLPEGSSGIARLHALIAAQLGDDAGDDAEVRVGIETDRGPWVAALNAAAYVVYPVNPLQAARYRQRHAVSGAKSDAADAHSLADMVRTDAHQLRAMAGDSPDAEAVKVVARAHKTLIWERTRQTQRLRHALREYFPAALEAFDDLDAADTLELLGKAPGPTAAARLSRAQISAALRRARRRDIDTKTTRIRAALRTEQLGRPGVVTAAYAATTRAAVAVLGTLNEQIAALEAQVDDHFRRHPDAEIVLSQPGLATVLGARVLAEFGDDPTRYATAKNRKNYAGTSPITRASGKRKLVAARYVHNDRLVDALMRQAQSALQTSPGARAYYDRQRARGLDHNPALRQLANRLVGILHGCLKTRTHYDETTAWSHHVDKPAA

SEQ ID NO: 377602 - protein, 352 aa, unidentified
MTRITTIGVDLAKKVFQIHGVDAEGKVVVARKLRRKEVLAFFAKLAPCLVGMEACGSAHYWGREIAKLGHTVKLMPPKYVKAYVKRGKTDAGDAAAICEAVTRPSMSFVPVKGIEQQGLSMLHSARTQLIGQRTQLINGVRGHLSEFGIIAARGLLGLAELAAIVRDKSNRRLPATARAALMILVRQIGAVSAEIAELDTALRKDNNASELGPRLETIPSVGPVIASALRARVTDARLFENGRHLSAWIGLVPENDSTGGKIRQNGLSKKGDRYLRSLLVNGAMAVVQQALKRPDKNPWVTKLLGRMTAKQAAIAIANKTARIAWAIMVHGGVYEAGHRAPQYRAEACAAAA

SEQ ID NO: 377603 - protein, 336 aa, unidentified
MKHNSIFIGMDVHKNSIDIAIAESGRTGQVRHYGKINGTLAALNKAVGKLVGKGDRPHFVYEAGPCGYQIYRHLTARGFECAVVAPSMIPKQSGNRIKNDRRDSMMLARLHRAGELTPVYVPLAEDEAIRDLSRAREDAKSDEKRSKQRLLAFLLRSGHRYSGRSPWSQAHMRWLADIKMAHPSQQIVLQEYIDTISQCTLRLQRLTEQIRQLLPQWRLFPVVQALQSLRGVSLIVAVTTVAEIGDFKRFQNPEELMGFLGLVPSDYSSGEKIKHGSITKAGNSHVRRMLVEAAWAYRFRARVSRALLKRQEDLPQPICDIAWKAQLRLCARYRHF

SEQ ID NO: 377604 - protein, 432 aa, unidentified
MKHNPSSKQNQRISRISETTLVIGADIAKHQHVARAFNYRGIEFGRRCLFQNDENGLLNLLAWTEAIKQEHGFTDVLLGVEPTGHYWFPLFHFLKQRGIEVVLVNPHHVRKSKELDDNLPTKNDIKDAKVVAKLVLDGRYTQPKLPAGVYADLRVLMNQRDRLCGDLHRVKGRIHNWLDRFFPEYRQVFKDWEGKASLVTLKQFPLPQDIVAAGEAAIVATWKQHDVKRAVGAKRAELLCRKARKSIGLTEGAAAARYELAMYLEQYAMLCSQIEQLMELVAQLVEQIPGAAHMMSIPCIGLITVAGFLAEVGDLSSYDHSRQIVRHAGLSLRENSSGLHKGKTTISKRGRYRLRALLFRAALTMVARNPEFRALHLYFTTRQDNPLKKKQSIIAICNKLIRVLFELGRKQKNYDAGKVLGPHRAAQLQAAA

SEQ ID NO: 377605 - protein, 347 aa, unidentified
MNFYNSTHRHYCGIDLHARSLYVCILGQQGETLLHKEIPAKPEPLLRLIEPYMDDLVIGVECMHCWYWIADFCEDQGIAFILGHALYMKAIHGGKTKNDRIDSYKIAALIRGGNFPLAYVYPRTMRATRDLLRRRTGLVRHGADLKAHVANTTSQYNLPPNKVNLKNVSAREQLNRTFDDPVVQRNIDLDMAVLECYHRELSQIEWLLVKQAKQHRPTYYHLLQTIPGIGRILALTILYEIGDIRRFESVQKFASYSRLIKCKAESAGKTYGTQGNKIGNAHLKWAFSEAAVLYLRGNPGAQKLLQRFQKRMSKAKALSALAHKLGRAVYFMLKNEKVFDEQRFLMS

SEQ ID NO: 377606 - protein, 362 aa, unidentified
MEFFCGLDVAMDETAVCVVDDHGVVHLETTAVTDPDALFGALKPFLPRLRRVGHEAGALSPWLHPELKKLGLPAVCLETQHVRAALSAQRNKTDKADALGIAHIMRTGWFRQAHIKSEGCYRTKLLLTHRRNLKAKFFDLENAIRHSLKAFGIRLGKVGRGAFEQAVRTAVADDPMTSELMDAMLLARAALWRQYCRLHDLVVKMVARSELCRRFMAIPGVGPVTALSFMTAIDDPSRFRRSRDVAAYFGLTSRRWQSGTSIDVQGRISKAGDADVRRSLYEAASGLMTRFKGSDKVKSWGQAIAKRSCHRKACVAVARKLAVIMHAIWTDGTFYVGDPAASQAEAGRRAHHKDRKLLGAHR

SEQ ID NO: 377607 - protein, 406 aa, unidentified
MNMNAVGIDVSKRKSTVAILRPGGTVVVKPFDVPHLSADFQSLKKLIRELDGKTRIVMECTGRYYEPVARELSQAGFFVCAVNPQIIHNFQGQDNPLRKVKTDKADAIKIARYTLDSWANLKQYSLMDELRSQLKTMNRQFDFYMKHKTAMKNNLIGLIDQTYPGANTYFDSPAREDGSQKWVDFIDTYWHVDCVRKMSLSAFTDHYQKWCSRRKYNFSKPKAEEIYGKAKELIPVLPKDNFTKRIIKQAIDQLNAASQTVEQLRTLMNETASRLPEYPVVMEMKGVGSSLGPQLMAEIGDVMRFTHKGAITAFAGVDPGVNDSGDYSQKSVHASKHGSPVLRKTLFQIMDVLIKTKPDDAVYLFMDKKRAQGKPYYVYMTAGANKFLRIYYGRVKEYLSTLPTSD

SEQ ID NO: 377608 - protein, 330 aa, unidentified
MTASAYFVGIDVCKKYLDVAVRPDGRQWRVERTPEGIAALVKELTLRLPTLALMEATAGLEKEVAAALAAAGVPVAIVNAKRIRDFAKASGRLAKTDRLDAEVLAHFAETFRPASWKAPTPEEEELEALVTRRQNLVQFLKQEGQRLQASGVSALAKESLESHIKWLETEKARIEKLIEKMLRTEYFLEKATLLRSAKGVGPVATAALLAFLPELGALDRKQVAALVGLAPMNDDSGDKGKPRHIRGGRAELRQLLYMAALVATRHNPSIKAAFTALMARGKPFKVAMVACMRKLLCSLNAMVRDGEAWRAPETEEATECAHSIPSNPSP

SEQ ID NO: 377609 - protein, 341 aa, unidentified
MRTKGDFVFVGLNVHQDSVQVCIINDAGKTLCNRSVVNVVSIIVKTIQDFGADAKLGIEACGGAAALADAVIEATGWSVQMTHAGYAQRMRQNPDKSDYSDAYLLADLVRLGYLPRVWLAPAPVRDLRHLVRYRQQLVNQKRNTKLRIRALLREHRELSAPKSLWTGTGVGWLKQDVVLPSHARWILDRHIEDLNRSTEAIALADKRLIDAAETDTIMQRLMTHAGIGLITAAVFRAQVGDVNRFGNGKQLSRFCGLSPCNRSSGSRQSDAGLIRGCCKLLRATLIEAAHRLTIHDEYWKAFKARMRSQGKPGSVIAAAVANRWIRRLYYDLRTPATSVAA

SEQ ID NO: 377610 - protein, 383 aa, unidentified
MTPEGKEIRTFSTKTIFLIELVDWIKSNNCTHVAMESTGVFWKPIVNLIEAEEMEFLVVNAQHMKAVPGRKTDVKDAEWIAQLLRHGLLKASYIPDRNQRELRELVRYRRSIIEERARQHNRIQKVLEGANIKLASVVSDIMGVSSKDMLRAIADGEEDPEILANFARRTMKKKKDELVLALKGFVNAHQRMMIKTIMTHIDFLTEQIEKLDQEVAERVRNYQQDIERLDSIPGIATRMAEHILAEIGTDVENQFGSAERLCSWAALVPGHNESAGKRKSTRAKKGNKYLRSALTEAAHSVAASKNYLGAMYRRMAARKGRKRAGIVVAHAMLRIAYYLLTRKEMYIDQGEDYYDKKKQESIVRNSVRRLESLGYEVTISEVS

SEQ ID NO: 377611 - protein, 354 aa, unidentified
MAEQIAVVGGIDTHTDFHQAAVIDSIGRHLATEAFPTTPDGYRRLLDWLCSHGEVIAVGVEGTGAYGSELARFLRAGQVTVVDVDRPDRRARRKNGKSDPVDAYAAATAVLSGRAGGTPKTHDGIVEAIRALRVVRRSAVKSRTQTINQIRTLIVTAPGEVREKLRDLATTDLIRHLARSRPGTDIADPACAARTALRRLARRYQHLTEEIAEADTELKPLVTTAAPTLVELLGVGTETAAQLLITAGDNPDRLKSEAAFAHLCAAAPIPASSGRTNRHRLNRGGDRQANNALHMIALVRMRYDQRTRDYVARRTTEGMSKKDILRCLKRFIAREVYKHLTSQSTTPKSLPQTA

SEQ ID NO: 377612 - protein, 355 aa, unidentified
MSQEKYIGLDVHQASISAAVMDPSGNVLMECLLETKAATILEFIQGLRGTLSLTFEEGTAAAWLHDLLKPHVSRLVVCDPRKAALLKEGNKNDRVDARKLAELLRTNQLKAVYHGEHGIRTLKELGRSYLTVSKEITRTMNRIKSLYRSWAIPCSGTTVYAPRHRGEWLAKIMEPGVRVRAQHLYQQLDNLQPLRLEARRELLLESHKHAAVKLLRQIPSIGPIRAALLVALLQTPHRFRSKRQLWAYSGFAVETHDSGEYRWVRGKLQRNRERITVRGLNDNHNHDLKNLFKGAAISASARPGPLQDFYLARVAQGMRPTMARLTLARKIATITLTVWKKGANFDPQQLHRQAV

SEQ ID NO: 377613 - protein, 322 aa, unidentified
MIEAIARSCAGLDVHKGVVTCTLLRENSQGTLVKETREFPTFRRQLEDLAGWLKSAEVELAVMESTGIYWKTVYEALEDAGLKAFVVNAMHVKRVPGRKTDVQDSEWLAELARCGLLRASFIPPKDLRQLRLLTRYRRKLSGYLAGEKNRVHKILDDCGVRLGCVVSDIDGVCARKIIQALIEGKKGPEEIARLACGRLRAKQPEIILALDGRMSDRHRFLLRRIESHIRWLEKQIRQIDSQVVAAMEPYRKEWELMQTIPGIDEIGAAMLLAEIGTDMTRFGSSDKLSSWVGICPGNNETGGKKKKRSHPKRKQVHQAVAV

SEQ ID NO: 377614 - protein, 435 aa, unidentified
MSSLSKINPNCAGIDIGNESIFIGIEDCDVVSFGTFTDEYLKAIAYLNEHGITAVAMEATGVYWITLFDMLEATGITVTLVNGKQVKYLPGRKSDVADCQWLQQLHAFGLLRPCFIPDDVTRQLRTYTRLRADHLSMASSHIQHMHKALTLMNIKVQNVISQLHGVSGMRIITAIVLGERNAERLADLCEKSILKTKRERVVASLKGNYKSEHIFALKQALCAYDFYQNQIVECDKQIEALLNDHTDSMPTPTNLTPPKKIRHNPPQIDDLHTKLMKMTAGNDPSRITGLTDKTLLELLAETGTDLQAHWITEKHFSSWAALSPTMHQSGKTNKRRKIKKNSRAGQIFREAALSIAASKHSALSAFYKRMKAKKGFRHALKATARKIAVLYYRIMTKGLAFVEQGIQLYQQKLKDQQLRFLRKKAHSLGLQLVPG

SEQ ID NO: 377615 - protein, 408 aa, unidentified
MNVLHARCCGIDVHQASLAVCVSIREEGRQEKHRLRCGTKTAELLRLMDWLHEHRVTHVALEATGVYWKPVWHVLEGQFELLLANPTQVKALRGRKTDLKDGERIADFLQHGLLQGSFVPPREIQDLRDLTRSRTKLKQEQVRVGNRILKVLEDANLKLSTVMSDVMGISGREMLRAIIQGKSDPAELAQLARGKLRGKIPLLQQAARGSLREHHRFLLEQWMGIWDELGVRITKFEERIAEQIGPFQAAVEAWASLPGIDRVTGWTMVAEMGTDMTQFPTAAHAASWAALCPGEDESAEKRHSGRTRKGNVWLRRALTQAAWGASITKGSYYKAFYHRLAPRKGKKRAIVAVAHALLVTGYILQVSGKKYQDLGVDYFDRLNRERLTKRLVKRLEKLGHKVSLEPAV

SEQ ID NO: 377616 - protein, 444 aa, unidentified
MRIIFERVAGLDVHKKTVTATRMRVTEDSRLEWETKTFGTTTPDLLELHDWLQAWGCRQVAMESTGDYWKPVFNLLEGDFEVWLVNARHVQQVPGRKTDALDAEWLAELMLHGMLKRSFIPPKPQRALRDLTRYRSRLVQERARTINRVQKLLEGANIKLASVVSDIMGVSARAMLEALGAGQDDPALMAELARGRLRNKLPELEKALTGIVEAHHRFLLSQQLAHIDFLDEQIVEISAEIARRIEAMSQAPLPATSETDRAGANTDMSSDQQQPPLTWSEGVTLLDTIPGVDRKTAEVILAEIGLDMSQFPTDKHLAAWAGLAPGNHQSGGKRYSGRTRHGNQVLKSTLVQAAWSAVRTKDTFLKARYHRLAARRGKKRAIVATAHSMLVSVWHMLTRRQPYQELGGDYFDQRKKEVKVGYLIRRLEKLTGASVTLEIQPAAA

SEQ ID NO: 377617 - protein, 348 aa, unidentified
MQLLNIDKKYYCGIDLHGKTMYTTIQDKSGSVLFHKNLPNSMDALRDALQPFRNEIAVGVESTFNWYWLSDACRKEGIPFYLGHALYMKAIHGGKNKNDRMDSRRIADLLRTNFFPMAYAYPPEMRGVRDLLRRRRYYVDVRASAYRHIKMVFMQQGWVDKPLPTLNKRKGREDILKDVDDPVLSLSLASDIRVMNDMDQIIDVLEQKIESEAKHHDRAAFELLKTIPGVGDILALTLLYEIHTISRFPTVQKFSSYCRLVRPERTSNGKNTGLGNDKIGNPELKWAFTQIIIHGQLSSVGLKALHEKMKQKHGSAKAKSILGHRFAIAVFHMLKNGKGFDEKTFLGG

SEQ ID NO: 377618 - protein, 411 aa, unidentified
MIKENYIYVGIDLHKETHTAVMIDCYNQKLGEITFPNRPADFPKLVAKVKKCNTDGKTIVFGLENAYGYGRALAVWLIDKGYLVKDVNTAISHRQAKHRGAMYRKSDSDDAEAIALATLNMLDKLPDAYPNDAYWSLGQLVHRRDNIMKQRTRLVNQLHEQLCIAYPSYKQFFNDISRPTALYFWEHYPSRKYLKGKSVEDLRAELVPVSHNKCSTKTCEKILDAVASDKVKNNAYQDARDMVTLSIVSDLQHYDSQLAEVDKMLEQMYKMLGCTLTTIPGVNVITAVKILAEIGDIKRFSNANKLAQFAGIAPLHLSSSGKGKDVATKQGNRRLQATIYFLAIQMVQVSSKGTPRNSVVRAYYEKRKAEGKTSQQALICISRRLISIIYGMLKHGTEYRMPVVESAGENR

SEQ ID NO: 377619 - protein, 415 aa, unidentified
MCHPLFVGLDVHSQTNRVCLLDQAGESWGRRFSVTNNRPGSQLLIVRLVEALRQGEFDSLRLAVEATNWYWFPLFQTLQQDPVLSQWPVALFALNPRLIARYKETFSDQDQTDDSDAFLIADRLRMGRDLPEPFQLEAQYLGLRFLTRYRFHLVKDLVREKNHCLSILYLKASAYRQDHPFADVFGATSQALLQEFATLEEIAAMPLAELVIWLDVKGKGRFPDPVKVARELQQVSRDSYPLDSQLQQPVNYVLTWNFQLVTCLERQLQRVNTAIAEAMAQIPHTLDTIPGFGPVYAAGIIAEIGDVARFDHDETKVAQFAGLHWRTTASAKFEAEDTHLTKRGNAYLRYDFCEAANAVRMRDAEYAAFYQRKHDEVPKQQHRRAVVLTARKLVRLVVRLLTTNQPYRPRSVPSG

SEQ ID NO: 377620 - protein, 347 aa, unidentified
MKYYVGLDVSLKETSICVVDGSRRVVKEGRVVSEPETIGVWLLGLGLDFELVGLEAGSLAPALYDGLREQGLPVVCLDARHLKNATTAMPVKTDRIDAMNIALALQAGWYRTVHVKSRDTHKLRALLRSRAMLVKTRTTLDNHLRGILKAFGLKVGRIAVGRFEDRVRELISDIAVLEETAEAILRVRSEVAARLADLHRQVLAVAKSDPVCRRLMSVPGVGPVTALAYRTAVEDPSRFTKASLLGAHFGLTPRKYASGETDRNGRITRCGDRMVRSLLCEAATVLLCRVRSWNWLRRWGMQVAQRRGMRRAQIAVARRLAVILHRLWTDGTEFQTSRAGIASATAA

SEQ ID NO: 377621 - protein, 410 aa, unidentified
MELLHPHCAGLDLHKETVVACIRYMLNGTVTTEVKSFQTTTQQLMELSDWLSSHGVTHIAMEATGVYWKPVWHILSDGEFELVLANAAHVKNVPGRKTDVNDATWLADLMAHGLIRASFVPDQPTQQMRDLLRTRKQFVRERSSHTQRIQKTLEDANIKLDSVITDIVGLSGRRMIEALIAGETAPEALAALAHGRIHATKAELEAALRGRVTAHHRFMLQLHLDHLDAVNAAIARIDKEVDANVEPFRVAVEMLTTIPGVSSLAAEVMVSEIGIDMSRFKTDGHLISWAGLCPKNDESAGKRRSTRMKKGAPWLKTTLIQCAWAASRTKGSYLQAQYLRIRSRRGPKKAIGAVAASILTAAYHMLKDGTLYQDLGANHFDNRDKGKQVLRLVNRLQSLGFAVQITSMAA

SEQ ID NO: 377622 - protein, 398 aa, unidentified
MLYVGIDVAKHKHDLAIVDTEGTIFVRHLQIENNREGFTKLQMTLDNLQKTTGEDIQIALEDTGHYCFNILRFLRTQGYPTYSYNPYLIKEFAKNQSLRKTKTDKKDAMTIARKLRTDLDKQSFSANPSMIELKYLTRHITRLKEDCTRKKVNYTRILDILFPELASSLGSLTAKHQSYVYAILKEYPSARKLGNAHLTKLTNLISTHSKGRFGKEQALKLKSLAQSSIGQESPALEFELLQTIDIIRYLTTMRDEAEKEVARLMSEIDSPILTIPGISFQLGSVLLAEIRDIKNFRSPNQLLAYAGAEPSVSTSGMNQTETGRMVKRGSSQLRWALHQAARLMSIWSPSMRVYFQKKLAEGKHYNVAISHVVRKLVRIIYQLLKDNKLYEEQKMIVN

SEQ ID NO: 377623 - protein, 349 aa, unidentified
MFKDFDKSILPNLNIMKYDAFIGIDVSKEKLDFVVISNGVMLFHMVVTNNEKGIKQFFKCLDDQLNTDSCCLFCLEHTGIYCFPFLSFSVHKNLSVWLEAATKINAFHGAFRDKNDKVDALRIAEYAAAKSQIAHLWEPERKIIQRLKSMITLRDRLIKAKNSLAVACKEEEFYTDKQWHKEHQERVKPILDQITKQTRDIERTIKEAIDQDDQLSQLYQLASSVKGVGLIVAVNIIIVSNEFKSIREPKKMACHCGVVPFNQQSGKSLKTRSRVSKKANKKVKSLLNLAARSAVASKGEMQEYYFRKVAEGKNKMSVLNAIRNKIIHRVFACVRDGRKYDNNYIHKLA

SEQ ID NO: 377624 - protein, 400 aa, unidentified
MSEQRTRVWAGIDAGKAHHWAAVVDDTGATVWSRKITNDESAILAALGDILGLADEVSWAVDISGTASALLLALLAAHGQHVVYVPGRTVNRMSGAYRGEAKTDARDAYVIAETSRVRNDFQVIDVPAQLAADLALLTAHRTDLVADRVRLINRLRDVLTGISPALERAFDYSAHKGALVLLTGFQTPAAIRRRGQTRLTAWLANRKVRGADAVAATAVAAAQAQHTTLPGEQVAAGIVAELAKQLLAMDDRLKKIEGQIRDTFRSHPQAEIIESLPGIGPILGAELVVAAGDLAAYTDAGHLASAAGLVPVPRDSGRRTGNLHRPKRYSRRLRRVFYLSAQSSIIREGPNRDFYLKKRGQGLKHVQAVIALARRRVDVLWALLRDNRVFTPAPPVTQAA

SEQ ID NO: 377625 - protein, 412 aa, unidentified
MEILYACCCGIDVHAKMLVACLIKEGKKEVRTFSTMTADLLRLLDWLAQAGCTQVAIESTGVYWRPVFNILEGAMEVILTNARDAKGFKARKTDVIDAEWLADLLRHGLLKPSFIPPLPIRELRELTRYRESLVREQTALANRIQKLIESANIKLGQVASDALGASGKAMLRALAAGETDAEKMSHLARRTLKRKQPQLQQALAGRVTEAQRWVLGQLLDQYDQSEAALTRVEERIRQEVESSPDPFVPEAVKLLDTIPGVGETVAQIIVAEIGVDMERFPTDHHLASGAGMCPGNNESAGKRKSGKTSKGSRCLRAALGQAAWAASHQKGTYLAAQYKRLVKRMGKKKALVAVGYSILIIVYHVLQKRVPYQDLGGDYFERRNVSTQRQRLIRQLEALGVKVTVEEVKEAA

SEQ ID NO: 377626 - protein, 416 aa, unidentified
MNAVGIDVSSRKSTVAVLRPLGEVVCLPFDVSHDADGLASLAEKLKALDGETRVVMEHTGRYYEAVAKALHEAGFFVCAVNPLLIKEYGANSLRRVKTDKADAVKIARYALDNWADLRDFTPMDAIRYDLKTLNRQFQLASKQRTASANNLIALLEQSFPGIRKCFDSPVRSDGTQKWVDFAHSFWHVDCVRKQPFAAFCERYRKWCKRHAYFFKQSNAEEVYALAKRAVVLTPKSKVVKVLVQEAANQLSSISRSVEVYRAEMDRLAAMLPEYPVVMAMYGVGKSYGPQLMAEIGDVRRFERKQALIAFAGIDPMPNQSGDKNVRSNKSSKRGSPYLRKTLFNVIRTYLQCAPQDEPVFQFLNRKRAEGKPFYVYMLAAANKFLRRYYAKLRDYFASLDTLQSVDPIPATLKASL

SEQ ID NO: 377627 - protein, 392 aa, unidentified
MLYVGIDVAKSKHDCFITNSDGEHLLGSFSVENSISGFNKLYESILSFEKTPSLLNTRVGLEATGHYSNNIIDFLIRKNLNPVVFNPLSTNLFRKGLSLRKIKTDKSDARFMTMMLMSEDTTPYLPVSYHISELKALSRNRFRLVKSRSRAKVALSRLIDVIFPELAQNVWSVSQKSMLFTLLELPNTAAVASCHLTRLANLLSKYSRGKYGKGKATELRELAKNSIGSNSPALAFELKQTIRSILFFQGEICLVDKQIKRLMDETVSPVMSIPGISYTLAATIVSEVGDIDRFDTPAKLLAFAGLEPSTHQSGKYTATHNVMVKRGSKYLRWALLEAARLVCMRNRVFASHRNKKIAEGKHYFVALSHVAKKLTRIIFYLLKSGEQFRQPA

SEQ ID NO: 377628 - protein, 344 aa, unidentified
MLIGCDFHPSWQQVCWVDTETGETQQCKLVHAAGEAEKFYGQFSAPARIGMEATGNCQWFVEMLAALGHEVWIGDAAKIRASDVRQQKHDRRDAALLLRLLMEERFPRIWTPSSEQKDLRQLLIHRYKLVRLRAQAKNGLQHLAMNQGLQKKNRLWSKAGQQALRDLALQPWASRRREDLLNVLVMLDRQIESLDLAVQQAAEQNENTKLLMSQPGIGPVTSLAFVLTMGDVSRFPRGKQVASYLGLIPREYSSGGKQRFGPISKQGNRFMRMLLVEAAQVAVRCDPQLRREYLQRCHHDKPKGVAKVAAARKLAIRLYWMLRTQKRYPEIVHVESSSRVALGG

SEQ ID NO: 377629 - protein, 344 aa, unidentified
MTRKLMAGIDLHSNNMFCGIVDMDGKRVFDSRLPCDIDSVAKALKPFKKRLEKIAVESTYNWYWLVDGLQDRGYPVVLANPAAMQQYDGLKHADDKSDAFFLAEMSRLNILPTGHICDRQVRPVRDLLRRRMGLVHKRTSLILSLKSLHTRMTGRDLSAGRIKALETQEAEKLFEHPADQLITRLDLQLVEQLGRSIQAIEGAILATVKKLPDYQVLQTMPGVGKILGMTITLETVDPKRFASPGDYASYCRCVDSQRSSNGKKKGENNGKCGNKYLAWAFVEAANLAQRHDEHCRKFYDRKKAQVNGIVATKALACKLAKAAWHMMSKNTCYDAGRMFPGVKK

SEQ ID NO: 377630 - protein, 351 aa, unidentified
MDATTVGVDLAKNIFVACVADCAGRIVERREFNRTGFLTWLGTLPAGTVIGMEACGSAHHWGRTAQRLGLAPRLMAAEFVRPYRKRQSVKNDRADAEALLIALRSPGMRFVPVKTEAQQQRLAWHSLRIGWVEERTALLNRVRGLLAEFGLIVDPGPKHLRTLLAEREFDTALSPALRGVIQSVRDQLEALDTRIGECDRQITAQQADDPLAKRARDLPGVGLITADAVTASVGDASMFKNGRQFAAWLGLTPSQSGSGGKTKLGRITRRGDDYLRTLLVQGARSVLAATLRKQRRESPDQLTRLQQWIVALNGRIGYHKTLVAIANKHARQLWAVLAKGEAYNAQAWQRA

SEQ ID NO: 377631 - protein, 411 aa, unidentified
MEQIHDRVAGLDVHRDQVAACVRTPGPRGGVQAEKARFDTTAGGLAALAEWLAGHAVALAAMEATGVYWKPVYYALEGRFLVWLCNAHHVKNVPGRKTDMSDAGWLADVAAHGMVRPSFVPPPPIRELRELTRYRKTQIDVRAAEIARLEKVLQDAGIKLTSVASKVLTQSGRAMIEALIAGQRDPAALAGLAKGKLRPKIPQLTAALRGHFGAHHAIVAARILAHLDFLDETIGALDAEVAARVAERYQSAARLLAEVPGLERRSVEVIIAETGADMSRFPTPAHLASWAGLCPGNHESAGKRRRVATTPGNQWLRRALIESARAAARTRDSYFGAQYRQIARRRGPNKAAVAVAHSLLDVIWHMLTTGEVFTDLGADYFTSRQDKEHQTRRLVSQLEKLGYTVQLTAAA

SEQ ID NO: 377632 - protein, 417 aa, unidentified
MSNPLIVGIDVHSRTNRTCLLDREGEPWGKRFSTANNRPGTQTLIGRLVETLQQGQFDSLRVALEATNWYWFPLYQALSQEPALAPWPQTFYPFNPRVTARYKDSFSDKDKSDDSDAYIVADRLRTYNRQELPAPFAPNLRYLGLRFLTRYRYHLVKDLVREKNYCMSLLYLKANEYREAHPFADVFGATSRAVIEEFASLEEVAAMPLAELAIWLDTQARGRFPDPAKVARELQQVAQDSYPLDPQLQQPINYVLTWSLALVNFLERQVQRVNAAIADAMRDIPHTLDTIPGFGPVYSAGIIAEIGHAEHFDHDEAKVAQYAGLHWRQHESADFKAEDTRLTKRGDAYLRYYFCEAANAVRMRDAEYAAYYMRKHDEVRTHQHKRAVTLTARKLVRLVVRLLTTNQPYQPRRQSSG

SEQ ID NO: 377633 - protein, 345 aa, unidentified
MIIGCDFHPSWQQVSWLDTETGEAGEQKLVQSAGDVERFYRQVPTPALIGMEATGNCHWLVDLLTELGHELWVGDAAQIRASYVRQQKTDKRDAAHILKLLVEGRFPRIWMPSSEVRDLRQLLLHRYKLVIIRARVKNELQHLCLNKGVQRKHKLWTKAGQQVLRELPLKAWAGRRRDDLLGLMAMLDQQIEPLDEAVKAEAQRDKMARLLQTQPGVGPITALAYVLTMGDVSRFPRGKQVASYLGLIPREHSSGGRQKLGAISKQGNRMLRMLLVEAAQTTVRLDPQFRKEYLHRCHQKPKAVAKVAAARKLAVRLYWMLRTHKPYPDVVRIESSPRVPLVGAS

SEQ ID NO: 377634 - protein, 386 aa, unidentified
MRTLGLDVHKTFIEVALHEAGSVSRVGRVAIKDLSVFAESLAPTDHVVLESTSVSWAIVDVLAKHAGRVTVSNPMKTKAIASAKVKTDKVDARVLAQLGAADFVAEVWVPDGETRALRRRVAHRAGLVRQRTALRNQIHGVLARNLVHLPAVSDLFGRRGRRVIESVALPVHERDQIESALRLHDALQGEVDRLDRELARCALERDEVRRLLTIPGMGVVTALSLISVIGDAKRFASARNLVGYLGLDPRVRQSGEQRPRMGHISRQGQAHARGMLVEAAHIAVRSPGPLRSFYQRVQARRGTQIAIVATARKLAVLCWQLLHNGEDYRHASPRLTASKLRALQLRAGDQGERVKVPKPTDRDRELRLAAQADYEVLVADRIGPGG

SEQ ID NO: 377635 - protein, 365 aa, unidentified
MWEAPVIRQRTSVGLDVHARSVLGCALDGDTGEVFQRRLCPDHGGIVAWLGDLPGPVAVTYEAGPSGFGLARALTAAGFLCEVAAPSKLIRPAGDRVKTDARDAAHLARLLHLGQITAVTVPPASQEAARDVVRAREDCREDLMTARHRVSKLLLRQGIIYSGGKPWTGRHEVWLRAQRFDNPALQLSYEAAFDAMLACVDRRARLDDAITKLAADSEFTPVVHRLGCIRGIATLTAFGLAVEIGDWQRLTGRTIGAYVGLVPSEFSSGETRAQGGVTKTGNGHARRLLVEAAWHHRSPYRPGAELRRRWDLAAPAARARGQSANRRLHTRWVGFDARQKRPVIANVAIARELAGWCWSLAVMPD

SEQ ID NO: 377636 - protein, 343 aa, unidentified
MKKIAIGIDFAKEKFDVTVKNVTNNTSVYGQFPNTRGGGRDMVRMVKKFAKGTTSEDWIFCGEDTGYYSQTIARYLTEKGHFMWLQNPYCIKHSEGGIKRGKNDKADSVSIADYAHRYEDKARKYELPSKVSEELHLLLTRRDAYVRAKRVIQSGAMEIPKRDKQGDTITLIKASNKHLLKEIDDEIERLETRMEEIVAEEDAMQKNYEILRSFPGIGIVNAMCFIAYTDNFKKFGLKSRRIATYWGVAPFGEDSGTSVHKDPHVSHFCNHWLKAILSNAANSSILCNPLIKQYYDRLLKAGKCEGICRNNVKNKIIHIITAMIRKGEKFDPEFNFTNQKAAA

SEQ ID NO: 377637 - protein, 355 aa, unidentified
MNKIKTNFEGQTIFVGMDIHKAHWNLGIHLNDMFVKSVHQKPNPFLMADYLKQHFPGANYKAAYEAGKFGFWIQRQLTKLGIECLVVNPADIPKSQKDTLQKTDPRDARNIGIRLQSGVLHSIHIPDEQQEADRVFFRHRKRIWKDLTRCKNRIKGCLAFSGIDIPEQYDNASWSHNFILWLKSIDCRQISRRSALNYMIAQMEFLRVELLQISNDIRKMMREQRYKTNYYLLRSIPGIGPLTAASLLVEIGDIKRFETFYHLNSFVGLLPMEHSSGEKESKGMLTVRKHRQLRSDLVESAWTAKRTDPAMTLYFQEQVKRKDSKIVIIKIARKLLNRIRYVLINQTAYEYGIVK

SEQ ID NO: 377638 - protein, 348 aa, unidentified
MTFYVGLDVSLEETAICIVDAGGKIHREGKAESDPEAIAIWLGSAAEAYERVGLEAGPLSPWLCEGLLAAGLPALCIETRRMKGATAAMAVKTDRNDARAIAQAMRVGWFTAVHLKTLRSQELRMLLTNRRALLTSRVAIENEIRGTLKAFGLKVGPVKVDAFKDRVIELTADHPRLGKMMRPMLAAREALQLQCEALHAMLLKAVRTDPVCRRLQSVPGVGPVTALAYATAIDDPGRFAHSRDVGAHLGLTPRKYASGEIDRNGSISKSGDRLAREALFLAAHTLLTRVTRWSMLKAWGMALAKRRGLRRATIAVARKLAVIMHRMWVDATDFRSTREENTPVPAAT

SEQ ID NO: 377639 - protein, 337 aa, unidentified
MNCVGIDLHKKTISLCIVNQEREIVDRKRFYCSEPERIVAFFASIKPFQVVVEATASYEWLLALLEPLAERVVLAHPKKMRVIAESTRKSDELDAQILAEFLALDMISESYRPSKRERAHRILVRQRCYLSRRLTSVRNKIRRVLSNYNADREDLFTEKGLAYLSKTSVLEADRFVLDQLTAEWRSYTEQMKEADKRLSSFAKDAPAKEAEARAVLDTIPGVGPVTIDVVISELGDLRRFRSQKRACSYAGLAPGQRESAGRSRQLGITKEGSRLLRWILVQAAWRLTNTTARWRSIFDALVKRRGKKKAIVAIARRLLCVMVSMLQSGRGYKAAMV

SEQ ID NO: 377640 - protein, 349 aa, unidentified
MSMVCGLDLHREQITFDAMEVESGEVWWGRVWQPDRERFRRWLRHDVARRAKGRPVALAVEGCTGWRYVVEEIGAAGFAAHLAEPADTQAARGRKRHAKTDRSDARLLRELLQRGDLPESWIPPMPVLEWRERVRLYKSLVDQRLMWTQRIHAELFQHGLAIPEAAIRSASTRAWLTGDDVNLTPAARPRVRVGYVMIDATDAEAVPLKEQLRHFGVRQPACRPLVEHHYGIGGLLAVAVWSELGDCRRFSRSQQVVRHTGLDVTVDASDLRRARGHLSRQGPATLRWALFEAAHNASRAGSPDHAYDATVKDRHDDKLAAISVARQFARRCHHTLPNLDPDVVYAMPN

SEQ ID NO: 377641 - protein, 345 aa, unidentified
MEYFAAIDVSLELSSVCVVDGTGKIICEKKVASEPEALVAWFNDTGLEFTRIGLEAGPLSQWLHAGLTAAGLSAILIETRHVKAALKAMTVKTDRNDARGMAQLMRMGWFRPVHVKTVPAQEIRALLTGRKLLLGKLRDIELGIRGLLRGFGLKVGRVSKGRYEARIRGLTAGHPMLEPVAAAMLQARMSLRAEYGKLHRMLLGTVRADATCRRLMTVPGVGPVVAMSYKTAVDDPARFRKSRELGPYFGLTPSKYQSGEVDWTGRISKVGDAMVRTALFEAANVMLSRVTRFSTLKAWALRVAKLRGMKRAKVALARKLAVVLHRMWVDGTDFRWRKMPAAAAA

SEQ ID NO: 377642 - protein, 386 aa, unidentified
MQKLNDLSRSPNPLDPDGTLIAVIELSLSSWLVAGMVPGVERQPLKKLAVDENALLKLLNRWREEAAKAGHRIKRIAVAFEAGRDGFWLARWLRARDIEAHVIHASSVAVSREHRRAKTDRLDTELLKRSFLGWLRGERDHCKMVAIPTTQDEDAKRPNREHESLVGEQSRIVNRMKATLIRLGIRGFNPKLKKAAERLDGLRTPEGEPIPPNTLAELRRDMVRRRLVSDQIRQIEDARLERLKQAPSDGPHAMVRLLARVIGVGVETADMLVQEVLSRSMRDRRAIARYAGLTGSPDESGRKRREKGLTRSGNARVRRGMIQLAWRFLMFQKDSTLAQWFRTRTENARGTRKTMIVALARKLLIALWRLVREGVVPDGVVLRPAP

SEQ ID NO: 377643 - protein, 343 aa, unidentified
MKLSRVGVDLAKNVYQLHGVDRSGKAVWKRRLKRHQWLNVLLDKTEPGCVIGMEACASAHHWGRELQCRGYTVKLIPPQFVKPYVKSNKNDARDAEAICEAMSRPNMRFVTVKTVDQQDIQATHRIRAELMTQRTAKANQIRGLVAEYGLVTPKRLSSLRAAIPCWLEDAENGLTGDFRALLQGVWEDLRLLDDRVGEMDQKIKRLADNNEDCVRLQQLRGIGPMTSTAMIATVGDARQYQRSRQMAAAIGITPKQHSSGDRDRLLGISKRGDVYLRTLMIHGARAVVARAKHKDDRLSRWVTNIANKKHPNVAAVALANKTARMAWAILRNKTDYDPDFAIR

SEQ ID NO: 377644 - protein, 445 aa, unidentified
MAKQRGKRKKDAKADATEGLPPLNLHAAGIDVGSAEHYVAVPSDRDAEPVRKFGSFTADLHRMARWLKDCRITTVVMQSTGVYWIALHDVLESHGFEVNVANARHTKTLPGRKTDVQECQWLQKLHTFGLLNNSFRPPEEIRTLRGYLRQRENLVAAAATCIQHMQKALTEMNIQLANVISDISGTTGLAILSDIVRGERDPYKLAMHKHSRIRASRQEIARSLEGTWRQELLFVLEQSLDLYQTYQQKIQTCDERIDGQLRSMEPRIDPMSEPIPEPRRGKDARGHQSGFDLRGQLYRITGVDLTRIDGIEVQNAQTIVSEVGVDMSRWKTEKHFASWLGLCPDNRISGGKVLKRGTRHVVNRASTALRLAALTLLRSQSALGAKFRRLRSKLGAPKAITAMAHMLARLVYRMLKFGHDYVDRGVEFYEAKYQQHQLARKSHED

SEQ ID NO: 377645 - protein, 365 aa, unidentified
MNECTHIGLDVHKDTIAVAVLRPGTTEVDERVVPNTPEAIRRLLTRHDPGLTTLCYEAGPTGYDTHRLIRSLGFDCDVIAPSMIPRRSGARVKTDRIDARNLARLHRAGELTSVRVPGAAEEAVRDLIRVREEVKCDRRVARQRIRSFLMRYGKRYPGPRDAWSHRFEVWARSLSFDEPHAQEAFSHLLGAYFIKDTHLAEMGRRIEEIAGSEPFASDVARLSTLRGISTLSAMTIISETCDFHRFGSAGSYMGFTGLTPSEHSSGASRHQGSITKTGNRHIRRVLVESAWAYRHAPAVRGKLRDRLEGMPPEVAAYSWAAQVRLNRTFRTVSARKGAHTAVVATARELSGFVWGLMTDNLGPAR

SEQ ID NO: 377646 - protein, 301 aa, unidentified
MTITTVGIDLAKNVFAVHGVDQNGKTVLVKPRVSRAALPELIAGLPPCVIGMEACSGAHYWARLFRQYGHEPRLMAAKFVSPYRMAGKSGKNDAADAQAICEAVRRPHMRFVPVKDESQQAMQCLHRTRQGFIEEKTAIYNRLRGLISEFGVIAPQSTDALRHMVSQQKSSLPLQVQQCVDDLLEHVARIEANIAEYDRILSRMAKTDHRSQRLMELKGVGPTTACALVASIGNAHDFKNGRQLAAWLGLTPSQYSSGGKSKLGGITKAGDSYLRTLLVQGARSVLIGAEKRTDSFSRWVC

SEQ ID NO: 377647 - protein, 318 aa, unidentified
MTFSPIGIDIAKAKFDAAALRHGKYKTKVFQNTPEGFRAFLAWLQAFPTPHVCLEATGRYGEGLALFLVDHGLAVSVVNPAQIHAFGQAELSRTKTDKSDAKRIARFCLSQRPLLWQPPPPAVRPLQALVRRLESLLEMRQMEKNRLDGADPTVRPSIEAVLATLDTEIAATQTRIREHIDHDPDLRQRRDLLDTIPGLGDATIPVLLAALGDVHRFENARSVAAFAGLSPKEHQSGKWKGHTRLSKTGDALLRKALYMPAIVAWRHNPLIRAFCERLKAQGKNGKLIVGAAMRKLLVLAYGVLKSGRPFDPNHGLAS

SEQ ID NO: 377648 - protein, 341 aa, unidentified
MNYYAGIDVSLKYSSVCVVDANGKIVREGTVASEPEALIAWFSELKFEVTRIGLEAGPQSQWLYAAMRQAGLTVELLETRHVRDAFKAMPVKTDRKDAQGIAQLMRLGWFRPVHCKSMEAQETRTILGARKLVQSKLHDIEMSLRGTLRGFGLKVGKTTPNRFAARIKELVEGHPTLQAIATSLLAVHAVLLREFKVFEKRVRVMARQDERARLLMSTPGVGVLVALTYVSAIDDPGRFTSSKRAGAHFGLTPKKYQSGETDITGRISKIGDKGVRTALYEAAHIILTKPVKGSGLKSWAARLAKRAGMNKAKVALARKLAVIMHRMLVDKTPFNPAAAAA

SEQ ID NO: 377649 - protein, 387 aa, unidentified
MVFVGIDVSKDSHSCHILSSNGKTLVENLVISNDSDGFNTLNDSLSLMGEEIRVALESTGHYSLNIESFLRNKGYSVTLLNPLMVDKFKKSQTLRKTKTDKSDAKLIATLLFSKTQEATFDVPMEIRELKSLTRNRSRLVKEKSNLKVQISRLLVIIFPEFKTIFSSQHRKSAYALLKIYPNIQEISNANIDKITELLRRTSRGKYSNSKAYEIIELAKKSVGTVSRALSFELQQTIRLVEIYEQEIKIIETEIKTMLDATKSPIATISGVGSTLGSIIISEIGNINRFNSPAKLLAFSGLEPTIYQSGQYSATRSRMVKRGSSYLRWALMQASRTICLTDKTFKDYLAKKRTEGKHYLVALSHVARKLVRVIFYLLKSNKKFIPQH

SEQ ID NO: 377650 - protein, 310 aa, unidentified
MGIIVGCDISKGWIDVERVGAEQQPALRLDNSARAVDCFARELPAGSLVGMEATGEMHELLAGKLVKYGHTVFVVNPRWIHQYAKAIGQRGKTDRSDAALIARFIAAEAANLHSYQPPSREQHELRKLLLRRYTVVKLRAATRQSLGDQAREIVRQFDRILERIERRIAELIKAAPDWRELAQRLRTAPGIGPVVAAHLVQVLTRFPFQKADAFVAHTGLDPRPNDSGQKHGRRRLTHHGDATLRTMLFMGAMSACKRREWRALYDASIQKGLPSTAARVVVARKLARVAFGLFKSGETYDPGRFLSTSG

SEQ ID NO: 377651 - protein, 314 aa, unidentified
MVNVGIDVSKDQLDVAVRPDGEYFKVSNNESGITELIKRLRKLRPERIVLEPTGGYEADVVHAMSVAKLPVVVINARFIRDYAKSIGHRAKTDAIDAGVLARYGEANQPEIRPLKDEHLRELEAHVTRRRQLVDMRSAELKRKLQARPSVRKNVETVIAFLDEQINDVDNDIDKLIQSSDLWRDGDAFLQSTPGVGDVMSRTLLALVPELGTLSRQKISSLVGVAPLNNDSGRRDNRPRRTWGGRAPVRAVLYMAANVASRYNPVIRAFRERLQAKGKPTKVVLVACMRKLLTILNAMLRDRVGWASPKVAEAK

SEQ ID NO: 377652 - protein, 455 aa, unidentified
MPKRTTGGGPDLKPVNLGAAAIDIGSKMHMAAVNPACTDTPVRAFGTFTQDLHELADWFKACGVTSVAMESTGVYWIPVYEILEQRGFAVILVNARYAKNVPGRKTDVSDAAWLRQLHSYGLLRGSFRPDAEIATLRAYLRQRERLVEYAAAHIQHMQKALMEMNLQLHHVVSDITGATGMRIIRAIVAGERNPDVLATYRDVRCHSSIETIRAALVGNDRHEHVFALTQSLELYDAYQAKMLDCDRKLEVLISALNTKGAGPVGKLAKPRVKTKQVNTPTFDVRTALYGVLGVDLTEIHGLGPSLALKLIGECGTDLRAWPSAKHFTSWLCLAPGNKISGGKVLSSRTRRSSSRAAALLRLAATTVGRSETALGAFYRRLSSRAGKSKAVTATARKIAVLFYNTLRHGISYRDPGADQYEQQYRSRVLANLQRRAKSLGFVLQAIPGDANPAVS

SEQ ID NO: 377653 - protein, 357 aa, unidentified
MNDQERGLDFSNQEFYLGIDVHKRSWAVTIRSNNIVLKTLSMDPSPKELSDFMKKRYPNGNYHSVYEAGFSGYGMHRELESLGFRNIIVSPSEIPTTGKEKLTKTDEVDSRKLARELEKGTISGIYIPSQLQQEIRSLSRLRNQQVKKQTRIKNQIKSYLDFYGHKLPKNYEMQHWSRKFIEHLRTLEFNYDIGKEQLEIYVVELLVIRNRILQILILLKKYFRQYEKYHIIELLRTVPGVGFTVATTLYSEIMDIERFSNNEKFASYIGLVPSTMSSGEKKRVLGLSFRFNRYLRSLLIESAWVAIRKDPALTLAYNNFLIRLSAQEAIVRIAKKLLNRIYYVLKNEKEYVYSVAK

SEQ ID NO: 377654 - protein, 437 aa, unidentified
MSDNKASEIRVSVDVGYRRHSVAIGLPSGEVLEEFEIAHRPEGFAEFFSRIETHQRVRDCEVAVAMEGFNGCARPLDAMVRRRGYRLYNINNLKLARFKEIFPGAAKSDRIDARKGLELFQLSDHLPLAKEVLQEVKGTPRENEVLKRLTRRRRRLVDERVRVISNLQTDLQAVCPGLLEITKNAGNQWFLNFLVSAPTLPQLARLRPATLLKVPAVGRKYARLIEDWQKRAHFSEEVEWVSAMIQEDAQRCLDLDEKIKALRAKIKEVAKDSTIVKVLLSIPGFGTICTAELAGEIGTLERFSKEGSLALYIGMSTLDNSSGKYQGSKQPKHVNTRAKAAMMVALDRHRKVVPQSQRYYEKKRSEGKKHNQAIRALGRHLCRIIYKLLKEEREYEIRLEKGNTKGKVSPRSLIKTQMRKPKISAKGKNNKIYQQST

SEQ ID NO: 377655 - protein, 416 aa, unidentified
MKQWPDITHYAGFDWAKDHHAVVIVNSEGRIVADFEFEHSLEGWKSFVEKTSAWPNLGVAIETSQGAAVDQLLQREYTVYPVHPVAAQSYRERKAPTGTKTDHIDGWGLGDALRVDGHGWRPLQPMDPITQQLRLLCRDEVVLIEQRTALVNQLQQALAEYYPAALEAFDDWTDAFTWEFILAFPTPQALVEAGKRRWEKFLHTHKLWRPGTAEKRLKLFAQADQFKGSEPIARAKSQLAVSLAKLLCTLGQQLKLYRKQIEALFRDHPDHDLFGSLPGAKKVLAPRLLAAVGGDPDRYGSHEVLQCIAGTAPVSFQSGKLNKVRVRWACDKFMRYTMHLWADCFRKASAWGQTYYEQKRQEGMTHACALRCLGQRLLKILFRMIATKTPYNAELHARNQQKHGSWVLRLAKKPAA

SEQ ID NO: 377656 - protein, 312 aa, unidentified
MVVIAGIDVSKDKLDIHVLPSNQTFVVGRDRRGLTSLVRRLRKAGVEQVALEASGDYERIVIEALEAAGFVVHLLNPARVRAFGEAIGILAKTDPIDARLIALYCQHFPDKGLTRRPEQARKLGEFLNMRAMLLKVAGEIRNSLEHVREPGLKALADTLSADIAVKLKDVDGRIAKVIADDGATIRKARIIRSFTGAGPVLTSSLLARVPELGSVTRHAAARLSGIAPTDRQSGRSQRRSSIEGGRDQLRPVLHMAALAAMRSNSIIKAFAQKLSAAGKPKQLVIAACARKMVVILNAMLRDDTEWKYAKAA

SEQ ID NO: 377657 - protein, 455 aa, unidentified
MTSIRFVGLDVHRESVRACVRDPENRIVAEQSFGCTREALETFARTHLSKQDAVALEATFHTWAIVDVLAPFVGRVVVSNPLATKAIAESKVKTDKVDARVLSELLRCDYLPEVWTPDAATRERRSMCARRAGLVSDLVRTKNRIHSVLAKALVPKPKGELFDGKGRAWLATLDLPEPARLQIQSDLRILALAEAELEAHDRELVRRAWADPRVKLLITMPGVDVTVALAILAAVGDIARFRDGDHLAAYLGLVPSIRQSGAHCYLGSITKRGNGKARWLLIQAAQHLAGHPGPLGVFFRRLAHRKNRNVAVVATARKLAVIAWRMLKGNEPYRYAQPKPTQDKLARLRIRATGARRKGGLAKGTARPAAYGTGQRTRTTRALPRLYAAEGLPEALGPERLKAAEQRILRQMGVEDFVGAIQSDIVEPRPHKRAAGNQPSAVTSEGGQNATKSAG

SEQ ID NO: 377658 - protein, 409 aa, unidentified
MKRYYIGVDWGDRLHQVCVCDEQGNKAKEIQVAETAQDLAEMGRWLDEKRVEGCELWAAIEKPTGRVVDFLLDHGVAVYPVNPKAVDRVRDRYRMSDSKSDLFDAYVLAEFVRTDQAHLKVLQPSSEQAQELKLLCRDYRRMVRHKTRLLNQLITTLKEYYPRALEAFGDIDTEVALDFLTQYRTPAHLSALKRRAFHRFATQQHHLSKERCEELWNKLIPAQLPVPEHVIRAKAQLTEVLIDQLRAAIKAVKTYEHKVERFFASSPVALIAKTLPGAKSGTVVATIWAELGDATGRWESFHHLQAQAGVVPVTKASGKSRVVHFRFACNKELRYALYWFAFNSLNRSQWAKTYYRKQRAKGHHHPQALRALGAKWLKIIFVMWRDHKPYDEKLHLANVALQNMRQNAA

SEQ ID NO: 377659 - protein, 315 aa, unidentified
MTAIIPRTLGIDISKDRLDVHLLPEGTERQYANDASGLRELIRWLAPLAPARIVYEATGAYHRLLERTLGAKGLPLVKMNPQRTRAFAKAAGRLSKTDRIDAAMLAHFGALMAPQIRPIRSDALDALCELVAARRALIKDRTATLNRQKSLTIPLLKRQAEQRLKQIAAQITAIDTECRTHIASEPGLRRRFDILTSIPGLGEASAFAIVADMPELGALENKQAASLAGLAPVDRQSGQWKGKSFIQGGRQMLRQALYMPALVATRFNQPLKAKYESLRAGGKPAKVAITAIMRKLVVLANALIRDDRKWSPDIP

SEQ ID NO: 377660 - protein, 322 aa, unidentified
MKYIGIDVSKATFVVAYSSDKGGEIRTFNNTTTGIKQFIGALPKDGSIHCVMEATGNYSALLLYMLNVAGITVSMENPLKIKNFARAMLSTVKTDKIDARLIALYGEKMNPQPFKIQGEAILRLRQKRTVIRQLTKQITAMSNLRGSLACLPVPDKGATHTVDETIEFLEKRRDRLQSELTDLVEVEFSRQLALLTTIKGIGITLATALIITTGGFTYFQNAKQVSRYLGICPTYEQSGTSVNIRGHINRNGDAYTRGLLYVAAWTASRFNTKCGETYTRLRQNGKPGKLAMIAVANKLIRQAFAVVTHDKEYVDGFVSNRP

SEQ ID NO: 377661 - protein, 418 aa, unidentified
MHNYAKTLFVGADVGLDSVDICFLDYMGNKLFPKRLVYPNNLPGSQELTEQIAKTMSHHDLDAIMFGIEATSFLGWHLEVAILQSPILWKFKPSVFCFNPAQVKAHKKALGIYPKSDPIDAFAVADRLRCGKLPKPAAFNFPYIALQRLTRLRFHLADYMAREKNIFLSVLFLKFSSLRQSDIFSNTFGAASLAVINDFLTVDELAARPLPDLIDFLMDKGKSHFEDPASIAKQLKDAASKAYRLHSDLQKPVNFALKTTAENIRFYSKQMTIVDKQIKKQIAVFDNPLISIRGIGPVFSAGLIAEIGDITRFKDDNALAKYAGLTWQFSKSGRNQRADDTSITRSGNAYLRYYMTESANLVKQFVPEYIAYYQQKHNESKTHKHRRALVFTARKLVRLVFALLRDNKNYSPKFRRCN

SEQ ID NO: 377662 - protein, 375 aa, unidentified
MGERNTTEVGLDTSKNSIQVAMLLPGSERAVEWEIANEPRAVRRMAKRLKDEAAGELRVCYEAGPCGYVLQRHLRSLDVNCVVVAPSLIPVKPGERVKTNRRDAKKLAVMLRAGALTEVHPPTPEEESVRDLCRCRDDIREDLIRARHRLGKMLLRRGWIYSGKSWNGAHRRWLRNLALEHESDRAVFDDYLRAIEHLEERLCAIEITMEATSHREPYREPVAWLRCLRGIDTVTAMSLVAELHDFGRFQSARELMSYLGLVPSENSTGDRQRRGAITKTGNKQARRLLIEASWHYRHKPAVGKKLRQRRQGQPGWVIALADRAQARLHRRYWRLVMHGKAHNKAVTAVARELSGFLWAVLREHRVAKVSRATVG

SEQ ID NO: 377663 - protein, 424 aa, unidentified
MRAIGIDVHRDFCEVAISEGGQLRSAGRVPSTPEELELLAASLARDDEVALETTGNALAIARILAPHVGRVVVASARELHAISDAKAKTDRRDARTLAKLLAAGMLQGTWLPDEETRALRRRLARRAQLVRQRGRLKNEIHATLYRNLKGAGPASDLFGAAGRRWLAELELPGDERETVEGCLRVLDFLDGEVANLERALAAQALDSPEIRRLVTIPGVNLITAATLVAVIGDVGRFASARKLVGYLGLDPRVRQSGSSPARMGRISKEGAAAARHVLCEAAQAAMRTPGPLRAFGQRVGGRRGHQVAVVAVARKLASLAWRLLTSGQDYAYANPARVRLKLRRIELLAGAPRQRGRQSGATRSGERERELALAAERAYQRLVADRQAGGSPRKGAGAASGRASRKAHAGPGSAADPKPQRSAL

SEQ ID NO: 377664 - protein, 333 aa, unidentified
MIASSPLPALPRLGIDISKLTFDVHLCTPGGRTHSAQFANNQEGFALLDSWLTQHRAAKTRAGLEATGPYGVLLLWHLHTQGHTVYQLNPRRVKDYARSQGRRVKTDAVDAAVIAAYLRACEDLKPWAPASQALQDLQDLVRRRDQVIISLNAERNRKEKGTSKVVIASLDRLIKNLKAEVSKLDEAIEAHVLKHTALQKCVRLLRSIDGVGRLVAVTILAEVPQISAFERARDVAAFAGLTPSLSQSGTSVRRRGAMTKEGSALLRKMLYMAALQAVKRTNNTFHSCYNAFVERGKSKMCALGAIMHKIIRVAFGVLKHDSPFVKNFAKVEA

SEQ ID NO: 377665 - protein, 352 aa, unidentified
MQRFIGLDAHGQSCTLCVMGPSGKRLGHHVVETNGKALVERIRSIAGERHVCMEEGTQSEWLHEILQAHAQRIVVTQPLRREGNKSDEIDGWSLADLLRKDAVERSVFKSPQVFTTLRQAARGYVVVQSDMVRAKCRLNALYRSRGMTPNAEIYDEQRRDPWLRKLPASHRLLAELLSEQLDGLIQAHQGAETWLLEEAKRIPATRRLATAPGIGPIRSALLVAIVVTPARFRTTRQFWSYSGLAIVTRSSSDWVRENGRWARKPVAQTRGLNRNRQPLLKALFKGAATTVIQQMPKHPLHQDYQRMITEGNIKPNLAKVTLARRIAATTLAMWKHQEDYDPSKQKRAPLSH

SEQ ID NO: 377666 - protein, 438 aa, unidentified
MKVMHERVAGIDVHKKMIKVAIRSPGDKPWTRKTEILTFRTFYGVLREMARELRARGVTHVVMEASGVYTEPVYYALLEEDFTEVLVVNPAHVKALKGHKTDAKDCARLAELLECGLLQGSYIPAAELKEVRDLTRYRSKTVQARTSEIQRLDKTLESAGIKLGSVASDITGKGPAAMIEALIDGERRGKVMADLAKGRARAAGKLADLSMALEGRFTEHHALMCRLILDRIRVHDTAIGGLDKQIAGLAAVWQREIDLLKTIPGFGDVVAWTWIAEIGPAPHQWFGSHEKLASWVSLAPGNYISAGKRKHSRTGDAGTYIKPVLVQAAWAAIRVRGRLQARYNRLVRRFGGPKNPAAKKKAIVAIAHTLLKIAYSVLKSGTPYQDLGEDFYTRRETPAQRQAWLERQIQKLHPGCTVTITISPPPGHAPEAALTPGA

SEQ ID NO: 377667 - protein, 345 aa, unidentified
MKKLIKQVLGIDVAQNELVVCLAKKYDDCSEDNYVHKTFVNTAKGFEQMRGWVKKSTDISVEVNYVMEATGVYHESLAYYLRDQAELVSIVLPNKISHYAKTLTVKTITDKTASQAIAQFGLERTTDQWEKPDPVYKKMKQLTRERGQIVMERTMVKNELHAEKAEAQPNKSSVTRCNKRIELLTKQEKEIIIEIAALIKTQDRVNNLVKLLCSITGIGMLTAATILAETNGFDLIRNKRQLTSYAGLDVKDHQSGTSVKGKAKISKRGNRFLRKAMHLPALAAIRHDERFKAVFVRLVGKHGIKMKAAVAVQRKLLEMTYTIYKSNKKYDKKYLQNNAAILTEI

SEQ ID NO: 377668 - protein, 343 aa, unidentified
MQAVTTIGLDIAKSVFQVHGIDAEGNVLIRRQLKRRYVLSFFQKLPPCLVGIEACATSHHWSRELKGLGHNVRLMPPAYVKPYVKRQKNDAADAEAICEAVTRASMRFVETKTPEQQSCLMLHRTRQLFIRQQTSVINAIRAHMAEFGVVAPVGRQGVEALLEAVADVGDNRVPEVARACLAALGAQLRMLKAQILEFDRRILAWHRSNETSRRLDAIPGIGPALATALVASVANPKAFRSGRNFSAWNGLVPKQHSSGGKDKLGGISKQGDRYLRSLFTAGALAVIRYAKLHGTQHRPWLTALLARKPTKVAAIALANKLARMACAMMARGERYREPVALAA

SEQ ID NO: 377669 - protein, 338 aa, unidentified
MAIVMGLDQHRAQITADWLDTETGEVLRRRISPAHRAGVRRFCEQFRGQELEVALEATTGWRFVAEEFRRVGAGVHLAEPAETAARRGNKKRAKSDRADARHVRELLMIGRLPESWIASDHILDLRARVRLRHTLSHQRGEWQQRIQAVLYHHGCPQRSNLMTSEGRSWLAAQPLPAAAREQISVELSMIDALERQLAPLDKELRAYARRQAGCKALMGQFGVGELTAVTILAELGDVRRFSSSRNAVRYAGLDITVHQSDQRRAAGHLSRRGPPALRWALFEATLCASRAGSPDHEYYAQAAERLGSNRARLSVARKLLKRSYHLLRELGEEALQPA

SEQ ID NO: 377670 - protein, 320 aa, unidentified
MTNLNVFSGFDVSKDYFDFFTIDDQGKSIGQRVVYTREGLKSLARLIPAQSHCVMEATGPYYLKLATWLYQNGYAVSVVNPLVIRRFCQMKLVRAKTDKADARMIALYAKSEKPALWQPPAPYIVKLQQLDALVELFTKNRTALMNQLHAFEVTGIGDPFACSLLKKTIADVTKKMEKIEVEITAVIGAHYKEMLENLKSIPGIGKRSAVALIVASDGFKRFDNYKKFSSYLGICPRIYESGSSVRGRSRICKLGMSRIRAILYVCAWSAKKGNLACKQLYDRLVEKGKSKRLALIAVANKLVKQAFAIAKSGIKYQPVG

SEQ ID NO: 377671 - protein, 385 aa, unidentified
MQKCNDLSRSPNSLDPDGTLIAVIELSLSSWLVAGIVPGVERQPLKKLAVDESALLKLLHRWREEAAKAGYRIKRIAVAFEAGRDGFWLARWLSARDIEAHVIHASSVAVSREHRRAKTDRLDTELLKRSFLGWLRGERDHCKMVAIPTTKDEDAKRPNREHESLVGEQSRIVNRMKAALIRLGIRGFNPKLKKAAERLDGLRTPEGEPIPPNTLAELRRDMVRRRLISDQIRQIEDARLARLKQAPNNEPHAMVRLLARVVGVGVETADMLVQEVLSRSMRDRRAVARYAGLTGSPDESGRRRREKGLSRSGNARVRRGMIQLAWRFLMFQKDSTLAQWFRARTESARGTRKTMIVALARKLLIALWRLVREGVVPDGVVLRPA

SEQ ID NO: 377672 - protein, 447 aa, unidentified
MPVIHQNAAGIDIGSQFHVVAVPPDRTDKPVRTFKSFTGELHAMAKWLKKCRVDTIAMESTGVYWIPAFEILESYGFEVFLVNARAAKTVPGRKTDVNDAQWLQKLHQFGLLQASFQPSQKIAGLRAYLRQREKLLEYKAAHIQHMQKAMMQMNIQLQHVVTDVTGKTGLAIIRAIVQGQNDPNELVKLRDPHCKNSLEVMTAALTGSYKPEHLFALTQALELIDFYVEKIEACDRVIESTLKQLQQENDSTSPPPTLQKARGRESSKNNPSFDVRQSLFSFIGIDLTQIHGIGSSVALKLVAECGTDMTKWPTSKHFTSWLCLAPCNKISGGKILSSRTRRSSSKVATMLRLAAVVVGKTNTALGAAYRRYAARIGKAKAVTAIARKLAILFYNALRYGMAYVDKGANYYEEQYQKKVINNLHRKADALGYTLQKKALSISAAGVT

SEQ ID NO: 377673 - protein, 307 aa, unidentified
MDVIIDKGCGLDVHKETEVACVMGEGIKKEIRTFSTMTEDLFRLKSWLADKGITHVAMESTGPYWKPVFNVLEDSFEVILANARHIKNVPGRKTDVKDSEWICRLLRSGLLAASFVPPKAIRELRDLTRYRRKLTQAISSEKNRVQKVLEDANVKISSVVSDTFGVSASRMIEAILAGNHNTEAISDLAVGKLKGKKEELKKALVGNFQEHRRFMIRASLDHIETLEKIIAGLDQEINRKLKDYHKEYELLQTIPGVKEQGAASIIAEIGSDMGRFPSEGHLSTWAGMIPGNNESAGKKKRKDDARQ

SEQ ID NO: 377674 - protein, 427 aa, unidentified
MKYTQNEKILQVTEDTLIAGVDIAKESHYARAFDYRGVEYGKYLRFENNREGMTKFFRWAKDLMERHKKNKLIVGIEPTGQYWLCFAQYLKDNNIKVVLVNPFHVKRSKELDDNSPTKSDKKDPKTIAMLVKDGRYVEPTIPEGVYAELRVAMDIKDRLNKQIGMTKNQITRWMDIYFPEFNTVFSDWEGKAALITLREFPTPEKIAKKSAEEIISIWKKEVQRGVGEKRAIKLIETAKESIGKKQGIKMAEYEIKTLIEQYEFLKKQIEEIEKKMEELIVEIPGVKELLEIKGIGVNTVAGFIAEVGDIEKYEHPKQIQKLGGLNLVGNSSGKYKGETTISKRGRKRLRRVLFTAVMALVAKNEEFRELHKYYTTRAQNPLKKKQSLIVLCNKLIRIFYVILKKGVKYDPIKMIKDIKRPLLQEAA

SEQ ID NO: 377675 - protein, 389 aa, unidentified
MLHDHLSDGPAAIRTQFGAIFVSLELSRSNWLVTSLSPGKGEKMSKHSITAGDVAGLLKLFADLKRKAMARTGQSYPIITIQEAGLDGFWLHRALQQEGIESHVVDPASIATPRRHRRAKTDRLDGETLLRALLAYKRGEPRVCAMVVAPSPEEEDRRRLCRERRTLIDERIAHVNRIKGLLFAQGISGYAPLRRDRRARLEALRTGDGRALPSYLKTQISRELDRLELLLDQIKAVEAEQDALLAAAGKGAGEQAAPDPVTMLLALKGMGANFTAVLWSEAFYRQFSNRRQLAAYAGLAPTPWRSGSIEQEQGVSKAGNPRLRSTMIQLAWLWLRHQGQSALARWFKAHSQRGRKTAIVALARKLLVALWKYVTAGVVIEGAVMKSAA

SEQ ID NO: 377676 - protein, 344 aa, unidentified
MSTIRVVGIDIAKSVFQVCVWMVDGSVARNKKISRSKLLDTIRQFEPGTLVAMEACATSHFWGRTFASMGYCVRLIPAQHVKAFVHSQKNDANDALAICETAFRPGIHFVSVKTTEQQDIKALRNTRQLMVEQRTALANQLRSLLAEYGFTIPVGILRLQQQLPELIEDASNSLTFTLRRLLSSLREDMQALNERITSLDSEIATLSSQQIAYHHLLTIPGVGPLIAAAFISEVDATQFSSGRELSAWCGLVPRQHSSGGKQRLSSVTKNGNRSLRTLIIHGARSVMRCVKKRDDSLSIWLQRLEARRGFLKTTVALANKLTRIIWHVLTDGIDFNMQKAVAIN

SEQ ID NO: 377677 - protein, 325 aa, unidentified
MSLPCLGIDVSKRKLWVALLIDPAKKPKRKTVSNDPQGYEALLKWLAYHRVEWVHACMEATSTYAHGVARFLYEQGHTVTIANPKQVKAYGESLLVRTKNDHMDAAIIAQFCAERRPHPWTPPSPEVEALQALARRLDTLNSMLTAERNRLETTPPSLLDDITSHVEFLNQQKQAVLEKINQHIDQHDGLKHQRDLMISIPGIGETTAAVLLAEIGDISCYKSARQIAAHAGLTPKEHTSGTSIHKKTRLSKIGNARLRRALYMPALAAITWNPAIQQFRQRLLDAGKCKMQVVGAIMHKLIRFVFGVLHSNKPFDLDIALAKQA

SEQ ID NO: 377678 - protein, 407 aa, unidentified
MDVVHLKCAGLDVHAQTVVACARLGSGKAVAYDRRTFGTTTPELLALSDWLTAHGCTHVAMESSGIYWKPVWHVLDGHFELVLANAMHIRNSPGRKSDVNDATWIADLLAHGLIRSSFVPPPSVQELRDLTRTRKQLVREIAQHTLRIQKTLETANVKLTSVLADILGVSGRAILTALIAGETQPERLAALASDQVKASRAELVAALHGRLTDHHRFMLRLHLDQIASLDVAVRDVEARLGETLAPFRAAVDHLITMPGVSETVARVIVAEIGFDMTRFPSAAHLVSWAGLCPRLHESAGKRLSNRTRSSNPWLKTTLVQAAWAAARKKDSYFRAQFLRIKSRRGPKKAVLAVAASMLTAAYHMLRNGAVYRDLGADHFDRHDKAKLAKRLIARLHDLGLVVDVRAA

SEQ ID NO: 377679 - protein, 369 aa, unidentified
MTTSVALLTGPIHLGLDTSKNSIAVGILRPDEVSPDTEKIFNDEASVRRLIDRFADRSVLRVCYEAGPTGFGLYRLLASMGVACEVVAPSLVPRSPGDRVKTDRRDCRRLARLHRAGELTAIRVPTPQEEAVRDLCRARADMVADRTRARHRLSKFLLRHDRIWRDGDAWTVKHERWLTGQRFDDAALRATYGHYRAVLVGRDAELAAAEADLAHWYTHGPFTDAVARLAAYRGVAQLAALTIAGEVGDWRRFPTARTFMGFTGLVPSEYSSGDSVHRGRITKAGNAHLRTQLIESAWSYQHRANLGPVLRRRQQHAGPGTVARSWTAQQRLCARYRRLAARKTSRNVVTVAIARELAGFLWAEMTATD

SEQ ID NO: 377680 - protein, 346 aa, unidentified
MKINRVGVDLAKNVFQLHGADHRGKTVWKRRLSRGKWLTVLCDTVEPGTEIGMEACAGAHHWARQLMQRDYPVKIIPPQFVKPFIKSNKNDANDAQAICEAMSRPNMHPVKVKTVEQQDLQAMHRIRDEIKSHRIAKANQIRGLVTEYGLVAPQQLPALRRAIPDWLEDAENGLSFLFRQLLQGLWGDLSVLDKRMAELDRQIAVIAQEDPTARRLQQLRGVGPLIATALVATVGDGKQYRNGRDMAAALGLTPRQHSSGGKDRLLGISKRGDAYLRCLLVHGARSAVRTAKDKEDRLSRWIIDLQSRRHANVVAVAMANKMARMAWVMMTRGVDYDPDLAAASVS

SEQ ID NO: 377681 - protein, 338 aa, unidentified
MNIKLLGIDLAKNVFQLCGVDVQGHTVYSRRVRRDDLLSTIAQIPVCTIVVEACAGCFFWQRHFERLGHAVRIISPQYVKPYRKYQKNDSNDAEAICIAAQQRHMPFVPARSIEQQDIQTLHRARQRLVNHRTAVSSQMRGFLRDRGLVFPASLANTRKRIPQLLEDGENDLTPMARETLAELYDFLREIDHRIAVFDQRIEAVFRASSDAQRIAHIEGVGPKIATAVIAAVADGREFCNGRHMAAWLGLVPRQHSSGDRVQLMGITKRGDQHLRTLIVHGARAVVRTAAKKTDPKSQWVNELKQRRGFNKAVVAVANKNARTIWAVLRRGDEYRKAA

SEQ ID NO: 377682 - protein, 349 aa, unidentified
MSNLKQYVGLDVSLAETSIVVIDDSDKVLWRGSTPSTPDAIAEALRKHAAHAERVGLEAGQLSAWLYHGLKAKGWPIVCIDARHAKAALSLRLNKTDTNDALGLAQLMRVGWYREATVKGHDCQALRALLVVRAQLVSQITTLKNCVRGILKTFGRVLPRKLCASYITSVREIAEGDAVLEPIVMPMLKTIAATMEQLQVYDRAVHRIAREDETARHLMTAPGVGPIVVLAYITGVETPARFTRSSAVGAYFGMTPRRYQSGEVDKAGRISKCGDGLVRGLLYEAAKVLLSRSAKPSDLQAWGRGLMRRIGRKKATTAVARKLSVILHRMWTTGEPFRWTAVPTAAAMA

SEQ ID NO: 377683 - protein, 420 aa, unidentified
MRAVALDVHRDFCEVAIVADGQLRSAGRIQTRPEALELFAQSLDARDWVALEVTGNAWEIARILEGHVARVIVVSLTDTGIRQARAKTDRLDARALAKLLWAGELDGVWTPDERIRAMRRRLARRAQLVRARTRAKNEIHAVLMRCLKDHPPASDLFGVKGRRWLAEQQLPICECETVESALRQVGFLDSEIAEVEKLIAADALGWPEIKRLMTVPGVNVIVAATFMAAVGDIRRFGDRRKLTAYLGLDPRVRQSGNAPANHGHISKQGSASARHALVEACWSTVRQPGPIAGFYQRIKARRGHSIAIVAAARKLACLFWCLLTREEDYAFAQPSLTKKKMRRLELTAGAPRWQGGRHVWSTNDAMRQAERELALQAQRAYERTIKDRQQKGASATPGRASQGSWKEHVARQTSRPTSAL

SEQ ID NO: 377684 - protein, 417 aa, unidentified
MTANSLMQRRSVIKPDTLVVGIDVAKFNHVARTLVPGGVIGRPFEFPNSREGFVALAAEIEARKPTPATAVIVGLESTGVYWINLARWLTEQGYQVVQVSGLYVHHAKELADNSRGTSDGKDALLIADLVAQGKYLGFVRPAGVLADLRQLVGLRQRLVRERAARYNLLHQSVDLLFPEFPTVFKDVTGSGTRRVLRRFPTPAAALAHPPDEMRRLLAEGGPIRAGVAKLARLQVAAQQSVGASEGTAGMEYALNDTLLELDSLDTRVKQVEAEINRLLLQVDETPILTSVVGSMTAAVILGETGGLRQYSCAAAVLKLAGLNLYQISSGQYCGDRHISQMGRPLLRQTLYLAVLQHTHPGMPLYPYYAEMLRRGKPKPVALIALCCRLVRLLYALVRDGRCYSPQPPDKNQQTQAA

SEQ ID NO: 377685 - protein, 343 aa, unidentified
MNISRIGIDLAKNVFQLHGVDRRGKVVWKRRLKRDQWLKAVMDHAEPGCEMGMEACGGAHHWARELEARGFTVRLIAPQFVKPYVKSNKNDANDAEAICEAMSRPNMRFVTIKSVAQQDIQATHRIRSELMTQRTAKSNQIRGLVAEYGLVAPLTLRALRAAIPCWLEHADNGLTDNFRSLLHGLHADLVALDDRLLELDRQIEQLANNNEVTRRLQQLRGVGPMVATALVATVGNAKQYHRGRQMAAAIGLTPRQHSSGGKDRLLGISKRGDVYLRTLLIHGARSVVSQAKHKDDRLSRWVTSIAIRRHPNVAAVALANKTARMAWAMLRNETDYDPDFAIS

SEQ ID NO: 377686 - protein, 391 aa, unidentified
MSMYFIGIDISKYKHDCCIISAADQKVVSKVTIKNNKAGFNELLTIIHSLANPADIRIGFESTSHYALNLELFLENSLLTFMEVNPVLISEYKKSKTLRRTKTDSVDCESIARWLMTVEYKPHSKGFYHAYSLKSLTRLRDKLIRQRSFYLVKITNVLDHTFPEFKPFFNERLSKTALYLLENYGSAGKMARMNSASYEKLRSLSRGKFSPQQFLRLKELAANTVGVNNSIFDVELNSLLSLYKSLVKEINTIEKEINKLIEEVHPHYMSVPGIGPLSAAVIYSEYGDISNFTNPGQMLAFAGIEPGINESGTESHGGKMVKRGSSQLRYTLINCCLPLIRFDMTFATYYAKKRGEGKPHRVAITHVAKKLIRVIYALERQDIDFNAQKLR

SEQ ID NO: 377687 - protein, 355 aa, unidentified
MERYIGMDVHAASCTLAVISEKGRRLKDFPVETNGQALVEAVRMIPGHKHLVMEEGLQSAWLYETLSPHVDELVVAGITTSRGPKSDKRDAYGLAEKLRVGNLDKYVFKAPRQFTRLREFSRTHMTLVTDVIRTQSRIKSMYRSRGVLVAGVDVYSSRRREEWLEQLPSSTKMRAARLYSHFDFLLDQKKQAEGDLLREANKHPIVKTLETAPGFGPIRAARLVPIVITPHRFRTKRQFWSYCGLGIVTRSSSDWVQTADGAWIKSRVPQTRGLSRQHNHFLKSIFKGAATTVVTQRNKDPIHARYERLLEGGTKPTLAKLSLARMIAATVLRMWKNEEEYDPGRAGLPTQTRKG

SEQ ID NO: 377688 - protein, 468 aa, unidentified
MSNHLAGRNGWQGVAAAQAELRQADPERVLISAWDIGKDVHLWFVRTLAGEVLVAPSKVASLASGYQQMRQALDELLASGRFDLAVFGHEPTGVYHEALSQNLLQDYQAHCCGKALPVVRYRWLNPALVKQERQRSTQRRRKSDKIDVAAISQLLGDGQGYPAPALTPAESALRLTLRHVQHLVKRQRRLAIGLLRTLDRLWPGALGDARAYQRTHPDLPLLLHLVDSHPLQRQRVRVLLEHCPDPYQLRTLGVAGIRSLFNDHGERCGLQTAQHIFAVAQQSLLPLPSVCALLAGQVQADFVQFQQLEAQIAAGEAQAQALLPATCGQVLTTLPGVGPAQATRYLAGLGDPDRFATARQVWAYAGFDPSQADSGNRRHDGAISHRGSPYLRSTLYQIGYLTALHCPDCTRLYVQARQRGLAKTLAIIHVANKANRILLALLKTQEPYRSPLSAAEADHWRSLLPQVR

SEQ ID NO: 377689 - protein, 353 aa, unidentified
MGPKHQKEKRSMDYFAGLDVSVKDTSVCIVDDAGKIVREVKVGSEPAALLAVLRNPAYHFRRIGLEAGPLSQWLFSALAEADLPVICVETRHMRAVLKAQINKTDRNDARGIAQMMRVGLYRPVHVKTLRSQKLRMLLTHRKLLQAKAIAVENDLRATLRNFGLKVGVVGAVKFEMRIKELIENFPDLVALVEPLLVVRRVLREQISILHRRVLAAVRNDEVCRRLMTTPGVGPVVALTYRATVDVPARFRKSKSVGAVFGLTPARDQSGERDHPGAISRCGDEMMRVMLYEAAQSMLRSKKWSWLKAWAMQIARRRGMKKAIVALARRLAVIMHRIWVDGTEFRWTREAAAA

SEQ ID NO: 377690 - protein, 428 aa, unidentified
MPYKIAEIDVHKRMLAVVVSDVEVDGEYAFERRQFGSNPAQLRLLADWLLEQQIEEVVMESTAQYWKPVWAALERYWTPTCKKREGAGAMSGTQHLAQAQSNRARQGRKNDFADAERLVKRLVANELTLSFVLDPEQRLWRTVTRTKYQLTRNRVQLQNRLEALLEECHIKLSSLVSDLLGVSARRMVKALADGETDPAALAALANYHLRATQEQLRDALGACQELNPVYRRLLKLALEELQLIEKQISQLDQEIADLLRPYQDQVQRLAEVPGLGVDSAQQIIAEVGPIAATFPSAGNLSSWVGACPGDDESAGVSHSHRSPKGNRQMRRLLNQAANAAVKYKGGIFEILYRRYVPRLGHKQTIGVIAHRLCRLIWKILYQGVRYEERGPDVRKKSQRYRAARMIRELQSLGYRVEQANSQSADVPA

SEQ ID NO: 377691 - protein, 340 aa, unidentified
MGEITTIGLDLAKNIFQVHGVDETGTAVLIKRLRRSQVIAFFAGLPPCLVGMEACATAHHWARELTKLGHEVRLMPPQYVKAYVKLNKNDAADAAAICEAVKRPSMRFVPAKTIEQQSALLMHRARDLLIRQRTMLVNALRGHMAEFGLIEAQGLHKVAGLIAVVMDDRDERIPQMARQALKMITGQINELQTRIAILEKQVLAWHKNNPVSQRLATIPGIGPIIATAIAATVPDPNVFRSGREFAAWLGLVPRQSSTGGKARLGGISKRGDGYLRRLLVNSAHTVLLCSKAAKVDPWLISLRGRKPRLVVAVALANKTARVAWAVMSRQDTYRCAAVAA

SEQ ID NO: 377692 - protein, 341 aa, unidentified
MNQKYLIGVDISKKKGDSALITDGLSVLSEKVVQNTDVKWERYLMTVLKKNKIARENLLVCCENTGIYSNPLKRVCHKLGIALWVEHALKIKRASTDMRGKTDRQDALRIAEYACRYRDKAVIYQPEKPLVRALQHQVKIRETLIEKKVAMENQLREAKSHDPELYKALVKGYRTVLKTINAAIKKAEAEIEGLAAQDEEISTNEALLRSIPGIGAQTALRFIIRTDNFRNFSSAKHLACYAGVVPFANESGTIIKRQRISKMADKNLKQLLHMAAMAAIRSKGELQDYYKRKVAEGKNKMSVLNAVRNKLVHRIFAVILRQTPYQRENYFSIKNEISLAC

SEQ ID NO: 377693 - protein, 354 aa, unidentified
MAKCMMIGCDLHDKSMLLKAVVDHGKPWVKTWGTSPSARRKMIATLKGQANRQEVVRIVFAYEACGFGFLLYDELVAAGIECYVVAPSKMPRSAHSHRRKTDEQDAQAILDALRSFVLAGVPLPSIWVPSLQARADRELVRRRLTVAEDLSASKTRVRWLLKQHGIEGAPAEPWTQAYWRWLEGLATGPLAGGAGASLASLMRHVRWLVQERSVLDEKIIELAQTARHASVVKALCRREGVGLLTAMVFLTELGDLRRFRNRREVGSFLGLTPASHESGQDCDHKGHITHQGPARVRKVLCQAVWSRLRVDSSEQLAYQRLVSRNPRHKKIAVVARMRVLAIQMWHDGLAARAA

SEQ ID NO: 377694 - protein, 421 aa, unidentified
MKSASNTPIITTLPEEPRNDVTAGLDWARDDHAVSVVNGRGREVARCTVAHTATGLRELVGFLDRHGVGEVAIERPDGPVVDTLLGAGVTVVVISPNQVKNLRGRYGSAGNKDDRFDAFVLADTLRTDRARLRPLVPDTDATVALRRACRARKDLVNHRVAVANQLRAHLRNVLPAAVGLFKDLESAISLAFLTRFDTQDKINWLTPKRLGDWLAKQGYSGKADPAVLHQRILDAAPGATGTHGVTQAHITASYVALLHTLVAQIKALSTQIDRQLDAHADSHIFTSLPRSGRVRAARLLAEIGDCRARFPSPESLTCLAGAAPSTRQSGKSRIVGFRWSCDKQLRDAVTDFAGDSRHANPWAADLYNRAIARGHDHPHAVRILARAWLHIIWHCWHDNLAYDPNKHRALQLLLTQQKAAA

SEQ ID NO: 377695 - protein, 447 aa, unidentified
MEVVYERCAGIDIHKKMVQVCCITSDERGQRHKEQRRFATKTQDLLDLSTWLKAQGCTHVAMESTGVYWKPVYNILEGEFEMLVVNAHHLKTVPGRKTDVNDAEWIADLLQHGLLKASFIPSAPQRELRELTRYRVSLVEERTRTVNRLQKTLEDTNLKLGDVVSDVLGKAARSILEAVRDGESDAKRLAGLAQGRVRTAPEELERALVGHVTVHHRFMLGEHLRHIDEVDASITRVTQEIGGRLLLPDPPPEGDHGNEEPTTTHADAPPEAQCAPSQTPLDWQEAVTLLDSIPGINERAAQCILAEIGLDMTRFASAKHLASWAGVCPGNHESAGKRLSGKTRKGDPWLRRVLVQAAHGAARSKKTYLAAQYWRLASRRGPKRAAMAVAHSILVMIYHVLRERTPYRELGGNFFDERDRQATEKRLVRRLEGLGYHVELQTEQQAS

SEQ ID NO: 377696 - protein, 352 aa, unidentified
MIYVAVDIGKRRCVTCVMDQDGSILDTGSYPNTAFDASHYARQTVEKYGECKAVVESTGNMCMKTYEAFESNGVEVKLANPVKTRAIAEARVKTDKLDSKILAHLLRADLIAECYVPSKDVRLARALLSHRVNITREQTRIKNRIHSLLDKYDLECEYDDIFGAHGMRWLHTLHLNGHDHEILQSLLRQLEFQQDEEAKANSTIAKDALHSQYVPIIMSMTGFDYYGASVLAAYIADISRFPSPSHLVSWVGLCPSVYQTGESLYMGRMKGGNRKVRWVMTEAANTAIRSDPRMRAYYERKIRRHHHNVAVTHVANKMLRIIWHMLRENRLYNERKERLYESKLKRMTHTAQ

SEQ ID NO: 377697 - protein, 349 aa, unidentified
MSEKPNNAIAVIGIDIGKNSFHVVGLDARGAIVLRQKWSRSQVEARFANMPPCLIGMEACVGAHHLSRKLQGLGHDARLMPAKYVRPYSKGQKNDFRDAEAIAEAVQRPTMKFVATKTADQLDLQALHRVRERLVSQRTGIINQIRAFLLERGIAVRQGQRFLRAELPRILATPSHVLSPRMVRLIEDLTGDWRRLDERIEGLTGEIEAIARQDIGCERLMSVPGVGPIISSAMVAAIGSGDAFSKGRDFAAWLGLVPRQVSTGDRTILGKISKRGNRYLRVLFVQAAWVVLIKPKIWERHGLKSWLEAAKKRLHHNVLAIALANKLARIAWSVLARGRDFEASKLRVA

SEQ ID NO: 377698 - protein, 321 aa, unidentified
MVYIGIDISKSSFVAAYPSVNGYHTKAYPNTTAGVRKFIATLAAEEHHCVMEATSNYSFLLLYLLHQSGIAVSLVNPKQIKHFARMMMAVTKTDEKDACMIAMYGEKMNPPIYKMPSQAILLLKQKKTVIRQLRKQLVASKNLRGSLVVLPYRDKACLRTLDKTIDFLTKQIEQLEAELADIASSEFDKQLKALTSIKGIGITLATALILTTGGFTYFDNAKQLSRFIGICPTYQQSGTSINIRGHINRNGDEHLRSLLYVASWSALRSNAACRESYLRLKANGKPSKVALVAVANKLVRQAFAIATTDSTYIDGFVSTKK

SEQ ID NO: 377699 - protein, 342 aa, unidentified
MTEVAVVGIDIGKTSFHLIGLDVAGSIQWKKKLSRSQLMRHMAALPRCLVGMEACCGAHHLARELSALDHDVRLMAPQFVKPFLKSNKNDYLDAEAIAEAVQRPTMRFVPAKSVEQLDLQALHRVRERLVSRRTAVINQIRAFLLERGIVFRAGRQHMAREMPLLFVDERSTLSSRMRTLLQRLWEEWQTLDQDIAAVTKDVEAIAKTDEACRRLLAIPGVGPLVATALVAAVADGTGFKRGRDLAAWLGLVPRQHSTGGKPKLLGISKRGNSHLRRLFIHGARSASMHMKREHGLGPWLDQLETRTHKNVAVVALANKIVRISWAVLARQEEYRPPMPIAA

SEQ ID NO: 377700 - protein, 404 aa, unidentified
MLFVGVDWAEAHHDVCVLDGEGRVLGRKKVNDTLEGVRDLHALLAACTDEEPDIVVGIEKDRGLIVTALVASGYEVYAINPMAAARYRDRHHVSGAKSDPGDAKMLADLVRTDRHNHRPVAGDTPLAEALKVLARAHQNAVWSRQRHANELRSSLRDYFPGALEAFGTDLAHHDALAVLGVAPTPSLARTLSKAKLMSALKRGGRQRRLEVRALELQEILRREQLAQPALLEHAYGLTTSATVAIIVTTNATIVELEAGLAEHFEQHPDAKIIRSLPGMGMVLGARVLGEFGDDPNRYADSKSRRNYAGTSPVTKTSGTRKVVLARRGRNRRLASALDQWAFSSLLQSPGARHYYDELRAREKSHRKALRQLANRWVGILHICLERGVLYDESLAWPHLIEQAA

SEQ ID NO: 377701 - protein, 425 aa, unidentified
MHKKQYSKQLEKRKRIGDQTLVIRMDIGSDFNAACFMDKEGNVLGRYPTIYNSRKGFDYFQAMVVQARRKYKLHDILIGMEPTGHYWRKIAFFAKEQGYEVRFVRTTAVKHQRELDESSSAKSDIKDAYTIGNIVREGKYIDTVIEESVFRQLRTLAHARERILRYIVGSTHGLQAVLNDYFPELRHLFWSMKARGLWTLLETYPFPEDVCHAGLDAVTALLSKGTGKKRHIQEQAAHIYQAAVESVGLKAITKADRARLTMYLEEIKRSDARRKLLEHEMKELLKQIPLAQYILSLPGTGEVGCAVFLGELGNSEYFHNPRQIIKFAGYDPKENDSGLRVGRKIISKKGRWLLRKCLFFMVLRLVHRSSFFKAYYEHKKKGCDRPLEKTEALCAVILKLIRVLFALMRDRRMFTEELPRCEKAA

SEQ ID NO: 377702 - protein, 358 aa, unidentified
MRYYIGCDAHKKYSVFAGINEAGEIVPSQRVEHDRESYRSFLNGLPAASQIAVESVGNWYWMIDEMEKAGHIPTLVNAGKAKLMMGNINKTDKLDARGLAVLSLNGTLPAVWIPPGELRDQRELARMRIYLVHIRTGLKNRIHATFAKYAITFQEVSDLFGVRGRNLVEDRLVELPPETRQSMKEQLKLLDQLQKQITEVEKRIWRIVKVTREMQLLMSLPGVGPILAILIAFEIGDVARFADSAHLASYCGAVPRVKSSGGKTYYGKTRPDVNHYLKCAFTEAANAIVANQHRKTGRHTVALYQRISRTKGHAKAIGALRRHLSEAAYAVLRSGQPYHEPVPSRKSLVAKEVCAGLA

SEQ ID NO: 377703 - protein, 287 aa, unidentified
MSLYAAIDLHSNNSVLAIMDEAGKPVLQCRRPNELSRILGDLSPYQADLTAIAVESTYNWYWLVDGLMDQGYHVQLVNTLAVPQYAGLKFSDDDSDALHLAQLMRLGVLPQSYIYPREQRATRDLLRRRAMLVRQAVKLMLAVQCSFSRATGHALAGNAVRRLTAEQIEAAFPDPVTRYGVLVQLKLWSTLQEHIAALEHWVQRSLARPDLLARLRGVPGIGPILGMTILLETGAIERFATVGEYASYCRMVPTVRLSNGKSKGHGNRKCGNRYLCWAYMEAANYAI

SEQ ID NO: 377704 - protein, 336 aa, unidentified
MTTMNEKGEIINQKKLPSNGEIVDFLKGFGEEMEVAIEATPSWYWLYDHLEDEGFQVKLSHPLKTKAIAYAKVKTDKVDSATLAHLLRSNLLPLSYVPGKETRLNRELLRYRASLVKIQTRLKNKVHTILAKNNVNHSYTDLFGKQGMAFLRSLTLAENYKIALEGYLTVLDTVRQEIRVVSKKVKQLAEEDAETLLLMTIPGMGYYSSLLTKSEIGDVNRFPSAKQLCAYAGLVPSTYASGNTCFHGHITKQGSRWLRWILVEAAIHAVKRPGVLRRFYFKVERKKGGQIAKVATARKLLEWIYHILRDGRTYQEMEKIADLLGRGELGNHSGRA

SEQ ID NO: 377705 - protein, 322 aa, unidentified
MMFIGIDISKEKIDLSWLRDQLTNKIKTKVFKNKRQDFVTIEKWLLNTTKSAANELVITLEPTGVYHEALMYFLHEQGFNILLANPGKAKKYADALNIIHKTDKSDATMLAHYGCAKHAVVNYWQPEALEIRELKALIRRLDALESNRQREANRLEASEFSNVSARVCQSIKVTIAFLDDEIKQLKSDIDNHIDNEPDLKRNRKLLESIPGIGLVLSRELTYLFAAKIFNKAKEAAAYCGLIPRHNESGKLKGRTSISKLGPARIRCKLYMAAIVAGQWNKTIKRHKLTLINNGKTPMQAVCANMRKLIHICFGVIKKPRSV

SEQ ID NO: 377706 - protein, 357 aa, unidentified
MQLQDAFSIPKIFIGLDIHKKSWTVSIQTDLFFHKTYSMPSNAEDLYQYVERTFPNHAVDLVYEAGCCGFSAARYFLNLGWNVLVVNPSDVKTGDKERYQKTDALDSKNLSNQLKSGVLKGIFIPTEEHEQFMTLARHRTQVTKKLRQTKSHIKSMLLFHGIKIPEEFDNSNWTIAFIAWLEEIKFSTSCGDLALQGKIRMFKFIKSEYLEIANQMRAYCRKNNKKDYNLLKSIPGIGGYLASVILAECGDLRRFNNEGQFSSFIGLVPGIYNSGGSEKCLGITPRSRSQLRSYLVEAAWIAIRKDTEMQNYYRKHQGKNVKSVIIKVAHKMARRILSVIKTETPYQINRNLVPIIQ

SEQ ID NO: 377707 - protein, 330 aa, unidentified
MKKYVDVIGIDVSKLTIDAHIYNRGVHRVFSNTSKGYKALLSWVEKHLGKDLCFFCFENTGHYSTNLSVYLSENNIDYVEESPLTIKRSSGIVRGKIDQLDSAMIARYAWLYKEELTLSSPKAQDIQELGRLLSFREQLVRDRTGKMSSLKEMQTLLSSPSTDDCCIIVKKMIHYLTKQITTLEQSIKKLIRSDELLEKNYQLLNTLKGVGLILSCQLLYHTNNFKRFDSWRQFSSYCGVAPFEHSSGTSIYRKNRIHKIGDRKMKTLLTLASVSAIQCDKELKQYYEKKVAEGKPKLVALNNVRNKILSRAFAVVKRGTPYVELQKFAA

SEQ ID NO: 377708 - protein, 316 aa, unidentified
MKIKQTETKNLYLGKEVFVGIDVHKKTYSVVARVERELVKKWTTTASTQSLGDQLLKYFKGAKIQTVYETGFSGFVLHRELVKQGINNIVVHAAGVEVAVNNRVKTDKRDAQKLAALLEAGRLRGIGIPSEAQEQHRILTRTREQLVGDRSRVKNRITMKCHQMGLINYDENRQMTHKLVKELLGRVSSPELTIAIEAYWQIWQQLAQQITKIEKAIKEQAQDDPNESTYRSCPGSGPLSSRILSNELGDMSQFNNERELFSYTGLTPCEYSSGENIRRGKITKQGNSRLRHVLVEAAWRGIKKDKALAEFFERLY

SEQ ID NO: 377709 - protein, 348 aa, unidentified
MAMTMVETTRPVTGGVDTHLDVHVAAAVDASGGVLGVQPFATTTAGFVELHAWLETFGSLERVGVEGTGAYGAGLARYLRSRDLEVIEVDRPNRQLRRRAGKSDTIDAIEAARAALSGRASGIAKTADGNVEAIRVLLIAKRSARDTRIKCLNQVRHLGFTGPDELRERLRGVPRGRLAGTAAGLRPTAGSDPVVYATKLALQTLGRRVVDLETTTQRLDATLDQLVCATAPNLVAVAGVGIDTAAILLVAAGDNPERIRSEAAFAHLCGVAPIEASSGKTVRHRLNRGGNRQANHALWRIVFTRMSADARTRAYVARRLEQGRSKPEIMRILKRYVAREIYKHLPRD

SEQ ID NO: 377710 - protein, 351 aa, unidentified
MLIVGCDYHPSFQQIAWVETDSGEVGERALMHSTGEAEKFYRTLKDEGVKVRVGIEATGHARWFERLLAELGFELWIGDAAEIKAKRVRKQKNDREDARLLRTLLIENRFPRVWLPDVSNRDLRQLLWHRHRLVQMRTRVMNQLQAVALNEGVRRKRGLWSQAGRAQLESFQLLPWATRRRKDLLELLDNLTPRIAVLTAEVEKKAEQHREAQRLTTHPGVGPLTALAYVLIIGSPQRFRCGKQIGSYLGLIPSEESSARRQRLGHISKQGNALLRFLLIEAAQAATRSNPAWRREFLHLTLRRGRQIATVALARKLAVRLYWMWRNGWDYEKSLEFGSHVGQPGTGYGVK

SEQ ID NO: 377711 - protein, 408 aa, unidentified
MEKFLKLCVGTDVSKDTLDICLSGLREDLSVKVVESKSFSNNAAGISQLMKWAKQNTDGNPYQVVMEATGVYHEKLAFTLSKNAVEAVVVLPKLTSNFFKSHNVRVLNDKISAEQIASFGLSRKLDNWKEPEPVYMALRALCRHRYQLDKMNTQCSNQIHAQKHSETSLQEMIDMSEEMVKLANKQIKEIDKKLQVIINENDWLKAKVKNICTVKGLGWLTVVKIIAETSGFHFFRNGRQLVAYAGYDVLSKESGTSVHTKSRMSKKGNKYIRAAMYMPALPAIRSDPKMAAFYSRLFHRHFIPRKSNVAVQKKLLVLIYTLWTKDCPYDPDYCHPASQCHDQENNPGNDPEFDHENGQPSKITETTINKNREAIRRSLHRLDQVRLQDFDDTNIEKNPQIEHCQRIE

SEQ ID NO: 377712 - protein, 421 aa, unidentified
MHVLYQRCAAVDIGKDVIAVAVRLPGDGPEHRQTIKRTFKTFYGVLKHAAGWLTAQQVTHVAMEATGIYSMPVYHALIEHGQFEKVLVCNAGHVRNVPGRKTDLSDAEWLVHLLECGLLRGSFIPPAQIKAARDVIRYRTKLTESRTSELQRLGNVLQDAGIKVDSVASTIATRSVRAMVEALIDGERRPVLLAELAKGRMRARIPDLQRALEGRFDDHHALMCRLHLDHLDHLEEMIARLDTQIQDMMQPFRAQRELLTTIAGIGPFAAAAIISEAGADIGETFPSAGHFASWIGVCPGNHESAGKRHSGKPRKGNQHLQHVLVECAWAASRTPGYLQSLYRWHVRKFGGSRNPTAKNKAIVAVAHKLAIIIWHVLATGKPYTDLGADYLDRRIDPAKETRRLIARLQALGHTVTIEPAA

SEQ ID NO: 377713 - protein, 350 aa, unidentified
MKKIAVGIDFAKEKFDMTAINVVERTSVHGQFKNSPMGARGMLRAVRKFARGIDSEDWMFCGEDTGYYSQRVTRYLTEKGYFMWLQNAYSIKRSEGVIRRGKDDKADSRCIAEYARRFEDKAVRYKLPPKELEDLKMLLSQRDLLVSAKTKLHNSTSEIPERKVQGSAVSLIKSANKRVCRVIDDEIKKLEDKMDEIIDSVEAIKENYDILCSFTGVARINTLAFIVYTENFTKFDFNARKIATYWGVAPFHRESGTSVHTSPHVSGFCNKKLKALIGNAATVAIKYNSVINAYYNRLLERGKCPMIAKNNVKNKIIHILTAMVRNKQKFDKEYFFTFDTSVKNVKTLAS

SEQ ID NO: 377714 - protein, 387 aa, unidentified
MTRVIIGMDPHKRSVTIEVMAPDESVLDRGRYATDQAGYAAMLRNAQRWPERVWAVEGCNGIGRHVATRLLADGEQVVDVPPKLSARARVFSTGQGRKTDATDAHSIALVGTRMAGLRPVVDDQQLAVLRVLADRRRALGEDHTRMVAQLHHLLLELIPGGAKKDLSAAQAKALLAKVRPRDAAGKTRRRVAAELIADLERIYARKKAADKELRELIEATGTSLLTLNGIGPSGAARLLIDVGDITRFPTKGHFASWNGTAPLDASSGDQIRHRLSRAGNRQINRTLHIMATVQLRNPSEGRAYYDRKKASGKTSMEAMRCLKRRLSDIVYRHMVNDAVRAVTGPGGHRGTAAAFSATGSRPHTGSSDKSLPGPAATEPRTDLPAAS

SEQ ID NO: 377715 - protein, 314 aa, unidentified
MNPSTIGIDVSKDWLDAYRLADGAARRFVNDKTGRKALIKWLTAAPMKRVVFEPTGPYHRQLERALDAAGLPIAKVNPRQARRFAEAAGKLVKTDRVDAAMLARMGEVLDLQPRPCVSQTIAELKELYLARAALIKDRTAAKNRAKSITLALLEKQNKKRLAEIDLKIEEIDAAIEKLVLDDAPLARRFEILLSIPGVSKITAFALLIEMPELGGLEGKQAASLAGLAPVARQSGQWKGHAYIRGGRAFLRQALYMPALVACRFNKDSRALYQRLVKAGKPAKIAITAVMRKLVVLANALLREDRPWAENAPCA

SEQ ID NO: 377716 - protein, 348 aa, unidentified
MDHIGIDVHKKESQIYILADGGEIIERRIRTEPERFAAVLGTRPRARILIEASTDSEWVARCLEALGHEVIVADPNFAPMYATRSRKVKTDRRDARALAEACLLGAYRRAHRLSDPQRHVRGRLGVRDALVHTRTRYISLIRALLRQQGYRVPSGSAESFAHRVQAVPLPGPLLSVVAPLLAVMCHLNRQLAYCDERIEHLAVQDPRVPRLRSVPSIGPVTAAAFLAAVDNAQRFRHAHQLEAYLGLVPREYSSGDTQHRGPITKAGHSRVRWLLIQAAVSILRRHPPQAEELRTWALRIVARRGKHVAVVALARRLAGILYALLRDGTVYTPRRPAALPHPVAALRV

SEQ ID NO: 377717 - protein, 324 aa, unidentified
MESKKYIGLDVHQASISVAVRDDAGKLVMESVIETKAGTILGLIRGLRGSLCVTFEEGTSAAWLYELVKPHVAQVVVCDPRKNALLKVGNKNDRVDARKLSELLRAGLLTPVYHGDSGVRTLRELSRSYLTVTKDLTRVMNRTKALYRSWAIPCAGEKVYSPRHRNTWLEKLSEAGVRRRAEQLYQQLDALMKIRREARRELLTESKKHSAQKLLRQIPLLGPIRVALLIALLQTPHRFRTKRQLWAYSGLALETRTSGEYRFTGGQLQPAKRLAAPRGLNHNHSHDLKNVFKGAAMHASRSSNALGDFYKDLLATGMKPTWPA

SEQ ID NO: 377718 - protein, 310 aa, unidentified
MFAIDWAVRKKFQIYNINTEKLKSIAPTREAFDKFFDKLSGKHSFYTEEGGGDTFKLLALKHGHKVFTTPGKKVHDFRVELKIQKTDESDVKVIGSLSKEQPQEFYEYQEDDKLTLRICILSREYNKLVKDSTRKKNQLHAFRNKMELLISEKAVAKIIGKRKTTIEALGKEINLISGQLLKLVEKHPLWINLLSGIKGVGAVTAGGIIGSIRRFSRFTSKYSLRHFAGMRTKKDNPDYNRYLKQALYNFADQIIRNRTQPWRKLYDDMKVYYKKRHTDWRPAKVGAFAKKFVQTKFLDEMWKRGIEVEK

SEQ ID NO: 377719 - protein, 340 aa, unidentified
MKGTTMGIDLAKNVFEVYVEAESGAVIERKRLSRKKLLPWFATRRPALVGMEACGGAHYWARELTKLGHEVRLIAPQYVKPWVQTNKSDAADARAICRAVQEPGMRFVGMASEAQQTVQAVHRVRSRYLDNRTALVNQTRGILLEYGVAIPKGVASVRKTLALLLTEDRWSALVRQFLADQQAELAEWDAKIAAVTAQIKRENARQPICQRLEQARGIGPLGASALWAKAAGQAYQNGRHVAAALGLVPKHTGTGGKVRLGGISKRGDRYLRQLLIHGARAVVRQVGEKPDRLSCWIRRLVARRGMNKAIVALANKNARMAFALIYTDQPYDVTKMCGAE

SEQ ID NO: 377720 - protein, 548 aa, unidentified
MRLRVLAFEDNAEGAGSMDVFCGVDWAEGHHDVALIDDTGKLLAKCRIGDDLDGYRLLLGLFAEHGDTAEAPIPVAIETSRGLLVATLRPGPRQIFADPMAASRYRDRPGVSRKKSDPGDALVLANIIRTDMPMHRPLAADTDLAQAVAVLARAQQDAVWSRQQLCNQLRSLLREYFPAFLEAFKDKQGGLARPDARRILAVAPTPALAAKLPVWRLTAMMKRAGRRRNIEADAERLQQLFRREAPHQVPLVEEAMGKQAPALLLQLDASCEAVADLGQATEEAFRAHPDAPIMLSFPGIGSQIGARILAEIGDDRTRFATAGGLKAYVGAAPITRASGKRHYVGRRFVKNNRLNHVGHLWAFASLSRSSGADAHYRRRRTGGDWHMQALRHLFDRMLGQLHHCLLARSRLMKRSLSRTAPTSRNSHRVKQKRGSLSRGGGGDDHSVMRPEVQTFVADGPLPDWDASEEEIDRRERQLRTIFRPVTSEEAAALATCFGPDDCYGVAWTLVHLIETTPNPVPPWEDPGPEAGDWAEVLRGRWGGGPPAA

SEQ ID NO: 377721 - protein, 342 aa, unidentified
MQITTIGLDIAKNVFQVHGIDAAEKVIVRKQLRRSQVLAFFKAVPPCLVGMEACATAHYWAREFTKLGHEVRLMPAKDVKAYVKRNKNDAADAEAICEAVRRPTMRFVQIKSAEQQGQLMQHRTRDLLMRQRTQVINALRAHLAELGIVAAQGDKGVKELLALVVDKEDTRLPIDARASVIVLATQLEATQTVIGAIEKRIKMQHRSNEASQRVETIPGIGVIGATAIAATVADPTVFRSGRDFAAWIGLVPRQDSTGGKQKLGPISKQGDRYLRRILVIGAVSVLRRAQENPGKYPWLTQLLARRPFKVVAVALANKMARMAWALLAHGGTYRAPEIAKAA

SEQ ID NO: 377722 - protein, 397 aa, unidentified
MIAVGIDVSKSKSTVAILNGDGSIRAKPFDVHHVVDELQALVDYIKRTSEPPTILMEPTSHYHYPLLKAFTEAELPVCLINPYQMKKYGDTELRKAKTDKRDSLRIAQYALEKSYSLIPYTPQDQKYEDLRFLSRQYSQRISTLTVAKVQLLSLLDETMPGITTILPLKSRDPDNCVLLRFIKRFKSFDVIRKMGKTRFLDSYQVLVKKTKDRFAGSKGLAIYELVLNSVTTRGENPLSAMTQDQCVDLVSTSQKAADEINLQMRIIAETMPEYKVLRSMAGVGDRLGPIILGEIGDIRRFHSGKALNAYAGNDAPPYQSGQFESRNRHISKRGNPALRKACFEVMQALKLTKPQDDPVYLFLLKKEQEGKPYNVAKMAAVNKFLRIYYARAMELYK

SEQ ID NO: 377723 - protein, 419 aa, unidentified
MADGTVSWFAGVDWGSERHQVCLLDAAGQVVGERAFPHGGAGLAALCDWVVSVAGEPGRVAVAIEVPHGPVVDTLLDRGFAVHAINPKQLERLRDRVSLAGAKDDRRDARVAAGGLRTDPHLFRPVAAGDPAVIALREWSRLAEELQHERVRLGNRIRQQLWRYYPQLLAVSDDVTAEWVLDLWTLAPTPAKAARLREATLARLLQEHRIRRIDAEQVLGLLRQPAIKVANGVTEAAVLHLRSLVARLRLANREFHQAERKLDELCTNLRDNTSTPKSGGPRDAAVLSSLPGIGPVTLAILLTEAAGPISRRDYAALRTLSGVAPVTKRSGKSCLVTMRYAAQIRLRNAVFHWARVAVLNDPKCGSRYAALRARGHSYGRALRSVGDRLLGVACVLLQRQALFDPAHDKRAASQPRAAS

SEQ ID NO: 377724 - protein, 411 aa, unidentified
MGAGGEGCGTIAGCDELQQMETAPMQRNDLNRSLVAFDQNSTLVAVVELSLQSWLVAGIVPGVKREPLKKLSADRERLLALLERWRNEAIKAGHAISRIAVAFEAGRDGFWLARWLRERGIEAYVIHASSIPMPREHRRAKTDRLDTASLKRAFLGWLRGEAHHCRMAQIPTLEAEDAKRPTREHESLVGERTRVVNRMKATLVRLGITGFNVKLRKAAEKLAALRTPEGAPIPPNTLAELCRGLERLAMINAQIAAIERARLLRLKAAPQHGTHPMILMLAKILGLGIETADMLVHEVLARGLRDHRAVGRYGGLTGSADESGSKRREQGLAKAGNGRVRRGMLQLAWRWLMHQKDSALTHWYREHSANGRGDTRKTMIVALARKLLIALWRYVTTGELPAGVVLKAKAI

SEQ ID NO: 377725 - protein, 417 aa, unidentified
MRIVRPICCGADIHKDLIVATIAATNQDGITEYIQSSFSSQNFDLVRLKAWLIEHHCFEIAMESTGKYWIPVFNVLEGEIKVFVVHPKYTKAIKGKKTDKKDSKWIADLFKHDLLKFSFIPPKEIRELRELSRYRIKLIAMRSSERNRYQNSMTISNIGLASILSDPFGKSSRAVMKEVIRSSSVTEEKISKLLERNTKKKVKEVLQSLVGSHIESDQRLKMNIASQHMDQIDSHVRRLETEMAIRCIPYATLINLLLDIPGISYLSAMTISAEIGTDMSVFETSKQLSCWAGLAPANNESANKKKSVRISKAGSYLKPLLVQCALAAINSKSNPYYRIKYNRIKKRRGHKKAIIAIARMILVNIYHILSTGEVYSPCDMEQIINPKPVKKVMTIQNAIEFLQSQGFDTSKLISSLS

SEQ ID NO: 377726 - protein, 401 aa, unidentified
MNAVGIDVSKGKSMVCVMRPFGEVVLEPFEVLHTAQNLNDLAGKLKALDGETRVVMEATGNYHKPVAFVLHDAGLFVSVVNPVLIHDYDNNSLRRVKTDRKDAVKIANYTLDKWTRLRQYLPEDDTRLALKNCYRQYQQAVAVRTMLKNNLISSLDLTFPDANKLFSSPAKSNGCEKWVDFIGDFWHSECVSSLSSDAFAKKYLKWCQKHGYNFTRSKSDTIYACAVNAASLPKSPTSKLLIQQQVAQLKAVSQSVAAFQQEMLRLSQQLPEFDTVMEMYGVGPSLGPQLMAEIGDVRRFSSKKLLIAFAGIEPQPNDSGKIVGNDSGISKVGSAVLRRTLFLIMTVILKTQPQDEPVFQFMNKKRSEGKPYKVYMMASANKFLRIYYARVKAVMDSERSQ

SEQ ID NO: 377727 - protein, 316 aa, unidentified
MTTLSVAGIDVSKARLDTFVLPQRIGLGSSNDARGIAGLRRKLQHLKVDRVVLEASGGLEYPVARALSDAGFEVARIQPGRVRGFRTFLGRKAKTDALDAELIARFALAMDDEDIRDVPSERAEAIRSLSARRRQIVDLAAQEKTRLRMTRDRVVLQSLRRTIAALNAERLVIEKALTEALEADEQAKRKYALLRSVPGIGNAVATTLLTDLPELGTLNRHQAASLAGLAPHPDQSGTSKASAHIHGGRACVRTALYMAAVNAIRCNPPFKAFYRRLIDSGKPRKLAVVAVARKLVTLANAILRSNQPWTPNHQLD

SEQ ID NO: 377728 - protein, 338 aa, unidentified
MKLYRAIDLHSNNNVTVLIDEKDKVVYQKRLANDLPSIVEQLSPYSSSIEGIVVESTYNWYWLVDGLMDKAYRVHLANTAAIQQYEGLKYTDDDSDARWLAHLFRLGVLPEGYIYPKEERPVRDLLRKRSQLVHHKTAHLLSIQNLYSRNTGQSISANRIKQLSREKIDALFTNCDRALAIKANLTVMRSLETEIAILERIVKERVKLKPTYRYLLTVSGIGQILALTIMLETGDIRRFSKVGNFASYCRCVKSEKLSNGKRKGSGNTKNGNKYLSWAFVEAANFAIRFEPLIARFYQRKKAKTHRVVAIKAVAHKLARARYYIIRDEVPFDVDRAFA

SEQ ID NO: 377729 - protein, 389 aa, unidentified
MSSVAVVALDLHKKFSRAVVMDPGGEVLDDRRVSHSDRAEVERFFREFERGTDVVMEATFNWPWVADLAAKCGLTPHLGDPMRIKDYRKGLPKSDRKDAIGQGNLWLRRMFPEAYLAPGEVRRRRGLFRMRSLFVRMRTALKNNIHGQLFKLGLNVDETSDAFGEAGRWAMRRLPLDDDSRLELSRKLALLDDIALHIARIERQIKDEVKENEDARLLDTLPGFAEITAHGFLAEIGEVKRFPNARALAAYGGTLPLDNESADKDLGKRTGSHSNRFLRWIVLEAVNGAVRKSPRMRSLYNRVKARNRKQPGKARVAVARELMELAHLVLTRRVPYTETPPPRPGSKEAGVKSQRRRESFPLTGRRLNRRTGKRSAERSPKGYGNDRQA

SEQ ID NO: 377730 - protein, 370 aa, unidentified
MSVRRILAKTIDTDLEYEAIGIDLAKNCVSAALLTTDGEVVCIDRLDYSELEKSAQALSSTTFAMEPCTEMNYLVQKLEAWGHRCLVIGGKNVQNYVENHFSGQKTDLNDAQALAFLAQDTQLRTIKAKDVEQQKYASLTTLREQYIKQYRQTIVSLKGICQAWGLNISKGISGKARLKDLIENHAAFPEELKESLVDMVTHAQTAQKALNKITKTLEELAKNDKLCQLIRTIPGLGLICSCRLRATIGDIKRFKNPKDFPAYYGLVPRSIATGHNEKKGRITHRGDKTMRSLMVQGAGSVINMATRGKLKSKQLTKWILKKQKEKMPWGKLVCAVAAKLLRIVRAVLISSKPYNPQIAGVAKCSLPKGT

SEQ ID NO: 377731 - protein, 410 aa, unidentified
MKSAVITAVGVDVSKSKSTVAVRRPGGEIVMHSFDVRHTNSDLKKLVSTLKKLGGDIRVVMEHTSMYWRPIALTLKKAGFFVSAVNAMLIHDFSDNSIRKLKTDRADALKIANYALTFWDTLPLLNDEAETRLLLKMQSRANERITATATVLRNGLIALADQTFAGVNLAFDPNTKNTDGHEKWVDFFLRYWHRDCVCQYSMEVFTESYRGWCKRKNYKFRTATAHKIYIMAQECVATLPKCESTKTLIGQACKSLNAVCEARHNTQLEMQRLAALLSEYEIVMQMEGAGPVTGPALMAEIGDVRRFKNKKALVAFAGIDAPPFQSGAFESKSRHVSKRGSPHLRRTIFLVSNIILTLSNPENAVFCFMEKMLRGKTLLCLYCCRKRKVLAHLLCSRERVPSLSSSSGCL

SEQ ID NO: 377732 - protein, 376 aa, unidentified
MITCFIGIDAHTTNYTLSTAIDAEDKPFNTCKYAPKLTYILKYANALCKKYNLKKEDILLGYEAGCLGFKLQRDLNENGFNCVVMAPSTIPGTAINCRKKTKNDIRDAEAIAKALRNDDYSSVATPDEEDEAIREFIRAREDVRMELKRCKQHIMAFCNRHGQHYEETGWTQKHMKWLNNLAFSQPVLKETLNSLLLEYEYLTEKLEEKDRRIEEFAQMDKYRESVHKLTCFKGIKTLTALAVIVEIGDFARFMKAKNFVAYLGLSVGEQSSGNDHNQTGITKQGNRFIRKLLTEAAQCFSRATSKKSKELKKRQEGNVEEVIAYADKANERLRKRYHHLVIHNMKSPNKAKCAITRELACFIWGMMTDNIHTVLV

SEQ ID NO: 377733 - protein, 490 aa, unidentified
MEKTRTAVFEEIRRNVAGIDIAWRADHFVCGPRREDGECEIASFGTTTVELHRMVNWLKQRNVESVAMESTSVYWIPATDLLESNGIEVVLVDPRQVRMVPGRKSDVKDCQWLQKLHSCGLLTGAFRPPEAIAAVRSILRERDTLQAMRTQTIQQMQKSLDQMNIRVHHAVSDIDGKTGTAIIGAIVSGERNPLKLAALRDKRCKNSEKEIADHLTGTWREEHLFNLGQAFKTLQFLDERLEEYDQKAQTMLASLAEAASSREDGEQSPPPPPLPGKTEYDVTALATSALSAEGACSCDNREENPPPPSKPVNAKELAHNIWQDIIDRVMGFDIMTIPGIGYNTARVIISELGTTFDRFPDERHFASYIGLAPALGKSAGKNISQKKRCKNSSRAGQAIRMAASTLYRSQSELGAYLRSVARRTDKKTAIKATARRIAHLIYRGVKYGKEYIDHGAEAYEARMRERTVRTVNRLIKSHNISSSEITALTA

SEQ ID NO: 377734 - protein, 355 aa, unidentified
MSQEKYIGMDVHQATISAAVMDAHGKLLMECLLETKAATIVEFVQGLHGTLSLTFEEGTSAAWLHDLLKPHVSRLVVCDPRKAALLKEGNKSDRIDARKLAELLRTNQLKPVYHRQHGTRTLKELGRSYTTITKDVTRVMNRIKALYRSWAIPCSGSTVYAPRHRAEWLAKIVEPGVRIRAEHLYQQLDGLQPVRQQARCELLRESHKHPAVKLLRQIPSIGPIRAALLVALLQTPHRFRSKRQLWAYSGFAVETHDSGEYRWVRGKLQRNRERITVRGLNDNHNRDLKNLFKSAAISASTRPGPLHDFYMARVESGMRPTMARLTLARKIATITLTLWKKGVSFDPKQLQRQAV

SEQ ID NO: 377735 - protein, 394 aa, unidentified
MKLVGIDVGKNSHHFCVMDKETGELNLTPSSFPNNKEGFDFLINSLKPYSKKSILIGMEDTGHYHVALLKFLLSNGYTVALINPKTTDLTRKMEGGITKNDKLDTLTICDVLDTPERKKQYRITKVDRFDLYEQRQLTRHHHNLKEELNIYCNRLQKSIDLVFPEFNTLFGSKYGIVYMNLLKTFGSAEAIASTDIRTIRKCFEIKGRGCRISLTPEKLKECAKNSIGISSEVETIQIKHLVSQITLIKEQIAEIDKKIEEFSITNNSPILSIPGISHFSGTSILAELGDIGNYSKPSQIIKFAGVAPYHYESSQYNAQHTGITKKGSKYLRKTLYQIILTVINNNPVFKKYYRLKISQGKGHRCAQGHCIRKLLRIIYHLLETGQSFDPALLR

SEQ ID NO: 377736 - protein, 330 aa, unidentified
MAKDVFQVHCVSATGRRVINKKIKRAKLLAFLETLPRCVVGMEACGSAHHWGGELRKLGHDVRLMPAAYVKLYVKRGKTDAADAEAICEAVRRQSMRFVEIESEDQQAVLAIHSARDLVVRQRTQVVNMIRSILREFGHILPTGIEAVSKFAREHGTEDQLDMPEIADGILGVMCHQLNGLNARVDGLTKLIEQHAWLDADARRLMRMPGIGPITASAIVATIGDAKQFETGRDLATWLGLTPLNKSSGGKERLGRIIKKGDRYIRKLLIIGMTSRSLMAKNKPEKADTWTAKLPDEQPFRLATVAMANKSARIIWALLTKREEYRQPIV

SEQ ID NO: 377737 - protein, 345 aa, unidentified
MEPMYYIGLDVHKQKISYCVKDSGGKLFAEGWIPATRHDLDCWMKNLPQPWSAAMEATMFTGWIYDHLKPHATELKVAHPLMLRAIAAAKKKNDRIDASKICDCLRCDFLPESYMAPTAIRERRRTLRYRNLLVRQMVQMKIKTSTLLMEAGVSYNKQKLHKAGYFRELLASNPDIDEGLRSLLRQCREMVVRLGRMEAALIHSLQQDRLLAERVERLLSIPAIGPITALTWALEVGEVQRFSSIKKAVSYCGLCGDQRSSADRVQRTPLSKQRNKHLQTTLIEAAKMAPRYSPTLALLYDKEKQKGNANRATLAVARKLVAYLMAVDRGQTHFLVLDRETCAAA

SEQ ID NO: 377738 - protein, 345 aa, unidentified
MPIVGGLDIHRKQITFDYLDTETGQVQRGQISPADREHLRAWLARFAGRDDVAFALEGCTGWRYVAEELAAAGVTAHVAEPADTAFARGRKRHAKTDRTDSRHLRVLLEQGRLPECWIPPAQILECRALLEAYHDLRREHTAWIERIHAVFFHQGAPRLGEGALRTDRGLAALREAAAVHLSPAGQLQVATALDMLAAVEARMEVLRQQLLHAARHLAGARALQARLYGVGPLAGLAMTCWLGGAGRFSSSRKAVRFAGLDVTVYSSDGKRSPGHLSRQGPEILRWVAYEAGKTHGRASAPGHDYYAAVKDRADGKIAALSQARKLIRQACHILAELGDDALTAA

SEQ ID NO: 377739 - protein, 343 aa, unidentified
MQTVTTIGLDIAKSVFQVHGVDAAGQVVIRRQLKRRYVLSFFQKLPQCLVGIEACASSHHWSRELQALGHTVRLMPPAYVKPYVKRQKNDATDAEAICEAVTRANMRFVPTKTPEQQSGLVLHRTRHLFIRQQTSVINAIRAHLAEFGIVAPVGRRGVEELLTVVADPNDKRVPEIARACLSAFGAQLRSIKEQVLEFDRLITAWHRSNEMSMRLDEAPGVGPVLATAVVATVADPKVFRSGRNFSAWIGLVPKQHSSGGKDRLGSISKQGDRYLRGLFVAGALAVIRYAKIHGTKHRPWLTALLARRPTKIAAIALANKIARMVWAMMAKGERYKEPIALAA

SEQ ID NO: 377740 - protein, 344 aa, unidentified
MVTFGVDAHKRTHTIVAVNDRGTPVGQTTVGTTSQDHLVLLRWAARFGAERRWAVEDCRHLSRRLERDLLAAGESIARVPPKLMAHVRDSARTYGKSDPIDALAVACAAQREPNLPLARLDGPDREVRLLVDHRESLISERTRLICRLRWHLHELDPAWEPKARSLDAQRTLDEVRGRLQDHVGVVARLAVELTERCAELTITIKALEKEITELTTQLAPALLELPGCGALTAAKIIGETAGVDRFKSRDAYARFNGTAPLPVWSSNKARHRLSRTGNRQLNAALHRIALTQARWHPPAKGMIERRKSGGNSGREALRVLKRRLSDAVFQALLHDQTAGLTLAA

SEQ ID NO: 377741 - protein, 399 aa, unidentified
MRCWAGVDVGLHTSVLVVVDVDGTPVVRTNFPMDGAGHLEALRTLRACAGHRRERLQVAIEDSTSPLTASLVAAGFTVMAVHGVTLARFRLGQSVARSKSDRGDALTLANIIRLQPGVHHPVPRDTPEVLALRARTRAYEGRRRQLHKLESRLWSYLNSYYAAALPCLHARTSRDMYAALKLAPTPGAARRLRPRRLSTALEEAGRHRLNEQAATEIITELRVPHPRQPLQLELAAGSCLLEQLTIIGVLEQSANRLHEEAMAAARSHSLWPIVESFPALGQITGARLLAELGDDPERFASTRGLLSLAGLAPVTRQSGTVSTVHRRRIYNRPLGRAFAAWALPLRSTSPAAKTWYDHRRAVGDRHNAAIRNMLGGYGRALHHCLLTGAEYDEERMLRG

SEQ ID NO: 377742 - protein, 333 aa, unidentified
MQIPSPSNLLWIGVDVSKATFDAALWGHQDFQRMATAAFPRTEEGVQAFRTWALAHGGDAVGVVMEATGCYSQELGRWLQRDMPASRVAIVNPSLVKAFGRSLALRNKTDRLDACMLARYGQERAPEAWIPMTPERAELRDLIRTRAKLVRLQVTLRLRLDDALGRTGSPAGKAQQKVLKVLQGQVEALDKAIEQQLRKVAELGHAVELLTSIPGVGKVTAATMLGEAGDLRSFRRGRQLTAFVGVSPRRYDSGSSVRGRTRMCRIGGVHARIVLYMAAVAASRTATPLGDFYRHLVEQGKPKKSALGALMRKLVLVMRAVLIQDKPYSPQPA

SEQ ID NO: 377743 - protein, 365 aa, unidentified
MQTVKRSQTLFIGVDVHKDTHTAVGLTPFGEKVFEMTIGNGAEDFISLVEKTKVESEKAGLVPSFGLEDVHSWGERLSSFLVEEGLPVRAVAPILVDHRRSKTTHPEKNDSLDAQGVAEVMIQRIDSLPLYKLTEEAQKAKQIRELSLEREWLVKERSRLKNQLHILLHRIHNTGYRSKFKDPFSKKALCYWMRSAPKDTDTILEQRMKRAVRRLLDLRDEIQEIEEELETMMEENGQTVATASGCGPVIAAELIGEIGDMNRFHSPGALAKYAGCAPREHSSGKTIRWRKTRSGNRRLNRAFHRMALSQISRSGNDAARTYFKRKVSEGKTKAQALVCLRRQLVNVVWMMMKHKTEYVYPQEIV

SEQ ID NO: 377744 - protein, 335 aa, unidentified
MSSIFFCGVDLAKHHFSLHAVDDRGKVILHKSVSRAKLLTTLANMPAMRIGIEACSGAHYWARAFTQLGHDTRIMAAKYVSPYRTLNDAIAICEAVQRRNTRFVPVKSPERQAILAIHRMREHWVQERTALINRIRALLAEFGIVVPTGRAAVHREVPLILEAAENGLPDIARAVLADCFEHLQTLNQRVEDTDQCFEMVTKASPNAQRILNVRGVGPQTATAIIAAIGKGEQFDSGRDFAAWLGLVPKQYSTGGKPRLGRISKRGDKYLRTLLVHGARAVITNLGEKQDRLSVWGRNVLERRGMNRAIVALAAKNARIIWALLHNQTEYQDYAA

SEQ ID NO: 377745 - protein, 347 aa, unidentified
MTIVEAARAVTGGVDTHLDIHVAAALDGVGALLGTAAFPTTAAGYQALLRWLESHGEVNKVGVEGTGSYGAGLSKFLARAGISVVEVNPPNREERRRSGKSDPLDAIEAARAALGGKAKSIAKAKDGPVEAVRALLVAKRSARTARTSALIQMRELLVTGPDQLRSRLRGLRISALVAEAARLRPARQGDTVLIATKAALSSLAHRVQELDGELAELDGRIEALLMRHCPDLLGLFGVGPDTAAALVVCAGDNPERLRSEPAWARLCGVAPIPTGSGQTSGRVRLHRGGDRQANAALWRIVMVRIAHHPETTAYYHRKLQEGRSKNDIVRLLKRYVAREVYRYLPRS

SEQ ID NO: 377746 - protein, 359 aa, unidentified
MRPQYTHADFAGQVVNIGLDAGLKHWDAAFYLGQAYHKTVAFPPDPPAVIRYAHRMFPGASVRVVYEAGYFGFWIHEAFVKLGAECMVVNPADVPTADKERRFKTNRIDATKLGRSLANGDIHGIYVPDHQAQQDRSLVRMRSTFVRKQTRVKCQIKAFLRYYHIEHGHDLSDRYWSRAYIRWLESVSFEHESGTQAFKMLLKELLDLRANVAQITKLIHRLALQDRYRTNVQLLARIPGISVMAAMIFLSELITIWRFKTLDPLASYFGIVPGQNSTGETETDTGLTPRRNAALRYMLIECAWIAQREDPALLKAFNKYCERMPKNIAIVHVARKLLNRMRYVLIRQEPYACGVLANG

SEQ ID NO: 377747 - protein, 416 aa, unidentified
MPLALPDAQVFTGIDWAAAEHAVCVMNAAGKIISEFKIGHSADGIAALIRRLGRLGNPGDLPVAIERPDGRLVDLLLEAGHPVVPVKPNAIRAWRDSEVLSGAKSDAGDAAVIAEYLRLRQHRLRVATPYSSETKALRTVVRTRDDLVDMRVAATNQLSALLDAHWPGAKAVFADVESPISLAFLARYPTPAAARHLGAKRMAAFLVKHGYSGRRPAAELLARLRSAPAGTADEALTEALRDAVLALVAVLQALNTSVKDLDRSTAAHLGEHPDGEIFTSLPRSGQISAAQVLAEWGDCRPAYEHPDAVAALAGVTPVTKESGKHRAVHFRWACNKRFRKAITTFADNSRHASPWAAGIYTGARAAGKDHPHAIRILARAWIRVIWRCWIDGTPYDPAKHGAAAALVHKPDRQFAA

SEQ ID NO: 377748 - protein, 367 aa, unidentified
MMGWMAPLRHLSAKLLSDRNSSEWEPSMGEVTTIGLDLAKHVFQVHGVDAEGATVLRKQLRRAQVLAFFSRLPPCLVGLEACATAHYWARELRALGHEVRLMPAQYVKAYIKRNKHDAADAEAICEAVGRPTMRFVPVKTADQQAAVLLHRGRERLVRQRTGLVNALRGHLAEFGVIAPQGLRNVGKLIAIVRDEGDARLPDLARQVLQVLAAQIEQLEAAVAAIEKQLMAWHKSNPVSQRLASVPGIGPIIATALAATVVEPSGFRSGREFAAWLGLVPRQNSTGGKHRLGGISKRGNPYLRRLLINGASANLLRSKATKADPWVIGLRRRRPPLVVAVALANKTARIAWAVMHRHENYQRVAAAA

SEQ ID NO: 377749 - protein, 343 aa, unidentified
MGEVSTIGLDIAKSVFQIHGVDAGGAVVIRKRITRAKLLEFFASLPACLVGIEACPSAHYWSRRLQALGHTVRLLPPSYVKAYLKRSKNDANDAAAICEAVTRPSMRFVATKSAQQQSGLMLHRSRQLLVCQRTMLSNAIRGHMAELGIISAKGRNGTAKLLEMIADEQDDRIPAAARFSLAILARQYAAIRAEIVAIEKRIHAWHRSCEESRRLEEIPGVGPIVATALVAEVGDWKTFSSGRSLAAWIGLVPRQHSTGGKERLGSISKQGNRHLRWLLVVGAMAVIRYARQHGTKRLWLARLMERRPIKVAAVALANKIARMAWAMMVRRERFKEPKLLPAA

SEQ ID NO: 377750 - protein, 427 aa, unidentified
MNATESNRVTEFRQFKKRIRGSTVDLVVGLDIGKRKHHAFFGDANGKTILKGLIVENSAAGFHHLMSQVDFYRQRDGFKAVVFGLEPTSVYHKPLAEHLIEQGHLVVYATNEAIKKNRSLIDGRWDKHDTKDSANVADLVAQGKCHYYDWPDQRLRDLRSLLLLRKRLKKQFHGCRVRIRNNLLAQYFPELDLFWNHADAENLAIVREYLDPTRIRQLSCEQFIARVITHNGGLRQRRRLGQIWEAARSSIGCRPGAAMQLEAELLVDTLQSIKQQLAHVEQAIQELAAGFPEYGYLKSIPGFGPYVSAMTLAAIGNPHRFENRAQLIRLAGFDLCASRSGEKSSTAVPVISKKGKADLRYALYQAALVASSLTRHFRSHYNRLLEGRQREKGIRTKMLVKIAAKMLVIAWTLMKRKEPFNPAYIQA

SEQ ID NO: 377751 - protein, 449 aa, unidentified
MEKSRKKTNVKKITQFEIIRPQVAGIDVSDNADMMVAYPLNEKEIAVEAFGCYTCDLRRISSRLKEYKIESIAMEATGVYWIPLFLLLQEDGFEVYLVNAKHVKNVTGRKDDEEDAEWIQKLHRCGLLSASFQPDNMTRSLRSMVRHRSTLVQTRSSYLNRMQKALEQMNLKLHTVISDIDGKTGLAIIHAIFEGERNAEKLADLCHPRIKASRADVVKSLEGFWSETHLFELKQCYKAFQFHNDLIADCDREIEKQLLEMIAAQNHGVIPDIEKLKRKRNYKNQVHVDLTSYLKEINGVNMTEITSISEISALTILSEVGTDMSKWKTEKQFTSWLGLAPNTKISGGKVISSRVPKKKHYAGQAFRMAAMSLRSNKGPLGDFFRRIRAYAGAAKAIVATARKLAEIYYLMMKSKQAFNPAELEKSQKKYKDNKIRYLERKIDKLKNSA

SEQ ID NO: 377752 - protein, 311 aa, unidentified
MAKRVIGIDVGKGKLDAALHGQKRVKSWANDETERAELAAWVVDQQVELVVVEASGGYEAGIVSELVERGQAVAQVNPTRVRAFARAAGVLAKTDKIDARTIAYFGATMTPRAQARRSPAQLALNESVTRRRQLVLIVTAERNRLQTASPEMRESIARHLDWLQAEINTLEEQINQAIAANSEWAETAKRLQSVPGVGAITAATLIADLPELGQLNRQKIAALVGVAPFNNDSSKRRGKRRISGGRTSVRSVLYMAALSATKHNPVIKSFYERLLEKGKVKKVAITACMRKLLVILNSIVKSGQDWVAPVT

SEQ ID NO: 377753 - protein, 347 aa, unidentified
MLIIGCDFHPGFQQVAIFDNRTGEMQGKRLQHRAEAEQFYGALAGQEVRVGMEACGHYPWFERLLEELGFELWFGDAGRVRASVVRKQKTDRRDAEHLLDLLRQDRFPRIWVPSLEVRDVRQLLVHRHKQVQARTRTKNQLQSMALSHGVQKKYKLWTKAGRAELEQLPLLPYAAERRKRLLEGLDALEAEIGELDRRVAEEAGQRPEAVRLMTHPGVGSVTALAMVLTLGPAERFGSGKQVGSYFGLIPSEESSGGKQRLGKISKQGSSFLRFLLVEAGQTAARYDPQLKRFYRRLAARKNRSVAKVAVARKLATRLYLMLREDWTYAQLCQAVMQVSPSHSVAGE

SEQ ID NO: 377754 - protein, 457 aa, unidentified
MGDDVMISVDPHKASNTLAVMDPVTKTVIARQRFMNTAVGYRRLREFAGGWTHRRWAVEGCHGAGRSLAQRLAGDGEIVLDVPAKLAARVRVYSQGHGRKSDADDAISIGLAALNSTRVAVVRRDDTLVSLRLLCDRRDELGALRTQAVCRLHRLLCELTPGGTHRGLRASRAEQLLAKLRPVDPVDVVRCQLAHQHLDDIRALDAKMTAVRAQIAALVDGTGTRLTELYGIGPVIAGRILAEVETIDRFPSKDHFASYNGTAPIDASSGEQVRHRLSRAGNRRLNHALHMMAVTQIRQPETIGRRYYERKRLEGKTPKEALRCLKRRLSDVVYWQLVADRRATITQCGSATTPTRTRPTSTSATTPVPRTAPPRRPPHPTASTGSSHSTGKTAASSASKSSTPAVGSPNTSSTKQKTRAEATRKPRTNSAAVPDRRPTSAAAAGVKAGAATRRARP

SEQ ID NO: 377755 - protein, 351 aa, unidentified
MLHVGMDMHKKFSVVTVVNEDGEEVISGKRLDHGNGEVKEFFSEHREDIQVVLEAGSNWYWMCDLLDELGIPNRLCHPLKTKAIASAKIKTDKLDSRILANLDRMDFVPESYITDIKTRHSRELLRYRSALVKIQTGIKNRVHAILAKNNIPNPFTDLFGKAGMKYLSELKPAPVYRQALDGYTRQLDALSTEIERAEKSIAKTMEITPETSLLETIPGVGPIRALTIASEIGDVGRFHSAKHLASYAGLVPSTSQSGESTRHGKITRQGSRWLRWSLVEAAIHAAGKPGPLRDFYLRLAKSKGKKAARVAVARKLATYIYHMLNEGKDYRSVLSYSKKRPGVSPPGPMGK

SEQ ID NO: 377756 - protein, 388 aa, unidentified
MQIVSALDVHRRQITYKTVELVSGESWRGRISPAAREPVRAWLERFAGQDAHFALEGTTGWRFVVEEIERAGHTAHLADPAETASKRGRKRRAKTDDADCDLQLRLLLAGELPESWIPPAQILELRTRVRLRKTLIDQRTAWLQRLQAQLFHQGAPSGLKPRTLAGRRALAAVELSASGRELVELALRMLDMIDRELGPLDHALQAYARRQPGCRALITRLYGVGAVTATAILAELGDTRRFTSSDDAVRHSGLDVTVWQSDRKRAPGHLSHQGPSLLRWALFEAAQCAARRSSPDHAYYLKVAKRLDHNRACLSIARKLCRRAHHILRELGDDALATLDDAPQKQGGRHCCGLINNRARVAHHHADALAASSRIAPAASAPRPGRPP

SEQ ID NO: 377757 - protein, 366 aa, unidentified
MKKISTAAAKQSRNFSELRLTIGLDLGDRSSDYCVLDETGGILIESRVSTSPNAMKTVFGPMARSRIALETGTHSPWVSRLLNELGHEVIVAHARNVRLIGESRRKDDRLDAQTLARLARIDAHLLCPVKHRSARAQADLTVIRARAGLVRARTALVNTARGLAKSYGERLRGCNVRNMNPEKADALSPELQKALQPLLAGIAAVSEQIGEYNERIEKLAEESYPEVMLLKQVKGVGTLIALTFLLTLEDAHRFRKSRDVGCYLGLQPGRRNSGQSEPQMHISKEGDPYLRTLLVQGAQHILGPFGPDSDLRRWGLKIAERGGRNGKKRAIIATARKLAVLLHRLWVSGEVYEPLRNNQGTIAAAA

SEQ ID NO: 377758 - protein, 355 aa, unidentified
MGEVSTIGIDIAKSVFQVHGVDTDGAVVIRKRIGRTKILKFFTDLPPCLVGMEACATSHHWARELRRLGHDVWLMLPTYVKAYVRRSKNDAADAAAICEAVTRPSMRFVPIKSAEQQSALMLHRTRDLLIRQRTQLINALRAHLAELGLVAAKGREGLHQLVTIVMESCDEKLLSDARFACQAIVMQLHAAHQINGLDKRIIQAHRVNADSKRLNAIPRFGVILSTAVVATMTDPKAFKTGREFAAWIGLVPRQNSTGGKERLGSISKQGDRYLRRLFVVGAIAIVRTARMRPEKYPWVIKLLTRRPAKVVAVALANKMARVAWAVLAKGESYRAPTRSSNAALAAAGLIEGLGI

SEQ ID NO: 377759 - protein, 395 aa, unidentified
MYSLLVGIDVSKEGFSAAGIDSGGKEAFSKAYAMDLKGFGDLLKTVRSHCGKDSEVLMAMESTGCYHINLFSFLTSQEIRTMVVNPLLIANYAKLSLRKTKTDKKDAMTIARFLLDHHQEISQLSISQDLQDLRDLSRERESLSHLVSATKVEIKRVLRTTFPELETIGDIYTGVMLRLIQEYPSARLVSAAKLKGIAKLLKGPYLGNKLTYTAEDILRAAKTSIATVSPGKEIILQGKIATLLHLQGRLEEITKLLTEMCKSTRMDDLEILQSITGVGPKTAVPFLAEMGSIENFPSHKKLIAFAGMDPSVSESGHSIGASRLSKRGNRHLRRAIYLMTASVVSKNACFKAYFQKRKAEGLAPQKALFATAHKLIRVIFAMLSQRTFFQAKEAI

SEQ ID NO: 377760 - protein, 366 aa, unidentified
MEKISTVQVFGNEIWKEQKLTIGVDLGDRWSFYCVLDEAGKIILEQKVATTPEAMKQTFGKIPRSLIALETGTHSPWASRLLTELRHEVLVAHAQKVELITKSNRKDDRHDARTLARLARIDPALLGPVRHRSAKAQIHLTVIRARAELVSARTALVNAARGLVKSYGQRLPQCGTQQVNRELAVGLNTELREALEPLLKEIESLNERIPEYDERMEKIAQEVYPEVSLLKQVKGVGTQIALTYVLTIEDPYRFEKSREVGCFLGLKPGRRNSGKSEPQKKISKEGDRYLRTMMVQGAHYILGPFGEDSDLRRWGRKLAERGGKNAKKRAVVAVARKLAVLLHRLWVSGEVYEPLRNSQKAMRAVA

SEQ ID NO: 377761 - protein, 450 aa, unidentified
MGRPQVIDDEERERVYEKVAAVDVAKDSGMVCTRLPHPSRAGTRQSTVWTVQARMGAIRELGRQLARGGIQTVTLESTSDYWRIWFFVLEGCGLAVQLVNSSQAKNLPGRPKTDKLDAMWLARLTEMGLLRASFVPPAPIRALRDYTRARTRLTQERTRCWQRLEKLLESALIKLSSVASKLTTLSAQDMVRALIAGERDPQVLAALARGKMKAKHDDLVEALDGMFGDHHGELAQLLLDQIAFLDSKIAELTARIQEQAAAQPGAWGVNADGTTGPGAGTSPGDPVLPVVQRLAQVPGISEDLARSIIAETGLDMSRFPDAAHLVSWAGLCPRAHQSGPRARNGKKGRGNGYLRGYLGQAAIGAAATATFLGERYHRIARRRGKAKAQVAVARSILVIIWHLLASPEARFTDLGYGYYQARTDKDKKIKNHIRQIEALLGHPVTIAKAA

SEQ ID NO: 377762 - protein, 356 aa, unidentified
MRFYSKQHKYYCGVDIHAKTMYLCIIDQEARIIKQKNIKSNPAAFMKAIEKYRDDIVVSAECMFTWYWLADLCAKEHITFILGHALYMKAIHGGKAKNDRIDAYKIAYLLRGGNIPMAYVYPPEMRATRDLMRRRNHLVRKRAELLGHIQNTNHQYNLPPLPKNIRFRGNRDGLIEHFRDECVQKSMETNLFLIDHYNSLLLKLEHYICKKAKVHDHEALLRLLSVPGIGQTLALVILYEIHDIRRFPRVQDFVSYSRLVKPSKESAGKIYGHSGKKIGNAHLKWAFSEASVSMLRGIPDVKKYKEKLQRKHGKAKALSILAHKIGRAIYYILKRKEVFTIEKFLTNKYQIQAGQA

SEQ ID NO: 377763 - protein, 318 aa, unidentified
MRPCHGPIKGLDRVVGVDVAKASVVLFDSQTRRTWKVANQPQALRQALSGLADYDLLVCEVTGGYERAVLEAALALGLPAHRADPLRVKRYIGSLGGLAKTDGIDAAWLARYGQERGADLALWRPRDINRDALAALVRHRQHLVAARVEAKNRRGAPGCQIASFLDTEIAFLGQQIQAVDQAIGELMADAPQLAQSEARLRKVVGFGPVVTRSLLAFLPELGSLSRRQAASLAGLAPHPRDSGQLNAYRRTGKGRDGLRPVLFMAALAATRANPDLKAFAQRLAENGKPKRLVLTAVARKLVVLANAILGEQPSTQLT

SEQ ID NO: 377764 - protein, 356 aa, unidentified
MSHDVKYIGMDVHREAIVIAVLNGSGKLVMETILETKASSILQFLHGLRGELHVTWEEGTWAAWLYDLLQPQVEEVLVCNPRRNALLKEGSKSDKVDARKLADLLRTGMLRPVYHGENGLRTLRELGRSYQTIGKDLTRVMNRLKAVYRGWGIPCAGTRVYAARYREEWLSKLPQAGVRRRAELLYQQLDGLQALRREVRPEFLAESRKHKAAKLLRQIPCIGPIRAARLIALMQTPHRFRSKRQLWTYSGLGIETHDSAQYRYVGGQLQRSKKPQQIRGLNRNHNHEMKEIFKSTATRASCGTGPFHEFYAALLAKGMEPEMARLTLARKIAAITLTLWKKGERFDAEQLKTQAA

SEQ ID NO: 377765 - protein, 279 aa, unidentified
MSVYVGIDVHRKRSQVAVVDGKGEVLANRNVPHGAEPILKVIGGLPPGTPAAFEAAYGTSWLVQLLEDYGFDPHLVHPSRCKAIASARLKNDKVDAAILAQLLRADLLPEAWIAPPAIRQLRALLRHRVALVRLRTRLRNRIHAIVADYGHDRSGGGYWTGPGRAWLASLSLPAVSRELVEDDLGLIDALQVRIDRLDWEIRQRARSDPRVAVLTQLPGIGPFTALVILAEVGDIRRFASARKLASWAGLTPTVRGSDRVAHYGHIWKGGLGVAALGVV

SEQ ID NO: 377766 - protein, 409 aa, unidentified
MIYCGIDWAEKTHDVALVDDTGTLVAKRPITDDAAGYRALLDLLAEHGDTEDNPIPVAIETSRGLLVAVLRTGRRKVYAINPMAAARYRDRHSVSRKKSDPGDALVLANILRTDMHAHRPLPDDTDLARAIAVLARAQQDATWNRQTIANQLRSLLREYYPAALAAVEPWKNGLCHPEAHALLKAAPTPTRAARLTRTQLQAALKRAGRQRRIEADADRLQEVLRAEWAHQPPLVEDALGEQMLALLIQLEAACTAADRLAKAVEEVFPQHPDADIYLSFPGLGAQLGARMLAEVGDDRTRFTDARGLKAYADSSPITRASGKKSSITRRWVKNDRLNTAGYLWAFSAPNASPGAKAHYRHRRDDCGDWHAGAQRHLFNRMIGQLYHCLQHTELFDEQTAFPVELAEAA

SEQ ID NO: 377767 - protein, 363 aa, unidentified
MEYIAFDAHKHYTLASVVRPNGNLVREERIEHDRGSLREFLERCERGSPVAVETIGNWYWIVDEIEAAGCVPKLVHARKAKLMMGEINKTDRLDARGLNRLQRNGTLPTVWIPPGELRDQRDLPRTRMVLVRQRTQLKNRIHATLAKYALHDLEVSDFFGVRGRALLRQRFDLLPPHTAYASQQLLEQVEELDRRVREFEQRIQAVFKPTPAIQLLLTLPGVGLTLGVVIALEVGDVARFASAEKLAAYAGATPRVHASGGKTRFGPSRPDVNRYLKWAFVEAANAICIGRGRAPHCHVSRLYERIARRKGHAKAIGAVARHLAEATFWILRKHEPYREPKASAVSPTGDKRGWPLSSRKLDR

SEQ ID NO: 377768 - protein, 354 aa, unidentified
MIWLGADLHKRSHTLAAVASATGELLGDRTIRVGEPGFAAALAWARGLGSERVWALEDCRHVSGSFERFLIAHGERVVRVSTRLMAGERRGSRDRGKSDRIDAIAVARAAIREGVEQLPQARLAGVELDLRLLVDHRDRVIRMRTALQNDVLWHLHDLWPEQSFPRNALVSRKWGQPIARRLARAEQTARVRIAREELRQIRDLTRSADALEAEIAELVGQVAPHLLDEPGFGPLTAAKLIGEIAGADRFSSDAKLARASGIAPIPASSGKTQRHRLDRGGNRQINAASHRVAVTRARCHPESRAYIERKRAEGKSSKEAIRCLKRHLVRRIWHLLQTPAPDPTPTAITTTSLT

SEQ ID NO: 377769 - protein, 340 aa, unidentified
MKRYLGVDLHRNCFTVCTLKEDGQSELRKWSIHSLCDFAQEVQATDAVAVEATGNARYFCQALKERGCRLVVVNPHQFQVVSRSVKKTDAHDAKTLAEFLAKDMLPEVRMKEALPAEIASVLQTRDKLVKLRTVLKNKINNLLAGRGILIRRESLSSDKGLEQVLQAPVSDLERVELEVLVGQIRHLNDSIRRLEAAIKEQGPKLPGYESLKSIKGIGDIGGSTMLSTIGDINDFASEGKLAAYFGIVPRVQNSNATERSGRITKRGSKLGRTALVQCALIAMRYSPYLAHYYARIKAARGSGKAIIALARKFLGIIYKTLKNGWVFEDFPAFVLAPATG

SEQ ID NO: 377770 - protein, 359 aa, unidentified
MARTASEEAPVLWIGVDVSKKTFTAAARLPWEAKAIYPEDSVEFENNRSGARRLCEWIGELEEKAGGSFGVAMETTGTYSLRLYENLKKRRPELHVAICNPLSVSYYMRSLGTNKTDKADAAVIAEFAVQRRPARYVEPSKDRAELMRLTRDRTFLVESRTRCRNRMESERNPSSRARLKKVVETINEQIRDIDAEIRKYISDCASSDCQREIGLMQTFPGVGRLSAAIIYGELGSLADYTRKQLSAMSGICPTTRQSGTSLNKGGLSKRGSKRLRRILYLDSLQAIQGSPALAALHQRMLGKPDSSKMSARVACMRKMLLILRGMVVSGKKFDKDHVSVRPGVQEKNQKNPEKTEMMA

SEQ ID NO: 377771 - protein, 420 aa, unidentified
MNDSQQWQQHRAFGALDWASEKHSVVLVNQTGKVIEDFEIEHSALGWKKFREKLQPYGSIPFAIETSQGVAVEQLLEAGMLVYPLNPKSAQAYRERKAPSGVKDDRLDAWSFADALRMDGQNWKALRPEEPLIKELRLLCRDEVTLIEQRTAFINQLRHALAEYYPAALEAFEDWTSVSAWMFLQRFPTPESLAQAGKRQWQKFLHSRRLWGSDQGPRRMEIFAHATEFAGTPPTARAKSLLALSLVQMLFSIEKQLAVYRQRIEELFARHPDHDLFGSLPGAGPKIAPRLLSEIGDDRQRFGGDPQNLQCLAGSAPVTKRSGKQRKYWHVHQRWACDKHLRHAIHLFSEQSLSRCVWAEIYYQHHRQKNQSHANALRRLSHRWLKIIYKMWIDRTPYNAELHHRNQLQHGSWIFQLQKS

SEQ ID NO: 377772 - protein, 346 aa, unidentified
MTIVEATRTVTGGIDTHGEVHVAAALDEVGGLLGVETFDANPAGYVDLFTWLSAFGAVTKVGVEGTGSYGAGVARFLARAGVEVIEVDRQNRQARRQSGKSDPLDAVEAARAALSGRARGQAKSRDGSVEAIRVLVVAKRSARASRTKALVQMRQLTYSAPDQLQSRLKGLPLPQFVAAAQGLRPSRAADPVTAATKASLSSLAHRVADLEEEIAELDARITPLLQATAPALLAVYGVGIDTAAALLAAAGDNPERLRSEAAWAHLCGVSPLQASSGKVMRHRLNRGGDRQANSALWRIVITRLASDPRTQAYMERRVKDGRSKSEVIRILKRYVAREVYRYLPRG

SEQ ID NO: 377773 - protein, 338 aa, unidentified
MKCYVGMDLHATNTYVGVVDEENKVLNKQRFRNELPLILAGLDPFKKDIQGVVVESTFNWYWLVDGLMDQGYRVHLANVSAIKQYEGLKQIDDQRSAFWLANLLRLGILPTGYIYPKEERPTRDLLRKRLQLVRHRTSHILSVKNILARNLGLRMKSEDVKKLLDAEVKRFFPDKEMQTAVLASLGLIRHLEEEISTIEAMILKKLKIKKEFAKLITLPGIGKILALTIMLEVGNIRRFPTVGDYSSYCRCVKSIRTSAGKVIGYGNRKNGNKYLSWAYVEAAQFARRFHETVRNYYQKKMAKTNRIVAIKALSHKLTRASYYVMRDQVDYDPARLFQ

SEQ ID NO: 377774 - protein, 437 aa, unidentified
MTSMTTTAAAVIGGVDTHADTHYAAALDQVGRLLGTRQFAADAAGYRQLLGWLESFGSVQRVGVEGTGCYGAGLTRFLRGRDVTVVEVNRPDRRARRLRGKSDPLDAEIAARRAMAAYDTAVPKDTATAVESIRVLRLARDGAVKARTAALNQLKDLITTAPDQLRSSLRGKTLRKVAAEAARFRPDMTRLANPVQATKTALRSVGARVVALNGEVAALDRQLGALVGATAPRTMALFAVSTQHAAQLLVTAGGNPHRLRSEAAFAALCAANPIPASSGKTTRHRLNPAGDRDANATLHMIAVLRMRWDPATRDYVTRRTEDGLSKREIIRCLKRYIARQAYHAVTADLAEPATCDDTPKLARVSSEPVELIALDEPAQGLISARRNGEPTFTHVQGIADAMMAALSRGVDRVIPKQLYPDLRESLPPELPPWVKVR

SEQ ID NO: 377775 - protein, 369 aa, unidentified
MKKDITYVALDDSKNSIVAGVLRPQATEPELRQFPTEPKHLRRFFSRLQREGPVVACYEAGPSGYDLYRQLTALGVPCQVIAPALTPRKPGDRIKTDRRDAAKLVRYFRAGELTPIHVPDEAAEAARDLLRCREDVQEDLLRWRHRLVKFLARHGRVYRDGRPWTQRHWTWLRSQRFDLPALARTYAEYRFTVEQLLARVAELDREIAALAETAPSRERVGWLRCFRGIDTLAAMILLTELGDVQRFAHPRELMAYLGLVPSENSTGGRERRGSITKAGNTHARRILVEAGWHYRHPPRIGGALARRSQGQPKTVLTQTWQAQLRLHRRYRHLIGHGKRAPVAVVACARELVGFLWAVLTQTEAAAQAA

SEQ ID NO: 377776 - protein, 275 aa, unidentified
MTTGTVYVGVDIACASAQVAWLLEDGTTGQQSIQQSPEGQLALIRQLQQLAPAEQTRVVMEATGNYWLALALALHEAGVEVSVLNPSQAKHFAKSDPVDAALLAQFAQRMQPARWNPPPAICAQLQQVLTRRQQVVDMHTAELNHLHALRHLPGTLPSILTEVQDHLALLSARINTLNQQLEQLVSGQHEWHTAFRHLCSIPGVGTLGAATLLTATHCFARCETPEQAAAFAGLVPYVRQSGSSLRAQAHIGGGEPHLRHVLYMCALAAFRCNPG

SEQ ID NO: 377777 - protein, 350 aa, unidentified
MEAYDGPQIVGMDLHRRRSVLVRMAEDGHKLSTVRIANSPARLAAEIKRAGLHPKVVLEACYGWYWAADTLTAAGAEVHLAHPLGVKEFSHRRVKNDELDARDLADLLRMGRLAEAWIAPAEIRELREITRYRGKLVQLRTSCKDQVHGVLAKLGIEVTCSDIFGAWGTQWLDELPLPQPYSWKVASLRQLTGWLSAEITVLEQVTADLLAGHDAYRAVQALPGIGPVLGAVIVAEIGDITRFRHPARLCSWAGLTPRHYESDTKVVRGRITKQGSRPLRWALIEAVQRTPAGTPIHQARDAIIARRGPQARNIAKVAAARKLLTYVFYAMRDGHVRALDTPGAAAPETA

SEQ ID NO: 377778 - protein, 342 aa, unidentified
MKFNQLTTKYAAGIDLHKTPVAIHILGKNDISLYQKTIRKNMRRGLKRVLLKYKDDITVCVESTYNWYWVADLCLQLNIPFEIAHAYYAKKKMIGKNKNDKIDAFGLASMLLHEELPIAYNYPTEMRATRDLLRLRCSLKKMRTGRLQHHSCVEDQYIMSEISLEEAGYNEETIKDITTNMGVDEQCIDFLTTQINGLEKHILERAHIHDKDAFIRLKKIDGIGNILALTLLYEIHTVKRFRSQQEFSSYCRVINPQCESAGKRVGAGNKKAGNKYLSWTMQEIVTYSCRYNKRIGEYFKKLERKKVRKHARRILAHKWAIAIYNILKKRIDFDIDKFLKNA

SEQ ID NO: 377779 - protein, 482 aa, unidentified
MKHSHQDKSQKVSPHKEQNSWQQMNRKQRREMTRKMHAEDLSLEVVHPHAAGIDIGNEAHYVAVPPDRDNKSVRRFGCTTAELKEMAVWLKQCGIRTVAMQSTGVYWIAVYDILEAAGLEVYLVNARETKNLPGRKSDVQESQWLMKLHTYGLLRNSFRPPQEIRTMRTYWRQRNDLIRSAARHVQRMQKALTQMNIQLANVLSEVSGVTGQAIIQAILAGERDPRKLAAFRDKRVKASEEEIARSLEGNWQEDLLFMLKQEQDGYEFCQKQMSECDERLQQYLRQREDRSKGAELPEENRKERLRKKKTNKPRFDLRTELFRMTGTDLTQIDAIDVRTAATVISEAGWDMSKWPTEHHFVSWLRLCPDNRISGDKVIGKGRLPINNRLSVALKIAASTLRQSNTYLGAQFRRLKTRLGPPIAIKAMAAKLARLLYRMLRYGMRFIDRGAQFYEAQHRWRQINSLKRKAANFGLKIIDAPAA

SEQ ID NO: 377780 - protein, 346 aa, unidentified
MKYYVGLDVSLKEISVCVIDGDGKIKARGTTPADPMAVKSWFKKRSLEPETIVHESGQLSIWLQRGFLELGLPAVCIDARRAHKSLSARLNKSDASDAEGLAQLARTGWFTPVFVRSVEADRLRALVGARERMIRLRKDLEGHIRGVLKTFGIRMAGVTQGKLRQKFRDQLAVAGETDPVLRIMADAFIDIHAMLCKAAADLGRALKTKVETHPVAKRLMTIPGVGPIVSLSFIALIEDPSRFTKSTDVGAYLGLTPKRYQSGEIDWSGRISKRGDKAMRSLLVESASTLIRNVKRFSALKSWAIRLAGRKGFRKAAIATARKIAVLMLTLWKTETDFQWTKEVKS

SEQ ID NO: 377781 - protein, 343 aa, unidentified
MEGYAGQQFVGIDLHRRRSVIVRTTERGDPLETVRITNDVDSLTKVMARAGVSPEVVLEATYGWYWAADALADVGASVHLAHPLGVKAFAYRRVKNDVRDATDLADLLRMGRLPEAWIAPPVTRELRELVRHRAKLVGIRSGCKCEVHAVLAKCGVQVLMSDLFAPTGIGLLERLDAPAPYLARVGSLRRLIDDLDVEIDLFSRLIRGRLVADPGYRAVQTIPGIGPVLAAVFVAEIGDVHRFPGPAQLASWAGLTPKHHESDTHVHRGRITKQGSRLVRWAAIESVQALGPGTGAGRLKRRVGDRRGRNIGKTAAARQQLTYVYYAMRDGHVRSLHRSRVAA

SEQ ID NO: 377782 - protein, 346 aa, unidentified
MTKTPIAVLGIDLGKISCSLVGLNASGAVVLRRRVRRETIPGMTAKLPRCVIAMEACCGAHHLGRLLARQGHVIRLMSPEYVRPYVKAQKNDDRDAEGIAEAATRPTMRFIDLKTEEQLDLQMLHRVRSRLVGMRTTLINQLRAILLERGSVFPKGRRKLEVALTVFLADPEVSLAARIRTLIVEIRAEWASLDKRIDTLDREFVEVVLDDEAARRLITIPGVGPMTATALRAAINDGSAFTRARDLPAWLGLVPKQHSTGGKPRLLGISRRGNAYLRQLFIHGARAAMPSLSKAENPTGAWLRGLLARAHPNVAVVALAAKLARVAWATLRRGTSFARQPELAAA

SEQ ID NO: 377783 - protein, 340 aa, unidentified
MNITTIGLDIAKSVFHLVGADNRGKQVLKKRLKRTQVLEYFGNLSPSVVAIEACGGAQYWARQLKGLGHGPRLINPKYVKRFLRGNKNDYHDAAALCEAVVHPETRLVAVKTPEQQDLQALHRLRGGAMKERSALVNRARGLLAEYGIVVAQQLGQLRRAIPQILEDAENGLTDFFRALLAQQYEQLVEWDRRIEGYDHQIESLFRSHEACGRIAAVEGVGAVGATALVAAFGDARQFASGRQFAAALGLVPRQHSTGGKSRLLGISKRGDRYIRTLLVHGARAVVQAVLAKDKTDARSLWIKRLVADRGKNRATVALANKNARIIWALLTRGETYRVAA

SEQ ID NO: 377784 - protein, 267 aa, unidentified
MSSFYAGIDLHSKDLLICLIDEKGIAVKEKKIKNNIDHVLGFLAPYGECIAVAIESTINWYWLVDSLIDAGYEVRLAHPLALKHITEAKIKTDRRDAYKLANLLRLDALPKSYIYPKDIRPLRDLLRRRSDLVAEKTKWFSTLRMQFMQYNVNTMSLSVLKHFTDKDFDMLNIPEALKMHANMTMKRIELLEIQIEAIEKYLESITVGDPRFKLLTDITGIGRVLGLTIYYEIGDISRFENARHFSSYSRLVPSCHQSSGKSKATLI

SEQ ID NO: 377785 - protein, 348 aa, unidentified
MDKIIRIGIDTSKSVFVLHGVNAADEPVLRKKLRRRQVLDFFRIMEPTRIGLEACGAAHYWARELMALGHAVVLLPPQYVKPYVQRGKNDAADASAICEAMSRPRMRFVPGKTAEQQAALMLMGVREQLITRRTQLANMIRGYAAEFGITAARGLDKIEPLLARIATAADVPELAKELFAALAEQYGELKPKLRRIDAQLLAWHRQNELSRRLAQVPAIGPIGAALLAMKVPDPRAFRTGRDFAAWLGLTPKDHSTAGKQRLGVITRAGDEALRGTLVSGATAVIQQVSKARGNPSPWLIALIKRKPPKLAAVALANKTARIAWKLMVSGEPYDRNHGAAARTVGIAA

SEQ ID NO: 377786 - protein, 316 aa, unidentified
MSYIHFIGIDVSKQWFDVAIHDAKAAKPQRFQNCGEGFAAFASGFAKLLPQALVVLESTGGYEIELIAALLRDGVSVHRADPRAASYFIRSLGKRGKTDQLDALALARYGAERHASLRLCRVCETSQEELQALLARRADLVAMRVAEQNRRQHPRYDRFASLKGSLNTMLAVLNAGLAELESQIAALIEQSPALAAKYAIMTGVKGIGKQTAFTLLACMPELGTLTRRQAASLAGCAPHPKDSGKTQGYRATRGGRAGVKRSLFMAAMAARRFNPACRVFYERLIGNGKKPILAITAIMRKLIVILNAKLREHTYA

SEQ ID NO: 377787 - protein, 344 aa, unidentified
MNIMHYIGFDIHKKVISFCEKQVDGTVICQGVIRATRKDLNKWTIERKVPWVGAMEATLFTGWIYDYLHPFAKELKVAHPEMLKAITAAKKKNDAADAEKIADLLRCNLLPECYMAPTEHRDLRRILRYRNLLVREAAKMKTKTATLLMEVGAEYNKRRLHGGKYFQELLCNLDYVPESALNLLQMSHDSVDFFSKMQKTLIYALRNEAQISKRVELLMSIRGVGEVTALTWVLEMGDINRFGSIGQMVSYCGLCSAQKESAGKEIRGPISKKRNKHLQTVLVEAAKLAPQWNPQLAEVHERELQKGNRNRATLAVARKLVAYMQAVDKTKKCFVPKEILKEAA

SEQ ID NO: 377788 - protein, 352 aa, unidentified
MTRITTIGIDLAKKVFQVHGVDAEGKVVVARKLRRKEVLAFFAKLPPCLIGMEACGSAHYWGREITKLGHTVKLMPPKYVKAYVKRGKTDAGDAAAICEAVTRPSMSFVPVKGLEQQGLSMLHSARSQLIGQRTQLINAVRGHLSELGIIAARGLLGLAELAAIVRNESDQRLPAIARTALMILVVQIETISKELTKLDSMLRKENKASELGARLETIPSVGPVIGSAFRARVTDAALFKNGRHLSAWIGIVPENDSTGGKVKQKGLSKKGDRYLRSLLVNGAMAVVRQAQKRPDKYPWVTRLLGRMSNKQAAIAIANKTARIAWVVMVRGGIYEAGHRAAHYRAQACAVTG

SEQ ID NO: 377789 - protein, 433 aa, unidentified
MGLIVPTTIHPEREDQPLPYEWFVGIDWGSQQHQVSVLDRDRRRVGERVVDHDGASLARLADWLWTLSAGQPQRVAVAIEVPRGAIVEGLVERGFHVFALNPKQLDRFRDRHSVAGAKDDRRDAFVLADSVRTDQPSFRRVHLEEPQLLLLRELSRAEETLLEEFRRSANRLREQLHRFYPQMLQLCSAADEPWLWGLITLAPTPAHAMLLSEEQVQRVLKAHRIRRLTATEVLACLQALALPVAPGAAEAAQAHCQLLLPCLRVLAEQLQACSQQVSALLSTLAEEPGEGESPSDVAIVLSLPGVGRKITAWLFAEAAQSLTERDYQMLRTHSGVAPVTKQSGKRRLVVMRRGCNPRLRHALYHMARVAMQRDAHFSSVYAALRAKGQRHGQALRNIGGRLLRILMSMLRHRTCYDASRIRCEPVVQMGQKM

SEQ ID NO: 377790 - protein, 404 aa, unidentified
MWYAGIDWADTKHDVVVLDETGHQVASKRVSHTQAGLSDLTKFLEGITGPAQKEQLVCVIETNRGLLITTLLEAGFHVFPVNPKTVDRRRVASGAKTDQIDAYLLAKLGRSDLADLRQLQPDSPLIQELKTLTRDQEQLIQMQTRLVNQLTACLKAYYPVALSLFSKLHQRSTLRFLQGYPTPQEASAASQEHLTSVLKQAGHTRAEQVAAKLFATLHQPQLTADPITTRTKARLMLALVGQLLLLLEQIAAYEQEIEALFLIHADSPTFASLPGAGKRLAPRLLAELGDDRGRYESRTSVQALAGTAPVLFQSGNYTKAHKRHACLKPLRNALYQVAWQSTLTEPWAKDYYRRKRAEGKSHSVALRALSNVWVRILYALWVNHTCYERATFEAAQCAHTIRAA

SEQ ID NO: 377791 - protein, 449 aa, unidentified
MKNSTARKLEQLPTDYLIVGIDAHKKKHAAVVKTQDAFTRAKFKVSNSRDGFVELLERTKAQMVKTDSRGTIFAIEAGGRYWRTLAYFLEERGIPFRLISPFTLKRRREGEDIDRRKNDYRDADMAAELLRTGKFTETRLPQGIYADLRAAYHTYYSLGRERSRATNLLSALLDSLFPEFYAVFKDISTKTALAVLAAYPSPHVIAEMSMEKFMDTMMTKYKGQYLIRKKVSAIYQAAHNSVGIHAGAGVVCFEISLLVERIRLLTEHRRKVEDLIVTLVEWIPESKYLLSIPGLGHITIAGILGELGPLNHYRSGKQLVKMAGINPMQSESANKQASKTPMSKKGRPLLRYCLWEASLNILNHNQEFKAWAKRLQERPLHQNPLKNREARGAVCKRLLYLVLALFNKHSFYEVNYEINIERELVAAKTISKFTYQAGGVTSPLFFGRS

SEQ ID NO: 377792 - protein, 453 aa, unidentified
MSPIVTPPKASETLMDVNPDAAGLDIGHDEIWACVPTERATPAVRVFGTYTPDLNALADWLVLCGIQTAALESTGVYWIPIYEILEARGIKVYIVNARHLKHVPGRKSDIQDCQWIQRLHTYGLLTASFRPAADICAIRSYVRQRAMLIEYRAAHIQHLQKALQQMNVQLTQVLSDITGKTGLAIIRAILAGEHDPQRLAQLRDERCAKSEAEIVKALTGNYRAEHLFALKQAVALYDMYTTQIQDCDTELERLWQALRPAQDQALPPLDTSDKRNTHSKNAPTYDARTLLYEVVGVDLVAISGLNVSTVQTILSDTGLDLSAFPSEKHFCSWVSVAPRNDISGGKVLRSRTLKSGNRAGQAFRLAAQSVSRKQDEFGAYYRRQRARLGPEQAIVATAHKIARAFYHVLKHRTPFRSVSADDYNQQVRDREVARLKKKATQLGFTLAPVPAPA

SEQ ID NO: 377793 - protein, 339 aa, unidentified
MRLYAAIDLHSNNGVLVIIDESDKVVYERRLPNDLGRVLSALAPYRGQVEAIAVESTFNWYWLVDGLMEAGYAVRLVNTVAVKVYEGRKFTGDEHDARHLAHLLRLGILPTGYIYPKEERSVRDLLRKRAQLVRCRTLQLLSMESWVNRHTGGGISVPKLRALSDEAIQAMAGGNRQGLLSMQSNRAVLQCLDEQIQRLEQAVLREARVKPAFEQLLTVDGIGRILGMTILYEAGPIKRFGRVGQFASYARCVDSRRLSNGKKKGEGNRKNGNKYLGWAFVEAAHHAVWCNERIRRFYQRKKAKTNGAVATKAVAHKLARACYHVLKKQVPFEAERAFS

SEQ ID NO: 377794 - protein, 531 aa, unidentified
MVTTRTTGTKRKRSRSQRFKKAVLGRPQGVIQSRVQAVGPEKFGIVAIDCAKARSKWMLVDFYGNVICPPADVEHNRSAFQRAILMLKQAVGKHDLKDVIVAVEMTGTYHKPPMRAFRQAGFETRLVHPFASSFYRQPEHGDLKTDAHDLDAIFRAAVNGFGLIEKPVDAIHHQLQILARHRRDLVKKRAKLQCQIRHHLELALPGFGALFDGDDLWRQITPAPLLEAIAQRGGTVDVVKQAGQKGITQWLNAAKVRFHKKTVERVTVWAVNAAESDPMAAFHARVWTSQLADWKQKTQQIQEIERDSASVLVKTPYVLLLSYPGINVVSAAELAGEMGPVENYATAKSICGRAGLFPSRYQSDEVDRGGKLTRFRNARLRAAWMMVADNMLKCNAYWIKKAERWRGEGHKPQDIRARIANRMTRGVFQMVSGRQLYQHASRLDRGYIMDKLLTFHREHETSPAVIVRDLKHAADQLPKSSQLEEGAKLQEAALKARRSRQKGPQELGTLLVAVLARLGIAAKDDDALEST

SEQ ID NO: 377795 - protein, 320 aa, unidentified
MQTQNAVVYAGVDVAKATLQLHLQGRQSELANTPEGRRQLFNQLQNVPGVHVICEATGGYEQAMVKVLHQAKIPVSVTNPAQVRAAAQARGQRAKTDPIDAEQLTDYGQRYQPKATPPTSATQDQLVALTQWLKQLIHGQAMAKTQAEHHQQPFVRRQHAKLMAHLQSQIKSVEKQIEALLNQDAPLQQRVNCLDDIQGVGPRTAWMVLAHMPELGQLNRQQVAALAGLAPWTRDSGTMKGMRCIGGGRPEVRLALYMAALSAARSNPVLRTLYKRLRAKGKLGKVALTAVMRRLLAYMNHQLKDLLSKTATEKTEEAKA

SEQ ID NO: 377796 - protein, 431 aa, unidentified
MKNKTDMRLEEITAGTLVVGVDIAKHEQWARFVDYRGVEIGKAIKFKNDLQGFESIVAKICEICKIKTLKYPIEQVIIGMEPTGHYWKPLANYLIKAEYRVVGVNPYHTKKAKELDDNSPTKSDKKDAITIARLVKEGRYFDPYLPEGVYGELRGLVNARTSATKHLSAIKNMITAILDEYFPEIYEVFKKTLTGKASRQVLKSFPFPAFVIELGEDGVLAEIRKAVKKTVGMKKVRQLIDAAKNSIGVQYGLDAARMRLKMLLEELELIERHLCEIEQTMETALYKTGYAEQLLGIKGIGVVTAASFLGEVGDPLRFQNARQISNYAGYNLTEDSSGQSKSGTCISKRGRKQLRSTLYQMAFTMIGKNAEMKELYQYLTTRKNNPLKKKQALVVVSKKIITVIYSLLKKQEHYKPELVLGTVRKELMKAA

SEQ ID NO: 377797 - protein, 391 aa, unidentified
MPTVADRPDAPTAIQSNLAAIFVSLELSRSIWLITSLSPGSGEKMSKHSLRAGDVAALLARFSELQKKALARTGKSFPIIAVQEAGLDGFWLHRVLEREGIESHVVDPASIATSRRRRWAKTDRIDGEALLRALLANKRGEPRVCAMVRVPTPEEEDRRRLCRERKVLIAERVEHVNRIKGLLFSQGVVGYEPLRRDRRQRLNELTTGDGRPLPAHLKTHISRELDRLELLLDQLKTAEAERDALLAEQQAATPAQAPVGRMLLEFKGIGAESAATLWLEALFRHFDNRRQLASYAGLAPTPWQSGSVDREQGVSKAGNPRLRAILIELAWLWLRHQPQSALALWFKERVKRNGGRMKKTIIVALARKLLVALWKYVTAGIVIEGAVMKPA

SEQ ID NO: 377798 - protein, 316 aa, unidentified
MAEITNPSNVGIDVSKDWLDIVVIPSGETWRTENIAEEIDVLVEKLEKLVPERIIIEATGGYERLVTSKLYLARLPVCRVNPKRVRYFARSVGQLAKTDKLDAKVLARFGEVIKPALTQLPSDQEALLSALLARREQLTAMRVAESNRMDTAPARVRPSLNEHITWLKNQLKELDRQIDDFINQNPDLKEKDEFLQEVQGIGKKTSAKLIADVPELGHCDRKQIAALIGTAPYNHDSGYKKGQRSISGGRPDVRRILYMATLAATRSNPVIKAFYQRLLKAGKKKKVAIVACMRKLLTILNAILRDRKHWNSALSS

SEQ ID NO: 377799 - protein, 429 aa, unidentified
MIMGFTKPIEHFNLQRKKVITMNTLYVGIDVSSKSNVVYLMLPNGDKHSNFSIANSHEGSTQLVKRILSALTSHSLDTVLIGLEATSVYGDNLVYFLREDATLAPFNRKIHVLNPKQVKKFHDAYNDLPKNDYVDSFVIADCLRFGRINKEVYMGDYRYKALQNLTRARFFAVQNLVKEKQRFMNVLFKKYSTMTQEKVFSDTFSTTALAVYDEFESAEALANMDLHELTDFIIEKGKNRFPDPDAVAKAIQKAARSSYRLPKTVNDSVNQVLSISITSMKALESQIKEFDKAIKAQMELLPNVLISIPGIGPVYSAGIMAEIGDINRFNSQAALAKYAGLAWKQHQSGGFESEVTRLIPSGNRFLKYYLCEAAFSLVRCDKEYSDFYHLKYKEVNRCQHKRALALTARKFVRLVFRLLKDNRLYCPAK

SEQ ID NO: 377800 - protein, 326 aa, unidentified
MQGKEASEQETKVKSSVGIDVSKDWLDVHILPCGKRLRMANTADGIRRLKRRLMRFDLGLVVCEATGKWHRLLWRSLFASAIPVAMIDPFKARMFAKAQGIFAKTDRLDAAVLARFAAIMTPAIRPPPPQAVEELAELAAAREAAVAEQTGLKNQLSAANVAMLCRQLGRRIARLAKDIAALEREILARIAADEGLARRYAILTSIPSIGPAVAATLVARLTELGSLTDKQIAMLAGLAPVADQSGSHDGKRVIWGGRARVRRMLYLAAVSAVRCNPALRSLYRRLRAAGKPAKVALIAVARKLVLLANTLIRQNRNWLPNAPQPT

SEQ ID NO: 377801 - protein, 343 aa, unidentified
MGEVSTIGLDIAKSVFQVHGVDDAGAVVMRKRVGRSKVLEFFGSLSPCLVGIEACPSAHYWSRELQALGHTVKLMPPTYVKAYLKRSKNDANDAAAICEAVTRPSMRFVPIKTQEQQTGLMLHRTRQLLVRQRTMLSNAIRGHMAELGIISAKGRNGTAELLQIIADVADDRIPPVARFCLELLARQYLALNAEVSAVDKRIHAWHRSCQESRRLEAIPGIGPIVATALVAEIGDWGAFRSGRNLAAWIGLVPKQHSTGGKERLGSITKQGNRYLRWLLVTGAMAVIRYARAHGTKRPWLTRIMDRRPAKVAAVALANKIARMAWAIMVRAERYKEPKLLLAA

SEQ ID NO: 377802 - protein, 401 aa, unidentified
MEGPIVSIDVSNGNSHYMCFIKNNKRFGKVKKIDHDIEGFKRLLEDIQKLEAETNEKVCAVFEATGVYTKPLERFLSKNSIKTYIINPLESARKRKEEIHNKKTDKLDPISISKVYYDKEEMMELKKKDETYNWLRKKNRLYEDQLNHLRKYKVTFQNQLSICFPGYLDLFKDGYSDIPMTILKKYPHPDLLKNKKAETVARYLEKNTCHTHKVSLEYALKIIGFAKKTYPGCEKDDVEVEIFKILLDKVIETQRECEKTLNEMITVASTLEEYRYISSIDGIGPNLAARIIAEIGDIEEFKSREALVAYAGLDPHIYQSGDQDGKHLKISKKGNKYLRCLLFLAVGCSIRGAKDNPVNRFYQKKKQQSNPLNSKAAKTACTAKLLKIIYGICKNKTTYKR

SEQ ID NO: 377803 - protein, 336 aa, unidentified
MRYIGVDLHTTQITVCYLTDKEEIEIKKYQLSEIEKFVAGLQPTDEVAVEATCNTRWFSEQVKENVSRVVLVNSRQFEVVKNSVKKTDKNDARNLARFLRADLLPEVRAKRQVATSVQSLVNTRTKLVRLKTSLINKIHALFVAGGGKLKKTSLASEKGLEKVLQEKWTTIEQIELEIIIEQIRSLKLSIKKLDKAIADESEKLKGFKNLVSISGIGSLSAGILLSVIGEVKDFGTADKLASYFGIVPRIANSNETVNHGRITKRGNKTGRTTLVQCSLAAIKKSEYLKNYYEQVKARRGHGKAKIALARKYLGIIYNTLTNGWVFADFNNFELAE

SEQ ID NO: 377804 - protein, 346 aa, unidentified
MEYYAGLDVSLKEISICVVDANGKTIARGTCPADPEAVAGWFRNRDLRPRRIVHESGMLSIWLQRGMARLGLPVICIDARKAHKALSARLNKSDAADAEGLAQLARTGWFTPVHIRSEGADRLRSLIGARERLIRLRKDLEGHIRGVLKTFGIRMSGIGQGQQRQAFRDQLAKAGEADQVLRAIADGFIATHATLCQAADDLDKAVKRKAKADPVARRLMTIPGVGPVNALSFIGLVDDPGRFSRTSDVGAFLGLTPKRHQSGEVDWSGRVSKCGDGAMRGLLFEAASCLIRQVKRFSPLKSWAVRLAGRRGFRKAAVATARKIAVLMLTLWKNETEYQWTKEATA

SEQ ID NO: 377805 - protein, 349 aa, unidentified
MEFYAGLDVSLESTSVCVVNGEGKVVREGKMASDPDAIELFLAEWGIHLKRVGLEAFSFSAWLYAALDEKGLPVTCIETRHTKAALNAMLNKTDKNDARGIAQLMRTGWFRAVHVKSREAQTLRVLLAGRKALLGKVIDMENMIRGLIRPFGLKVGQVSTGKFEARVRELAAGLTELEPIVEPLLAARAAMRLQFAHMHRLALAAARKDQAVRRMMTVPGVGAIVALTFRATVDDPARFKKSTTVGAHFGLTPRRYQSGETDWSGRISKCGDEMTRAMLYEAAIAILTRIPKSFKLRLWGLRLVKKKGLKKAATAVARALAVLLHRIWADGATFRYGTGMKGGRIAKAT

SEQ ID NO: 377806 - protein, 394 aa, unidentified
MKLVGIDVGKNSHHFCVMDKETGEFNVAPSSFSNNKEGFDFLINSLKPYSKKSILIGMEDTGHYHVALLKFLLSNGYTVALINPKTTDLARKMEGGITKNDKLDTITICDVLDTPERKKQYRITKVDRFDLYEQRQLTRHHHNLKEELNVYCNRLQKSIDLVFPEFNTLFSSKYGVVYMNLLKTFGSAEAIASTDIRTIRKCFEIKGRGNRISLTPEKLKECAKNSIGISSEVETIQIKHLVSQITLIKEQIAEIDKKIEEFSITNNSPILSIPGISHFSGTSILAELGDIGNYSKPSQIIKFAGVAPYHYESSQYNAQHTGITKKGSKYLRKTLYQIILTVINNNPVFKKYYRLKISQGKGHRCAQGHCIRKLLRIIYHLLETGQSFDPALLR

SEQ ID NO: 377807 - protein, 367 aa, unidentified
MQKTKRKEGTAAMKQQAIQYVALDVHQATLVVSVRDEQGSVVMRATVATEAKAIVGLVRGLGSRVHIVFEEGTQAQWLHEVLKPYAERVVVCNTRGRGAQDNKSDRIDADRLSELLRLGSVKSVFHGASELLTLKELVRSYANLVEDGTRVMLRIKALFRARGIKTPGTSVYGTSKRKGWLSQLEGRGARMRAEALFAELDVLQELRPKAKAAMIAEARRQPGWKVLRSIPFLGPVRVAQILAIMATPWRFRTKRQAWPYVGLAVVTRSSADQEFADGKLRRRRRAPLTRGLNRNHHPLLKSVFKGAANAAAATEGPLKDFYDACVARGIREDMAKLTLARKIVAIALRLWKTGELWDATKLTLQVT

SEQ ID NO: 377808 - protein, 361 aa, unidentified
MNRNTGMNAGQIIGTMNGQQVIGLDIAKLVFQLHSVDMSTGEIMNVQIKRAKVLDYFVNKPQSLIAMEACGGAHHWARELTALGHTVRLLHAKIVGPFVSGNKTDATDARAIWIAVQQPGVKFVGVKTAAQQATLTLHRQRELLMKMRTMQTNALRGLLYEFGATFAQGRKALFKDVEQTLEDLAGQLPQMVRDSLREQVARIKEMSQAMLAIEKRLHLQLKADPHMQRIAQIPGVGLLTATAAIATMGDARAFKSGREFCAWLGLVPKQTGTGGKVRLGGISKRGDTYVRTLLIHGATSVLAHAKEPGPWLEQIKARRPANVVIVAQAAKMARAIWAVTAKEQSYQKGFQSVRPNATAAA

SEQ ID NO: 377809 - protein, 344 aa, unidentified
MKITAIGLDLAKQVFQVHGVDECGHPVLSKKLRRAQVALFFANLPPCLVGMEACSSSQYWARKLLALGHTVKLMAPQFVRPYVKANKTDSADAEAICEAVGRPGMRFVPLKSVENQALLAMHRARQAFIKARVAQTNQIRGLLAEFGIVTQRGPKNLEPRVAGILEDAENGLPTSLRELLYRLVQHVRDLRQRAQEIEAEINRWHERNEASCRLAQIPGIGALTASALVASIGDANAFTNGRQLAAWIGLVPRQHSSGGKPKLLGISKRGDTYLRTLLVHGARAVILRAKQKPGYSESWLGRLLTRRHQNIVACALANHNARVAWALLAHNRQYEAAHVVAHAA

SEQ ID NO: 377810 - protein, 422 aa, unidentified
MMDKERRWLVGIDWASQEHVVSLYDDAGKKIGQRKFSHGGTGLTDMIAWLLKASGGKPGDIHVGIETPHGPIVEALLERGFNVYSINPKQLDRFRDRFTVSGAKDDSRDADVLADSLRTDMRAFRKLSIAEPIVVELREWSRIDEELKVERGRLTNRFRHQLWRYYPQMLELADDVGATWFLDLFEAVPTPEKAANVREKTIARILKNHRIRRFDAVHVLSDLRKPALAVAPGTIEAATARIRGLIERIRMINNQLRDAGQQLDRLCKKLSEPVADKDEEPSPGQKTEQRDAAILDSLPGVARTILATLLAEASDTLQRRDYHALRALCGSAPVTRRSGKSRVVLRRFACNQRLRNATYNWAQNAVRWDAISRAKYDALRAKGHGHARALRSVVDRLLNVACAMLNSGTLFDPEFASKRTTG

SEQ ID NO: 377811 - protein, 371 aa, unidentified
MAQSTPLYDGLDVHKDSIAVAHAQGESAAPPVFVGEIGPRQADLDKLIRRLEAKTPALVFAYEAGPCGYGLYRRLTAQGFACQVVAPSLIPKKPGDKVKTDRRDAVELARLLRSGDLTGVYVPTVDDEAVRDLVRARDAARLTLKNAKLRLKGFLLRLGRHYVGRADWNPAHPRDLAKVVCPTAAQQIVVQESVRAVDEQVDRLHRLEAELLERAPAWRLYPVVQALQALRGVQWLVAITVVAELGDLTRFDSPRQLSAFVGLIPSEYSSGAARRQGAITKAGNGRARRALIEGAWAYRHPAKVSAHIQTRIDALPKPIQAIGWKAQVRLCKRFRRLTARGKHPNVAVTAIARELVAFMWAIAKEVPITTT

SEQ ID NO: 377812 - protein, 412 aa, unidentified
MDRWIERCCGLDVHKQTVAACVRVPGAQGRRTQEVRTFGTTTPDLLALQDWLAAHQVTHVAMESTGVFWKPVYYVLEARFTVLLVNAAHIKQVPGRKTDVRDCQWIAELLEHGLLRGSFVPPPVIRDLRELTRYRRTQIQERTRVANRLHKVLQDANVKLSNVTHHVLGVSGRAMLDALVAGTTDPDVLADLARGQLRKKLPALRQALTGRFRAHHAFLLGQILAHLDYLEEAIAAVSAHIEEQLRPFAPQVERLMTIPGVQRRTAETILAEIGTDMAVFPTAGHLASWAGMCPGNNESAGKRRSGKTRKGSKWLRTSLIEAANAAARTKATALGARYRRILPHRGHRKAIVAVGRHILEISHHLLRTDRTYQELGPDYFDRRHAERLQRRCIRQLEQLGLQVTITPASAAA

SEQ ID NO: 377813 - protein, 358 aa, unidentified
MKDRTILTHGCTVGVDLGDKYSQYCVLETDGEVVQEGRVRTTAQALRGWCSSLEACRVALEAGTHSPWVSRLLKELGHEVIVANPRKLRLIYQNNDKCDQVDARYLARVARMDPTLLAPLHHRGAIAQADLAILRARDALVTARTQLVNHVRGAVKSFGGRLPTGSTHAFAKKMGAHVPQELKPALEPVLRAIQELTDRIADHDRKIEGLTEKYPETKNLCQVAGVGPLTSMSFILTLEDPARFKKSRTVGSFLGLRPRTKDSGERESQLGITKAGDVFLRRLLVGSAHYILGPFGPDTDLRRWGLALAQRGGKNAKKRAVVAVARKLAVLLHRLWVSGQPYEPLRNSRRNKTQAISE

SEQ ID NO: 377814 - protein, 339 aa, unidentified
MSAIVTIGIDLAKNVFAVHGVDATGKSALVRPSVPRAKLLEIIASLPPCLIGVEACSGAHHWAREFEKFGHTVRLMAPKFVIPYRLSGRRGKNDAADAAAICEAVTRPNMRFVPIKSIDQQGQLMVHRARQGFVEQRTATFNRIRGLLSELGIVLALKAAVVRREAMARLEDLPGWANTVIGDLLSEVTHLDERIAQYDRHIALMARQSIEAQRLMQLCGVGETTATALLSTIGNGRDFKCGRQLCAWLGLVPGQYSSGGKQRLGRITKAGDPYLRSLLVLGARAVLAAAKTKSDPISRWAVSLEQRRGYWKAIVAIAAKNARMCWAVLSRGEAFRLPA

SEQ ID NO: 377815 - protein, 410 aa, unidentified
MGLYCGIDWATAHHDVAVIDDDGKVVARGRVSNDAAGLAALLILLAEAGDSSDHRVPIGIETDRGLFVAALRETGRTIYPINPLAASRYRARYSVAGAKSDAADAVLLANIVRTDPGAHRPLPADTELAQAIRVLARAQQDAVWARQQVGNQIRDLLKDFYPAAMVAFAGLPQGGLARADARVILTAAPTPAQAAALTPARLRRLLVKAGRQRHLDRDVERLRDIFTDTYLHQPLVVENAMGIQLTSLLRQFDAACTAVAELAEAAIAHFEQHPDAEIITSFPGLGNLAGARVLAEIGDDRTRFADARGLKAFAGSAPITRASGKKTVVLHRHIKNRRLAAVGSIWALSSLRGSPGARRHFDTRRAAGDWNRQAQRHLFNKFLGQLHHCLHTSQLYDEHVAFPPPLQLAA

SEQ ID NO: 377816 - protein, 353 aa, unidentified
MFHKPGEATTMKITTIGLDLAKNVFQVHGVDEQGKAVVRKQLRRNQVAAFFANLPPCLVGMEACGSAHHWARKIEQLGHTVRLMAPQFVKPYVKTNKNDAADAEAICEAVSRPQMRFVPIKNAEQQAVLALHRARQAFVKARTAQANQIRGLLGEYGIIFPQGICHITKRLPAILEDGENELPGSFRALLDRLGEHLRELDRQVDELEAQIYRWHRENEASRKLEQVPGIGPITASALVATIGDANSFKNGRQLAAWLGLVPRQHSSGGKSVLLGISKRGDSYLRTLLIHGARAVIRVAERKEGYPQSWLGQLLGRRQKNVAAVALANKNARIVWALLAHDRNYQADYAPSAV

SEQ ID NO: 377817 - protein, 342 aa, unidentified
MKRIVKQVVGIDVAKAELVVCVGKMHDDLTSELYAHKTFPNTAKGFVAFTSWVKGRTVSEIPVRYVMEATGVYHESLLYFLDDNKLEVTVVLPNKISNYAKTLDVKTTTDRSASDAITRFGLERNLDRWKRPALMFRKLKQLTRERDQLITERTRTKNQLHAEQAEAYPAMESIARMKARIKFLQKQIDEIETELKQAIKQDQAVKARVKVISSVIGIGELTAVTALAETNGFELIRNRRQLTSYTGFDVKDKQSGTSVKGKPRISKRGNRYLRKALYMPSLAAIRYEGRYKDLYKRLLSRHGLKMKALVAVQRKLLEMMYTVDKANQPFDRNYLKKNPVEV

SEQ ID NO: 377818 - protein, 349 aa, unidentified
MKTYYVGMDVHRATIALAVLNGAGKVVMESTIETGAERVRGFLKQLRGKVYVTFEEGTQANWLHDIVRPLVSEVVVCDPRHNKLLQSGNKNDRVDARKLAELLRNKSVKAVYHGDNGVRTLKELVRTYDCLVSDTTRVMNRLKAIFRGRAIACEGHEIYRQDRRGQWLGKLHEPGAKQRAGFLYEQLAALKPLRHKAKLAMVKEGRRQTAYLWLMSVPRLGSVSVAQLIAVVGTPHRFRSKHQFWTYVGLAVVTCSSADHELVNGVLRRSSKPLATRGLNRNHNHLLKRVFKNAATSACQSGPFQAGYEARVARGMAPSLARLTIARQLAATTLAIWKRGEQFDPERKK

SEQ ID NO: 377819 - protein, 339 aa, unidentified
MQLYCGIDLHSNNNYVAILSDTLEQVACRRLRNDLGQVMGFLEPYREDLVSVAVESTYNWYWLVDGLMEAGYDLRLVNTTKASKYSDMKYTDDKHDARWIARLLALGILPEGYIVPPQERCLRDLLRRRSFFVRKRTDHLLSVGTLLERSTGLRVGTAEIQTWSGKEVRALIDDPFVAESITVMLPVVRAFTRQIKSVEKRVLAEAKLRSDFQLLKTAPGIGDILALTIMYETVTIDRFPRVGNYVSYCRCAKSEHTSNNKRKGAGNRKNGNKYLSWAYSEAAHHAKRLDPLARGYFARKKKRSHPMVAKRALAAKIARGCYYVLRDQTPFDPSRTFPK

SEQ ID NO: 377820 - protein, 465 aa, unidentified
MSKNKKRKHYNKESMDHLEQLNINAAGIDIGAESHYVAVPKGRDPEGQDVRHFSTFTADLYKLAAWLKRCNIDTIAMESTGVYWIPIFEILDEQGFDVRLVNPRSIKNAPGRKTDVLDCQWIQQLHTYGLLQSAFRPGNQICELRSYLRQRAMLISYASHHIQHMQKALEQMNIKLGQVIDDIKGVTGMKIIRSIISGERNPKKLARLRDSRCSNDEATIAKALEGNFRSEHVFALQQAVELYDFYKKQIIECETRIQNHLESFDDRSNGTPLEKPARKSGGSTNKFHFDARSYLYKITGVDVTRIEGIEAPTALNIIGEIGIDMSPWPTEKHFASWLGLCPGSKISGGKVLSSKTKPSANRAAIAFRLAAYSLQRSASAIGAFFRRKKAHIGAPKAITATAHKIARIFYNMLKYGTEYTDLGQEYYEQRYKDRVIANLKRKAKNLGYKLITIKEHEQIIPATST

SEQ ID NO: 377821 - protein, 315 aa, unidentified
MLYDGIKGRIKTRNIQNNRHSVENIIRWLRLQHCGPEDVHVVMEATCVYHERLATELHDAGFRVFLANPHRSREFARGMGIMTKTDKVDAYMLACYAFLKKPHRWEPPAPEIRYLGALLRRRDVLLGDALREENRLEKYLSTDTPADIISSCRRMAQLLREEVSNIERQIKAHIKACPALRRDYTLLTSIKSVGPLLGMHMLVVLRSHNFTSAEQAAAFLGVVPIEKRSGTSVRSRPRMSKIGPPQLRAKLYMSALCGKIYNKRMRHIYDEMCLRGKPKMVAIGALMRKLVHWCYGVLKTGTVFNDESLKQVLST

SEQ ID NO: 377822 - protein, 348 aa, unidentified
MEVVVACCAGLDVHQASVVACINRTGQGGRSRKEVRSFGAMRDDLIALRDWLMESGVTLVAMESTGVYWKPVYEMLEDHFDVMVANARHIKNVPGRKTDVKDCEWISDLARHGLISPGFVPPRAIRDLRELNRYRRKVAQVQTGERNRLIKVLETAGIKLAGVVSDVLGVSGRAIIRALIEGEDTPAAMAGLALGKLRKKRPDLARALDAPLRLHQRFMLRAQLARIQQAEADLEQIDIELNKMAVPYQRYIELLMSIPGVNWINAVTIIAEVGIDMSVFLSAAHLASWAGLCPRPGGDRGGATVALRRIRLALQRGAAARGFEPDAPGAALVRTHAAPPRRGAAALV

SEQ ID NO: 377823 - protein, 325 aa, unidentified
MAVIGIDVSKQKIDCAWLRDVATGKVKTRVFPNRRQDFPRLLEWLEHQTGEPQDQWHVLMEATGIYHETLAYWLHAAGIQVYVLNPAQVRDFSRSLGVRGKTDKKDSVVLARYGATQHPEAWQPEPEEVRKLKALAARLDALDKDIQRERNRREKAEFAMATDILRSIDDILLALTRERDRLHQEIDDHLDQYPGLKQDRALLQSIPGVGPAVSLRLLAMLRSRVFTSARQAAAFAGLVPVSWESGSSVRSRPRLSKAGNPKLRQSLYMAAVVGLKRNPDISALYQRLTGNGKSKMAALGAAMRKLIHIAYGVLKTQTEYRPQTA

SEQ ID NO: 377824 - protein, 400 aa, unidentified
MDRVEQGWVGIDAGKGHHHVVLIDGNGRPLLSRRVINDELELAALIDVIRDRVTNLTWAIDLADGAGALMIALLLHRAQPVFYLPGMAVNRASAGYRGEGKTDARDAAIIADQARMRRDLRQLRLLDDAIVRLRLLTAYRADLAADRTRSINRLRGLLVGIFPALERVLDFTNQGPLILIGGFQTPTAIRRLGQARLARWLEKRRVRGAARLAAAAAEAAGRQTVEISGEAAAASVIARLAQTILELDRQLAVIDREAAAIFHTQADAAIITSLTGIGDVLGAQFLAAIGGSLAGFASADHLAGYAGLAPMPRDSGYRTGNLHRPQRYNRQLQRVFYTSAMISIQRSAASKAFYDGKRDQGKRHTQAVIALARRRVNVLWAMLRDHQPYRERRQAPALAA

SEQ ID NO: 377825 - protein, 368 aa, unidentified
MIVRIIPYERSTLVNDEKYIGLDVHQATISVAVVDANGKVVMESILETKAATILDFFAGLRGTLWVTFEEGTWSVWLYDLLNPRVDKLVVCNPRKNALLKDGNKSDRIDARKLAELLRGNQLKPVYHGETGVRMLRELSRSYLTIVKDLSRVMNRLKAVYRSWAIPCAGRDVYYRRHRTQWLAKIREAGVRRRAERLYEQLDMLQHLRQQARRELLAEGRKHAITARLRQIPYLGPIRSVLAVALMQTPHRFRTKRQLWAYSGLALETRTSADYRYVEGQLRRSKKMVSIRGLNKDHNHDLKGLFKGAATMASVRPGPFQDFYQAAVAKGIKPTMARLTLARKMAAITLTLWKKGENFDAEKLKSQVA

SEQ ID NO: 377826 - protein, 309 aa, unidentified
MFVGIDVSKARLDVAVRPTGETFDVSNTPQGIAHLVDRLQALRPVLVVLEPTGGFEQPAVLALAERRLPVVVVNARQIRDFARATGRLAKTDKIDAAVLAQFAEAVRPQLRALPDPEQRSLDALVARRVQLVEMVTAERNRLQHTRNAAVRANIHAHLAFLERQLDQMERELLRAIETSSALKMRFDLMVTVPGVGKVTAATLLGDLPELGTLGNRQIAALVGVAPMNRDSGQIRGRRSTWGGRSSVRRVLYMAVVSAIRCNPVIRSMYERLRSAGKPAKVAIVACMRKLLVMLNAMLRSGTPWMRQAA

SEQ ID NO: 377827 - protein, 464 aa, unidentified
MSKLSQRGQYKKKENRPFAGMSKMRPNAAGLDIGAHEIVACVMGENENTQEVRTFGTYTVDLKELGEWFKVKKIESVAMESTGIYWIPIFEYLESQEIECCLISATDLKKVPGRKTDVLDSQWIQTLHSYGLLSASFRPEADLATLRTILRHRAQLIEHRSPHILHMQKALLQMNLQLSQVLTSITGQTGLKIIRAIVAGERNPQKLAHMRDWRCKKDEIEIEQALTGTWRDEHLFVLQQSLALFDFYTAQIDACDQEIERTFNLVTPRWSISEEEANEIMTSGEFAQVKKVGKNASMVVQTRAHIKRITGVDLVSVPGLSVSLAQTIISEIGANMSKFPNEKHFCSWLGLAPKNEVSGGKTLKSRTQKTQNRAGQAFRLAAQSLTRTNTEFGAFYRRMKSRLGPAQAMVATAHKLARVVYHMLSKREEYQPLGADEYEQQFKEQQIRYLERKARKLGLQVIPT

SEQ ID NO: 377828 - protein, 348 aa, unidentified
MGLYAGIDLHSKSNHLAMIDENRKRVLKKKLANDPDLILGVLAPYQGEIAGIVVESTYNWYWLVDLLQENGYRVHLANPAAIQKYSGQKHVDDTHDAFWLAELLQLHILPEGYIYPKETRALRDLLRKRQQLVRVRTSLILSLQNIVTRNFGIKLSASDLKILTEDRVQPYLQENEDLLLAGSANKSCIDSLTLQIVRIEKAVEKKLKLLPPYIQLLTLPGVGRTLAMTIMLETGPISRFDKVGRYASYCRKVSSKWTSNEKVKGHGNKKNGNRYLAWAFSEAAEHARRHHAGSRNFYQRKLRQKKNMMVAHNALAHKLARAAYWILRDNVPFQEAKMFGQAEAALDN

SEQ ID NO: 377829 - protein, 347 aa, unidentified
MDQQCHYVGLDVSLETTSICVIDDAGAIIWRGKCSSDPNTITAMVRQHAPGAVRVGLETGQLSNWLTLSLRRRGVPVICMDARHAKAALSLQINKTDANDAFGLAQVVRTGWYREVAVKSMDAHTLRMLLVARSRLVSQRQATANTIRGLLKTFGLVVARGGKGLFPVRVREQIAGNPALIAIIEPLLAVWYAVRDQVAMLDRQMLARARNDQVARRLMTIPGVGVVIALAYTAVIDDPARFRRSVSVGAYLGLTPRRYQSGEVDTTGHISKCGDSLLRGYLYEAAAVLLHRDARVSILKSWGLALAKRIGMRRAKVAVARKLAVIMHRIWSDQSEYRWTALPPTAA

SEQ ID NO: 377830 - protein, 429 aa, unidentified
MNYNTQNAKIASITEKTLIIGIDVGSETHYARAFSWRNYEYSKKPFAFSNDEAGFAAFKEWMDDIAEKHGMEVIIPGMEPTGHYWLNLGAYLQEQGMKPVHVNPHHVKKSKELDDNNPSKNDRKDPKTIAGLVNEGRFSYPYIPTGIYAEIRNLSNLRIQTQEEITRIKNRMARWFSIYFPEIKDVYRNPDAVSGLMVIKQAALPCDIRELGVEGVNKIWRDARLKGAGIKRATTLVTAAEHSIGNTEAPRSARKEIRNLLEDYEGYKKRMDELMEEIEKTLSEIPYIDKLMEINGIGIKTVSCFIAEIGDIGRFDNPKQVQKLAGYAIVANSSGKHNGESRISHRGRKRLRYALYEAAISVIGKNKEFKEIHSYYRTREKNPLKKMQSVIAVACKLIRIFYTILTKGVDYDGQKMLNDIVRPEIQPAA

SEQ ID NO: 377831 - protein, 335 aa, unidentified
MTSTQYIGMDVHKESISIAVRNAVGKIVMECVIETKASTILQFMDGLRGDVQVTFEEGTWAAWLYDLLKPHVTKVVVCDPRRNALLQEGNQNDRVDARKLAELLHNNQLRSVYHGDHGLRTLKELVRSYLTITQDVSRVMTRVKAVYRSWAIPCTGKQVYAPHHRAEWLAKINEPGVHRRAEFYYQQLDALRCVRQQVRRELLAESKKHPAWKRLCGIPSIGPIRAAVLLGILQTPHRFRSKRQLWTYSGVGIETSSSADHQVVKGQLERKKKPVEIRGLNRNFNHDLKNLFKGAAIVAATKPGPFAEFYATLLARPSRITRKSYGPRVPDRTMG

SEQ ID NO: 377832 - protein, 429 aa, unidentified
MKIIYPRVCGIDVHKKFIVAVICISESVEPVYLKKRFSTFHNDLIRFRDWLIQNDCQNVCMESTGKYYIPVYNILESHISNIVVANPKWVRAVKGEKDDDKDAKWIADLFKLGIVKSSFIPQKDFRILRELTRYKYKLVNMRSSEKNRYQNALTSGNCKLDMVFTDVFGKSASNIIDLILSDNPYTDEDILSKVHKNCKASPDMILNSINGTDLTSIQKSRIELVNNHIKQLSSNIQRLDKLIDLMIEPYEDYISFLCQIPGVSRNSAITILSEIGVDMNQFTSTRRLTSWAGLTPSSNQSAGKKKSVRISRAGVYLKPCLVEVAHAAVKDTNHPYYANKFNKISKRRGKKRAYIAIARKILVAAYHMLLTGEIWNPADLAEVETPVEQRIKYVKNNLKSDIKQLLDIGLTVEELTLMIQQNANNIATQ

SEQ ID NO: 377833 - protein, 422 aa, unidentified
MKEKPLDFAIGIDRSDATLDVCLASLRAGSSPRFDKLANSPDELGAWLARLRSEHPEARVAVAFEMPAPDLVAFLCPRGWLEVYALNPSVPARFRKAFNGSGAKSDLLDCEVLAQLLASHRDKLRAHRLDSAAMRRIDSLSKARRGEVDRQVEQCNRLKSLLKSSFPQALALLGRDLHAPMAIGFLRRWPSLQAAREADPEEMAAFYRSSHCSRRDVIEERLRVVAESVVLTDDPAIMDVMELRISSCLDHIEACSRAIARYDQELARRYAESEDKPIFDSLPGAGPALGPRLLSAMGEDRSRYSSREALQRYSGVAPVTQSSGKKRIVHRRYSRPRFLMQTFVEFAGESIKWSSWASAFWRMKKAAGMTYNCAMRELAYKWQRIIYRMWKTRTAYDEGLYIERLKAKGSPICAYLQDSMKN

SEQ ID NO: 377834 - protein, 376 aa, unidentified
MEHDSTLYVGLDVHKDSITVAYALGAGEVELLGKIGTSKADIDRLCKRLQSKASRIRIVYEAGPCGYGLYRQLAGKGFECMVCAPSLIPKKPGERVKTDRRDAVKLVRSLRAGDLSAVYVPSVEDEAFRDLSRAWVSAKDDLKRARQRLKAFLLSHGVRYSGRADWGPAHRRWISTFAFDTVWQQLAFDEYRRAIEDRLAQCSRLEAALREAVVNWRFYPAVLGLQAMRGVQFTTAIGMLAELGDLSRFVHPRQLMAWLGVTPAEHSSGEKRRQGSITKNGNSYARKLLIEAAWSYRHPARVSPEIQRRHEGIPKAIVDRSWDAQVRLCRRYRRLAARGKNPNIAVVAVARELSGFIWDISRLAMSLAIPNAAQTT

SEQ ID NO: 377835 - protein, 340 aa, unidentified
MTITTVGIDLAKNVFAVHCVDQHGKTVLVKPKVPRAALPELIASLPPCVIGMEACSGAHYWARLFRQYGHEPRLMAAKFVSPYCMAGKSGKNDAADAQAICESVRRPHMRFVPVKDESQQAMQCLHRTRQGFIEEKTATYNRLRGLISEFGVIAPQSTDALRHMVSEQKKSLPLQVQQCVDDLLEHIDRIENNVTEYDRILSRMAKADHRSQRLMELKGIGPTTACALVASIGNAHDSKNGRQLAAWLGLTPSQYSSGGKSKLGRITKAGDSYLRTLLVLGALSVLIGAEKKTDSFSRWVCSLVERRGYWRAVVAIAAKNARLCWASLHYGDDFRLYSVS

SEQ ID NO: 377836 - protein, 382 aa, unidentified
MCPIEACPARRMSPVRITREAEQMIMIGADSHKRSHTVVALDEVGRKVGQKTVVTDSEGHLQLLRWSRQFEEVEFALEDCRHLTRRLEGDLLAAGQRVIRVPTRLMADARRAGRERGKSDPIDAEAVAWAALRHPDLPVASLDGSAREVKLLSDHRRDLVRQRTQLCNKIRWFLHELNPSLDVPSRGLRRRCVITRVKAELDRFDGIVARLAREHLARCAELNQQIAVLDRELNTLMKDLAPTLLTVPGCGVLSAAVLVGETAGVDRFKSKDTFARFTGTAPIPVWSGSSEGKVRLNRGGNRLTNTALHMIAITQSRGHGPGRAYIEKLQARGKTRTEAVRLLRRRISDAVFAALRTDAIHRSATPGNRTIVPHNTAIRAAA

SEQ ID NO: 377837 - protein, 392 aa, unidentified
MKISVGIDAAKTVHWAVAVEEGGRVVLDRAVENDPKAIDGLVAGLRALQGEMVIGLDVVGSFARFLEATLLAEGFSLVHTPGIAVNRAGQGFAGGERKSDPRDARTIAELVRTRTLRPILPDDDTLVALRLKVGRRGDLVEDQTRRLSRLRGLLCAIHPGLERALDVTCKGPLALLARFVTPAEIRQAGKARIVAHLRKTPHLHRVDALADRALEAARAQRIAIPGEAATAELIRELAAEAFEARAKIARIDRDLEALLADHPDGALIRSLPGMGAVLAAEFIASVGDIRRFPSADALASAAGLAPVQRQSGKRNGWRRAFGGDKAIKRVFYQSAFCAVSTKDPLSKAFYDRKRREGKHHTQALIALARRRVTVIWTMLHRHETFDPNRKAA

SEQ ID NO: 377838 - protein, 408 aa, unidentified
MGRAAEVMAPSSSTRTDGDCPVAQVNDLSRSLTAFDPISTLVVVVEMSKASWLVSGVVPGIERQPLQKLEPDATALLRLIERWRNEAVRAGRPISRIALAYEAGRDGFWLARWLITRGIEAHVIHSASVAVSRERKRAKTDRLDAAMLMRVFLGWLRGERGHCGMVVIPTMEEEAARRPSRERESLVNERSRITNRMKSALARLGIRGFKPHLRKAPERLAGLRTAEGTGLLANVIEEFRRDMARLALVREQISSIEKTRAERLERAPDTGPHAMVRLLARVIGIGIETADMLVREILSRKLRDRRAVARYAGLTGSPDESGLKRREKGLAKAGNARVRRGLIQLAWRFLMFQKDSALARWYRTRTEGPSGARKTTMIVALARKLLIALWRLVTTGEVPDGVELRPAV

SEQ ID NO: 377839 - protein, 351 aa, unidentified
MNTQITATPKLFIGIDIHKRSWKVHCATDLSSGKTFSMLPDAELLYEYVAKHYTGYEVSTAYEAGCCGYRAHRCFVGYGWRSLVVNPADIFRRGKERHTKTDRIDAQLIARELKDGRLSGICVPDKCREQLRSLFRRRNDLVKDMRQIKSYIKMQLLYYGIRIPQEFDNDHWSHKFRDWLDELDFGYDTGNEVLRSRMRSFRFIDREFREVSTLLRRYTKKHFKKDYMLLRSIPGIGPIVASGILSELGDLRRFGNIKHLAGYVGLAPGIYQSGDTIRHTGVSMRAHRLIRSYFIEASWQAIRTDPVMQGYYRKHHGKNVKSVIVKVARKLLSRTLAVIKTETPYEIGVLE

SEQ ID NO: 377840 - protein, 405 aa, unidentified
MNRFAGLDWASHHHALCVIDNSGAVGEQFEVTHDAAGLRELLARLHRCAPIPANLPIAIERPSGLLVDALVEAGYPVFPIHPNIVKATRPRYRSHGAKSDASDAYLLADLLRTDGARFHPLQPQSDAIRALRALVRGRDDLVATRVQLANQLRSLLESFWPGAAAVFAEIDSPIALAFVQRYPTPASAARCGEKRLAAFLAQHRYCGRRSPAALLERLRAAPLGHADELETDAKGTLVQALAATLSAVVEQLTQLTSRVEHAVAELPDGQLIMSLPRAGQVCAAQILAELGDVRDRFPSDAQLAAEAGVAPLTYQSGKSRSVTFRWACNHRLRRALTCFADNSRHASQWAATVYARARSRGCDHPHAVRILARAWSRVLWRLWVDRCAYDPARHRAALAFSTPGG

SEQ ID NO: 377841 - protein, 352 aa, unidentified
MSCRSESGPVGQRASDHSRATLYVSLELSPSKWLVTSLVSGTDKLSKHLVPGGDCGALLQLLAALKAKAEKQSGMAVVVATIQEAGLDGFSLHRLLEANGAESWIVDPSSVAAPRRARRAKSDAIDGETLLRTLLAYRRGEPRVCSMVHPTSPHDEDRRRLTRERRTLMRERIEHTNRIKGLLMSQGISGFDPLRKNCLVRLDELTTRDGHRLPPRLRAEIGREIDRLELLARQLKQVEAERDALISQVADVADSPAAQLMRLKGIGIETATLLWLEGLFRTFANRRQLAAYAGLAPTPWLSGRIRREQGISKSGNPRLRTGMIELAWLWLRNQPGSALSRWFDRPPLGGPI

SEQ ID NO: 377842 - protein, 389 aa, unidentified
MRTAKMRGPGPSHVLTTPDHAGNVVGIDPHKRTLTATVVDPRGGVVASEHFRVSGEGHRELEVWARQFGSIARWGVEGSASWGRHTAVFLVARGADVRDVCANRTPRSDRARQRGKSDTLDSERIAREVLAHPLLPRAFKRAGQEQGPDEQHQLLALWHNRRRSILTSRQHLVGEAEHLLCDLPLELRDELPDSKAVRPRLAALAHRNRRRRYDAPTTVRLGMLDAYRAQISALDREEKDVVAQLRELVAANGSTLSELCGLDTRSVAELLVEVGDPRRFTEGGFARFNASAPLAASTAEGPGEPVRHRYNPGGNRRVNAVLHRMAVTQLRCEPRAQAIYANARARGHTKKEARRILKRHLSDVIYRRMIRDLAAADRASVPTQPILAA

SEQ ID NO: 377843 - protein, 388 aa, unidentified
MQVVADRAEAPTAIQTDLRAIFVSLELSRSTWLITSLSPGGGEKMSKHSVQAGDIAGLLKRFAQLKEKARARTGRDFPIITIQEAGLDGFWIHRVLQSEGIESHVVDPASIATSRRRRRAKTDKIDGETLVRTLLAYKRGEPRVCAMVKAPTPEEEDSRRLCRERKVLTAERVRHVNRIKGLLFCQGISGYEPLRRDRHERLEELQTGDGRLLPQHLKAQVNREIDRLELLLKQVKAVEAERDALLVAGHTPAAVPASMLLNIKGIGPEFAAVLWSEGLFRHFDNRRQVAAYAGLAPTPWQSGAVDREQGVSKAGNPRLRTTLIQLAWLWLRNQPHSALTLWFHERVSRNGGRLRKTTIVALARKLLVALWKYVTAGVVIEGAAMTAA

SEQ ID NO: 377844 - protein, 339 aa, unidentified
MYAATIGLDIAKNVFQVYGANAAGDPLFNRRVSRAAILDFFSKLPPCVVAMESCSTAHYWGRSISALGHQVRLIHPAYVKPFVNRDKTDANDAEAIHEALFRRSMRFVPLKSTSHQASTMLFKTRALLVRQRVRAVNALRAHLAELGIVARPGTSNVSSLISIVRDRQSKSLPPSAITALKIIARQIDTLTKDIESLEKTLKGQAKEDDEMRRLMTIPGVGPMTATAIKAFVPDIGVFKSARHFASWTGLTPKSFSSGESITIGGITKMGNADLRSLLVTGAMSVIRNTKTDDNKSWTASLKRRRPFKVAAIALANKNARTIWAILTKGGSYETAPTRA

SEQ ID NO: 377845 - protein, 338 aa, unidentified
MNNHTVIGVDLAKTVFQVAVQHGQKITSNKKLNRSKLVEFMTQQLPSVVVMEACYTAHYWARVCEALGHTVRLIPAQHVKPFTRGNKTDANDAIAIIEAAQRPNMIDVPVKTQHQQDIQSLHRIRERLVCNRTGLMNQVRGLLAEYGLISAKGNKGFVALIELALNTDELSPLIKNEVQRSLDELQLLRDRTEAIEATLREYLKSDPHCQIISTIPGIGVINATALVCKFGNGSQFSKARSLAVNLGLTPKLSASGLRSQMQGISKRGDPYLRKQLIHGARALLGVCDKRPDDALCRWASRIKQRRGGKIATVAIANRLARLLWVLLHKQEAYRPMPV

SEQ ID NO: 377846 - protein, 354 aa, unidentified
MSHSDDTTVFPSCTIGLDLGDRSHAWCALDAAGQVVGRGTIGATPDAVGALSTAHPGARVILEAGTHSRWVSRQLTAAGHTVVIANPSKCYQGRRRQRNDRRDAEFLARQGRADVMLLHPITHRGPTTDAPLALLRARDQLVAARTQLINTARGLVKPTGTRLPACSAESFGRQAAAHVPAPLRAVVGPLLETVMHLTTQIRAYDRQITHQLLPQYPVAQRLAAELQGVGPLTALAVVLLIDDPTRFRASRDVGAYFGLVPRLDESGAATPQLRITKTGDALGRKLLVSAAHYILHRGPDTALRRHGEALMQRGGPNARKRAVIAVARKLVVLLHRLWGTGAAYDPTRGLAAAA

SEQ ID NO: 377847 - protein, 348 aa, unidentified
MLADQLDYIVGVDPHRDSHAVAVVHVQSGAVVFETNVVANSDGYAQALKLVDRHAPCRRAFAVEGTGSFGAGLTRFLTERGERVLEVGRLRRERRSGGKNDALDAVRAARSVLAGQRPATPRAGGERQALQALVAAREGAVNAKRAGLCQLRDLLITTPEPVRSELRPLTRARLLQRLAATRPDGRRDPELRGSMLALRSIARRVLQLTAEERELAREIETLTRKLAPQLLDQPGVGPHAAAQLVLSWSHRGRIESEAAFARLAGAAPIPASSGQTVRYRLDRSGDRKLNRALHMILVTRKRSHPATIAYIERRVQEGKTRREASRCLKRYLARSLYRLLEHGAPLAT

SEQ ID NO: 377848 - protein, 350 aa, unidentified
MVILGIDAHKQTHTVVVVDERGRKLGERTVKTTTKDHLDLLVWASRFGAERRWAVEDCRHLSRRLERDLLGAGQQVLRVPPKLMAHARTAARTYGKSDPIDALAVARAALREPELPVARLDGPAREIRLLVDHRDDLVAERTRVINRLRWHLHELDPSWHPPARSLSRAPATHLAATEAFISRFDGMVARLAGQLVARVQELNAQIDQLEADLVPRVRRYAPSLLALRGCGVLTAAKLVGETADIRRFHSKDAYARHNGTAPLPVWSGNKQRYRLSRTGNRQLNLALHRIALTQARHHPDAQRYLARRRANGNTPTEAIRALKRRLSDVVYRALLADAGVADEAGQAAAA

SEQ ID NO: 377849 - protein, 262 aa, unidentified
MKKWKFTLGVDVSKHTLDVSCSELNEHIKIKNGSEGFTQFLKWCRQLKIDLPDSFLVLEYTGGYEYKLLQFCEAHTIVYARIPRLAIKNSMGITRGKNDKVDSARIAQYGEEKYKSLQPSKPLNAAIIRLKELLAFRKRLVRENAGYQSSLKEREHMYGKNTKDIIVKSLQQKQKANSKIIENLEGEMMQIVTKDEQMHVNFTLITSIKGIGKVNGLMTIAYTENFTSFTNPRSYAVYVGVIPFDHSSGTSIRGRKRVSHIA

SEQ ID NO: 377850 - protein, 343 aa, unidentified
MKYVGLDLHKRNIFATVLDGDGNILSKANIGSKREDLSHYLKRQGGGNDLSVAIEASYNWLYYFRILETITDNITVAHPLKTRIIGEAKVKTDKIDSKVLAYMLKADMLPRVYIPTRISMENKLLLRSRISLVRVRTQIKNKIHTIIDRNKDSYSGLENLSDIFGKTGTGILKDTEISQPDYMILANYLDLIADINKKIADIEAEIDRRIAPDKDIELLKTIPGVGKFTAFILKSEIDNIDRFISKEKFASYAGLIPSVHQSGSKSYTGKITKQGNKFIRWALAESAHSAIRYSQYFRYHYNKVKARRGANSAIIAVARRIAEIVYVLLKEKRGYIEKQVIYS

SEQ ID NO: 377851 - protein, 428 aa, unidentified
MADPANPTPPCNLVAIDIARYWNAVLVETPSGKRHRFRMANTAADFDRLLKFLHGLPGACCVALEPTGDYHRPIAHRLLSEGFEVVGINSVAQARYREAMFNSWDKNDPKDATVILEMLRRGAVQRYVDPMLAGNHDLQELAKTYYQVSRARTKVQHSLINHCLPLYFPEMHRYWATTRNEWFIRFLLQFPTPKHVRSLTRDGFVEAAWEVVGRKVDKRAKLEEMWEMAGATAALPHAPDSLAVETFRVTLRRYQELNTLRADLEARAELALAANADFAHLKTLPGIGSVLAMTILAEGGNLRRFGHHRQFLKYCGFDLAKTQSGTQRGREQPSKRGNARLRLAFWLAAVAAVHMRENSFRAKYERYIRAAPDDADLRRKALTAVAAKMARVAYGMIKKNQPYRQFFEQSLPSGSIPLSVAVGALATP

SEQ ID NO: 377852 - protein, 458 aa, unidentified
MKAKTRTVGIDLALKHSHMAFIRDEAGGPLGQSFSFPRTSAGFNQLLEKALAGMPETARLTVVMEPTSLAWVPLATYLSLKGHIIYLVNPRRVSDLRKFYSRRKKSDRLDAKVLSNLPNLEEDILTELYLPTGELNALKRHSQQRDKLKQSIGDQKNRMQAVFTEANPTALEAFGEDKFSRVGRAFLRKYINPLKVKGLGLKRFTQVLERKAYGELKESTVNRLFEACCDTINIYREALEKDKLPFSYEQIQEEINLELDLMEFKEAQVKKLDKKIANLYQQVDPRGDLKSLRGVGDVHAPIILGYAGYIGRFGNARSYCGFTGLVPGKKQTGGIDRKGLKITKEGPNLLKKTYYMVGETARHWDLEMAERYHRLIGRGLHHKQAITAIGRISAARAYAVMKRMELARKGLIKPEEVPYKLRDLEGREISAQEAREQILIRYPSKNSLKKRGRAATAD

SEQ ID NO: 377853 - protein, 404 aa, unidentified
MCYVGLDWADTHHDVEVQDEGGKRIGARRFAHSHDGLHELKAFLLGIAASPEELACIVETNHGLLITFLLEAGIPVYPVNPKSANQLRKAAGAKTDRIDAHLLAKLGRFDLAELRRLEPDSSTVAELKTLTRDQDTLIQTQTRLVNQLTACLKEYYPAALQLFAKLQQRSTLLFLQAYPTPQAAQAASLEEITATLRTGKHTNPRRAAPKIVAELHRPQLLASPVIVRAKSRVMLSLVKQLLVVIEEIPSYDKAISTLFLMHNDQELWRSLPGAGKRLAPRLLAEWGDDRSRYADATSVQTLAGTAPVPYESGNYAKAHKRFACLKPLRNALHQFAWQSTQQEAWARDYYLRKRAQGKTHSMALRALANVWVRIIYRMWVNKTSYQTAIFEAAQQTHAPRQRIA

SEQ ID NO: 377854 - protein, 393 aa, unidentified
MICVGIDVAKDKHDCFIFNSEGEILADVFTIPNNAEGFDALLQTIRHCAKPADKIKVGLEATGHYSYNILGFLLDKGLPTYVINPLHTSLYRKSLSLRKTKTDRVDARTIATMLLSDVDLKPYTDTAYHNEELKSLTRYRFDKVKERAKLKQSVSRLVTILFPELEKMVPTLHAASVYAFLSEFPGAKQAARAHLTRLTNLLHVASKGRYGRNMAMGLRDATRCSVGSVMPAKSLELQHTIRLIRELDDEIEDIESAIQAMMEDIQSPITTIPGIGVRMGAMILAEIGDFSRFDSPDKILAYAGMSPSTYQSGQLSLSGAYSHMEKRGSKYLRYALYNATKYVCLWDPTFEAYLAKKRAEGKHYNVALSHATKKLVRLIYALENSRQPYNSVA

SEQ ID NO: 377855 - protein, 430 aa, unidentified
MGLIVPSAMHPQQDDQPMPYEWFVGIDWGSQQHQVCVLDRDRHQVGERVVDHDGASLARLAAWLWIVSAGQPQRVAVAIEVPRGAIVEGLLERGFHVFALNPKQLDRFRDRHSVAGAKDDRRDAFVLADSVRTDQPSFRRLHLEEPQLLVLRELSRAEETLLEEFRRNANRLRDQLHRFYPQMLQLCSAADEPWLWDLIDLAPSPAHAALLSEEQVQRVLKAHRIRRVTAHEVLTYLQTPALPVAPGAAEAAQAHCGFLLPCLRVLAEQRQACGQQVSALLRTLAEELGEDEGPSDVAIVLSLPGVGRKITAWFFAEAAQPLAERDYQMLRTHGGVAPVTKQSGKRRLVVMRRGCNPRLRQALYHMARVAMQRDAHFSSVYVALRAKGQRHGQALRTIGDRLLRILVAMLRHRTCYDASRIRPEPVVQMG

SEQ ID NO: 377856 - protein, 387 aa, unidentified
MMKNKGRVVGLDVHPDSFAGAVVEGRDPASAVVSSTSTRVELERLEEWALRHTSTEDTLVLEASGNAFAVAARLRAIGREVEILDSHRAGKVGKVYCANDRVDAVKIARIYLSALSPIVWQPDQKTLERREIFSAYQAVVKESTRAKQQLRSMLNEHCVRLEKGFRLCHPQAITRLLKLREWTPARRMLLQQLHGGLVAARARRTMLRRHMAQEIVAEEALLRLSRLCGINLITLYGVVAAVGDVRRFTHSKKLVAYLGLNPSVSQSGNFQGSGALKRHGRGALRALLIQSGKKLLEVNNPLQKWGLAVAARRGRNKAAVAVARKLCVALWHLMMGHAIGTLERLDTLQTKLSKFATEIGPAALTAFGYYNRADFVQKKLYVLRSYP

SEQ ID NO: 377857 - protein, 356 aa, unidentified
MSSNIKYIGLDVHKEAIAIAVLNGAGKLVMESIIETKATTLVQFLQGLRGELHITLEEGAWAAWLYDVLKPHVHEVVVCNPRRNALLKEGSKTDKVDARKLAELLRAGMLRPVYHGENGLRMLRELARSYQTISKDLRRVMNRLKAIYRSWGIPCAGRQVYAPRYREEWLNKIQESGVRRRAELFYQHLDALQVVRRQVRSEFLAESRKHKAVKVLRQIPCIGPVRSALLLALMQTPHRFRSKRQLWKYSGLGVETHDSAQHRYVDGQLQRSKKPSQVRGLNQDHNHEMKEIFKSTAMSASRCAGPFHDFYAGLLAKGMRPEMARLTLARKIAATTLTLWKKGASFDAEYLKPQAA

SEQ ID NO: 377858 - protein, 393 aa, unidentified
MHSCLAIDVAKGKSMVSLISSCGEVLIDPYEINHSINDFTNLLNRINKLKLDNISVIMESTGIYHRPIERFFLENNFKVYTINALYSKMYKRNLRKTKTDKLDCISLTELFFTTDFKQYIKPDDLYLNMNALSRQYFALSDLCTNIKNRYKNLIYLCFPEYEIIFKGEMIYSTIALSFIEKYPHADIISNTRIDALQNFFKKSNFRYWKRKANIVKEYALKSYPSVNMNDESVSNLSQLARLINDYQKEIETIKYKLVFIAKKSKYFESINSIFGIGEFTTSIIIAELGDINRFNNIKELTAYCGLDPSIKQSGRSIDIHGPISKSGNKYLRKILFVSCLNIVRLSAKCHVQNDIEIYYRKKRNEGKHHYAATIACTTKLLRKILALCKQLDK

SEQ ID NO: 377859 - protein, 412 aa, unidentified
MLFVGDDWAEDHHDVEIVNEQGRQLARRRLPEGLDGITRLHALIAQFFPEEWADLEPAEAASRVKVGIETERGPWVQALIAAGYEVFAINPMSVARYRERHSTSGAKSDAGDAHVLAEIVRLDRAHHRPVAGDSELGEAIKLVARSHQSLVWDRTRHVLRLRGVLREFFPAALEAFADLDAADTLELLAIAPDPDRAARVSKAKITAALRRANRRSVEEKAAHIQSVLRAPALRQPAQVQAAFAAITASQVRLITTLNGEIAQLGEVVAHHFGRHPDAEIYASQPGLGVILSARVLAEFGDDRTRFADAKARKNYAGTSPITRASGTRKVVLARYARNTRLGDAAQQWAFGALKGSPGARAYYDALRARKIGHQAALRQLANRLVGILHGCLKTGTLYDENTALAHHHTAAA

SEQ ID NO: 377860 - protein, 348 aa, unidentified
MRVMALDLGGYKATVCEYDTASAEPKFAVVQATPQAIHDLLSEHMPDRVVFEIGPQAGWVHDIASALGLDVQVANPNREGWRWRKVKRKTDRTDALKLAQLSVMNQLPLTYVPSRPVRQWRAMIRYHHKLMDRRVAVKNLIRSILLREGVSWPAGKSGWTQESITALRGLARPLEEVDFDDFWRAQLALALQELDSLERLISAVDRKLDAVGKSDERVQRLQTIPGVGPRLAEIVVAIVDKPDRFKRANQVAAYAGLTPRQFESGTMQISGKITKQGDPLLRTLLVEVSWLGLLHNSWVRDVYHRTRKGSPARNKIAVIAVARRLLIRCWAMLRDQSDWRPPAVIAAR

SEQ ID NO: 377861 - protein, 430 aa, unidentified
MTKLCSTPAGAVLVAIDMSKNRQEVLIERPEGGRRRRMTVMATKEDYDGFAEQLAAIGRPIVVGFEATGNYHRTLAHLLLTAGFELRLISSVALVRTREALHNGWDKNDSKDAQVILHMLRIGATQRYVDPLAVGINDLQELSKTHEVISMAKTQTWHRILTHYLPLYFPEIAHFAGNSRSDWFLALIERFPTPGSITLLDREAFSAAAWPLIGRKVSKARLINDIYETACSSVALPVPEDSIAVTMFRMVIAQGRSLIQQRGEIEQLAHARLAEHLDYQLLRKIPGISPINTLTILAEAGDLRRFSHHRQFLKFCGLDLATCQSGTFRGRTKLSKYGNARLRRTFWMAAQIAARQRDNSFRDKLGRYVAGHADDADRRRKAMTALTAKMARVAHAVIKTGTEYRPFLERPDARWKDPSLRCREGAKATL

SEQ ID NO: 377862 - protein, 339 aa, unidentified
MKITTIGLDLAKNVFHVVCINAQGKEVKKRMLRRNQVRPFFVQLPPCVVGMEACAGSHYWGRQLRALGHNVKLIPPQYVKPYLRGNKNDYNDARAIAEAVTRPEMPTVGIKTVEEQDMQALHRMRSQCLRDRTALSNSIRGLLGEYGIVFTKGVATLRRKIPEVLEDADNGLSLRFRHCLARRYEQLVELEGHIAFYTKELHRLSEQDEACQRLQTVPGFGPIVASAFRSVMGDGRAYARGRDAAASIGLVPRQYSSGGKNVLLGISKRGNKYLRKQLIHGARSVVLQAANKEDPLSCWINRIRKDRGWNKAVVALANKMARIGWAVLRHQTSYQPATR

SEQ ID NO: 377863 - protein, 392 aa, unidentified
MYIVGIDIGKNHHEASIVSPEGKQIGRSLRFATTHKGADSLMSFIFKNIGNSPCVFGMEATGHYWYPIYSFLKAKGYTICVINPIQSDSLRKMYIRQTKNDSIDSFLIAEVIRFGQFGTTSMADENILAMRQLCRYRDSVISSRTEIKLRIGTIMEQIFPEYEKQFSSLWVSTSMGILEKYLTPENIENAPIDELFEIIKDKSHNRLTKAKAISIKEAAADTFGIKIAQDAFSFQLKQLIDRMNFHDKQIEALDIEIMKYYEQFDCYLHTIPGIGIIGAATILAEIGDISRFKNSSALVAFAGIDPTVRQSGEFNSTHNHMSKRGSPYLRHAIFLAATTCSFHNSPLNAYYKKKRDQGKHHLTATGAVARKLTTVIYAVLRDSKPYEPKKFC

SEQ ID NO: 377864 - protein, 387 aa, unidentified
MPQLNDLSRSLVALDQDSTIIAVVELSQSSWLVAGVLPGIERQPQKKLEPSAERLLGLLHRWRDEAVRAGKKITRIALAFEAGRDGFWLARWLNARGVEAHVIHPSSVAVSREHRRAKTDRLDTEMLKRGFLGWLRGERGHCTMARVPTIAEEDAKRPNRERECLVGERTRIVNRIKSTLARLGIRNFKPTLRKAAERLATVHTPEGMPLPPNTLAELQRDMARLGFVVSQIREIEQARQKRLEQETETGPHAMVRQVARVIGIGIETADMLVHEVLSRPMRDRKAVARYAGLTGSPDESGARRREQGLARAGNARVRRGMIQLAWRFLRFQNQSALAQWYRARTADSRPGTRKTMIVALARKLLIALWRFVTTGETLDGVILRPAG

SEQ ID NO: 377865 - protein, 438 aa, unidentified
MDLAIRMVQPPSVFCLASLRFGASYGRRSERLHMDELDKRSVIAGVDTHKDTHTLCLIDHMGRTIGTFEFAADAKGYDSLADKIGDPATCIGVGVEGAGSYGAGLTRRLLELGYCVHEVMVPGRAKRRPGRPKSDPADAEVAARQVLAGANLSKPKEQSGWTEDLRQLIIARDRLVQATSAMINAAKSLIVTAPEDLRRSLGDLSRKDLRRALASLDSDAGGVFLALGALGRAWDLQDREAEAIEGAMKGILEANAPALLAIYGCGTVTAAALAVAGGGNPERLGSEAEFASLCGVAPLLASSGKTERHRLNRGGDRRANRALYQIAVTRMSYDQRTKDYVAKRKRDGKSKKETIRCLKRYIAREVFRALRRPLEVKGPSWKDLRPARQALGITLVEVGKALNVGFQKVSYAETGRLMNAKFLEEYDAWLKSQLRIVG

SEQ ID NO: 377866 - protein, 414 aa, unidentified
MGLPRWVGRAIGLDVHRTFCEIAICEDGVTRSAGRVPSTPQGIESLVASLLASDRVALEVTGSCWEVVRLLEPHVNRVVVVSPDDTGIVSARAKTDKLDAQTLASLLWKGGLEAVWMPDERCRILRRRLSRREQLVRSRSRAKNEIHASLQRRLQEKPPCSDLFGVKGREWLSGLELPLEERESVDAAMRHVEFLDAEVAAVEKLIAQQALSWPEIRRLMTVPGVNLVCAASFIAAVGDPHRFMTSKKLVAYLGLDPKVKQSGDEPARSGRISKRGSPSARWALVEAAWTAVLQPGPMHAFYERIKARRGHGKAIVATARKLAILFWCMLTRGEDYAHQQPSLTRKKLRRLEITAGAPKYARRAAGIWSTNDLMRTAELELAQQAETSYRRMVQDQQASAPGRKAGASVTLERA

SEQ ID NO: 377867 - protein, 316 aa, unidentified
MSEKLLESFVGIDVSKNTLDLRIEPLGESLHVAYDEAGVSETIRRLVEVAPTLIVMEATGGLEVRLASELAAQGLPVAVINPRQARDFAKASGQLAKTDRVDAAGLAAFARAIRPTIRPLKDADTRALDDLVTRRRQLVAMRVQETLRLGSAASKPLQKNLKAHIVWLDKQIAKLDDDLTKCLRASEIWKTKDDLLRGIPGVGAVTSLTLLAKCPELGVLNRREIAKLTGVAPLANDSGKHRGKRFIWGGRADVRVVLYMAAVSAIRCNPTIRTFADRLTRAGKPPKVVIVACMRKLLTIMNSMLKNNTPWSLQTT

SEQ ID NO: 377868 - protein, 352 aa, unidentified
MNVLKQVIGIDVAMGELVCNFSLLTDELKIKLNSCEVFKNKPTGFVKLLKWAEKHKTAEGEILFVMEATGVYHEKLAHWLHGQSRKVAIVLPNKISNYSKTLDVKTVTDKTAAEAIARFGLERHLETWLPPKQLFREIKQLTREREQIVAERVVIKNQLHAEKVQAFPNKNSIKRLNSRLRLLNKQEAEIKTEIRQLINQDQKVKQDVANMTSIPGVGELTAAIVLAETNGFELIKNKRQLASYAGFDVKEKQSGISVKGKPKISKKGNRYLRKAVHLPALSAVKHCEQYKNTYARLVGRHGIKMKALVAVQRKILELMYILYKTETVFDPDYEEKRKAPQNIAGPFESSLS

SEQ ID NO: 377869 - protein, 408 aa, unidentified
MRRVKDKRSASSIVGCAPRCAEPHAERPRASICNSQRRQTVNKSITSFVGLDVHKDSTAIGEAEAGRESPRFIGTVGPDLGQLLKALKSLGKPETMFVVYEAGPCGYGLARQLRARGYACEVVAAGKIARRPGERIKTDRRDALTLARLARSGDLVKVMVPDERDEAMRDLSRAREDAVRARLKARQQLKALLLRHGHRYTGKSSWTLAHERYLATVSFAHPTQDIAFAEYREAVREGHERVERLTEALRTHTEHWRMKPLVAALSSLRGIDFVAAVTLAAEIGDFSRFAHPTELMGFLGLVPSEHSTGDTHRQGDITKTGNGHARRVLVEAAWNYRFPARISRVLQIRQEGQPKAVREIAWRAQLRLAHRYRRLSSRKLHPNKICVAIARELAGFLWDIAQQVKVAA

SEQ ID NO: 377870 - protein, 415 aa, unidentified
MDVVHPRCAGVDISKRDAKVCVRIQGAGRARARSTVTTWDAVTNRILELRDHLIAEEVTLVVMEATSDYWKPFYYLLEDAPFEVMLVNARHTKGIPGRKTDVSDAAWLAELGAHGLVRGSFVPPEPIRQLRDLTRTRTAITRERGREVQRLEKLLEDAGIKLSSVASDITGVSGRAMLEALIAGDRDPAGLADLAKRRMRSKIPELTEALTGRFGEHHSFLARLHLDLIDGHSRAIEELDERIEEAMQPFRATRDLIVTIPGISTVVADVIIAETGGDMSRFPSAGHLASWAGTCPGSNESAGRVKSTHTRPGNPYLKGALGAAAMSVARSKNTYLAAKFRRIASRRGPVKALVALEHAMLVAIWNMCSTGTYYADPGEDFFTRLHPDRARDRALEQLHRMGYAVTLEPLPAQTA

SEQ ID NO: 377871 - protein, 347 aa, unidentified
MKQVTYVGLDVHKKSITAVFGPVKSKPDSMKVTNDPKGWNRLAERLKTFDGQAVYEASSCGFEVYDEMTSRGWSVVVVAPSLLPKSAKEKKNKTDVKDATELRSRLVAHREAGASLPTVWVPPAVVREDRELVRRRLGLGEKAAGIKTEILSLLQIHKVRSVEGTAWTKAHVGELWALCGEMSGLGAPVKRALESQLRELEFLMAETARVEKEVEALAQEARHHAQVRELRKVKGVGTLTAMTFLTELGDASRFSNRRRLANYLGLTPSSYESGEAADRKGHITRQGPPRIRKILNQAVWSRVRWSPEAKERFGRLAARTGVKKAIVAEMRKLGIELWHRAVASIAA

SEQ ID NO: 377872 - protein, 323 aa, unidentified
MSKHSMVCAGIDTGKRKLDVALEKHPEQLQVDNTADGHGALSAWLRRHRVKRVGIEASGGYEQAVVAQLRRDGFVVIVFQPAQVRAYAKFVLQRAKNDKIDAALIAACTAATKKIHAPPDPRLAPLAEHLTLIEQIDEDIARFKNRHETCRDPRIRGFWREEIARRNKILRIELAALVTAIRQHRDLAERLDLIASVDGVGLKTAVAILVRMPEIGRVTREEIAALAGLAPYDADSGEQIGARHIAGGRKRLRGSLYAAALPAAFRWNPQLIALYQRLRAAGKEHKAALVACARKLLIYVNTVVERGTPWVDTAPVRSPLRAR

SEQ ID NO: 377873 - protein, 402 aa, unidentified
MNPVIGLDISKEESHGQAFLDRGKPYKKTFHFAHTQEGLEKLLQAIRDVEVVSGKRPTLILEATGHYQSPVVQFLEEHHFLFIVINPLISNRLRKSNLRKVKTDAADAYLLGELYYREEFEPFKKRGVQLLNLRYLTRQYEAFSKMCVQTKLQFQAVLDQVFPAYKGVFGAMYSSVSLRFLYEFPTSYSVIQTDSTMLKSKISLLLSSKRGRSEDWMNERVQRLLDAAKQNPFQQTMYASHFINLKILITLILQYQEHLAELDQNIDALAKEIEEYDLIQSIPGIGHKIAATILSEIGEIDRFDHPKKLVAFAGIDPSVFASGKFTATRNRITKRGSRQLRYALVMAVQCGLIRSRNTRIKEFYDHKRAEGKPHKVALVACANKLVHWLYAILKSKKSFRPD

SEQ ID NO: 377874 - protein, 345 aa, unidentified
MTIVKTRAITGGVDTHADVHVAAALDPIGGLLGVQEFPATAAGYAGLLGWLGGFGTVALVGIEGTGSYGAGLARHVSAAGIRVVEVDRCDRQDRRRQGKSDPLDAVSAARAAQSGRARGAPKGRDGAVEAIRALMADGRSARSERVQTNGQARALVLAGPGDLRARFARHTAASLVSGLASLRPRPGDVVGYATRIALRELGRRAEFLDAQLERLDELIAPLVAARAPGLLALHGVGPDTAALLLVAAGDHPERLRSEAAWAHLCAAAPLQASSGKVTRHRLNPGGDRQANHALWRIVLTRMSAHPPTLIYVERRTKEGLSKKEIIRCLKRYVAREVYRHLRAAG

SEQ ID NO: 377875 - protein, 360 aa, unidentified
MTLYIGVDYHPYRQTVAKCESENGEIEYREFLHSDKQSLKAYYGEAGRGAVVGVEATGSLQWFERMLFDKGIELRVGDPRLIRRAALSRHKNDFRDAETILELLMSGRFPRIEPRSDESRGVLQMLNYRHTLVRQRTSIANQMQAFARSKGLKKFAIRAKAAKESLLGAAEGEVELLLTESRFSLYEELTVKIKVVEDQLEKEVDKCEEVKLLQTHSGVGKLTALAVLHTLGDVRRFSTRDKVAAFVGLDPLDHSSGERRRIGKISKHGSRLLRHLLGQAAQASKDTRLRQFYSRVSRRRGHAIAKVATARKLLVNCYVMLRDNITYQEFRRRGEVGLCESSLEPETVSDPLIARPAIFE

SEQ ID NO: 377876 - protein, 329 aa, unidentified
MKKHYIIGVDVSKQKLDMHCYGQCDSLFVTNDARGHKKFLRWLKKMVSKNLKEILVVMEYSGIYSYGFEKYLYQQGINYVKRPALDIKRSIGMKRGKTDRADAKMISQYGWYRRDELKPMQPANEAQQRLHQLMSFRDKMVADKASYETRIKELKEQLGNKLLTGILKSTEQVVEVLKTEIKETENAIKELLVQNTELQMNYELITSIRGISFVTGIHLLVVTENFTRFSDPRKFACYSGVAPFEHTSGSSIKGKTKTSQLANKKIKSLLTLAAICAVRYDPELKAKYEQKLAEGKPKMSVLNMIRFKLIERIFAVIKRQTPYILSQAA

SEQ ID NO: 377877 - protein, 412 aa, unidentified
MKNIKEVRLLISVGVDVSKGKSTVCILKPYGEVIMSPNDYEHTLSDLKKLADQMDSFEDEIHVTMEATGNYHFPIATYLKKRDYDVRIINPLEMKRYRCQGIRNPKTDSIDAFMIAQYGIDFWFRPFQDYVVGDERIELKTLGMQYFKTMKTRQDRYLVLESVIDRALPGIGGVLNGYDKSTGKDKKSDFVYDFYHAKKITVYSENRFCDRYESWSTKKGYRYSEKEARQLYSIAKDSIPTLPSSENTKLMVQDAVKILREVDAALHDILTRMNEIAKCLPEYTTVMDMKGVGVSIGPRLIAEIGDPRRFHSAKALIAFAGIDAPPYQSGKFTGTERHMSKRGSRVMRKIGFELMDTINKHQKLYAGDPVCEYFLAKRAEGKKYRVAMFAAYNKFLRIYHSRVSAVLNENVK

SEQ ID NO: 377878 - protein, 423 aa, unidentified
MTKRLSTPIDTVLVAIDMSKHRQEVLIERPEGGRRRRLTVMATKPDYDRLADELAALRRPICVGFEATGNYHRTLAHRLLSAGFDLRLVSSVALARTREALHNGWDKNDPKDAQVILHMLRIGATQVYVDPLAVGINDLQELSKTHEAISKAKTQTWHRILTHYLPLYFPEIARFAGNSRSDWFLALIERFPTPGSITALGLEAFTGEAWSLVGRKVSKARLINDIYETASSSIALPIPEDAAAITMFRMTIAQARNLIQQRNRIETLAQSTLEGNRDYELLRQIPGIGPINALTILAEAGDLRRFRHHRQFLKFCGLDLATCQSGTFRGRTKLSKYGNARLRRTFWMAAQVASRQRDNSFRDKLGRYIAGHADDADRRRKAMTALTAKMARVAHAVVKTGTKYRPFIERSDARWKDPSLQVP

SEQ ID NO: 377879 - protein, 316 aa, unidentified
METSQPFVGIDVSSQRLDVDTVPVSQPFSEPNNEAGIASLTAHLKALNPQIVLLEATGGYEIPLAYALYEAGLPVVIMNPKAVRHFAKALGKLAKTDKLDAQILALYAQRIQPQVRPLKDQEQLELANLMTRRRQLQGMIVMEENRRRTCTPKVRSNIDLSLAHLRQLLKDLDREIHDSIRRTPLWHENSEILQSFTGVGPKVSASLIADMPELGTLPGAKASSLAGLAPMNRDSGQYRGQRKIQGGRPAVRRALYMAALVASRYNPVIREFYQRLRLAGKPPKVALTACMRKLLVILNAMLKNRTHWNPQLPLAA

SEQ ID NO: 377880 - protein, 465 aa, unidentified
MTIRSVGIDFHQGQHRARCLDDRAQPCDSFGFQTTMEGLAALEEHIFKDGSSPVIVFEPAGIPWLTVAAYLRSRHPDCRLLKAKMQKVAALRRYLRGPVKSDRIDALTLAKMPFIDPEQMEEVYLPSAEIHALQRLTRQRKRLQSDIAGRKVRIEAIFDGYLPGVRKTFSSPWSIQARAFLRARFNPFAVVRDGEKALVTFLSKATSRDKISQSESRQIFQACQAVANVCRAAEQAMTINEEFFVELQDEVARELRLMETEEVESESIENRISEIYHKLHPSNNLCTIPGVGEHTAPIFLATIGNPARFRNQSAFANWTGVVPRSRQSSNMEAKGLRMTKAGPSIMRMALFQSGDIGRRWDPQMAAIYYRQMVFHGKNHKQALGAVMSHLGARVLKVLLEDRPYELRDIDGKPVTRDYARRLILAKYQVSEDIRKERRRRNSKIGKMRETATNRANEAAKAPQPV

SEQ ID NO: 377881 - protein, 315 aa, unidentified
MIVGIDVSKKSFDVAWNNAGKSYHQTHDYNDKAIELLLSETPSDSHFVMEATGVYHSKLALKLHQAGRKVSVVNPVVIKRFCQMQLTRVKSDKADAELIRQYGEQADLMPWKPSGEQVEALKQAHGWLDDLLRDRTRLLNRQEAHRHQARPSQFVTRRMKEAYTQLTNEIVLCEGQLSVLVKKCFAELYEHLVSIPAVGKKTAIELIVITEGFTKFETVKGLSAYAGISPTTYSSGTSIKGKGGIAKMGGGRIRQLLYLGSLTAKSCNKDCRALYERMKAAGKPGKVIQVAIAHKLLRQAFAVATKGVYYTEITA

SEQ ID NO: 377882 - protein, 480 aa, unidentified
MVGQAVVHLGCEPVNDYMAAPATRLVGLRARIRICRLPAAPSSSEFDVRGRERKLRYFGVDVHLEFCEVAVAEGGKVSQVGRIASTPEAIREFAAGLGSEDQVALDASGSVMAIARILRESNVGRVVVSDAAQTRAISHARVKSDRFDAAMLARLLSSGMLSEVWVPDEATLALRRRVARRAALVRARTRTKNQVHGVVMRCLLGRPPVSDLFGRKGRVWLSEQQLPEEEAETVQGCLRQIDFLNGEIAQLDQKIAEQALAWPGLCRLLTIPGVDIGTAAAVIAAVGDISRFPSAGQLVAYLGLDPKVRQSGSEPARYGHISKRGNAQARSMLVEAAWIAIRSPGPLRAFGERVRARRGAQVAAVAVARKLVVLCWQLLSKDEDYAFARPSLTRQKTRRLELTAGASHLPRRHDGLTVSPTTGQRAAERELQAQAELAYRRLVADWRAAAPKKDGAGATPGRASSHRPSKGKAARQATSP

SEQ ID NO: 377883 - protein, 360 aa, unidentified
MKQDNTKERSWRQGGVTIGLDTGDRSSRYSVLNAGGEIVEEGEVASTRKSMTHVFGQAERCRIALEVGTHSPWLSRWLERMGHEVIVANARQVKLISASSRKDDRLDARTLAQLARVDPRLLRPIRHRSEKAQGHLTVIRVRAALVDARTSLVNAARGLVKAQGERLPSCDTDQMGVERMQKLPAGLRQALEPLLAEVESLTEKIKACDAKIEQIARTEYPETALLKQVSGVGTLIALTFVLTVEDRERFRKSRDVGCYVGLRPRRSESGERQPQLGISKEGDLYLRKMLVQGAHCILSHRGPDSDLRRWGLRLAERGGKNAKKRALVAVARKLAILLHRLWVNGEVYEPLRNSQPARAA

SEQ ID NO: 377884 - protein, 344 aa, unidentified
MQHYVGLDVSVKETSICIVDKAGKVIRDVKVATEPVAILAVLTEEALAIERIGLEAGPLSQWLYSALAEAGLPVICVETRHMKAALSAQINKSDRNDARGIAQMMRVGLYRPVHVKTLASQKRRMLLTSRQLLQGKALDIENDLRGTLRNFGLKVGMVGTVKFEARIHELVADHPDLAAIVEPLLIARRVLREQLGVLHRQLLEIVRHDEVCRRLMMTPGVGPVVALTFRATVDVPSRFTSSKAVGAAVGLTPRRQQSGEIDRMGGISKCGDALMREMLFEAALVLMTHSRKWSWLKAWGMKIARHRGMKCAIVAVARRLAVIMHRMWVDGTEFRWTREEATAT

SEQ ID NO: 377885 - protein, 372 aa, unidentified
MMAQSQEKKDDVGKDRFRIWCGLDVSKETFEAALVVGEARSLIGEQEVDMRQIPVRSFARSEAGARKFLAWADKKLAALVKQTQEPRRFGVVMEATGKYSLELTAWLCELRPSLAAAIINPAQASAFIKSLGLRNKTDKVDARALALYGRERNPRVYEPPSAELVQLQALSRQRDALLKTLVTERQRAQEGTPSKVVSQVQRSLIRHLERQIGKIERAMEELIDESADLARDVELIDTIPGVGRQTAMVVLAELGDVRRFSRSRQLSAFVGVSPRVWESGSSVRKRTRLCKAGNARVRSALYMATLTVIGRRNHLGALYQHLVERGKAKRAAMGAVMRKMLVLMRALLRSGECYHDDYHALGRHTRECVRMM

SEQ ID NO: 377886 - protein, 349 aa, unidentified
MEKITTIGLDIAKNVFQLHGIDENGEVVLRKSLRRGQMMIFFSNLSPCLIGMEACATAHHWARTLMASGHEVRLIPPAYVKPYLRRQKNDAADAAAICEAVTRPSMRFVPVKSEEQQATLMLHSARDLLVSQRTALINAVRGHFAEFGMVVSQGARNVHLLITIILEENNDDLSASARSALLPLATALLDIDAQISKLGKAILIAHRKSDVSMRLATIPGIGPIVASSLSASIPDASLFKGGREFAAYLGLVPRQHSTGGKPRLGRITKMGNRRLRKLLVIGAHSALYSIKSGKTDTPLAVWALSLLAKKPFKLVAVALANKMARIAWAVMMQNTIYQPTPKGVASKMA

SEQ ID NO: 377887 - protein, 480 aa, unidentified
MAKRAVQHADLKAVPMLLNESLYVGIDIGKAKHVAGFLSKTLLERHERFEACPALVFENSREGFRLLIERIRSLAPLEHIFVLMERTGHYHRTLEQYLQELDITVYVMHVQSRSIGMLKTDKRDALTLANQLDNQLELGVQVPNKLHLIRRVVPPTQAAAELRGLIRHRYELIHESTRRKNKLTAICDELFPELVRVVKDPNGQVALALRERFPTPAALATVSLTTLQQIRGGARSFSDAKLLELQRQAAQSIGIKEVARLRGLVLEQTQLIKELQMLQEHIQQLDKEIGGIVEHAREGQILLSFPGIGPIMAATSIAAIGSIHNFPSAAALKSYFGWAPVVAQSGSTLDHTRLTHGGARTMKHMLFLAVFQAIRLKDNEWARLYERLVKTKCPFDERTQSYLGKTRVIGRVAGQMTEAIYALLKRDAELLSKVPPSQDPPPPLLYDPEVHRQHHLGHYRPLKSTPPPNTITLLHPFPAE

SEQ ID NO: 377888 - protein, 406 aa, unidentified
MLFVGDDWAETHHDVEVMDAAGRRLAKARLPEGVAGMARLHAMIAEALGEDAEEAQVLVGIETDRGPWVAALIAAGYTVFAINPLQVARYRERHSVSGAKSDAADAHTLADMVRTDSHQLRPVAADTPQAEAVKVVTRAHKTLIWERTRHTQRLRHALREYFPAALDAFEDLDAPDVLELLAKAPDPDSAAKLTIAQISAALRRARRRHVAEKAARIQAVLRGEHLGQPKVLTTAYAATTRAAVAVLQTLDEQVKVLQGQVDAYFGQHPDAEIIVSQPGLGPVLGARVLAEFGDDPERYTDARARKNYAGTSPITRASGKKKIVIARYVHNDRLIDALMTQAFSALNASPGARAYYDQLKARGTEHNAALRQLANRLVGILHGCLKTRTCYDEATAWSHRVEQAAA

SEQ ID NO: 377889 - protein, 307 aa, unidentified
MPRTIIGCDLSRACLDLHCLPNAASSQVSNHRDAVNAWVGSLEPEAFVVFEATSGCDGALIAALIDRGIAFSRVNPRQAREIARATGVLAKTDRVDARVLAQMGSVLELPITRPVNTTRLRLADFLRRRRQLVEMRKAEKLRLYSAGQDEIASQIEAMIDLLSRQIADLDRTIAGLIAEDRTLSFQARLLSAVPGIGPTVLATLLGELPELGTLDRRRIASLAGLAPHARESGTWRGARRIWGGRRKVREALYIAALTASRRVPSLIAMRDRMREKGKAPKTILIAVARQLLVILNAMLRNGAPLRA

SEQ ID NO: 377890 - protein, 400 aa, unidentified
MHIFNGGVILNTYFVGIDIAKFKHDCFIADSNGCVIRDSFSFSNNLEGFNLILSILNNLKLSGNIKIGFESTGHYHNNLKLFLEKNGFTFMELNPLLVHKFVAAQTLRRTKTDKKDAQMISLYLMTIEYKPYVNSFYHIYGLKSLCRQRESFITQRTRISNDITALLDQLFPEFKPFFEHKLSKTALYLLNNYLTPSHISKLNIESYNNMKSALKRTISYIQFQHLREIAKKTIGISNELLEFQLKELLIQYNSIDSQIESIEQTIVKYYRTLDCHIHTIKGVSEISAASIISEIGDISKFNNPNQLLAYSGLEPGRFQSGTIDNNGKMVKHGSSQLRMVIYRWSETLYVHNQVISEYYWKKRSEGKHHNVALSHVARKLINIIFKLETCKIDFNINLLK

SEQ ID NO: 377891 - protein, 323 aa, unidentified
MDEVRGEDEVFVGIDVAKARLDVGVHPSGETWAVDHDEAGIMAVVERLGARRPRLVIVEATGGLELALVAALVAAAVAVQVVNPRQARDFAKATGHLAKTDRLDALVLARFGAALRPTPRPLPDAALQEVRALVARRRQLQAMVVAEKNRRASAPKRLHAQLDEHLAWLKRAVADLDREIGRTIRGTPAWQAQVTRWRTVPGVGPVVGATLLADLPELGTLDRQQLAALVGVAPLNHDSGAHRGTRSCWGGRAPVRTALFMATLVATRCNPVIRAYYQRLLAVGKPKKLALVACLHKLLTILNAITRHGTTWQAAPASPAVAA

SEQ ID NO: 377892 - protein, 298 aa, unidentified
MPKYSTAFGMDVHLRSTTVCALDADTGEAVTRRFPGNPWGEIAGWMDGFPGPSLAAYESGYLGFAPQRELAGLGVECVVAAVSKVPRSAADLSSKNDRNDAARMAKAILSHDISPVWVPSPEIEGLRDLAGAHDAATARLAAAKQRLLAFLARRGYAYGGTTPAGNPRRYWTYGFLRWLDGIRPADDGGIRALAALRNEVEAADETREAVLAEYRAAVAAGPLSAEVEALQSIKGCGFALAAAFASEVGDFSRFRSGRQVTSYFGLAPKQRSSADSVRLGGISGAGNALVRRLVLALL

SEQ ID NO: 377893 - protein, 402 aa, unidentified
MNPCITIDVSKESSHVQGFWDINKQVSKPKEIEHTKVGFSYINEIFNLIKEKTNIEPLIFFEYTGVYHLPLMNYLEEQKLRFIPIPPLVAAKVRKSDLRSKKTDKRDCKSISYVYYENKLKIYYEPTPEEKYLRELQQHYCQLEDIYQVITVHLHELLDSIYPYYKRIFSEFDCYNSLYFLKEYPHPKFVTSHRVQTVANKYQSLSNHSDNYCLKFANKLFAYIDEIVPGCNQNDYSVSMFKDLVEQTIFYKQRLDETIKTICQIISGSDKKELLESIVSIPGVGHNTAARFIAEIMNIDRFTSHKALIAFTGTDPHIEQSGDVDGKHLSITKLGNKRLRTILFQMVRSMIRKKIPDNHIKDFYKKKTQQGLKPKVALVACVNKLLGIIYQLNKNGSVFTYN

SEQ ID NO: 377894 - protein, 409 aa, unidentified
MTDLSYQIYVGVDWGTEEHRVVILDAERRVLHGRRVRQEAMALETFATWLSDLVGGRVDTVAVALETPRGALVETLLARGFHVFALNPKQLDRFRDRFTVAGAKDDRRDAHVLGDALATDRPAFRRLAPEDPRLIELRELSRLDDDLVAELGRLSNRLREQLSRFFPQPLQLCPAADEPWVWALLERVPTPAAARALPRAAVGHLLTRYRIRRLSADEVVTVLRTPALPVAPGTVNAAQRHLTVLLPRLRLVHTQRAACEARLEELLEQLADTQEHRDVAILRSLPGVGRVVTATMLAEAARLLAARDYHGLRAHSGVAPITKQSGKRKLVVMRYACNPRLRAAAHYWGQSAVCHDPRSQAQYARLRAAGHSHGRAVRGVVDRLLRLLVAMLTTQTLYDPARGVPAMAS

SEQ ID NO: 377895 - protein, 312 aa, unidentified
MTQIICGVDVAAQTLDARIAPDGPTRSFANTPKGCAALARFCQAHHVTLVALEATGGYEQQPFRLLWAAGLACAILNPRQVRRFAEAMGILEKTDRIDAAVIARFAEVRRIKPRPPASPAQERLSALVTRLRQLVEVRTAQTNQARLVREPTVRASIAEMVALITRQIGELEAEIAALLRTDPLWQRLEAGFRTIKGVADRTVARLMAELPEIGTLSGKAVAKLAGLAPIARDSGQSSGRRPVRGGRSGIRAILFVVAGCVRRFDSDFQAFDQRLRQAGKPPKVIRVALAHKLLVRLNAKARDIRAEMAQPA

SEQ ID NO: 377896 - protein, 357 aa, unidentified
MKYIGCDFHPSFQQMAMLDKETGELVERRLLHTEEARAFYEGLQGPVLVGIEASGNTQWFESLLARCGHELWIGDAAAIARQEGRKQKHDRRAAELILKLMLENRFPKIWVPTVVERDLRQLLMHRQHLVRMRTRVKNQLQHIALNQGWQKKRKLWSEAGLELLRSLKLEPWTQQRRDTLLQMLKELEEKIQPLDQAVEREAQARAAARRLDTHPGVGPVIALATVLTMGDVQRFPDSRSWVSYLGLNPSEASSGQRRRLGAISKQGNPFLRYLLVEGAASAVRGDKSLARMYARLKAKKHHGVAKVAVARKLAVRLYWMARTEKSYPEVVRTQGSQSHSVAEVRTDRLNRPPASHR

SEQ ID NO: 377897 - protein, 307 aa, unidentified
MKKNISRSVEMKATAVERKAGVRNAPGRTVRQPPDYQAVVGLDVGDRQTHYCVLDLDGELAVEGAVATKEASLRVQFEGKARMRIALEAGTHSPWISRLLLELGHDVIVANPRNVRMISASDSKNDPADARLLARLAHVGPELLSPIQQRSEKTQVDLALVRARDVAVQSRTKIVNAVRGIVKSTGLRLPSSSTLTFARKAKDACPKVLRSALLPLLRVIEELTREIELYEKLVTKKADTEYPETKAIRTIYGVGPLTALAFVLVLNNDRGRFQRSRDVGCYIGLRPKQRESGQRAPQLGITKAGDP

SEQ ID NO: 377898 - protein, 400 aa, unidentified
MISVGIDVSKEKSTVCILKPYGEVVSRPFEVCHVEKELSELTSMLLRLNDDVRVVMEATGIYHLPVLCYLKEKGLFVAVVNPFEMKEYRCQGLRRVKTDKQDAITISNYGIDHWYRLKNYEAEESVYAELKLLGRQYRHYMRMRVESVLELTHLLDYTMPGIKTLLKGWNETNGKDKLGDFAEEYWHYDNITKKSEEQFIKSYLKWAKEKGYHQSQDKAVKIYALAKEGIPTVSSDTPSTKMLVQEAVRVLREVDNTLMTILTQMQALAKSLPEYPVVRAMGGVGNVLAPKLIAEIGDVRRFHSGKALIAHAGIDAPPYQSGQFIGTERKISKRGSSSLRKIGYEVMRCLKTHKEPEDAAVYRFILKKEKEGKSKRAAKIAGLNKFLRIYYARVMEVYQN

SEQ ID NO: 377899 - protein, 461 aa, unidentified
MVSQHRKENVSVSKGSGVSRGDRRRNARLAELRLLVCRENAIVGIDLAEDNQAVVVTDHDSKVLARRSPRCKAWQLGEVLDWAVGKAKARGFESVTVACEPTGSRWMHVQQACAERGLNFVCVQTLVTHNARVAEDYTRDKSDQKDAVLIARLTAELRCYRPEVIEEEWAVLRYLGQRRDALVTEALRCRQQITDRLALAWPAALGAAAAPLDSVTFLACLQVTADRCDGDPGKLRRYGLAEFTQLVRGVLPRWGGQRICHRIVACFHAALGDSRGAVPARRRGALKLAGHALADLRRARELQLRAEAEMIAQLDVLGITDVLASIEGLSLPVAACILAEIGDPARFGSSRALVKHAGVAPCDNSSGNSAGQARISRRGRPVLRKTAWRGTWAMIHGANPVLAAKYDHLTSRDTGKLAKGQAHIACVATLLRWIYSVITTRTAWDRRVAGGTISHTAALAA

SEQ ID NO: 377900 - protein, 386 aa, unidentified
MRRKSFRKHMYVALTKGADRPMPSIAPHDIVWVGLDVHKISISAAVIRPGREAPEVANLMADEASVRKFFAHQGPPELLRACYEAGPTGYDLQRKLAGMGIACKVAAPSLIPRAPGDKVKTDRRDAQRLAHLLRSGDLVAIRVPTPEEEAVRDLCRARADMVEDLTRARNRLGKFLLRHGEVWAGATAWTLEHRRWLGARDFANKALSLTFSHYMAVMEEREADLAATTADLGAYYTKAPFAEAVARLCCYRGVDRLGALTIAAEVCDFRRFGKAEHFAAFTGLVPCEHSSGGSVHRGPLTRSGNAHLRHQLVESAWAYRHRPGVGATIKARQEGAPAETVARAWAAQQRLSRRFRALSSRKNVQSVVAAAVARELACFLWAEMVA

SEQ ID NO: 377901 - protein, 423 aa, unidentified
MRRCIGLDVHREFAQVAIWEDGIVRHIGQISATPEALRLFADSLAPSDEVAIEATANTHAIARLLERHVARVVVSNPQKTRAIAEARVKTDKVDAEVLAQLLAADYLPAVWLPDDETHALRRQVARRAHIVRQRTRLKNQVQSILHRNLVPRCPAADLFGRKGRTWLCEQELPDDERRTVEALLRQLDFHGEELRIVDAELGRVALRSDEVKRLMTIPGVDATVALSIVAAVGDFSRFSSPQKLVSYLGLNPRVRQSGGQPASHGRITKQGRAHARGMLVEAAWVAAKIPGPLRAFFERVRARRGMQVAVVATARKLAVLCWHLITRGEDYAFQRPSLTEKKLRALELRAGMPSRRGQKGKAAAYSLKEIRRREAELAEQAEQAYRQLVADWQAKAPAKKGVAAANGARLSRPSAGQAARQGS

SEQ ID NO: 377902 - protein, 359 aa, unidentified
MGEYIAFDSHKHYTLAEREEVETGRTKQTRIEHRRGALRGYLDDAAPGTAVAVEATGNWYWIVEEIEQAGCVPRLVHPRKAKVMMGMINKTDKLDVHGLNRLQRVGTLPTVWIPPGRLRDLRELTRGRMVLVAMRTRVKNRLTSTLAKYGLRVEGVSDAYGRRGREQWPRLLAHLPPETRWGAKQFWELLDCLEKRIAAYEERIEDLVQETPGMRLLRSLPGVGFILAATIALEVGRIDRFPTDEHLASYAGTTPRVHASGGKVRYGPLRPDVNRTLKWAFAEAGNSVAVNHRRCSERYVSRLYRRLRRRKGHAKAIGAVARHLAEATWHVWSREEPYRDRIQGRGKRDTVMSPSRLAE

SEQ ID NO: 377903 - protein, 340 aa, unidentified
MNAVTLIGIDLGKYSFHLHAQDGLGRMVFRKKLSRQQLLRTLANVPACRVVMEACAGSHWLARRLASLGHEARLISPQLVRPFVAGNKNDFGDAQAICEAASRPSMRFVSPRNEAQQTVSALHRIREALVRDRTGTTNQIHGFLLEFGISLPKGAAIIRRLPAVLTHESSLPARLVALVERLREHYKYLDQQIQQVEQELLAALREDDRSQRLLEIPGIGPITASALAVELGDARQFANARQFSASIGLVPRQYSTGGKPTLLGISKRGDRNLRRLLVQCARALMQHADVRTDALGAWIRALSIRRHSNVVACALANKLARIAWAVLARGTHYQARPLAA

SEQ ID NO: 377904 - protein, 342 aa, unidentified
MSIVYVGLDLGSSAFQQVAIKTDGSIKVNRSFTTSEANLRAAFADQQGEIQVHLEAGELAPWAASIIAPLVTRVVCSHPQSNAWIAKDADKCDRIDAYKLAELLRLNRFKEVHYPPDQRRRNFKQLVQHYDELTSQQARLKTKLKARLRMQGVIVGGERVFSSSGRKPVLTEVKSAEVRTALKQLYAVLDQSVMSQTEARLLMLRAAQAFAEIRIFRTAPGVGPIGACRFSAYIHTPNRFSSKRKLWKYCRLSVSHRSSNGKPLRRPRLDRCGCGRLKDVSRKAFEAAMRERKDNGFKRAYQRALETTQDATHARLTVQRKIVSTLRAMWLTMTPYCDELMR

SEQ ID NO: 377905 - protein, 355 aa, unidentified
MDSIKYVGLDVHRDTISVAVLNADGKLVMQSVIATQASAILDFLRGLRGTLHVTFEEGTHSAWLYDLLVRRVAKLVVCNPRKNALLKAGSKSDAIDARKLAELLRAGVLSPVYHGQNSTAAVKHLGRSYAALTEDTTRIMGRLKALYRSQAIACAGQKLYGSRHREEWLAQLTDSGLQRRARRLYQELDLLQQLRREARQDLILECRKHSETKLLRTVPWLGPIRVALLIGRVQTPHRFRTKRQFWAYCGLALETRSSADYGFVDGQLQRRKKPVFIRGLNLNHNHDLKNLFKSAATTASGSEGVFGAFYENLLKKGMRAEMARLTLARKIAAITLHVWKKGEAFDAEYLKSQAA

SEQ ID NO: 377906 - protein, 360 aa, unidentified
MAKARTLVGLDVHAAKVVAAVLDAETGELRVFRLGGDVDEAAGLCAGLSGPVQATYEAGPTGFGLARALAARGVGCVVAAPGKIPRAAADRIKTDRRDAEHLVRLLWAGKLCAVRVPGPEEEALRDLVRAREAVRQDLMRCRHRLSKLLLRRGVRFEDGPSWGERHRAWLAGIELGQPAAQATLADQVGAVDALVHRRDALEREIIATLPGSPWQTHVGRLRCLRGVDTLTAAGLCAEIGDFQRFARAEQLMSYLGLVPSERTTGQQRRLGSITKTGSGHARRLLVEAAWHYRTRPHVGRTLHARHAGQPAAAIAIAWTAQQRLHRTWQRLEQRAKRRTIIVVAAARELAGFCWAITQTE

SEQ ID NO: 377907 - protein, 331 aa, unidentified
MINQDGKRVAHRKLGCDLGEVVGFLKPLKPQLQSMAVESTFNWYWLVDGLRAQGYSIDLANPAKIEQYSGLKHVDDQDDAFHLADLQRLNILPKAHVYDPELRPVRDLLRRRTNLVHQHTALLLSFSSLYTRTTGQKLALGDAKKMEPKQAPKLYEHPANQLIAQVQAEHIQALAKSIRRVEKAVLACAREIPLYDKLLTLPGIGRILGMTITMEVGDVKRFKTDGDFASYCRMVDAKRLSNGKCKAQNNQKCGNKYLAWGFVEAANFARRYDEQCRRWYDRKAAKTSKVIATKALGCKLAKAAWHVMAGQCDYDEKRMFPELANPPMKTS

SEQ ID NO: 377908 - protein, 430 aa, unidentified
MKSNTQNAKIEAITEKTLVLGIDVGSETHYARAFDYRGIEYSKKPFKFSNTEAGFVTFKEWILDLKERHEKDKVVPGMESTGHYWFNLGKFLQDNEMKPVLVNPHHVKKSKELDDNNPTKNDRKDPKVIAGLVREGRYMIPYLPDGVYADLRTASNIRFQLQAELTRIQNRISRWFNIYFPEYKTVYGKPDAKSGILILKAAPLPEDILTLGIDGVNQIWRDAKLRAVGKARAKTLIEAAEHSVGSKEGAVAARMEIRMLLEDYESRSIRLQEVMTLIEGLVKQIPMAEKLLEIKGVGIRTVSGFLAEVGDISRFNNPKELQKLAGLALVENSSGKHKGETTISRRGRKRLRYLLFEVAMSLVSKNQEFRELHNYYTTRRLNPLKKMQSLMAIAAKLIRVFYAMLTKGVDYDPKKMVSDIKRPAVYLQAA

SEQ ID NO: 377909 - protein, 422 aa, unidentified
MGAASAALRCAGLRSATAALESNSSSVPGGKGLQESLGKSVGEWHFTLEGKTSVSTSDLSPKKATQMSHDVKYIGMDVHKEAIVIAVLNESGKLVMESVIETKASSILQFLHGLRGELHVTWEEGTWAAWLYDLLQPQVQHIVVCNPRRNALLKEGSKSDKVDAQKLADLLRTGMLRPVYHGENGLRTLRELGRSYQTISKDLTRVMNRLKALYRGWGIPCAGTQVYAARAREEWLSKIPNAGVRRRAELLYQQLDGLQALRRNLRPEFLAESRKHKAAKLLRQIPCIGPIRAARLIALMQTPHRFRSKRQLWTYSGLGIETHDSAQYRYVGGQVQRSKKPQQIRGLNQNHNHEMKEIFKSTATRASCGRGPFHDFYAALLTKGMKPEMARLTLARKIAAITLTLWKKEERFDAEQLKTQAA

SEQ ID NO: 377910 - protein, 347 aa, unidentified
MEVTTVGIDLAKNVFRLHGCDARGRAVLRKQLGRRQLLAFVARLPRCVVAMEACASAHYWAREIEKLGHRVRLINPRFVRPYVKANKNDASDAEAICEAAGRPAMRFVAVKTAAQQDVQAVHRVRQQLVKNHTALMNQVRALLAEQGIVIPQGSAHVHRSLPRILADDDNRLSGMMRELLNEIGERLRYIEERLRQYELRIRRLFREDERCRRLAEVEGVGPVTATALVAAVGNAAEFKSGRELAAYLGLVPRHRASGGRTTMLGISKRGDRYLRTLLVHGARAALRVNQRQHTTRSAWIERLKSRRGSNIAAVALAHKNARVLWALLRTGECYRPTPFPARVPHVG

SEQ ID NO: 377911 - protein, 346 aa, unidentified
MTRYIGLDAHSESCTIAVLGGSGKRLRHERLQTSAELLKSFIKEVPRPRHLCMEEGTLSEWLCEELTPLVDKLVVVMPDRNPGNKSDLIDACKLADDLRRDAIRRPVYKAPGCFRALREAARTHYVLQRDKVRTKSRLSALCRGCGRPELAKALYGLNTRPDALQELPEHLRPRAALFGQELDALVECAAQAERSLQEESGRVPIVRRLATAPGIGVVRAAYIVAVVMTPHRFRTARQFWSYSGLAVVTRSSSDWVSEGSGQWRRSKTQQTRGLNHNRHPLLKNVFKGAALQITLMPEHPLGQAYQRLLTTTKPNLARLTIARRLAAAVLAMWKNEKDYEPAKHLM

SEQ ID NO: 377912 - protein, 306 aa, unidentified
MKEVVKFPQVVKVGCGMDVHKDIIVATIRKSDDEFETREFGAYTSSLTSLRDWCKTEQVSHVAMESTGVYWKPVFNVLEEDFDIILVNARHVKNVPGHKTDKKDSRWLSKLLLSGLLKGSFIPPVDIRELRDLVRYRKKVVAQAASEKNRIIKILEDGNIKLSSVLSNIDGAVGTKIINSLIQGQTDINELAKFYHGKMKVSKAEFRMALEGRISKHHRIMLQFHQDSIVDKERLIERIDAAIEEATKAYQVEIDLLQTIPGVGKGSAISIVSEIGVDMSKFPSENHLSSWAGVSPGNNETGGKKK

SEQ ID NO: 377913 - protein, 337 aa, unidentified
MNYCGIDLASRESAVVILDGSGRELRRVAVETEQSGFRRALQGLGRLRVIIEASPLAEMAANYVEALGHEPVIIDARAAKHLMNAKKKTDPRDAHTLAEIGRCGWYIEVHRKSPEARELRSLLKARQALKKTSTAQLNSIRGLLRAQGIRLGKVSEGQFADAVMTLVNREIPGLTDAFTAMLQVWALARAEAARLERLIRQRSRADQVTRRFEQVYGVGPLTSVLYRATVDDPYRFRHAKEVADYLGLAPRVSQSGDTAYRGRITKEGDHLLRWHLVECAHVLLTKGRDCALKRWGLQLERRKGSAKAKVAVARKLAVLLWRLWKEEKDFAPFPQAA

SEQ ID NO: 377914 - protein, 405 aa, unidentified
MGTVMALDVSMGKSYKVVYDDQQCLSEGEVIHSQAGFQELLYEIYTLPEDLMLVFESTGIYSKTLETFCQKNQLRYCLLNPLAAKKQLEQGTLRSWKTDKHDAHKLAQVHRQNDRPEKLDQPDIYHDIRDLSRFYQEVEEDIKRTRMYLHNALQLSFPELERFFSSRVTPYALTLIDLFPHPDFVLQTSKTKIKNLLIRSTTKKISENRAKQNASEIFEYAKESYPAVSSSSVQTQKVQYYARQLLQRLEEKEKVSKQMTEKAKQLPEFELLISFPGIGDISAALFIGEIGDLSRFSDHKKVNAFIGIDIRRYQSGKYAGQDHINKRGNPKGRKILYFIVRNMIRQQKAAPNHIVDYYYKLKKQPHPKKDKVAVVACMNKLLKCIYSMVRNNTKYDYSYTASMDQ

SEQ ID NO: 377915 - protein, 343 aa, unidentified
MIYVGVDLHLRFCYMTVLDAKGKVLRQGRVQNTDSQLQQFFADVKNSLSENEGIAVAVEACGFWCAFVDCVEPLVERVVLVHPAKVKAIAHAKLKNDRVDSATLAQLLRANLLPEAWKADRTTRDLREVLRMRVALGQDRTRYKNQIHAVLHLHGQQTAVSDLFGRQGRAWLKALVVRPAARQAIDTSLRMIDQLNGELRVLDRQLQKSAQQDADARCLLSIPGIGAFSAMVLKAEIGDIRRFRDKKSLYNYAGLVPVIRQSADHLRRGGITRSGSPLLRWVMSEAAVTATRHCPAARAWFTRLAQRKHPHVARTALARKLLGAVWALWTQGVYFDERIFAAM

SEQ ID NO: 377916 - protein, 468 aa, unidentified
MGHNRSRSRQTIGKKGKQPSLLKRINRNAAGIDCGSEAHYVAVPPERDTEPVRSFKTFTADLHGLADWLAACGIKTVAMESTGVYWIPIFEILEERGFEVVLVNSRHIKNVPGRKTDVLDCQWIQELHSVGLLRGSFRPAAEIASLRAYLRHREKLVQSAASHIRRMQKVLVQMNLLLHNVISDITGVTGMRILRDIVAGVTDPMALAAHRDYRCRASVEQIAASLTGNYRAEHLFVLRQNLELFDTFQQQIRTCDGEIESLLRALAAKRCSPKAPAPSPRCKPRFCDNEPRFEIRDPLYRLAGTDLTQIDSIGPYTALKLIAEVGIDMSRWPTHKHFTSWLTLAPRNKITGGRLISSKTQPSANRAATALRICAMALGRSSTALGAYYRRIAYRIGKPKAITATARKLAILVYHALKGDLDYNDPGAQAYEEQHRTRTMRNLRNRARQLGFGLVNIETGELIDGTVS

SEQ ID NO: 377917 - protein, 340 aa, unidentified
MTITTIGLDLAKSVFQAHGVDESGATILVKRLHRKQMLPFFSKLSPCLVGVEACGTAHYWARTLAAMGHEVRLIPPSYVKAYVKRGKSDALDAEAICEAVQRPTMRFVPVKTVEQQSILMTHRARSLLVRQRTMTANALRAHLAELGLVANPGIANLAKLAEQALSDDDALPAYARTSLMILVRQIIALNNEVAALDRQLIAWHTESEASRRLAGIPGIGVITATALAATVTDPDQFRSGRQFAAWLGLTPQQHSTGGKTRLGGISKQGDRYLRRLLVVGATAVMRHTKDKPTPIANWIRKLMEKKPFRLVSVALANKLARIAWVVLTRQEAYRPYELTA

SEQ ID NO: 377918 - protein, 363 aa, unidentified
MLQHTTATHVGLDVSKASISVALLRPDGHLDEESIANTPEAVRRLVHRWPEPSRVRVCYEAGPTGYDLYHQLTALGIETTVIAPSLTPRRPGDRIKTDRRDARKLAGLFRADELTAVRVPTLEEEAVRDLLRARQDEREDILRARHRLSKFLLRHGRVYTDGSAWTGRHTAWLAKQHFDEPAAQRTLEHYRAELDMRLASLKLLDAELLDIAHRPPFAPVVARLCALRGIAELSALTIAVEVGDFTRFGSAPAFMAFVGLVPSEYSSGERRSQGPITKAGNAHLRRVLVEAAWHARRRPNIGPALAKRLAGQPPEVLAIAASSQRRLHDRYWRLVERRKPSNVAVVAVARELSGFCWALGRAA

SEQ ID NO: 377919 - protein, 443 aa, unidentified
MKALPVLDPQAAAIDVGSERLHVSIGGDAPKVFGTFTGDLEVLRDWLKEQGVRTVAMEATGVYWLYLYEVLEASGLEVVVVNGRHVQNVPGRKTDMADCQWLATLHAHGLLRGGFVPPNDIRQLQDYQRLRADHIVGAASQVQKMQQALERMNVKLHDVISDLTGVSGLKVVRAILKGERRPGELLALCDEQIRKKKSEAVKESLRGCWKKEQLFALRQALELWEAYQQKINDCDVEMQALLQQMAEPGEGQSGGGLSGPVKLAPAKAPGKNGPVIERLQELLARICGGHDATQIPGLGTSLVLQIVSEVGTDMSAWGTEKRFVSWLGLAGGHKQSGKRKRSIKVHRNRAGRMFCAAARSLAQTVDKALGGFYRRLRGRIGGLAANVALARKLALLFYRLLRYGSDYVEKGLKAYEAKVLLTEARLLRKLAKKQGFILVPVPV

SEQ ID NO: 377920 - protein, 346 aa, unidentified
MEHYAGIDVSLELSSVCVVDAQGKIVKEAKVASEPDALVSFFEAVGFSVKQIGLEAGPLSQWLHAGLKQAGFEAVLLETRHVKAALSAMTVKTDRKDARGLAQLIRMGWFRPVHAKSMGSQEVRALLVARKQLLGRLIDVELSIRGILRGFGLKVGPVTRKGFEARIRELVTGQATLERIAGAMLSARTALKAEYEKLHKAMLSIVRDDAVCRRLMTVPGVGPLVAVTYKSAMDDPSRIMKSKAAGALFGLTPRKYQSGEKDITGGITRAGDEMVRTVLYEAANVLLSRITRFSKLKRWGMDVAKRRGSKRAKVALARKIAVILHRMWVDGTTYRWTEASPIAAQA

SEQ ID NO: 377921 - protein, 335 aa, unidentified
MNNVSLFVGIDYASDFVQVCAVDQAGDVRVNKRVDNDWRAIVRAVEVHGRVAGAGIEACTGAADLGQELIDQAGWKIDLAHPAYVAKLKGSPDKTDYSDGRLLADLTRVGYLPRVWLAPAALRQLRQLVNYRQQLVDQRRSCKLRVGAILREHRVQPPEKLSRWCKGWISFVRTTDQLPEAMRWIVDQTLEQIEYLNKTILSAEQRLCKATEQDAVVKKLMEQEGIGQVTAWVLRAFVGRFDRFGTGKQLGRYCGLSPRNASSGNRQADGGLIKMSNKILRATLIQAAHRLIRTSRRWSTLAGSMRSRGKPVCVIVAAVANRWVRRLFHELKGTI

SEQ ID NO: 377922 - protein, 404 aa, unidentified
MIFVGIDWAEAHHDVCVLDREGEVLATRRVPDGLEGVARLHALLGEHTDEPAEVIVGIETDRGLLVTALLAAGYTVHAVNPLAASRYRERHTTSRAKSDRADARMLADLVRTDRQHHRVVSPDSESHGAIKVLARSHQNLIWTRQRQTNALRNALREYYPGALAAFEELHHPDATAVLAVAPDPERGRRLTEARIVSLLRRAGRQRNLERRAGQIRSALQVPQLAAPPLVAEAQAANTVALVAVITTLGQEITKLEAELVDAFGRHPDAEILRSLPGLGDILGARVLAEFGDAPDRYVDARARRNYAGTAPVTRASGTSHVVVARLARNKRLFDAAYQWAFCALTTSPGARAFYDDHDPGPHTAKAARRKLANKLVGILHGCLVHGTFYDEDLAWHRTSERLAA

SEQ ID NO: 377923 - protein, 436 aa, unidentified
MNPHGVSDQLNLEKLSSGCLRVERVRQKPATPCVEVVKHKTINLKRSNIMIKKRGRVVGLDVHPDSFAGAVVEGSDPASAQVLSTSTRVELERLEQWALRHTRTDDTLVLEASGNAFSVAERLRAIGRKAEILDSHRAGKVGKVYCANDRVDAVKIARIYLSALSPIVWQPDQKTLERREVFSAYQAVVKESTRAKQQLRSMLNEHCVRLEKGFRLCHPNAITRLLRLREWTPARTMLLQQLHGSLVSARARRTLLRRHMAQEIVTDEALLRLTRLCGINLITLYGVIAAVGDVRRFSHSKKLVAYLGLNPSVSQSGNFEGGGALKRHGRGALRALLIQSGKKLLEVTNPLQKWGLAVAARRGRNKAAVAVARKLCVAVWHVLMGHIVGALERLDTLETKLSKFATEMGPAALSALGYHNKADFVEKKLYVLRSYP

SEQ ID NO: 377924 - protein, 391 aa, unidentified
MRFAGIDIASEKHVVAVVDEAGGVVVKATPFTEDEAGYRALLELLGPPAECTIAMEATGHYWQNLFAVLAAAGFRLALINPLRTNRFAQEDLARTKTDAIDALGIARFTQQKRPVETRLPDAATQELKELVRLRDRVVQDMGDATRRLHRSVDLGFPEFTRYVKTLDSELATKILHEYPTAAAFPALPRQLAKLVYDGVHKVGNELAAQLVEAAKTSVGQHHGDAYRMQVQYSCEDIDLQRQRLRDLERRIETTLRKHDVGKLLTTIDGIGPMTAARIVAEVGDFERFRSPAALAAYVGVIPGLKHSGKNKPSRGAMTKIGHAKLRHKLWMPVLVAVRRNAWLRAYYTRLRDAGKPPKLALIAAMRKLLHAIYSVATNQRPFVARLPEVTS

SEQ ID NO: 377925 - protein, 349 aa, unidentified
MKIVGCDFYPSFQQVAILDLSTGEVRELKLMHADGEADRFYRELEGPALIGMESTGNTLWFERLMEQLGHELWIGDAAQIRASYVRRQKTDKRDAGHILQLLIDRRFPRIWVPSSLERDQRQLLLHRHRLVRMRTAVKTELQHLALNQGLQQKRGLWSVRGRADLEKLPLECWTGRRRADLLKVLDMLEAQVADLDEAVDKVAFSNAQARLLMTQPGVGPITALAFVVTMGDVARFKRGKQVASYLGLIPRERSSGAKRRLGAISKQGNVFLRTMLVEAAQSAVRYDEEFKKEYAHRCHQKPKGVAKVAAARKLAVRLYWMLRTQTLYAKAVASKAVHNEGSPSHSLVG

SEQ ID NO: 377926 - protein, 365 aa, unidentified
MREASVTSERMSVGLDVHARSVVGAALDGVTGEVLQRRLTPDPAEALAWVRSLPGPVRVTYEAGPTGFRLARVLAAAGVECVVAAPSKLQRPSGDRIKTDQRDALHLAKLLKLGEIVQVRVPSVEQESARDLVRAREDVRGDLMRSRHRLSKLLLRQGIVYSGGRPWTGAHDLWLRRQQLDGVGLRLAFESAYESMLFTVSRRERLDAAIEAMAASSEFTDVVHRLSCLRGVSVLTGFGLAVEVGDWHRFTGSTIGAYLGLVPTEHSSGSSRSQGSITKTGNAHARRLLIEAAWHHRKTYRTPGAAMRTRWELAPPAARTRGHEGNRRLHQRWQTFTDRKKKPVVANVAIARELAGWCWSLATLE

SEQ ID NO: 377927 - protein, 437 aa, unidentified
MNHQRLQVQREQLAGKIVIGIDPAKDKHQAAVVDAHGNQRGASFSFPVTAAGYGEILWRNIAKTNPTCNTRDVVFAIETACNLWETLAFYLRSRGYAVVLVSPLSTHHSRPIMSMEFSRTDPKDAYLVATIAQRGAYHHYEQFLPESNAMHQLAITYDKLRKNRAQNRARIRALLDRVFPEFPRILEPDTDTAVYLLKKYLFPDEFLAMDIRTEARAIENISRRQCDRTTLEEIQAAARTTIGIVRQSDERLADRITLDAFLALIDTIELHEKRVLDALIARAKELPQFERINSLSGCGKKLTALFLGEVRNLSRFTHYRHLEKLAGLNLRLYDSGRYSGSRHISSIGNCRLRWIVFKMAEETAKRVPEVRIKYLRRQLKRRKHVKNVVAAVPQLLQLIVAMEKHQRTYELHPEAVEMMQHLEQQYKELKAHKKTAA

SEQ ID NO: 377928 - protein, 335 aa, unidentified
MNYRLFAGIDVSKLKIDVVFFLTENPDKQFHECFDNSDEGCSKMVSWINQISGLLITDMFFCVEDTGLYTLPVCTFFDEQGGNLWVENALRLKRSLGLKRGKSDKADAAEIANYGFLHRRKAILFKLPGETISKLKHLLSCRKQLVKQQTALKNASGELEVFDKEAADFTLYIRKSLITEYEIKIKMLEEKLLACVKEDSILEKQYNLVKTVHGIGAQTAMFIVVLTQGFTLFENPRKFACYCGLAPFGNTSGTTLKGKPKVSHLANKRIKTLLTMCALNTIKKDNEFKRYYDRKIKEGKHHSSILNVLRNKLISRAFAAVLKDRPYEKDLNFAA

SEQ ID NO: 377929 - protein, 297 aa, unidentified
MLNCNVIAIDLAKNLFQVCKTDKNGKVIFNKLFTRAKLKALLTKEKKSLVAMESCGGTHYWARMAKNAGHQVKSIHARKVKAFRQGQKTDANDALAISVAARQPHIKESRLLSTQEQCLQSIESMRDLLVKQKVSLGNQLRGLLLELGHAIAQSDAKLRQAIPEILEDAENELTHSFRFSIDIIYQRFIDTIDEVKLIEDKLAEVIKQDKTCQRFQALEGVGPVCAILMKVALGNATHFKNGREAAACFGLTPVQHSSGGKEKIGSISKVVGNKKLRSALYKGALAVVSQLEKKRST

SEQ ID NO: 377930 - protein, 347 aa, unidentified
MHNRDVGGVDVCGLDVSAAELVVMVRRDGKTEPGRSFPNTHPGHQELRRYLTHRRERVRVCMESTGLYGLDAALALQADTRIELMVANPRAVKDFSRALLQRSKTDPLDALLLLEYAARMPFQKWQPPPAEALQITALARRIHALTQQCTMEKNRLHAVAATATTLRVIVQDLRRSVRSLERAIAKLSREAHKILAATPELERRSRLLQSTPGIGAVSALQLLGELVLIPANCDVRQWVAYAGLDPRHYESGSSVHQKARISKVGNRHIRRALFLPALTAVRFAPQLHAFYLHLHARGKCKMVALVAVMRKLLHAIFGMFKYDAPFDGTKLCPAFTLVGQSDATCAA

SEQ ID NO: 377931 - protein, 355 aa, unidentified
MNDAKYIGMDVHTATISAAVRDSSGNLVMEATLETKSETILEFVHGLRGSLRVSFEEGMCASWLHDLLKPHVTEVLVCDPRKNALLRVGNKNDREDARKLSELLFLNKLHAVYHGETGIRTLKELARSYLTLTRDLTRVMNRLKAIYRGWGIACAGQQVYAPGFRAEWLAKITEAGVRRRSEIYYQQFDILVALRQEVRRELLAESRKHPAMSLLRQIPSIGPIRAALLIALMQTPHRFRTKRQLWAYCGLALRTYDSGEYRFVGGQLKRSKKAVTIRGLNKNHNHDLKNIFKGAATRAAATAGPLQNFYEARIANGMKPPMARLTLARKIAAITLLVWKKGVRFDAEQLKQQAA

SEQ ID NO: 377932 - protein, 430 aa, unidentified
MNTTTQNKKIEAITEETLIIGIDVGSETHYARAFDHRGYEFSKKPFKFRNDEPGFMTFKAWIEDIKEKHEKDKVMPGMEPTGHYWFNLGKFLQDNEMNPVLVNPHHVKKSKELDDNDPTKNDRKDPKVIAGLVKDGRYMIPYLPDGVYADLRTASNMRFQLQSELTRIQNRISRWFNIYFPEYKTVYGKCDSISGMMILKEAPLPEDIVTLGVDGINKIWRDAKIRAVGIKRAKTLVKAVEHSVGSQEGAISARMELKMLLEDYESRNTRMQEVMELITELVKQIPMAEKLLEIKGVGIKTVSGFLAEVGDISRFNTPKELQKLAGLALVENSSGKHKGETTISRRGRKRLRYVLFEVAMSLVSKNPEFREMHHYYTTRAVNPLKKMQSLMAVGAKIIRVFYAILTKGVTYEPMKLLSDIKCPAGYLPAV

SEQ ID NO: 377933 - protein, 333 aa, unidentified
MKVEKVAGIDVAAKTLALAIRTGEQTGKVRELENTPSGHQAVIKALTSAGVQRVCLEATGIYHLDLALALDAAGVSLMVVNPTAAKRFAQALMTRSKSDAVDAGVLAQFAQSMPFQPWQRPATPVLEVRACARRLAALVKARTQAKNQLHAASQTLSTPEIVLADLRLSVTQCDDHIEQLREGACALIEADAQLREVFTLLNTVKGIAAASAIQIMGEILVLPADMQAKQWVAQAGLDPRHATSGTSVNQKPHLSKAGNRYLRLALYMPALSAARHEKHVNGYYRHLIKDRGLKPIQAVCAVMRKLLHAIHAMLKARQPFDGSRFYALVETPA

SEQ ID NO: 377934 - protein, 338 aa, unidentified
MEWTVAIGVDTHKDVHVAVALDRFGGQLDSREVETSETGYRSLLSWALELGVPGFAVEGCGSYGAGLVRFLERAGVAVWECERPRRRERRRGKSDLIDAALAARRLLSGDGLCLPRGGGRREELRLLLLERRSAIQARTAALNQLSALVVTAPAHVRERLGTLSGEQLARAAARQRACSDTTSAVLRRLGRRVERLSQEVAEVERNLAALASEVAPALLEECGVGPVCAAQLLVSSGDPKRMASEASFAALAGTSPIDASSGKQQRHRLNRGGDRQLNRALHVIALARIRHHSQTAAYYERLLATGKTTREARRCIKRALARHFYRRLREIPTIALTT

SEQ ID NO: 377935 - protein, 348 aa, unidentified
MAYIGVDLHQTSFTVCRREIDGRESFATYRLCRADLDRFCLGLDADDAIALEATGNSAWFRAEAISCVGRVVVVNPKQFQVIRKSVKKTDRNDARSLAFFLSKDMLPETRVKSKAENELASLTQTRDLLVKQRTRLLNKIHALYNRHGIKLKKEGLSSKRRLAGLETGRFSALEQVELKVVRDQALGLSDAIAALDRAIEAAAETMDGYDRLVSIKGIGPRAAAVFLSGIGNVEDFESADKLAAYVGIVPRVSQSNDTDNRGRITKRGNKLMRTTLVQCTLIAIRYSGYLNAFYRRVKEERRGSGKAIIATARKLLKIIYDTLKNGWVFEDFPAFKIAGETIPAGQSS

SEQ ID NO: 377936 - protein, 346 aa, unidentified
MTIVEAGRTVIGGVDTHLDIHVAAALDPIGGVLGVESFDASPRGYKAMFEWMGTFGTVSKVGVEGTGAYGAGLGRFLRRAGIEVIEVDRPNRQARRTSGKSDPADAVEAARAVLSGRATGTPKSRDGNVEAIRALLVAKRSARDARLRALHQMRQLSYTGPDQLRSRLKDLSITDLVAETAAMRPRSSGDPVVYATKVSLAALGRRVLSLEDELVGIDELLSDLVTRSAPEMLQLFGVGIDTAATLLVTAGDNPQRLRSEATWAHLCGVAPIEASSGKVTRHRLDRGGDRNANQALWRIVMTRLAWDPRTRKYMERRTKEGRSKREVIRILKRYVAREVFKYLPSA

SEQ ID NO: 377937 - protein, 333 aa, unidentified
MNSNVFGIDIAKQVFQIHWVDQETGEIHSDKVKRKDFVQYFANQQPSMIGMEACGGAHHWGRLFIKMGHTVKLLPAKKVKPFVFGNKNDVVDARAIWTAMQQPGMKFIAVKTQEQQAILSIHRMRELLVKHRTAQINAIRGLLTEFGLVMPRGKQAFKEKLPDCLAKLEEDAPSVFMCALQVQVERLTQLDEDIKQLEHQIQRWFKHDEDCQRIAKVPGIGPLTATALIASMGDASAFKSSREFAAWIGMVPRQTGTGGRVHLHGISKRGDVYLRTLLIHGARAVMTHSKEKSEWLVSLQARRPKNVVTVALANKIARTVWALVANQTEYQPC

SEQ ID NO: 377938 - protein, 444 aa, unidentified
MSDLATSSQPFAAYVGIDWGDQKHAWALQAEGCSQIEQGEIPHTPEAIQEWAAELQVRFPTGRLAVALEQSRGPLVFALSKYERLVLYPIHPTSAAEYRSIFRPSGAKSDGPDAVLHLDLLLRHRDKLRPLNPDTVETRTLQFLVEGRRRLVEERTRFSNRLTADLKSYYPQVLQWFEEPYAPVVLDLLERWPTLEELQKTKPGTLERFLKQHRCRDQAKNQQRIEAMRKAVAATQDGAVVTAGRAAVSAAVRLLRDLGQAIQHYDREIEQRAKTHPDFAIFDSLPGAGAALVPRLIAAFGTQRDRYHSAAEIQQYSGIAPVTEASGKQHWVHWRWSCPQFLRQTFHEWAAQSILQCDWAAAYYRVQREDKHKSHHAAVRSLAYKWIRIAFRCWKDHKPYDDSRYQAALQRHALATPQLSTAPFPLPVQWISCGGFKKLAWKNN

SEQ ID NO: 377939 - protein, 419 aa, unidentified
MAFKILRKNCCGLDIHKTWIFACIGITDSNGRTEYKQARFSSFSNGLRDLADWLAKYSCSDVCMESTGKYWIPVFNILEKTCWVTLAHPKYTKPQKGNKTDRKDAKWICDLYMCGMVKPSFIPPPDIRQLRDLMRYRVKLTNMLTGEKNRAQNCLTVSNLKLDDVFSDVFGKSSRSIIQYILEHPGEQFDVTPFIHRRCKHPVEEIQAAVDGVVSREQAAKLKECLLHIDQLNAHRERIEAEILRLAEPYPYQLELIRTVPGFAAAPLTAVALISEIGVDMSVFPSAKHLASWAGCCPRNDQSNKKVKSTRISRAGCYLKPLLVQIANAVIKSDRHPECRERYRRIKARRGHKKAIIAACRMLLTAIWNVLSKLEPYSAKGYLADKLTEHSVVISKAEGLALLRKRGYIFKDELAVESG

SEQ ID NO: 377940 - protein, 351 aa, unidentified
MSSEKYIGLDVHQATISVAVMDSQGKVIMESILETKASTLLEFFAGLRGSLFVTFEAAWLYDLLKPHVTEVLVCNARRNALLKHGNKSDKIDARKLAERLRLHDLKPVYHDETGVRMLRELVRSYLTVVKDLSRVMNRWKALYRSWAIPCAGRDVYYTRHRSQWLEKIPEAGTRRRAEQLYPQLDLLQHLRQQARREVLAESRKHSITAKLRQIPSLGPIRSALAVALIQTPHRFRSKRQLWTYSGLGLATRDSGEYHYVRGQVQRRKKQATIRGLNKDYNHDLKGLFKGAATRASVQPGPFQEFYQRSLAKGIQPTMVRLTLARKIAAITLTLWKKGEDFDIEKLKSQAT

SEQ ID NO: 377941 - protein, 316 aa, unidentified
MTSQVAVIGIDVAEETLSVCDTRSGEVFELANDRRTIKAWLKTLPGCCAIAIEATGIYHMDVATLAHAKGHRIYVINGLRLSNYRKGIGGRNKDDRSDAQLLARYLSHEQTQLEPWQPPSKAYCRLQTLLHRRATLVRSATSLRQSFSQDRTLANALKPVLKRMAVLERRLEKAIQTTLDEAGLKEQSKRCQAIEGIGPLTAAALNLAFLRGYFRNSDAFIAFLGLDVRLKESGRYSGRRKLTKQGDPEIRRLLHNAAMSAARTKRWKEIYLGYLARGLKKTEALTILARKLARIAFALMQTQTAYQPQEVRPSLT

SEQ ID NO: 377942 - protein, 338 aa, unidentified
MLHSGIDLHKRTVVIATVDAEGRPVADAELPTSPRLVQDYFAKLGGPHRAVVESTATWYWLRDLLVHQGIDVRLGHCKYIKAISYAKVKTDAVDAATLAQLLRGGLIPEGHMISPAHREERDLLRSRLRAVVQYTRCRHIVTGLLAQYNVPSVGLLPTLVQLRVAMLSEQRTLLAQQIKRIDKELAGRLVPSADMQRLLYIPGIGKIVAFTVLLEVDDIGRFPTVKDFVSYCRLVPAAKNSGGKQRQQRSKDGNRYLKLAFHHAVVRAIQYFPEIKRFYQGLARRKPKGVARAIVAKELARTAYFVLSRQEAFNGTFKGLPLSRRKTAQWPRLANPPV

SEQ ID NO: 377943 - protein, 389 aa, unidentified
MQGIATMLNCCCGIDVHKDMIEACIISGIDDAVIFRKQFSTFQSDLQEFVSWLYKNECYHIAMESTGVYWMPVYEAIEDFSPYYENILVINAHHFKNMPGRKSDVQDAEWIATLLRHGLLKGSFVPPRDIRDLREFSREYKNCKSEEVRCKNRIEKFLQHHGFKLSSVLKDITGASGMGILRKLAIKGSLNLCDVSSSLRGHTKHTSDEILCAVCGRLNTNERYLLDDLIDELTHIRRHIDKLVAKMQEISEPYSMQIAQMCSIPGIDTVSALLILAEIGNDLERNFKSPGFLSAWAGLKPRNDESAKKFKSRKILPGNTYLKSILVQSAWAAVASRKSSFHEWFWSRQARLGKKKAIIAVSRKILVLIYILIVRGDFYNPETAFARKD

SEQ ID NO: 377944 - protein, 361 aa, unidentified
MRTITIGVDLAKLLFSICEVDPSGRVLQRKDLRRDAFAAWLAQLPAGTVVAMEACSGAHHWARRCLAYGLVPKLIAAQFVKPFRKSCTTKNDRNDAEAVATAARQGNMRFVPVKSVDQQARLAWHRVREGHKTEALAAGNRLRGLLAEFGIVVAKNDHALRRALADLSALPELPATMLALLDDLNRHWQQVRDRIADCDKRIANHAKLDERSVRAQQLIGIGPLTADAVVATVGSAREFRNGRQMSAWLGLTPTQHSSGGRTRLGEISCRGGSYLRTLLIQGARSSLQRAQAVSRQRATPEQLWIQSLSTRMPFGKLLVAIANKHARQLWAMLAREERYDADAWAKHPMAQRPKSAKTAPC

SEQ ID NO: 377945 - protein, 352 aa, unidentified
MKLESQREVVLGVDTHLDVHVGVVISEIGQLLGTRSVSASSSGYLELISWASAFGVLTRAGVEGTGTYGAGLCRVLLDNGVTVLEVNRPDRAKRRQQGKSDPTDAESAARAVLSGLATAIPKQQSGACEAMRIISVARRSSVKAKTQAINQLRALLVSAPQDIREKLWRTKTSDCVKACAKIRSLGDSVLLQALTSTLRSLAKRWLTLAAELDQFDKQLEALTRTHAQQLRSRFGVGPHTAAILLSVAGDNPDRLKSEAALASLCGVNPLPASSGKTTRHRLNRGGSRAANNALWTIAMVRMRSDPRTRIYVDRRTTEGLTPKEIHRCLKRYIVRELFPLIVGDLGKLQGCV

SEQ ID NO: 377946 - protein, 440 aa, unidentified
MKREAYRSIDVNRVFVESFVADKAGIAAVIGLDVAKCEFMATARWSDGRFERPWRAKNPEEIPDMIHRLQRLADGRSLTIAMESTGTYGDALRQALTDAKLTVHRVSGKAVHDYAEIFDGVPSQHDGKDAAMVAELAAMGKSSPWPYEPLTEFDQELRYSVERMDIQQRIGMLWMGRLESLLARHWPEATRYLELNSKTLLQVLVEYGGPAALTADAKAAKRLKAWGGPFLKSEKIERFLQVSTSSVGVRQTAVDQRRIQECAQALLLAQHEVQKASKTLEKLAQGNAIIARQAVVVGWATACVLWVYLGNPANYHCAEAYRKAIGLNLKERSSGRYQGQLKITKRGPGAVRRWLYFAAMRLVQHSHVVEWYEVKKGQRAKGGKRALIAVMRKLTLGLHVVGVGEEPFDARRLFSPTVGKRSRSGIRQAKKDQKKQRQGV

SEQ ID NO: 377947 - protein, 342 aa, unidentified
MKKPKYYVGIDMSSASFTVSIGTVPWQIVAEAAEFENNSDGFSAMLNWMERSDIQADRAVLCMEATGVYGEGLAYFLTAKHYRLAIEPPLKVKRAFMPQGHKNDRVDSQQIAEYSYRFYDELRYWQPKEAVLEQIKVLLSTREQFVSQKTAHSNALKTLKRKVVATPLAETLHQQSIDRIKKSIKEIDAEIQRLIDQDPTYGQKIKLLMSIPGVGLLLASNVLLMIEAAPNYPPTHRQLAAHLGICPYEHRSGRSVYKPATSRHYGPAMARKLLYLASLSVRTHNPAFRKYFLRKVSEGKPKKVVLNNIANKLLKIMCAVIRTQTPFIPGYRSVHPALLNTP

SEQ ID NO: 377948 - protein, 352 aa, unidentified
MKIVTKNQEEVYCGIDFHKNTSTLCAKTKNGVVVEKATIKTSLLVKYLASRKTWKIGIEATGGVNHVVGEIKKLGHTVTIINSNKFRGIGIGGKKTDNRDAEALCDVLRLDYAPAVFHRSLYARQIKSLLTTREHLVQARVDGMNHVRGTLREYGITIPAGAETFYKLAKEKVETLENGFVRSSLSLIFENIMKYKEQEEFVESQAKEIVKNDERVKRLQTVPGIGPITAMMMVAVIDVIGRFPNAKEFASYLGLVPSVHGSSDITMMGAITRSGCEMLRRYLVHGARAWMRYSPDKDSNRQWAEKVKERRGMNKATVALAHRMARISFAILRDETVYKNSKKKNIETSIAA

SEQ ID NO: 377949 - protein, 422 aa, unidentified
MKEWQIITHYTGFDWARDHHAVVIVNQQGQIVADFEFEHTQAGWKTFRDKTAAFPNLAVALETNQGAAVNQLLQASYTVYPVNPVAAKAYRQRKAPSGTKTDHLDGGSLADALRVDGQGWRALQPTDPLTVQLRLLCQDEVVLICQRTLLVNQLQQALVEYFPAATEAFDDWTLPACWDFVIQFPTPESLVKAGKRRWEKFLHAHRLWRPATADKRLEIFARADQFAGSPPIVQAKSRLALSLCKLLRTLQQQLDEYRKQIEDLFGRHPDHDLFGSLPGAKQKLAPRLLAAIGSDPARYANAVSVLQAYAGTAPISFQSGQRNQVKMRWACDTFMHHTVHLWADCFRHASSWGQVYYQNKRHAGMSHACALRCLGQRLLKIVFRMISDKKPYDAELHARNQQKHGSWILTLANKTSAATAGE

SEQ ID NO: 377950 - protein, 464 aa, unidentified
MLPFQQGQKCTSCIGIDVHQKILVCHLRDLRGSSIFDECREFRSFEGDLDALHDWVLERNPELILMESTGCYYQSVYDILEEPVLDNKAEFKIAVVNPRHVKGMQGKKTDESDASWLAQVGIMGGYTPSYIPNLKYRNLRAVSRDLVKLTQLLQSLKNRESKNFNLAGFRFNVVFSDAFGENARKAKALILTGVKPEDVVEQLQLNRLKSSKEDIVAALSGTLTPEMTFVLKSIHEQIIETENKIKAHIGFLKEKVLEDESDKRIFNILTDMPGWGEITALQFIVEVGGAEFVEAFSNCHKFASWLGVCPGNNESAGKRKSGRCRKGNAFLRRILCEVAQSAAHAKNTTFYGKYQSLVIRLKAKKSIFAIAHFIAKLVYHLVKNNEEYVEQNVDYRSKSCEKNARRWLNDISRYTGLDIVASDKYTGDVIISKADAKVGVVQSLMGIINERKINRRNGTPTQSP

SEQ ID NO: 377951 - protein, 422 aa, unidentified
MLTTTHDNEEIIERVAALDIGKAELMCCVRVPDGDHAGRRLQEVQACPAMTRSVLGLADHLARLGVTRVVMEATADYWKPVFYLLEAAGLETWLVNAKDVKHLPGRPKTDKLDAVWLCKVAERQMLRPSFVPPPPIRQLRDLTRYRADLVAARTAEKQRVEKLLEDACIKLSAVVADIFGVSGRDMPAALVAGERDPKVLAQLARRSMRAKIAVLEEAFTGHFTTHHAFLLRTMPGRVDAISADIAALDDRIAAQAAPLAGAVARLDEIPGISLASAHVILAEIGTDMTRFPTAAHLASWARLAPGISGSAGKKKGKGATGRGNAYLASVLGNAAAGAAKTDTFLGEKYRRIARRRGSKRAIVALGRSILVIAWHLLSDPEGRFYDLGPGYHAARIDPERRKRTHIRELEALGYTVTLKPAA

SEQ ID NO: 377952 - protein, 351 aa, unidentified
MRTSQNTAETINTIGTDVGKNTFHLVGLDKRGAIVLQQKVTRHQLGRRLSNISRCLIGIETCSGTHFIARQLAALGHDVRLIPAQYVKPFLKGHKNDYRDAEAIAEAVQRPTMHFVSIKTPEQMDLLALHRVRSRLVRQRTGVANQIRGFLLERGITVRQGFMPLRKALPEILSSKSDALSPRMINLIGELMQDWRRLDERIASVSTEIEAMAKRDESCQRLMSVPGVGPIVSSAVVAAIGNGTGFKQGRDFAAWLGLIPKQESTGDRTILGKISKRGNKYVRTLFVQAAHVVLERRPRTARQGLWPWIEQASKRLHRNMLAIALANKLARIAWAVLARGHAYQPRIIANV

SEQ ID NO: 377953 - protein, 374 aa, unidentified
MTEYSEVFVGIDTSKLRNAVAIAEGGRNGEVRYLGVIDNTEVATSKLVKKLAAQHRRLTFCYEAGPTGYGLHRLIKTLGHQCVVVAPSLIPKKPGDRVKTNRRDALNLAKLLRAGELTAVWVPDARHEAMRDLVRAREAAVDDLKSKRQQVLSLLLRLGRHFTGKRTWTRAHMNWLVSQKLAHREQRIAFEEMLLAVRQANERVIRLERAIAAAVPDWSLAEVVTALMAVRGLDLISATIFLAEIGDLSRFASPRQLMAYLGLVPGEASTGDRVWRGGITKAGNHRARRILVECSWSYRHPPRVGKKKLAKVEAAPPAVQEIAWKAQARLTARYRALARRGKRPTLVVTAIARELSGFIWAASRAVGVPATPAK

SEQ ID NO: 377954 - protein, 356 aa, unidentified
MQTQVTKKIDFKGKDLYIGLDVHKKSWSVTILVEGMEHRTFTQPPDPRILFNYLQKMFPGGTYYSAYEAGFCGYGIHRELNDLGIKNIVINAADIPSSQKDQLQKRDPVDSRKIARALEKGLLRAIHIFDRDMEELRSLNRTRFYLMRDFRRSKNRIKSFLQYYSIFVPPEFDNNQWTLKFIGWIKQIQMKTSSGQDAFSNLIRSFEYNREQILILSRQIRIRVREYDKELYNLLKTISGIGPLTSSALITEIGDINRFPHINHLSSFVGLVPRVKQSGETSYNAGMTFRCNEYLRTLLIESSWQAIRLDPALMQYYQQHIINNKGQKVIIKVARKLLNRIRYVMKNRQPYVTGVA

SEQ ID NO: 377955 - protein, 316 aa, unidentified
MNTIAPCFVGIDIAKDRLDVFCLPSGESWFTPTDPASLKALIGQLKARPVALVVLEASGGWEQRLLAELVAGALPTVLANPRQVRDFARALGRLAKTDRIDAAVLAHFGQSLRPQPRPQPEPENRRLRALLTRRRQLIAMRSAEKTRRMQCHDPEIKAAIVAMIQHLDRLVADLERHCKALIGSAPAMARLDALLRSLPGIGPIASATLIAELPEIGRLNRRQVAALAGVAPFNRDSGTRRGQRSIWGGRAELRKTLYMAALSASLHNPTFASLYQRLTAKGKHHKTARTAVVRKILTTLNAMVRDQKHFTPTLHP

SEQ ID NO: 377956 - protein, 427 aa, unidentified
MATREKVGEPEFVAFVGIDWADQKHVWCLQAANSAKREGGELEHKPEMVEAWVSELCRRFGHGPIAVAVEQVKGALVYMLGKYECLHLYPVPSTMSASMRQALYPSGAKDDPRDADLLLDLLLQNRDKLRRLTPDNEATRRVQNLVEERRKLVEEKTAQLNRLTGYLKVYFPQMLEWFAKLDTKLACEFLERWPSLEELQAAAPAEVRKFFRQHRGRHPELTEWRLQGIGQAMSAIRDGAVIEAKRMVVQVIARLLRTLLEGIAALDDKITEAAEAHPDFFIFQSLPGAGAALAPRLLAALGSQRDRYASAEEVQKYSGIAPVTERSGKKKWVHFRWACPKFLRQSFHEWAGHSIVQSVWARAYYQQQRQRGKDHHAAVRALAFKWIRIVFRCWQDGAAYDENRYLATLAKRGSLLIPVPAAAATSL

SEQ ID NO: 377957 - protein, 404 aa, unidentified
MTSEGAADTEDQDVFGGVDSHTDTVHVAVISDNGGHLADAEFATTTAGYAAALAFLTAHGRVIAIGVEGTSSYGAGFTRTARSHGHQVIEVNRLDKAERRRTGKSDPIDAYAAARAALSGRATSSPKDDTVGGIRALHNTARSAVKARTAALNQIGHVLVTSPEAIRAKYGQLKGTDRTEALARLRPAGDALHTAVLTALRSLARRVKELTAEHEALTRALDAEVTTHNPGLRATYGVGPDTAAQLLITAGGNPERMRTEASFAALCGAAPVPASSGRTNRHCLSRGGDRTANSALYRIALVRMSDDARTRAYVARQVAAGRTKKEIIRMLKRAIAREVFRCLTTTVNIPGIADLRPLRQAKNITLTAVAQHFGVWPTTISRLERGLSRDDGLAHAYRDWLRAA

SEQ ID NO: 377958 - protein, 343 aa, unidentified
MQTVTTIGLDIAKSVFQVHGVDAEGNVLIRRQLKRRYVLAFFEKLPPCLVGIEACATSHHWSRELKARGHNVRLMPPAYVKPYVKRQKNDAADAEAICEAVTRANMRFVETKTPEQQSCLMLHRTRQLFIRQQTSVINAIRAHMAEFGIVAPVGRKGVEQLLDVVADARDRRVPEVARACIAALGAQLRLLKAQILEFDRRILAWHRSNETSRRLDELPGVGPALATALVASVADAKAFRSGRNFSAWIGLVPKQHSSGGKDKLGSISKQGDRYLRSLFTAGALAVIRYAKIHGSQHRPWLTALLARRPTKVAAIALANKIARMAWAMMAKGERYKEPAALAG

SEQ ID NO: 377959 - protein, 351 aa, unidentified
MDKIYIGVDFHARQQTICYLKTETGELVIVELKHEDKEQVRAFYRQFEEPIAVGLEASGYSPWFETMLEQLGGEVWLGHATEIRRRARWRQKNDRRDAELIWDLMVHHEFPRLHRPAVQSREILRMLRYRQKLIKLRTMTKNSLQAIALQAGLAKGRQLFSAAGQEQLQAAVMSPVLHWQREHWLALLKPFNQQLLETMVWFKEQSKDDLSVRRLRTHPGIGLLTALCLLHTLQPVSRFRNARKVAAYAGLEPVERSSAERQHFLGISKAGSRMLRYLLVEAGQTAVRYDEDLKRFYQRLAERRGRPKAKVAAARKLLIRAYIMLRDEIDYAEFRRRAVAARLARRGQRPT

SEQ ID NO: 377960 - protein, 418 aa, unidentified
MSRRDSNAVLSVVHHDCCGLDIHKDKVSAALLMTHEDGTIEENICEFGTFTEDLYRLKEWILEQGCHVVAMESTGVYWRPVHNVLEDTCQVILVNARHVKHLPGRKTDVSDSRWLASLLRHGLLKGSFIPEKHIRRWRDLARLRKTYVESLADYKRRVHKLLECANIKIDSVATDLFGVTGRNLMDLLISGDEITLESVIGCTRGRLKGKVGELIKSIKGFFTEHHRFQLVSILTLIESVEKQIAVVHERLSTLLSDRREKVDQLMQVPGISDVSAQALLSEIGDTLDQFQTAASLASWAGLCPGNNESAGKRHSGRSPVRGSIVKTIMIEITWAAIRKKGSYYREKYYSLRARKGFRKAIVAVAHRILNAVFHIIKFNRPYHELGESYLIQLNNKARLHNLHNQAAKLGYKLVSAQA

SEQ ID NO: 377961 - protein, 356 aa, unidentified
MLNDVKYIGLDVHQATISVVVLDGTGHLVMESIIETKAATILQLLHGLSGSLHVTFEEGTCAAWLHDLLKPHVAKVVVCDPRKNALLKAGNKNDRIDARKLADLFRSGLLSPVYHGENGVRTLKELARSYLTRTRDATRVRNRLKALYRSWAIACAGQKVYAPRYRNQWLAKITEAGVCRRAEFYYQQLDALQTLRRQVRRDLLAEGRKHKAMKLLRQIPSIGPIRSALLIALMQTPHRFRTKRQLWAYSGLALKTSTSGEYRIVEGQLKRSKKFLAIRGLNANHNHDLKNIFKGAATRAAAVPGPFQEFHAGLVARGMKPTMARLTLARKIAAITLIVWKKGVGFDAEHLKQQAA

SEQ ID NO: 377962 - protein, 489 aa, unidentified
MSRKKRKNKQGVSGNKKPLQLRGTTAKPRSSRRVGLPVDNAPPPIESLKQVNVNAAGIDIAANVHFVAVPKDRDSENPVRSFGAFTADLDAIADWLADCRIETVAMESTGVYWIPLFEVLERRGFEVILVEPSQVKKFRRKTDVLDSQWIQTLHTFGLLTGSFRPADRIIVLRSYMRQREMLVKSSAQHIQHMQKAMEQMNLKLTEVISDILGATGTAIIDAILAGERDPHQLAKLRNERCKNDEATIALALQGNWRDEHLFSLRQAVDLYRYYHKKIVEVDLEIEAYMRQFDDHSDGQPLAKPPRAKQRSKTTNEPKFDTRTILYQMLGVDLTSIDGIGAHSALQIVSEIGTDVNAFPTEKHFVSWLSLCPEANKSGGKKQKKGKSPTHRSSNRVAQTFRVCAQTLIQSKCALGAFGRRLRGRDGAASAITAIARKLAIIVYTMIQTGRPYKDVGAEAYNSRFQDKLVASLRRRAIELGYDLQPNLAV

SEQ ID NO: 377963 - protein, 331 aa, unidentified
MYFSQFIGVDISKDTLDAAVYPAKDKKMDFLHFDNTQKGLTVMMSWLKRRGIKATEMLICAEHTGVYTNPLIEFADKKGLALSLNSPLDIKRSMGIARGKNDAVDAGRIAEYAHNHKDKLRLYEKPSDNIRKLQYLLTERRQYMRQRTAIINLDCAMGKYGTNETRSRSESARHHCEKLVKKVEDQMLSIIHSDPDIQRNYDLVSSVKGIGLINAINTIVFTNNFKAFETPRRYACYIGVAPFDHTSGISVKGRTQVSKICRTQQKSELSMAARSAIVSDPGLRKYYLRKMKEKGGGKDAHGVVLNAVKFKIILRMFAVVRSGEPYKVLNY

SEQ ID NO: 377964 - protein, 354 aa, unidentified
MERTNLQDQGQHVYVGLDVARKSWKVSILGEVLEHKTFTQPPSVEILVQYLRRSFPTAQVHCAYEAGFSGYWICEQLREHQIECLVTNPADIPTKDRERAFKTDRVDARKIARSLRNGDLDPIYVPDRQAQEDRTLVRLRWSLVRKQTRCKNQIKSLLAFYGIPLVPEGIEAYWSKRFLAYLDAQRLRYASGDAVLQTLLTELRLYRQMISETTRRIRALAEEERYREMVGYLRSVPGISTLTAMTLLTELVDIGRFTTSDQLASYVGLAPGSHSSGEADVDTGLSHRRNSFLRFVVIESAWIAARHDPALLKAFETLAKRMAKQQAIIRIARKLLNRIRYVLMHHTAYTLAVD

SEQ ID NO: 377965 - protein, 341 aa, unidentified
MEHIAIDLGSRESQVCIRDEQGRILLERRVATPRLERMLAARPASRVVVETSSESLAVADAAVQHGHQVRVVPATLVRALGVGARGIKTDVRDAQVLSDASCRLDLPTVHIPAPLSRERKAMCTSRESLVRTRTHLVNTSRAFLRTRLVTLSRGAPETFPKRVRERLLKSSDGIPEHLEWLLRSIEALNEQIRLADAQLEALAKQDETCRRLMSVPGVGPVTAMRFVSTVDDVTRFKSASKLESYLGLTPGESTTGFRTQRTRLTKAGCSSTRHALGQAALVLWRIRPNDPIVVWAKAVSERVGRPKAIVALARKLARVLYAIWRSGSSYDPNHRRPASTG

SEQ ID NO: 377966 - protein, 345 aa, unidentified
MEITTIGLDIAKRVFQLHGVDGAGKAVWRRKLQRSEVLAFFKALPPCLVGIEACGTAHYWAREIRELGHEVRLMPPSYVAPYVKRGKTDAADAAAICEAVTRPTMRFVPIKTAEQQAVLMLHRTRDLLVRQRTMLVNALRGHMAELGIIAPQGIARVADLMAVLLGEDTTNVPALAREALRGLAAELEALDRRVKEIEVAIVRWHKDNEASRRLATIPGVGPITASAIVATITDPFQFHSARHLAAWIGLVPRQHSSGGKQRQGGISKQGDRYLRRLLVLGATAVIRHSRSKSTAEAGWLKSLLERRPARLVSVAQANKTARIVWALLVRGGAYRMPAAVPGGAA

SEQ ID NO: 377967 - protein, 416 aa, unidentified
MSLLSAIAAGIDVHKKFVAVAILSSEDPNRPVSTRRFGTTWQALEELENYLRVYHVTHVAMESTAQYWRPVWDWLEGKFELFLAQARSTQAPHGRKTDNADALRIARRLIAGDLTLSYVPPPPQREARLLTRHVVALKAQISDCRNEIETLLEQAHLKLTSVVSDTFGFSGRRILRALVAGETDPEKLAALGHRRLKVSREELAEALRGALTAAQKLVLRLILDRVERLEKDIEEIDRALLAHQSEHAEALRRLCEIPGVGLWAAQQLIAEIGPSASAFDSPGRLASWIGVCPGMHESGGKSASSRSAKGNRYLRRLVCQIAWAATLAKQSEARTRYFRLRARLGPLKAVWAIAHYLVRVVWKVLHCNEEFRHTQPQSLDPHTALQRAAKLKRNLAKLGFTLNITGPDLQPIQLPS

SEQ ID NO: 377968 - protein, 387 aa, unidentified
MQSVTSATAVATTARANNITLFASLELSKSKWVVTINSPGSEKFSKHVVEGGDGACLLDLLSRSRAKAEQRYGVQVKAIVIQEAGLDGFWIHRLLLANGIESHVVDAASIAVDRRHRRAKTDAIDGETLLRTLMAWARGERRVCSMVRAPSPEDEDRRRLTRERGTLVKERIQHTNRIRGLLGGQGVRDYNPLRRDRFERLEALRTGDGRELPAMLKAEIRRELDRIALVTTQLAAVERARDALIRTDAEERNNPAALLLKLKGLGPEFASLLWLESLFRSFGNRRQVAAYSGLAPSPWQSGGVERDQGISKSGNRRLRKTMIELAWFWLRHQPDSALSRWFQARVGAAKGRIRRIAIVALARKLLVALWRYVTQGVVPEGAVFKAA

SEQ ID NO: 377969 - protein, 485 aa, unidentified
MILFRRFPRSDRLGRSRITELKLDKDMAKKSSNKAKSQRSRERALLQKVHLNAAGIDIGADAHWVAVPEDRDASPVRSFGVFTRDLILLCEWLKRCQVETIVMESTGVYWIPLYQMLERKGFEVRLVNAHHVKNVPGRKTDVKDCQWLQQLHTFGMLGGSFRPQAQMCVVRSYLRLRDTLSKDCNSLVQRMQKALTEMNVQLHRVISDITGVTGMSILRAIIAGERDCLKLAQLRHPQIKSSALDIAKALEGDYCQEHLFALQTALELYDSYLLKIMACDRHVQKALSTFEAKTSAPAPELNGMRSAEKRQEALRRHHLEQMTGADLTKLPGLDLLAVERILSEIGLDMSRWPSEKHFCAWLNVAPNHRISGGQILSSKPRKNANRAAAALRLAAQSAMQSKSAIGAFIRRIKSRLGAPTAINAGAHKLARLVYRMLKFGKAYVETGQEAYEKFFKERTLRNLQRKAHQLGFQVTPITTPTVPVS

SEQ ID NO: 377970 - protein, 367 aa, unidentified
MKKVSIAATRQSRNISQQKLTIGLDLGDRNSWYCVLDEAGQIQLEQRVRTSAKELREVFGAMPRSRIAVEIGTHSPWISRLLSELGHEVIVANARKVRLIGESRKKDDRLDAQTLARLARIDPELLCPVKHRSAQAQADLMMIRARAGLVRARTGLVNTARGLAKSYGERLRGCNVRNMNAEKAEGLSPELQRALEPLLSAIEELSQQICEYNEGIEALAQASYPQVALLKQIKGVGTLIALTYLLTLEDAHRFGKSRDVGCYLGLQPGRRNSGQSEPQMHISKEGDPYLRTLLVQGAQHILGPFGVDCDLRRWGLKLAERGGKNGKKRAIVATARKLAVLLHHLWVSGEVYEPLHNSSRVTVAAAA

SEQ ID NO: 377971 - protein, 387 aa, unidentified
MQEVKSRPELAAIRTDLAAIFVSMELSRSTWVITSLAPGAGETMSKHSLPSGDVAKLLQRFSLLKQKARTRTGADFPIIVIQEAGLDGFWIHRVLESEGIESHVVDPASILTSRRRRRAKTDTIDGETLVRTLLAHKRGEPRVCAMVRPPTRQEEDRRRICRERRTVLAERIEHVNRIKGLLFAQGVFDYEPLHRNCRARLDALKTGDGCVLPDHLKAQIGRELDRLELVVTQLKAVEAERDALLEQTREIVTVPARALANLKGIGAEHAAVIWSEGFFRSFANRRQVAAYAGLAPTPWQSGSVDREQGVSKAGNPRLRTAMIQLAWLWLRHQPGSALSRWFHERVRRHGGRSRKTTIVALARKLLIALWKYATAGVVIDGAVMKAS

SEQ ID NO: 377972 - protein, 427 aa, unidentified
MMDVLYCCCAGLDVHKKTVQACVRRLSDDGQLRTETRLFGTMTRDILALGDWLAEWEVTHVAMESTGVFWKPIWNLLEGRFELVLCNAREVKQVPGRKTDVKDCQWLAQLMQYGLLKASFVPSRPMRELRDLTRQRVQLVNEHTATANRLQKVLQDANIKLSSVATDVLGVSGRDMIRALIAGEQDPEQLANLARRRLRNKLPELTAALEGGVDDHHRFLLQMYYEHLTHLEEMIARFEARIDEMLQDPALDAACVPEGALPFPIAVQVLTTATGIDECTAQAVLAEIGTDMSRFPGPDNLCSWTGICPGNNESAGKRYSGKTTKGNRWLRRALTQAAWAASHTKDTYLSALFRRIAARRGKKRAIVAVAHSLLVSIYYMLKRHETYHDLGPDHLNQLHPERLTRSLTKRLETLGYAVTLEPLQEAA

SEQ ID NO: 377973 - protein, 354 aa, unidentified
MSQTPNSAIAVIGIDIGKNSFHVVGHDTRGAIALRQKWSRGQVEARLANMPPCLIGMEACVGAHHLSRKLASLGHDARLMPAKYVRPYSKGQKNDFNDADAIAEAVQRPTMKFVATKTAEQLDLQALHRVRERLVSQRTGIINQIRAFMLERGIAVRQGIGFLRKELPTILATRIDALSPRMLRVIEELTGDWRRLDQRIEGLTGEIEALARQDQACSRLMTVPGIGPIISSAMVAAIGTGDVFSKGRDFGAWLGLVPKQISTGDRTILGKISRRGNRYLRVLFVQAAWVVLVKIKDWERYGLKSWIEAAKRRLHHNVLAIALANKLARIAWAVLAKGRAFELTRTDDASVRPV

SEQ ID NO: 377974 - protein, 397 aa, unidentified
MYIVGIDIAKRKHEAAVIDGEGTVIIKPFSFTNNCSGYNRLLAMLAKAKLPLDEVSFAMEATGHYWLALFTRLQKEGFRVQVINPVQTNSIRSFYIRQAKTDPRDALLIAEVIRFGHFSESTLHPENIYELRELCRGRHAIVSMQADVKRKVVALLDQVFPEYETAFTNMFGDTSMAILQTCPTPKELSEMPLEELCHLIEVSSHKRFRMAKAQELQALARNSFGFAMAGDVFSTMIRLYAKHLDFLKQQVREMDRKIAEIMETLDTPITTITGIGPTLGAYILSEIGDISRFSSAAKLAAYAGIDPTMRQSGEYNGVRNRMSKRGSPYLRHAIWLAASSAVLHDPALKLYFQKKRDEGKPYMASVGHACRKMVSIIYAVMRDNKAYVPCIPSEISA

SEQ ID NO: 377975 - protein, 413 aa, unidentified
MRLFVGDDWAEDHHDVELMDATGTRLAKARLPEGVAGMARLHAMIAEQLGTDIEDEQEAARQVLIGIETDRGPWVQALVAAGYQVFAVNPLQAADYRKRHKVSGAKSDAADAHVLADMVRTDAHQLRAVAGDSDQAEAIKVVTRAHKTLIWERTRQTQRLRHALRDYFPAALAAFDDLDAPEVLDLLAKAPDPAAAARLTISQISAALKRAGRRGDLAAKAAPIQAALREQHLGQPEVVTAAYAASVRALIAVLATLNQQVTALHKEVEAHFGQHPAAEIITSQPGLGPILGARVLAEFGDDPQRYASAKARKNYAGTSPITRASGKKKVVAARYVHNDRLIDALITQAATAVRVSSGARAYYNKQRARGADYNAALRQVANRLVGILHGCLKTGTLYDEATAWPHHAESLAA

SEQ ID NO: 377976 - protein, 425 aa, unidentified
MREHDTQAEAGTVNIPGKGAMFEIEDVGVFLGLDVGKTAHHGHGLTPAGKKIFDKPLPNSEPKLRAVFDKLTEKFGTVLVIVDQPASIGALPLTVARDAGCRVAYLPGLAMRRIADLYPGEAKTDAKDAAVIADAARTMPHTLRCLELTDEITAELTVLTGFDQDLAAEATRTSNRIRGLLTQFHPSLERVLGPRLDHQAVTWLLERHGSPAALRKAGRRRLVELIRPKAPRMAQRLIDDVFDALDEQTVVVPGTGTLDTVVPSLAASLASVHTQRRAMEVQINTLLEAHPLSPVLTSMPGVGVRTAAVLLVTVGDGTSFPTAAHLASYAGLAPTTKSSGTSIHGEHAPRGGNRQLKRAMFLSAFACMNADPASRTYYDRQRARGKTHTQALLRLARQRISVLFAMLRDGTFYEPRTPKNVELAA

SEQ ID NO: 377977 - protein, 400 aa, unidentified
MRAVFGIDVSKTSSEVAILVNGEKVHGYTILNDAIGFNRLLGDLKTVHNPEIIFEATGVYSRRLQAFLEECGYAYTRLNPLEAKKQLDSLRVRKTDKIDAEKLAKSQLVHNRKPTYVQEEVYQHLHDLSRFYQNMTEDLVRAKNRLHKVLQVTFPELENLLSTPTGEQYWNLVMAFPCKEFVLSLSQSDLYEIIRQSTSKRISEKRIAYLTDKLIELAKQSFCAVKKTSPMFEEVRYYAQELLRLSERRQVVLNDMVALAQPLPEYDILRSIPGIAETTATSIIGELGDIRRFQSTNQINAFIGIDLRHYESGNFLAKEHITKRGNPYARKILFKCIHNIASASHTNPCHIADFYEKRKRQSTIASTKPHTIASIHRLIRTMYYLITHNKLYDYSLTQNR

SEQ ID NO: 377978 - protein, 337 aa, unidentified
MLRFKVMGKKVFIGIDVSKSKLDVTFILSGNLEKPGYFQVGNSIKGFQILLKRIKEINLNETSWLFCFENTGIYSISLACFLSENSIDFCHESALRIKRSLGIKRGKNDKLDSREIAEYAYVQREKLRLTTMVQQELQELKILISYRERLIKQKNALLVAAKEAYECFENETTKFILDDSEELIPQYEKKIKNVEREMVKLIEKDENLIRNFTLATSVVGISLIVGSYMLVQTNNFTQFNQRQYACHAGIAPYEHSSGTDIPQQRKTSKMADKKIKALLTNAALNAKTYDPQIRHYYNRKIKEGKNKFCVLNAIRFKLVSRVFATVNRGTPYVKMAH

SEQ ID NO: 377979 - protein, 323 aa, unidentified
MNKDIKYFGIDISHLVFDVTDSDGNYYQFKNNPSGFKKFVKLMEIDSHCVMEATGYYHYQLAYYLLESGVKVSVENPLAVKRFIQMKLSKIKTDKSDSRLICEYAKQVDMKLWQGNSKHQTECLQMTRLLSVYTKQSTMLKNKLHGEAVLGNPSKAVVSSLKRSLKQLQKEIKSLEDTLLIFVKQTHQDLLTRLKSIPGIGPKTAIMLVVLTDGFERFTSGSELCSYAGLTPVIRKSGSSVNGRSRISKIGNQKLRNLLFMCSFNACKYNKACREIYERLVAKGKSKKLALIAVCNKLLKQAFAIAKSGLVYDQTYRSVLVTN

SEQ ID NO: 377980 - protein, 387 aa, unidentified
MPEQFDRHNAMAAFDHDSTLVVALELSGKSWQAGAVVPGVVRRPRRRLEPRDMAGLLKAIERWVAEAGGAGRAVRRVALIYEAGRDGFWIARYLLARGVEVQVVHPASIPVERPGRRVKTDRIDLDMLLRTFLAWLRGEPRVCSMVRIPSEVEEEMRRPGRERERLVSERLQLENRIENLLCLYGITGFRPRLKKAAERLEALRSFAGMPLPGKTMAELRRLMARHGLLSEQLQEIEAERDRVATATQPDQAERMIQHLARIVGLGLESATVLVREMFCRPFRDRRAVASFAGLTGTPFCSGGIEREQGIGKNGNARVRRIVIQLAWRWLRFQPHSALAQWFAARTGGAKGRIRTIMIVALARKLLVVLWRYAGTGEVPAGARLAAA

SEQ ID NO: 377981 - protein, 355 aa, unidentified
MTSTKYIGMDVHKESISIAVRNSAGKVVMECVIETIASMILQFIDGLRGDVHVTFEEGTWAAWLYDLLKPRVTKLVVCDPRRNALLQEGNQNDRVDARKLAELLHNNQLRSVYHGDHGLRTLKELVRSYLTITQDLSRVMTRVKAIYRSWAIPCTGKQVYAPRHRAEWLAKISEPGVRRRAEFYYQQLDALRCLRQEVRRELLTESKKHPAWKRLCQIPSIGPIRAAVLLGILQTPHRFRGKRQLWTYGGVGIETSSSADHQVVKGQLERKKKHVEIRGLNRNYNHDLKNLFKGAAIVAATKPGPFAEFYAGLLAKGLRPEMARLTLARKIATIVLIVWKRGVSFDAQHLKPQTA

SEQ ID NO: 377982 - protein, 429 aa, unidentified
MQNESTPGARGPVFCGVDTHADSHWLCVLDWRGRKVLSRRFPADAAGYEALAGAIAAAGEPACVAMEGTSSYGAGLTRHLASLGMPVREALSPARTQRRRPGQGKCDEADAERAARAAMSGSKLGTPKSQDGWVDGVRCMLAARSGAVKARTSAINTARSLLTTAPEGLRSRFRGMGGPRLMEELPSVRAEGALGAALGALADLWAAARDAALDMERAIGASLEENCPALLAMYGCGPVSAAKLAVAAGDNPGRLRSEASFAAICGACPIPASSGKTVRHRLNRGGDRQANSALHEIARQRVMRDPETAEYAERARGRGKSDREVMRCLKRYVAREAYRALMRPHEIRRPEDASELVAARRAARVSQVRAASILGTSEKYISMLERGQRELKPIRRAYEAWVEAGLPLDWDRQAFEAERKMDSKKHLAK

SEQ ID NO: 377983 - protein, 325 aa, unidentified
MNVIGIDVSKLKLDCAWLSENNKLKVKVFSNSLSGWSELLEWSLGQSGLSLSQMHFVMEATGIYHEQLAIYLYDRGTTVSVVNPAQVKFYGQSLGIRTKNDKKDSVVLARYGINEKPRLWQPEDLEIRTLKALLARLDSVEKDLQRERNRQEKAIVSQAPLVVLGSLKQMVTTLDAERQQLEKMIEEHINSHKQLKGNKALLESIPGVGKVIATRMLMVIGSRQFDSASQCAAYLGLVPIQHESGSSVRGRSRLSKAGNPVIRAKLYMAAVVATTYNPDVKALYVRLTGSGKSKMSALGAAMRKLVQICFGVLKHQQPYHPQVTI

SEQ ID NO: 377984 - protein, 408 aa, unidentified
MDVVNNHCCGLDVHKKSITACAITPKGKEIKTFGTMTHDLFQMVDWIKTKRCTQVAMESTGVYWKPIYNLLELEEIQPMVVNAAHIKAVPGRKTDVKDAEWIAKLLRHGLLQHSYVPNREQRELRELVRYRRSLVEERAREISRIQKVLEGANIKLSSVASDIMGVSGRAIIEAIINGVNDPEILSSLAKRSLKKKKDQLERALVGSVGPHQKMMLKTQLSHIEFIDQQIELLSVEVQQRMQPYEEDIELLDTIPGIGRGHAEQLLAEIGIGMEIANQFPSAPHICSWAGMVPGNNESAGKKKSGKTRKGNKKLRSALVEAAHSAAKTKNTYLSAQYQRLAARIGKKRAAVAVGHTILTIAYHILNRRVPYIELGADYFDKRKKEIVIKQSIKRLETLGCKVSIEAIA

SEQ ID NO: 377985 - protein, 351 aa, unidentified
MPRRSTVRAATTIGIDMGKNTLHMVGLDSLGAIVLRERVSRGRITSRFANLPPCLIGIEAGMATHYVARELAALGHDVKQVPPAYAKPFRQGHKNDFRDALAVAEAVQRPTTRFVPPKSNEQLDLQALHRVRSRLVSQRTAVINQIRGFLLERGIIVRQGLRFLRHLLPDILANRTDVLSPLMMRIVSDLAGDWRQLDDRIETVTDEIEILAKADDSCRRVMTVPGIGPIISSAMVAAIGNGSAFAKGRDYSAWLGLVPKQMSTGDRTILGRLSKRGNSYLRMLFIQAARVILVRPANWPRHGFGAWLARAIQRLHPNVLAAALANKLARIAWTVLAQERSYEARVMKAGA

SEQ ID NO: 377986 - protein, 411 aa, unidentified
MDRIYARCAGLDVHKDSVWACVRADGRVVLVERFGTTTRELLRLGDRLAEHGVTAVAMESTGVYWKPVWNLLEDRVKLILVNAQHVRQVPGRKTDVKDSQWLAQLLQHGLLTASFVPERPQRELRDLTRQRAQLTGDLARVANRVQKVLEDANVKLGSVASDVLGASGRDMLRAVIGGQADPAAIAELARGRMRPKIPLLTEALAGRVNDHHRFMLKALLEQVEHLERQVESFDARIEQVMTPFERAAVERLDGVPGLNRRSAQNVLAEIGTDMTRFPSAQHLASWAGLCPGNHQSAGKRKGGRVTQGNRWLKRTLAQCALAAANKDGSFLQARFRRLAARRGRKRAALAVAHSQLTAIYEMLKDSTDYRDLGAAYVDQLQRERVKRQLVHRLESLGYAVSLGEPPDKAVA

SEQ ID NO: 377987 - protein, 339 aa, unidentified
MENFVGVDLHKKVSQLATLREPKPASQVRFPNHTVTVEKVLKKLPQGSKIALEATGSWWWFVDLAQRTGHEVVMSHPKQTKAIASARLKSDKVDALMLAKLLKADLLPTVWIPPAAQRYVRELLTHRARLVRQRTSVINELHALYAKRNIDPGMIFHRVRPPAFRAEDLSGYGPRIVEEDVALLGFLNRQVQGLDKELKAIAEKDPESKRLMTIPGVGPVNAVAGSCWIGTIERFSNSKKLSSYFGLAPRVRQSGERERHGHITKEGNRMVRSLLIQAALWHIRRGPVSSRRHYLGVCKRRGKSIARVAAANKLLGIIFQMMKEKIDYEEFLRRGGNAQ

SEQ ID NO: 377988 - protein, 341 aa, unidentified
MQNYIGLDAHSKTCTFVVLDKQGRQTGFQHIKTGESEVRKFVESVRGSKALVFEEGNLSKWLYTILKDKVDELVVCDPSFVNLRSGPKDDYPDALHLAQQLRGNFLTPVFHEDSFFSELRSVVSSYLDLVRDTVRTQNRYKALFRSQAAETEGKTIYRDEERIGELGNETDRFVARALFAQLKLSREQKSEYIKRFQECEKKYPQISALSSIPGIGEVRACVIAAVVCSPRRFENKFKFWSYCMLVKYDCRSDDTSYGKKKTRGNRILKDVFMGAAQSVLQGESALRKYYDDQREKEVDHQAAKKNVARKVAAIALSVMRRGKNYQENYEEKKKNLKIQSV

SEQ ID NO: 377989 - protein, 344 aa, unidentified
MTRRTGGRLIFVGDDWSEVHHDVVVLDEQGTVLAKRRFAEGVAAVGALHELLAELTGEPTEVVVGIETDRGLWVASLVAAGYEVYAVNPLAVARYRERHVVSGAKSDPGDAQVLADLVRTDRHHHRPVAGDSELAQATKVLARAHQRAIWDRQRQLNRLRSILREYFPAALEAFGTDLAHPDAVGVLERAPTPALAAKLSASAIGACLRRGGRKRNVESRAQAIQKLLRAPRLDAPAAVAAAYGAQVRSLVAVAAEMTRQIAALEADLERSFESHPDAEIVRSLPGLGAVLGARVLGEFGDDPNRYQDGRARRNYAGTSPITKASGKKRAVLARYVHNRFPWDV

SEQ ID NO: 377990 - protein, 352 aa, unidentified
MKRERKETKAGEDLFVGIDIHKKTWHVTAQTVDVELFSWSIPGKWEALNRLLNRFKEYKIRVVYEAGHFGFWLYDRLAECGIDCIVTPPSLVPQEYGNKVKTDRRDSRKLSYLLAKGMLKRVWVPDKEELYHRQVSRRRRQLITDRVRTQNRIKSELQFHGIDIGEPEGRWSLVYIENLHRIRFKNRWMHESFNRLLELYDFLDKQVKEQTRLLKELSKTELYRKRVEILQSVPGIGIIVAMEILLELQDVSRFRKAEQIAAYVGLTPSQYSSADKIRMGRITCVGKNSVRAALVEASWKLIRKDGVMQEKYERIKARAGSKRAIVAIARSLLLRTRRMLLDDVQYATGVIS

SEQ ID NO: 377991 - protein, 362 aa, unidentified
MEIRVKPIIKVLSLKVSFDKLLKLILMEIKHFIGIDISKSTLDWAVCTPQGGIVYQTQSANSEEAVKGIINIIKTLPGFENLKSVFCMEHTGIYNAHLLSHLHRFHFPIWLENSLQIKRSGGIQRGKNDAIDAVRIAQYAFRFKDKIRIWQPPRQVIQQLAALSAVRHRLLLVRQQLQQPLNEQESFIELSLQKQLCKTCQASLKAINADLEKVDNQIKEIRENDPHLKELFEFVTSVPGIGVVTASEVIIATNEFNNIAQPKKLACHAGVAPFEHQSGSSVRGKTGVNHHARKRLKSLFHLAAMSAVRVKGEIQDYYLRKVAEGKNKMLVLNAVRNKLIHRVCAVVHKREKYDKNYMLTLA

SEQ ID NO: 377992 - protein, 393 aa, unidentified
MANLTPIGLRRSLLSYDFWWFLRQKGATARHVIYDGQWRGSDRSPLGHRGPFPSVVAPVLSYDLNGYLGFGPARQDKVRKRQMNYIIGIDISKDTLDVHRLADGQHMQVLNGIRGFAELFRWIEPHPTALIIFEATGPYHRQLEQALCVKGIPFVKVNPKQARRFAQASGKLAKTDRVDCEMFAKMGAALQLMPKPISAENLYDLRDLLAARRALIKDRTAAKARNATVTHALVKRQLEKRLRQIKCDIAKIDAAILEMARQDLCMTERLDILSSIPGVGVTTALIILVDRPEIGELDGKQVASLAGLAPMSQSSGKWQGKARIQGGRPNLRHAIFMPALVAIRFNADLKAKYDQLVAAGKEKKVAITAVMRKLLVLANALLRDQRMWSENQG

SEQ ID NO: 377993 - protein, 397 aa, unidentified
MTQPYAVFCGVDVGKGEHHAVGLDPAGKRLFDKALPNDESRLRAVFDKLAAHGRLLIVVDQPNTIGALPVTVARACGHDVVYLPGLSMRRIADLYPGQAKTDARDAHIIADAARTMPHTLRRVDVGDETLTELGVLAGFDDDLAGEATRTSNRIRGLLTGIHPALERVLGPRVAHPAVLEILSRCGGPEGIRAAGRRKLTAIATKHAPRMGVRLVDEILTALPAQTVTVPGTKAAETVLPKLADSLKGVLLQRKQIAADIEEMFADHPLAEVLTSMPGIGVRTGTRILLEVGDGTAFASAGHLASYAGIAPITHRSGSSIRGEHPARSGNHKLKRALFLSAFAALHDPVSRAYYDRKRAEGKKHNAALICLARRRCDVLYAMLHSKQPYRAPAASAA

SEQ ID NO: 377994 - protein, 386 aa, unidentified
MQASTVAAPTAGHIGTIFVAIELSQRSWRVALHSPDKDKISHHKLEGGDHAELLALVGRVRERAARTLGGVPAVASCYEAGYDGFWLHRLLLAAGITNYVFDPASIAVDQRARRVKTDRIDGERMLRTLMAYLRGEPRVVRIVRVPAAEQEDARRGSRERDRLIKEQTAHTNRIKALLRLLGMTVGNPRRRDWLSWLAAQRDWQGQAVPPRMLSEIRHEHARLMLVRDRLDALAQEAAAAEPMPAEAEMTRRSELLRRLKCLGPAFATTLTSEVFYKDFRNRREVGSYFGLTPSPWRSGGIDRDQGISKAGNPRARCAAIELAWLWLRHQPDSKLTLEYRKRTLDAGKRIKRVAIVALARKLMVALWRYLTTGLVPEGAALKAVKI

SEQ ID NO: 377995 - protein, 406 aa, unidentified
MHKTFLVATIITSEGINPHYSKKRFSTFNNSILQFKHWLVDNHCFDVCLESTGKYWVPIYNLLEGTIRVTVANPKWVKAVKGNKDDTKDSKWIGDLFRLGLVPGSYIPPKPIRILREYTRYRAKLVTCRSSEKNRFQNAFTVCNVALDAVVSDMFGKSASSITDYLLSSETFDPQHCSSLLQKSLKKKAATVIESIEGYQMTREQKERMVIVRSHLEFVQQSIVKLDEKLDKMMAPYESAIILLCTIPGVDRASAITIISEIGMDMSQFANSKRLCCWAGLTPGNNESAGKKKSVKVSRAGVYLKPALVQVAHASVKSDSSPYYQNKYERICKRRGKKRAIIAIARMILTAIYHMLVTGEEWNPSDLYKIDMPQEMLEKQKEKAIKQALKLLLSNGVIKEAAISAA

SEQ ID NO: 377996 - protein, 312 aa, unidentified
MDQDGVIVGIDVSKDRLDVHVLPSGEVFFVPRQGDGLAELVERLAPLKPALVAVEATGGYEATTAAAVAAAGLPLVVVNPAQVRAFAQALGKRAKTDPIDAEVIARFVQAVKPEPRPLPDDKTQLVADLLTRRRQIVQMISAEKQRDQRTAEPRLKRSIARLVLALQKELSDLDQQIDDEIRGSPAWRQKDDLLRSVPGVGPIVSRTLLAELPELGALDRRQIAALAGLAPWTRQSGKWKGKSFIGGGRAPVRTALFMAALVAVRHNPVLKAFHQRLIDAGKPKLVAITAAARKLLTILNAMMKANQPWRAA

SEQ ID NO: 377997 - protein, 356 aa, unidentified
MDSKGGTQMNQKYDHYIAVDWALSNMAIARATRHDNEINCVEVVADVSDLKVYLSHLKGTKLLCFEESTPAQWLYVELKEFVDEIIVCDPYRNKLLSEGAKTDKIDAIKLLKLMRAGLLKPVYHSSDQLISLRKIVNGYLDVVYAGVRVKNQRSALLRGYGLNRDEDLSEPSEADLFVMQGYDLSIKNYEEDKLRYNKKFISLGNDIEIIKTLKSVPGIGPVGAVKVAAIVVDPKRFINKSQWLSYCGLVMHDRISGGKLYGKKTPRHSRILKSVFKTAAITILQDQPTIYTKALGDSAGAIKSYYQLLIEKKNYPPHRARAAVARKIATIALGVMKSQKKFDDRWRKKYVTSNIL

SEQ ID NO: 377998 - protein, 340 aa, unidentified
MTITTVGIDLAKNVFAVHCVDQNGKTVLVKSRVTRAALPGLIAGLPPCVIGMEACSGAHYWARLFRQYGHEPRLMAAKFVSPYRIAGKSGKNDAPDAQAICEAVRRPHMRFVPVKDKSQQAMQCLHRTRQGFIEEKTATYNRLRGLISEFGVIAPQSTDALRHIVFEQKNSLPLQVQQCVDDLLEHVARIEDNIAEYDRILSRMAKTDHRSQRLMELKGVGPTTACALVASIGNAHDFKNGRQLAAWLGLTPSQYSSGGKSKLGRITKAGDSYLRTLLVQGARSVLIGAEKRTDLFSRWVCSLVERRGYWRAVVAIAAKNARLCWASLHYGDDFRLYSAS

SEQ ID NO: 377999 - protein, 344 aa, unidentified
MASIARIGIDTSKSVFQLHGVDEREQVVLQRKLRRRQFLTFLSKLESTLIGLEACGGSHYWARQLQALGHTVVLVPPQYVRPYVARGKNDAADAEAICEAISRPRMERHFVPVKTADQGAAQMLLGVRDSLVRRRTQLTNSIRGHAAEFGLITAKGLSKIEPLLARIAADDALPALAKEMFATLGQELAELASRIAAVEAKLMAWHRSNELSRRLAEVPGIGPIGACLLPIKIANPQAFRSGRMCAAWIGLTAKDHSTAGKQKLGGITRAGDETLRATLVAGATAYIQHVSRGHTKPSPWLVDLLKRKPPKLAAVALANKTARIAWKLMVSGQRYDRGIAAAAA

SEQ ID NO: 378000 - protein, 375 aa, unidentified
MGKHRLAFVAFDSAKNKHAAAIADDGRDGEVRYLGEIDNSPDAVRKLVAKLSRQYERLHFCYEAGPTGYGLHRQLTELGHVCDVVAPTMIPKRSGDRVKTNRRDSVTLVKLLRAGELRAIWVPDSVHEAVRDLTRARETAMLDLKTKRQQLLSFLLRHGRSFPDGRNWTKMYERWLATQTFGHPAQQIVFQDQLEAITTAQARLAALEQQLREIVPTWTMASVVAAYQALRGVSFLVAATFVAEVGDVRRFATPQQLMAFLGLVPSERTTGDTVRRGSITKTGNYRARRVLIEGAWTYRFSARVSETLRTRLKDLPLSVRAIAWKAQVRLCARYRRLIARGKKPPVVTSAIARELAAFLWAIGQQVAPQTGVLRN

SEQ ID NO: 378001 - protein, 426 aa, unidentified
MSERDYSKQVARRQRIGSTTLVVGVDIGCASNAVGFMNKEGKVLGSDPDMPNSREGFEQFVKMTEGLKAKHGLNDVLIGLEPTGHYWRKLAYFAREHGYEVRFVRTTALKHHRELDESSSAKSDQRDALTLTNITREGKYIDTVIEDGRMRQLRTLVKVREKVQKRNGSAKNSLHAVLDDYFPELKEIFWSMHARGLWALLERCPFPVDVVTLKVSVLKELIGRASRRRLEASRKAMAVYQAAKESIGLRQIGSADRYRLRMCLEEVKRTELMIKDMEREIKRMLKEIPDAQYLLSIPGIGPISAAVFLGELGNPSYFQRARQVVKYAGYDPQESDSGYRVSRRFISKKGRWLLRKHLFFMSMRVVVLSRYFQEYYQRKLQTKNRFGQLPRKKEILCAVAIKLIKVIFALLRDKRNFEDTGAYCVQ

SEQ ID NO: 378002 - protein, 422 aa, unidentified
MKKHAYRRTAINNFQPVAVQNRVSERRLVLAIDVAKENMVAALTTGQAEVVATLAWKHLEETPVLLEKLKELSDLGYSVEAVMESTGTYGDVLRHQLQSHGVVVYQVNGKRVHDAKVVYDGVASLHDAKCAAIIAKLHIDGRSSVWEPKTVAERELKAAVATMDIYHVQYLRLIHQLESWLARHWPEVTHLVELTSATLLATLARIGGPRDVASNPEATRKLMLGMSHRLMQPEKIEQVLACAAQTVGLELLPVERSALMALAAEAHRSLRAFKSAKLSVHEQAVGGPSEALAPAIGKTTAAVLVTEVGDPRRFPCARAYLKACGLNLKEKSSGKYQGRLRITKHGSGRARQYLWLAVHRWRRRDPVVHAWYEAKVRRDRGSKSRAVVALMRKLVKALFHVARGQLLDSHKLFNVVQLTSTS

SEQ ID NO: 378003 - protein, 343 aa, unidentified
MQSISTIGLDIAKSVFQVHGVDAAGQVVIRRQLKRRFVLSFFEKLPPCLVGIEACASSHHWSRELQALGHTVRLMPPAYVKPYVKRQKNDTTDAEAICEAVTRPNMRFVPTKTVEQQSCLMLHRARHLFIRQQTAVINSIRAYLAEFGIVAPVGRRGVEHLLEVVADAADHRLPEVARVCLAALGSQLRALKAQILAFDRRIMAWHRSNATSKRLDAIPGVGPALATALVASIADPKAFRSGRDFSAWVGLVPKQNSSGGKDRLGSISKQGDRYLRSLFTAGALAVIRYAKIHGTGHRPWLTALLARRPTKVAAIALANKLARMAWAMMARNERYREPTALTA

SEQ ID NO: 378004 - protein, 368 aa, unidentified
MMQYKRIGIDTSKGSFQLHGVDAEEQVVLRKTLRRKQFLEYLAKQEVGEIGLEACGASHHWARALRQHGHRVVLVPPQYVKGYVARGKNDKNDAEAICEAMSRRRVRERLVPVKTLEQSAGQMMMKVRSSLIERRTQLTNSIRGHAAEFGLVAAKGMDKIGPLLERIAVDESLPARAREMFAMLGEDYAELAARIVRIDKRLLAFQRDNELARRLMEVPTIGPIGACLWVTKVVDPHAFRSGRSCAAWLGLTPKDRSTAGKQRLGGITRAGDESLRATLVLGATAYLRHVRSGRIAATPWLAGMLARKPPKLVAVALANKTARIAWKLMTSGERYDPAHQPTREGLDASQWGGLRAEPLTAGGVEAVA

SEQ ID NO: 378005 - protein, 317 aa, unidentified
MAEVTFPQLIQRACGIDVHLKVVVATIDGAGIQRETRSFKTFTSSLNELKEWLLSNGVTHVGMESTGVYWKPVYKVLEDSIPNVWIVNARHIKNVPGHKTDKMDSEWICKLLLAGLLKPSYIPPKEQRQLRDLTRYRNKLIQQIASEKNRMMRILEDCNIKLSSVVSNTSGATATSLIDMLCEGKVLTLDDINSVYHGKLSASPEELLEACTGFVEEHHIYLLQMIRKDIDQTQTLVDDLSERIKRLLSKYENVLELLREIPGFSTKVVEDLVSEIGLDMSHFPSEKHLSSWAGLSPGNNESAGKKKAHESLTETNR

SEQ ID NO: 378006 - protein, 348 aa, unidentified
MGDSIMNISVLGIDIAKNIFQLHGVDSSGKRVLKQRIERDKLSAYVANLPLSTIAMESCGGSNYWARVFQRQGHKVKLISPQFVKPFVKTNKNDANDAEAIVEAASRPSMHFVPIKQVEQQDIQSLHRVRSRIVKNRTALINEIRGLNLEYGIAIPQGALKVKGHLLSIIDDKENELTISSRELMQELYDELVELEGRLKKLEKKIKLICKDNDQCQRLLSIPGIGELTATALVASVPNANEFKNGRHMAAWLGLVPRQSSSGNKQVLLGISKRGDRYLRTLLIHGARAALCRCKNLDSKYGKWLISKRESLSLNKAAVALANKNARIIWSLLKTGEEFNSNQQKSAA

SEQ ID NO: 378007 - protein, 364 aa, unidentified
MCHNVVAMKRHKEGAARMQVSTIGLDTSKRVFQVHGVDVNHQVVIRKQLKRAQVLKYFAELPPCLVGIEACAASHYWAREIGAFGHGVRLVPPVRVKAYIKRGRKNDAADAAAICEAVTRPSMQFVPVKTVAQQEALVLHRGRDLLVKQCTQLCNSIRGHLAEFGIIAAKGEAGFKALLAVVENQEDTRLPAAARGVLALLAEQWHAGTQRFRAIERQIVLWHRSNEDSRRLATVPQLGPIIASALVAKVGDAARFRRARDLPAWIGLVPSQHSTGGKERLGRITKAGDRYLRKLLMLAAMGMVRRAKAGRDVPPWFKELLGRKAPKLAAIALANKLARIAWVILVRKETYKTPQQLEVAIAAA

SEQ ID NO: 378008 - protein, 391 aa, unidentified
MEILMAQVDDLSRSLVTFDQQSTLVVIVEMSQTRWLIAGTVPGLDRRPLKKLEPNAPTLLHLVKRWADEATKAGRTITRIVLAYEAGRDGFWLARWLRARGIEAYIIHSTSVAVSREHRRAKTDRLDTEMLMRVFLGWLRGERRHCSMVAIPTLEEEDAKRPSRERESLVGERTRIINRMKATLARLGIRGFKPDLRKAPQRLDALRTPEGVPIPPNTCDEIRRDMARLAWIREQISAIEVARVKRLEQAPAQGPDAMVRLLARVIGVGIETADMLVREVLLRNLRDRRAIARYAGLTGSPNESGSKRRERGLAKTGNARVRRGLIQLAWRFLRFQKDSALVQWYRARTQAPEGARKTTMITALARKVLIALWRMVITGTVPEGIVLRSAA

SEQ ID NO: 378009 - protein, 346 aa, unidentified
MRFYTGQHRYYCGIDLHARTMYLCILDEQGKVVLHRNMRCDPDLFLEAVAPYRDDLVVATECIYCWYWLADLCKREGITFVLGHALYMKAIHGGKAKNDKIDSRKIAVLLRGGTLARAYVYPPEMRATRDLLRRRLFFVRKRGELFAHVRTTSHQYNLTIPTGQLLYQCNRARVPEIFDDPIVRTSVEADLELAGHYDGLIRSMERTVLEQAKVDDMSSLNLLQSIPGVGMILSLTLLYEIHDIARFKSVQDFVSYARLVKCQKGSAGKVLGTSGAKIGNAHLKWAFSEAAVLFLRKNPRGQKHINRLRARHGKGKALSILAARLGRASYFMLRRRSAFDLDRFMN

SEQ ID NO: 378010 - protein, 380 aa, unidentified
MQVMHERCAGLDVHKKTVVPCVILTLPDGRVEKHTVTFSTMTSQILAMADWLKSCGVTHVAMESTGVYWRPIYQLLEGQFTLLVANAQKIHRMPGRKTDLTDAEWLADLLRHGLIAPSFVPPQAQRQLRELTRHRSNVTGRRTQCINELHKTLEGTNIKLSSVATDITGVSAMDMLQHLLAGQTDPNFLAELARGVLRKKIPELRQALQGVVGEHQKLILNQLLGDIERFDQQIEDLNAEIARRLAQEQSVIQRLDEIPGVDRKVAEVMVAELGTDMSRFGSAQRAAAWSGMCPANRQSGGRRYAARSRFGNKHLKGTLAEAGWAAGRSKQTYLGAQFRRIAARKGSRRAALAVGHSILTISYHMMDRGTPFTELGSRLL

SEQ ID NO: 378011 - protein, 398 aa, unidentified
MICVGIDIAKGKSTVCFFKPGGEVLRTPYDIEHTAEEIGKLIRDIRSYDEEVRVVLEATGHYHLPVVAQLLEADIFVCVVNALRMKKFCAQDIRKAKTDKIDAAKIAAFGLTYWQDLQRAKPTDEVYRELRLLSRQYFQLTSMLVKAKISLGNLLDNVMPGIADVLQDRDPHHKLTDFVLKYLHFDKITAMGEKKFVSGYCSWAKKQGYRMYERQAEEIFALVQNSIPALPMTPSTTIVVKEAIRVVREIETSRTSILTQMQAFAKSLPEYFLIREMACVGDTLTPLVIAEIGDVRSFHSKHALIAYAGIDAPPYQSGGFNGTERHISKRGNGYLRHVGFEIMQCKLRLKPEGDPVYEFIQKKRSEGKCGKEAMVAGINKFLRIYYGKVTELYRELEA

SEQ ID NO: 378012 - protein, 350 aa, unidentified
MAIVGGLDIHRKQITFDYVDTGTGELRRGQIAPADRRHLAAWLAGRFTGDTAEFALEGCTGWRYVAEELAAARITPHVGEPADTAALRGRKRHAKTDKTDSRHLRELLTDGRLPECWVPPPHVLECRALLELYHDLRVEHTAWVQRIHAVLFHQGARQLGEHSLRTSAGVAALRAIAAAELSAAGQLQVATALDMLAVLDGHLDVLRRRLLEAARHPAGARVLTARLYGVGPVTALALCCWLGGAGRFSSARKAVRFAGLDVTVYSSDGKRSPGHLARQGPEVLRWCAYEAGKAHARGSAPDHRYYASVKERIDGKRAAISEARKIIRQAAHILSELGDDALTTDANPAR

SEQ ID NO: 378013 - protein, 411 aa, unidentified
MQRVLGMDIHRTFAEVVFWEAGRLRPAGRIDMTRSGLEGFGRSLSKEDEVVIEATGNAMAVVRVLGPYVARVIIANPLQVKAIAHAHVKTDKIDAGVLASLRAAGFLPEVWIPDADTERLRRLVARRNQIVRHRTRIKNEIHAILQAHLIPPCPHADLFGRLGRSWLGRQALPDDEKAAIDRHLRELDRLAEDLELLDREIAEKVIEDPAVKRLLTITGVNIIVAAGLVAAIGDIGRFCSPQKLVSYVGLNPRVRQSGLGLAQHGRISKRGRSHARAMLVEAAWAASKAPGPLRSFFLRIRARRGHQVAAVAVARKLAVLCWHLLTRDADYQWARPALVANKLRAMELQAGQPARKGNKRGAAYAYNIKELRDREIDVARHAEQVYEQFVSRWQRRGPGKRRTGAARDERQ

SEQ ID NO: 378014 - protein, 402 aa, unidentified
MSSSVPLAPAAAVVAVDVGKRLAALLVTDAARRRLLGPLDFPMTGAGLAGVITKTQAVLPAGLVRVGVEAAGHYHRPLATPAVWPGCQVVQLNPAHVSEQRRVMGRRRIKTDALDVEAITELLLAGRGVPVGEPSTVIIELTGWVGLRRRRVLTRVATRNQLLSQLDRCFPGLTMALPNVLGTRVGWLIAEDFADPRRLARLGASRFIRFAAARGLQIRRPVADRLIVAAREALPSPDATVARQILGADLSLLSSLQEQVQAAEAAMAKLLPQTPFAPLLTVPGWAVVRASNYAAAVGDPDRWPSAAQLYRAAGLSPVQYESAGRRRDSSISREGSVSLRRALIDLGIGLWHSDPAAKRYGRQLRARGKHGGVIACAMAHRANKIAFALVRDQAGYDPARWD

SEQ ID NO: 378015 - protein, 331 aa, unidentified
MNQVGIDISNEVFDAAMQCVDGVVRQQFPNTPSGHRQFKRWALRGANSARVCLEATGIYHLQLALLLDTTKNIELMVVNPCAARRFAQAHMVRAKTDSIDADGLLHFVQCMPFQRWSAPHEFVLQLQSLAHRVAQLDKDLSRERSRLHAARRAGKHTRQTQQDIQDHMEELKRRLEATKVQAYDVIRHDPLLAEDVRLTVSAPGFAALSSMKLMAELSALPPDMLAAQWVAHAGLDPRAYESGTSVNRPRRISKQGNARIRSTLFMAALSAVRHDPNVSAYYEKLLSRGKKKMQAIVAVMRKLLHALWGMLHHRREWEGEKFYRLNQPECA

SEQ ID NO: 378016 - protein, 421 aa, unidentified
MNFINQEVLQMNAVGIDVSKGKSTVAILRPMGEVVQTPIDVPHDAVSLERLAYQILSLGENTRVVMEATGRYHEPVAMELHDRGIFVSVVNPLVIHGYCSGGTVRKVKNDQKDSLKIAKFALDHWVDLREYTPMDTVRQQLKIFSRQYNLYMKSRVALQSNLISLTDKVFPGVNEIFTSPERSDGHLKWVDFITTFWHCECISRVSENAFTEQYRKWCKRMGYKFSAAKASDIYIGSRGHIVTLPKNNNTKLLIQTAAKELTAMNELLTVVKAEMIRLAKELPEYETVQAMFGVGELLAAQLMAEIGDIRNYPRRSSLVGFAGVDPEVNQSGKMNSESNPSTKRGSPHLRKTLFQVMTVYLRLSPADEAVYQFLDKKRSEGKPYYVYMTAGANKFLRIYYARVKECMAKIEDSAETAEENG

SEQ ID NO: 378017 - protein, 322 aa, unidentified
MAMLSFGGIDVSKDRLDVMILPEERRSSVSNDASGWAKLVEQLRGSSIAAIGIEASGGYERGVIRALLAAGIPLRQVGPFKLRQFARASGVLAKNDPIDARMIASFVGIMPTRPAQRQARAAERLTEMLAIRRQLSAEKIAAENASRLLEDVMLQRLSRRRIGRLTADIDILDKWMFEIVATDDALVHRYRLLCSMPGVGPLLACTLIALLPELGCMSCKQIAALVGVAPYAFESGTIKGRRCIWGGRAHVRQVLYMAAMSASNWNPVLKIFHHRLKAAGKLPKVVIVAVMRKMITTLNAMVRDDVAWADRLSGRHSVATAR

SEQ ID NO: 378018 - protein, 414 aa, unidentified
MDTTGEVLIGIDWGCARHYLVVRRGSQELFAGTVEHSGEGLASFTARLREWCGGDFGAVKAAIELERGAVVDHFVDLGAQVFVLPPKRSAALRDALYTSAAKDDARDARVLLYALASNPGMLRPVRTLSPAQRDLRAACVARHVLLADRNRCVLRIQDRLRGYFPEMLAACRDALDRPWFAELFRMVPTPAAAATVRPSLLAARLRRARCRADVNALLKALRAAPLRVAPGVAESAVRDVQAMLRAIKFSRDEERLVEKRTEAAMDAWRSENPALRKQRERDEEVLRSIPGIGDAVLAALIAETAELLERRDYRALRLYSGVAAVTIQSGGSRQCRMRKAAAPRLRVAVYHWARVAAIRDARSKERYAVLRAGGKTHGRALRGVGDRLLAMACAMLKSGETYRPDADDDAPETP

SEQ ID NO: 378019 - protein, 369 aa, unidentified
MEKSSKVFIGMDVHKESIDLTLAEPGGEVRRLGQIGGDRVSLLKMVRKQQSRGGERVFVYEAGPCGFWIYREIAALGERCMVVSPALIPKRAGDHVKTDRRDSERLASLARAGELEAIHVPDIRDEAIRDLVRGRDDAVIAQRRVRQQLKALLLRNDIRYVGKTSWTGAHRRWLSELKLPEPAQRIVLEEYVDAIVVASARIERLTRAIEAEVASWRFAPVVGALQAMRGIQFVHAVTLIAELGDLTRFASARSLMGYLGLVPREDSSGEHRRQGAITKAGNGYARRALIEAAWAYRHPARVTRIIATRQTGLPKAACDIAWRAQLRLSAKYRRLAARHLNPNKIVVALARELSGFVWAIGHSVKPQSS

SEQ ID NO: 378020 - protein, 429 aa, unidentified
MQNESTPGARGPVFCGVDTHADSHWLCVLDWRGRRVLSRRFPADAAGYEALAGAIAAAGEPACVAMEGTSSYGAGLTRHLASLGMPVREALSPAGTQRRRPGQGKCDESDAERAARAAMSDSRLGTPKSQDGWVDGVRCMLAARSGAVKARTSAINTARSLLTTAPEGLRSRFRGMGGPRLMEELPSVRAEGALGAALGALADLWAAARDAALDMERAIEASLEENCPALLAMYGCGPVSAAKLAVAAGDNPGRLRSEASFAAICGACPIPASSGKTVRHRLNRGGDRQANSALHEIARQRVMRDPETAEYAERARARGKSDREVMRCLKRYVAREAYRALMRPHEVRRPEDASGLVAARRAARVSQVRAASILGTSEKYISMLERGQRELKPIRRAYEAWVEAGLPLDWDRQAFEAERKMDSKKHLAK

SEQ ID NO: 378021 - protein, 338 aa, unidentified
MEVYAGIDLHSTNSYLGIIDGSDHKLFKKRLPNCKDTILAALKPFKKKLVGIVVESTFNWYWLVDTLNDNGYKVHLANPAAIKQYEGLKHTDDQWDSFWLAHMLRLGILPEGYIYPKEQRPLRDLLRRRGLLVKQRTAQILSLQSMISRNCGVVSTGRDIKAMLPGIAKHVFDHKHLVLAGETSIATIAFFSEKIKIIEKEVRSMARPRREFKILQTMPGLGTILALTIMLEAGNIARFPTVGDYSSYCRCVKSERFSNGKKKGSGNRKNGNKYLGWAYVELANFAIRYCPHASRFYQRKMAKANRVLAIKALSNKLARASYYMMKDNVSYDPEKLFS

SEQ ID NO: 378022 - protein, 326 aa, unidentified
MEHELHYIGIDTAKEKLDVDVLRPDGRHRTKKFANTTKGHDELVSWLKGHKIDHAHICIEATGTYMEPVAECLYDAGYIVSVINPALGKAFAQSEGLRNKTDTVDARMLAEFCRQKRPAAWEAPHPLERALRALVVRHQALTDMHTQELNRTETAREVQRPSIDAHLLWLEAELKRLEKQIKDLTDDDPDMKHRRKLLESIPGIGEKTSAVLLAYIGLKDRFAHARQFAAFAGLTPRRYESGSSVRGASRMSKAGHVSLRRALYMPAMVATSKTEWGRAFRDRLAANGKKGTVILGAMMRKLAQVAYGVLKSGVPFDASRHNPVAA

SEQ ID NO: 378023 - protein, 426 aa, unidentified
MSESEVLRQEPEFAALVGIDWADRKHAWCVQAAGTTQRESGEVEHTPEAVEAWIGQLCQRFGNRPIAVAVEQVKGALVFMLSKYEPLHLFPVPPAMSAKLRQALYPSGAKDDPRDADLLVDLLLQHRDKLRRLSPDSEATRRVQNLVEERRHLVEEKTAQSNRLTNHLKIYFPQMLEWFDRLDTELVCALLEQWPTLEELQKVPPSRLRAFFRKQRCHYPELVERRLIGIRQAMPAIRDRAVIEAKSAVVKVSVQVIRSLIRGVAELDRKIEEAAAAHPDFFIFESLPGAGAVLAPRLLAALGSQRERYANAAEVQAYSGIAPVTEQSGKKKWVHFRWACPKFLRQSFHEWAGHSIAHSQWARSYYQQQRERGKGHHAAVRGLAFKWIRIVFRCWKDRVAYDENRYLAALAKRNSPLAAVAGATIL

SEQ ID NO: 378024 - protein, 358 aa, unidentified
MQSNKISFKGQKIFIGIDVHAKSWKVAIAPEVGAVKGHSQKPSAKELFDFLKKNYPDGEYQAIYESGFSGFSTYYALKEVGIECMVIHAADVPTTQYEEVMKTDRIDAAKLARSLKAGQLKGNYVPEKQYIDDRSVVRIRRTIQKQLSGYKSRVKHLLHCHGVEMPERFSKIQTHWSRAFITWLMKDVKLMSDTRTSLDLLIRQVEVIRGTLLEATRQLRKMSQMERYKRRHDLLRTIPGIGPIVSMCILTEVCDVKRFHNENEFAAYLGLVPTSHSSGEKTVHGEKTFRGNKQLGPMVVEAAWVAISWDAGLGSQYFQYKKRMEPQEAIVRVARKLSNIIFSVLKNEKEYVPYQTGN

SEQ ID NO: 378025 - protein, 404 aa, unidentified
MKGPIVSIDVSKGKSDYQAFKDLNVKYTGSRSIKHTKEGFDEIVNLVREMEKKLETEVCVVYEATGVYHRVLKKVLEDNNIKQFIINPLLSAKTRKNDSLRCPKTDKLDPKSIAKTYYSHSLHNSHKQETIYHELRELSRYYEDILVHLRKDKVAFRAQLDIVFPGYDTLYDDLYGPVALTVIEKYPHPEMLQKKKINTVSKVIQNKTCHRQAVSDTMADKAIEYSKTIYSGCDKDDIEVLILKRFIKKLNEDMAEAERTIGEMINLAQELPDFSIIKSIPGIGDNLAARIIAELGDMTRFKKKNELVAFAGLDPRISESGQNDGDHMHITKKGNKRLRCLLYLAVTCSIRLKRDDNSIKDFYIKKKQQSNPMCSKAAKTACASKLVRIIYSMCKTGELYQYNK

SEQ ID NO: 378026 - protein, 447 aa, unidentified
MRLRTRMGICTLEDYSGPYSGQVTIMEKQRNKVCGADIHKRFLVATLLSRDGTKITNRFGMTLDDILKFKNWVMENQCEMVVVESTGTYWIPIHAVLEGTMDLIVANAYKIKHIPGRKTDISDSEWLAELGLNGMVEPSRIFPKEDRELRMLTRAREGYVTDMTKEKNKIHYALESCGIKLSSVLADIFGKSGRYLLDSLLNGVELEEMIEGIPVKRIKEKADQIREAVRGSLEIAQIILIRGSLDQMRSIQRRIDELDKEIKDRIARRKEDLRIAMSIPGIGFVSAATILAEIGDFKDFSKAEQLAAWSGLVPAVYQSADKNVTGSITKHGSRHIRRILVEVAHAIARTNKSRLKSFFRRVQAKKGYNVAAVALARKVLCILHHLLMNRELYQEDDAKTKKKTTINVNISTQRTRMDLDEMIQILVKAGYVIQKTSIRNNSFDTGG

SEQ ID NO: 378027 - protein, 324 aa, unidentified
MQAVTTIGLDIAKSVFQIHGVDAAGNVIVRRQLKRRYVLPFFQRLPPCLIGIEACASSHHWSRELKALGHTVRLMPPAYVKPYVKRQKNDAADAEAICEAVTRANMRFVETKTPEQQSCLMLHRTRHLFIRQQTAVINAIRAHLAEYGIVAAVGRNGVEELLGVVADPGDKRVPEIARACLAALGAQLRMLKAQILEFDRMITAWHRSNETSKRLDAIPGVGPALATALVASVPDPKAFRSGRNFSAWIGLVPKQHSSGGKDKLGSISKQGDRYLRSLFTAGALAAPGVSSHNVEITKRFTSGKHPDMGHVPRAQSSSLVTRRA

SEQ ID NO: 378028 - protein, 321 aa, unidentified
MSNSKPKCEIYIGIDVSKKNLDVYILEHDKHFQFSQTETGLSELVEIIGSFNPALVVLEATGGFENNGASILASSNIPVAVVNPRQVRDFAKATGTLAKTDCLDAKIIAMFGKAIKPNISALPDETLKQINLLVRRRAQLVSILGQEKNRFSSANGFMAKSIKKHIAWLKKELEQLDKNINDFIKSSPIYKEKVQIFKSTPGCGPVLASSLIAFMPELGKLDRKKIALLAGLAPLNNDSGKFKGKRTIKGGRANIRSILYMATLTAIRFNPIIKEFYERLVSKGKPKKVAITACMRKLIVTLNAMCKTKTEWSFKEQLIRA

SEQ ID NO: 378029 - protein, 418 aa, unidentified
MAFKIFRKNCCGLDVHKTWIYACIGITDTNNRTEYKQARFSSFSKGLQELSDCLAKYSCKEVCMESSGKYWILVFNILEKTCWVTLAHPKYTKPQKGNKTDRKDAKWICDLFMCDMIKPSFIPPPDIRHLRDLLRFRMKLTYQITGMKKRALNCLTVSNLKLDDVFSDVFSKSSRSIIQQILENPGVQFDVTPYIDKRYKHPVEEIQSAIDGAICPEQATKLKICLDFDEQEKRISELDTEIFRLAEPYNSVLEFMRTVPGFSKESLTAIRLLSEIGADMSVFPTSKNLVSWAGCCPRNDSSAQKVKSTRISRAGSYLKPLLVQIANALLKSKDHPEFKERYRRIKARRGHKKAIIALCRMLLTAIWNVLSKCEPYSAKGYLADKLTEHSVVISKSEDLALLRQRGYIFKDEVADFSW

SEQ ID NO: 378030 - protein, 364 aa, unidentified
MTTLAQSDAPCRVLGGVDTHKDVHVAAVIDDVGRILATASFPTTRPGYRQLFVWLRGFGEIVAVGVEGYGSWGAGLARDLTARGVRVVEVNRPNRQTRRRRGKSDTVDAEAAARAVLAGDATVTPKTGTGPIEALRQLRVARGGAMKARTAAANQLHSLIDTAPDPVRAQLRALSFKQKVALVASWRPRNATTPEGASRYALCSVARRWRDLAVEIGELDARIKVILDDIAAPLLAVHGVGPDTAGQLLVTAGDNPDRLSHERSYAALCGSSPVEVSSGRTNRHRLNRGGDRHANSALWRIVIVRMNSHQPTKDYIARRTAEGLSKQEIIRCLKRYVARELFRHLQHAVTDPHHEVPALVQRAA

SEQ ID NO: 378031 - protein, 308 aa, unidentified
MKQYVGLDVSQRETAVCVVNETGQVIFEGKAKSNPGALTDLLSKHAPHAERIGFETGAMASWLWHELRRVELPVVCIDARHAHAALSVRMNKSDQNDARGLAELVRVGWYREVKVKSEESQKIRAILVARSRLVSMRRDIENQVRSLIKECGLLFPRAIGQQFRNQVSELLGVDHLLLSVISPLLSIHENVCQQQGKFDNEVRRLAKLDETTRRLMTVPGVGVVTALTFRHTIDDPSRFRSASTVGAYLGLTPRRSQSGETDTNGKISRWGDRLLRTYLFEAATVLLYRTKKWSSLKAWGMNSPSGSA

SEQ ID NO: 378032 - protein, 372 aa, unidentified
MNSIVYVGMDVHASNYTLSCYTLTNDECFATVQMEPEVKNILTYLKKVQRNLGTPCEFRCGYEAGALGFSLYYQLQKHGIPCTILAPSTMPTFHRNEIKTDRRDAMKIARCLAFGAFRPVHIPTKEDAAVKDFIRMRDDHKIALKKIKQQIQAFCMRYDLHFTEGRSYWTQRHLAWLKALALDDLLREVLDEYLVTLHQLADKIERLDARIEELAQGERYAENVKKLSCLIGVRTHTALALIAETGDFHRFAKAEQYAAFLGLVPGERSSGDKQSRTGITKAGNTHLRKLLVEASQCYGRGKPGYKSRLLKERQQGNTSEVIAYADKANERLRRKFYRMVLRHNKKHNVAVTAVARELSCFIWGMMTGHTAI

SEQ ID NO: 378033 - protein, 372 aa, unidentified
MNYNTVYVGMDVHKESFSLCAYTIEAEKASHYQRTEADYKKVLNYLEFLRTIYGDDANFICGYEAGCLGYTLYHQLTANNVKCIILAPTTMLEQRSKKRIKTDRRDAEIIAKCLAQHNYSPVHIPTAKDEETKEFLRMRDDHKLALKKVKQQILAFCLRHNYRYDGKSHWTAAHLKWLKALTPEALYKEILDEYLLTYQTLSDKIERLDKRIEELATQDEYKEAVKKLCCFIGVKTHTALSVLVEVGDFKRFASAQHFASYLGLVPGEDSSGDDQNRLGITKAGNRHVRLLLTEASQCYARGQVGFKSKELKSRQSGNTPAVIAYADKANERLRRRYYKMVLNKCKKHNVAKTAIAREPACFMWGMMTDNIA

SEQ ID NO: 378034 - protein, 328 aa, unidentified
MFYLGIDVAKAKIDCCLILDNSTSKKKTKTFSNTQNGFEQLQIWLNHHAATSMQTITLMEATSIYHELLAQYLFKAGYQVCVTNPARARYFAQSMSKLNKTDKIDSEVLARFAMTADLHFWQPLPEHIQLLNALLERRAVLYDDLQREKNRLEKAKSTFTMEPVLESIHNSITQLNKHIQNIDQQIDNHIDQNPDLKNDKDLLSSIPAIADRTSLLMLSFLRSHTFEKASQAAAFIGLVPIQKQSGSSIRGRSHLSKAGSSKIRAGLYMAAVVATRHNPHIKEMNERLLANGKTKMMVIGAAMRKLVHLCYGVLKHQQPYQANYCINS

SEQ ID NO: 378035 - protein, 366 aa, unidentified
MKKISTMQVFGNEMFKEQKLTIGLDLGDRWSFYCVLDEAGKIILEQKVPTTPEAIKQTFGKIPQSLIGMETGTHSPWVSRLLTELGHKVIVAHAQKVELITKSNRKDDRHDARTLARLARIDPELLGPVRHRSAKAQIHLTVIRARAELVSARTALVNAARGLVKSYGQRLPQCGTQQVSRELAAALSTELRDVLEPLLKEIESLNERIQEYDERMEKIAKEVYPEVSLLKQVKGVGTQIALTYVLTIEDPYRFPKSRAVGCFLGLRPGRRNSGESEPQKKISKEGDRYLRTMMVQGAHYILGPFGEDSDLRRWGRKLAERGGKNAKKRAVVAVARKLAVLLHRLWVSGEVYEPLRNSQKAMRAVA

SEQ ID NO: 378036 - protein, 377 aa, unidentified
MNATSVCPSVQSTAGVIVGVDLAKNVFQLCVADAAWRPIESQRLSRAQFERWFANRAVSRVVMEACGSAHHWARWLTGLGVQVTLLPARYVRAYVKRNKTDAADAAALLEAARCADLHPVRVKSIEQQALQALHRTRSLWQADRTRRINTLRGYCREFGIAIALGSRLGLEQIARVLAEPRSGIPELLRPTMVLLVEEVRLLEARIGALERELAALVRHSAPCTTLLSVPGIGLLTSTAMVAATSGDVTHFKDARHFASWFGLTPKEHSSGQRRQLGRISKQGDRYLRMLLTHGARSVLRAAAAARNAGKSVTGLRAWALAVQDRSNHNKACCALANKLARIAYACLRDHAAFNEKTKLDKKIERQSFEMPCGAVPA

SEQ ID NO: 378037 - protein, 365 aa, unidentified
MPSVSHLTPIHLGLDVHKDTISVGILPADQQVPDVERIPHDEASIRRLVGRLGNPRSLRACYEAGPTGFELARLLHSLHVRCEVIAPSLIPKAPGDKVKTDRRDCRRLARLHRAGELVCVRIPTVQEEAVRDLCRTRGDMVEDLTRARNRLGKFLLRHGRVWRGGSTWTLKHQAWLGSQRFEQPAMAQTFGHYLAVVEVRNAHLDAVEADLAGWCDRPPFDWQVARLAAYRGITRLGALTLAAEVADWRRFATASQFMGFCGLVPSEYSSGTSVHRGPLTKAGNAHLRAQLVESAWAYQHHPAVGVRIARRQQGLPPAVAARAWKAQQRLCARFRVLAARKNVKSIVAAAIARELAGFLWAEMTA

SEQ ID NO: 378038 - protein, 348 aa, unidentified
MENITRIGMDTSKSIFVLHGVDASDQVVLRKKLRRKEVVEFFRKLRPTRIGIEACGASHYWARQLGALGHQVLLIAPQHVKPYVRRNKNDAADAEAICEAMSRPRTWFVPAKTAEQQAGLMLAGTREAFVRRRTQLSNTIRSYAAEFGLVSARGLDKIEPLLARIAADDDLPTLAKEMFADLGEDYALLQKRLEIIETKLRLWHRNDERSRRLAEIPGVGVVGAALLAMKVPDPKAFRSGRDFAAWLGLTPKDHSTAGKQRLGVITRAGDETLRSVLVVGATAVLRQVRLGRSHHSRWLADLLRRKPPKLVAVALANKTARIAWKLMVSGQSYDRTRVGIAAREAAPA

SEQ ID NO: 378039 - protein, 351 aa, unidentified
MPRTTTVHAVTTIGIDMGKNTLHMIGLDSRGAIVLREKISRGRITSRLANLPPRLIGIEAGMATHYVARELTALGHDVKQVPPAYAKPFRQGQKNDFRDAHAVAEAVQRPTTRFVPAKTDEQLDLQALHRVRSRLVSERTAVINQIRGFLLERGIIVRQGLRFLRQALPDILAKRTDVLSPRMVRVVADLAGDWRQLDERIEPVTGEIETLAKSDDNCRRVMTVPGIGPITSSAMVAAIGSGAAFARGRDFSAWIGLVPKQMSTGDRTILGRITKRGNGYLRTLFVQAARVILLRPASWPKHSFGIWLARAAQRLHRNVLAAALANKLARIAWTVLAQERNYEARIMKAAA

SEQ ID NO: 378040 - protein, 343 aa, unidentified
MESIYYIGLDVHKKSIAYCIKTVTGQIVCQGMVKAERRALRKWLVDLPGSWVGAMEATMFTGWIYDFLKPYAVELKVAHPAMLKAITAAKKKNDRDDAEKLADLLRVNLLPECTMMSEELRELRRILRYRNLIVRTASKMKNKISGLLMEVGAVYDKRKLHGKRYFGQLLERVEDVPESVKDLLKLSRSSMELFEAVQKKLLKILREDSLISKRVELLRSISGVGEVMALTWVLEIGDPKRFSNSGQAISYCGLCSAQHESAGKEQRGPISKKRNKYLQSMLIEAANLAPYWNPQLAILYEKELTRGNRNRATLAVARKLVIYMLAVDRRGEPFMTEKESLVA

SEQ ID NO: 378041 - protein, 412 aa, unidentified
MQDILTCAMGLDIHRDVIVACLAKGELGTDPEIEIRSFSTLIPEMRKLRDWVLEAECRYVAMESTGIYWQPIYEMLEPCFDGQISILVVNARHMKNVPGRKTDMRDAQWIATLLRAGLLKGSFIPDKTFRELRHLTRYRKSIVRDITAQKNRIDKFLQSSGFRFTAFLSDAFGASGRNIIRHLMEYGNISREALDRCLKTQTRKRIDEILIALNGSLSEHQRGFLRMIFGHLEALEQHRHTVEDAITKEITRHEEALSLLCSIPGIDVTAAAAIIAEIGTDMSAFPDSQHICSWAGLSPGNNESAGKRKSAHINKGNPYLKSMLCEVGWVISGKRSLYLSGWYWRIKQRKGAKRATIALARKLLALIYTMLKTGSPYNEDCFEIRRKQSERKRASRMVNELQKLGYFVVAPG

SEQ ID NO: 378042 - protein, 316 aa, unidentified
MNKVIYIGLDVDDNAFHGFATSSETKEGFAFKSQPKMGDLLKKLQVISKDPAELRLCYEAGYLGFTLARELRKKGYHCDVIAPHMIPRKGNSAVKTDRIDAKNLSFMLSKGLLTSCDIPDPDIECLRSLIRSRTYLRQRLRSLKNHIVSLCRKSGFHFKQETSSKAYWTVRHRAWFASLVNKEAINPLLAFNFKQLLTELKNEETRIAEYDEQIELLAQSDRFRETVTALSCFRGVSTIAAMGIAAETGDVTRFAHPTQFMSYAGLGVREYSSGGKEIKFGITKTGNAFLRMIVVESSQKIYRTPTLSKGVKQRQK

SEQ ID NO: 378043 - protein, 451 aa, unidentified
MTKEKRRHPERDFTPTHPNAAAIDIGSRMHVAAVPPDRDPEPVRAFGTCTGDLQQLANWFERCGVRTVAMESTGVYWIPAYELLEQRGFEVVLVNARDAKHVPGRKTDVSDAQWLRRLHEYGLLRASFRPKGELAALRAYLRQRERLLDYSASHIQHMQKALTQMNVQLHHVVTDMTGETGMRIIRAVVAGERDPAVLATHRDRRCHASEEEIAAALAGNWREEHVFALGQALELYDAYHAKVVECDLRIEIVLQRLREVAAKPAGQLPPARHRDKTANAPTFDARAALHAVLGVDLTQIHGLGPSLALKLIGECGTDLSAWPNAKHFTSWLCLAPANKISGGKVLSTRTRRSGSRAAALLRLAAVTVGRTQTALGAFYRRLSARVGKAKAVTATARKIATLFYNTLRHGLDYADPGASYYEDRYRARVLANLRRRAKSLGYMLNEMPAPA

SEQ ID NO: 378044 - protein, 365 aa, unidentified
MNFIGVDLHKKIITVCVMDQSRAVLARKTLSCDQPDQIVTFFRQFRPFKVVIEATANYLWLVDLLDPLAERVVLANPRKLRVIAESTKKTDRLDAQILAEFLARDMIPEAHMPTPRQRQHRILVRHRQYLRGRMTCVRCKIRHILADHNADRKNLFAPTSGGKAYIKEVPLSDAERFVIRQLWSEYEDLQAQLLALTKKLKAFAAKAPAREAKARQILKTAPGVGFVTAEVILSELGDVSRFRNAKAVCAYAGLAPVVKQSGGKRSKDLCISKQGSGILRWALVESAWRLTSTSLRWSALFARFKARGGNKRAIVAVARRLLCVLYAMLRTSTPYKYAALDIKPDKPPRKLRLVRKSTVEQSVTT

SEQ ID NO: 378045 - protein, 402 aa, unidentified
MNAVGIDVSKGKSMVAIMRPFGEIVSAPFEIKHTASGINSLVELINSVEGESRIVMEHTGRYYEVLAHQLSEANLFVSAINPKLIKDFDNDSLRKVKSDKADAVKIARYALDKWQNLKQYNVMDELRNQLKTMNRQFGFYMKHKTAMKNNLIGILDQTYPGVNTYFDSPARSDGSQKWVDFASTYWHVDCVRKMSLNAFIDHYQNWCKRKKYNFSQSKAEEIYGKAKELVPVLPKDAITKLIIKQAVDQLNSASTTVESLRTLMNETASKLPEYPVVMAMKGVGTSLGPQLMAEIGDVSRFTHKSAITAFAGVDPGVNESGSYEQKSVPTSKRGSSDLRKTLFQVMDVLIKTHPQDDPVYQFIDKKRAQGKPYYVYMTAGANKFLRIYYGRVKEYLSSLPES

SEQ ID NO: 378046 - protein, 400 aa, unidentified
MRVVFGIDVSKVSSEVAILVNGEKVHNYTMSNDAIGFSRLLGDLKTVHKPEIIFEATGVYSRRLQAFLDEHGYAYTRLNPLEAKKQLDSLRVRKTDQIDAEKLAQSQFVLNHKSTYVQEEVYQNLRDLSRFYQNLTEDIVRAKNRLHKVLQVTFPEVENILSTPTGEQYWNLVIAFPCKDFVLDLSKDELSKSIRLSTSKWISDKRVAYLAEKLIALANQSYCAVKKTSPILEEVRYYGKELLRLSEQRQTVLDQMVELAQPLPEYDILLSIPRIAETTATSIIGELGDIRRFQSANQINAFIGIDLRHYESGNYLAQEHITKRGNPYARKILFKCIHNMASASHTNPCHIADFYEKRKRQSQTTSTKPHTIASIHRLIRTMYYLITHNKLYDYASTQNQ

SEQ ID NO: 378047 - protein, 390 aa, unidentified
MYLVGIDISKFKHDCFIATETGQTIKNNFSFANDFGGFSELLSALKSLDHSSEIRIGLEATGHYGSNLKIFLHDNGYPFMELNPLLSERYRQVSSLRKTKTDKIDAKMISKLLLVLDFKPYPLKSYHILALKSLVRFRWRLIEARTKHKVRLQNIMDLTFPEYFKLFAAPFGETSLFILSHYPTAEKLARADLNVLSDNVRRLSHGHFSDSKLYRLVELAKSTVGNCNEIFEMQMAATLDQIKLHDEQIHQIEVKIMDIMDKYHFPTASIRGISVISAASIISEYGDFSLFRSPAQMLSFAGLEPAIYQSGTQTFSGKMVKRGSPYLRLTLMNVSNSIIHFNPVFHQYYQKKRDEGKPHRVALSHVAKKLIRVIFKLEKDKIPFDLNQLK

SEQ ID NO: 378048 - protein, 342 aa, unidentified
MESTTIAVDVAKEVLELAVSVRPGQVSEQRRLSRTAFARFFADRPAATILFEACGSAHYWGRRLQALGHRVVLLPPHATRPYVVRNKTDRADARGLLEAFRNQDIHPVPLKSVPQQALTALHRLRSTWLAARTARLNTVRGLLREFGCTIPVGAHHVLPQAWHLLGDPDSGLPDALRPALAEACTEIAALEDRMRLVERQLEALADQTPVVARLRSIPGIGLITATALVAFVGDAQRFPSGRHFASYLGLTPRERSSGLVRRLGSISKRGDVYLRMLLTHGARSVLWKAKSRPDPDRLRVWALKVQGLRGHNKAAIALANKLARIVWAVWTSDKDYREVPAD

SEQ ID NO: 378049 - protein, 460 aa, unidentified
MAKQRGKRKKDAKADATEGLPPLNLHAAGIDVGSAEHYVAVPSDRDAEPVRKFGSFTADLHRMARWLKDCRITTVVMQSTGVYWIALHDVLESHGFEVNVANARHTKTLPGRKTDVQECQWLQKLHTFGLLNNSFRPPEEIRTLRGYLRQRENLVAAAATCIQHMQKALTEMNIQLANVISDISGTTGLAILSDIVRGERDPYKLAMHKHSRIRASRQEIARSLEGTWRQELLFVLEQSLDLYQTYQQKIQTCDERIDGQLRSMEPRIDPMSEAIPKPRRGKDARGHQSGFDLRGQLYRITGVDLTRIDGIEVQNAQTIVSEVGVDMSRWKTEKHFASWLGLCPDNRISGGKVLKRGTRHVVNRASTALRLAALTLLRSQSALGAKFRRLRSKLGAPKAITAMAHMLARLVYRMLKFGHDYVDRGVEFYEAKYQQHQLERIRKQAAALHMQLIPLTRVVS

SEQ ID NO: 378050 - protein, 398 aa, unidentified
MSRIWAGTDCGKTHHHTLVLDSGGETLLSRRVANDEPELLKLIGDVLDLADGRAVTWAMDMTGGEPALLIALLVNHGQELVYIPGVAVNRASDGYRGQGKTDSRDARVIADQARMRRDLQPIRPDDDATVELRLLTERRVDLVAERTRTVNRLRSLLTSMFPALERALDMGTNGALLLLTGYQGPAAIRRTGKRRLTTWLRNRKVRNPEALAAKAIEAAERQHTAVAGESAIAKMVLTFAKEVMALNEKIAETDKLIEGRFREHELAEVIQSLPGIGTVLGAEFLVAVGGSLASFPSPDRLAAFAGVTPAPRDSGKISGNLHRPQRYHRRLQRVFYTSALVSIQFDPNSRKFYDRKRAEGKRHTQAVLALARRRVNVLWALIRDRRCYQVTPPVTAAA

SEQ ID NO: 378051 - protein, 349 aa, unidentified
MKIIGCDFHPGYQQIAMLDLVTGEMEERALSHERKEEVRTFYAGLEGSVRVGIEASGQSQWFERMLTELGHEVWIGDAAKIRASCERKQKTDRRDAKLLRRLLAEDRFPRIWVPTAAERDERQLLLHRHKLVRMRTQVKNQLQALALNQGVQRKWKLWSEAGRKQLESLPLLPWASRRRAELLQLLGQLEVSIGELDRAVAEQVSARPAARRLMTHPGVGPVTALAFTLTMGPAARFQRGKQVASYLGLIPSEYSSGGRNQRLGHISKQGNPFLRGLLVEAAQSAVRHEPEMRRAYQRLAQRKCRALAKVAMARKLAVRLYWMLRLQVNYAQLIQGSHAGQPGTFCGRG

SEQ ID NO: 378052 - protein, 430 aa, unidentified
MGGSEGINIRIYADTYLNYVGTDSHKDSHTSVFLDCFYDKLGELKFNNRPSEFGAFLAEAEKLKLEGTELLFGMEDTTAYGRTLAVFLKKNGQKVKHVNALLVARERKNQNVVEKSDSIDATCAARVLLSKLNELPDADTEDRYLILRTLVVRRGFIVKNTMCLKNSLHTLLTQHYPNYRKFFANIDCKTSLAFFTRYPSPVTLKNVTVEELTAFLREPSQGKIGEATARRILDSLEDTEMEHQEIRDMAVRSVIRQIEFTMDELGRIEESMAAFLKKFDCPLTSMVGIDVVTAAQMLSLIGDIKKFPTPAKLARYSGVSPVSYSSGQKDLQFANQRGNRELHSLFFNLAVRVSATVGSTNKVVNSHFYDLYHRKLSEGKTKRQAIKCVERRLVNIVWTMLTRNEEYINPIMYDVPKKEPESRKDKKNGK

SEQ ID NO: 378053 - protein, 428 aa, unidentified
MDEVSRNRLEEFRQLRQEIRQSEEHLIVGIDIAKDRHHAFFGTATGKTLLRRLVFSNDGEGFGKLLDQTEALRVRHGLKRVVYGMEPTGNYHKPLGEYLIQMGRMVVLVSGVTAKHNRESLDGRWDKHDDKDSANVADLISQGKCLYYEYPPVELRGLRGLLSLKRRLKRQEQSYRVRIRNHLIAQYFPEMDRDYERLGAEGLSIVRWCLAASEIAQLDVDPFIERVTSRRVNMEKRRRLEALWEKAGESIGCDEVPGVDHEAKMMVEGLKQVREMIKETKERIEEICNRFPEYPFLLTIPGFGPDVSSKVLGAVGDPDRFENRKQVLKQAGLDLSANRSGKNSARAIPQISKQGKADLRYALYQAAFIASTKNRDFMRYYTSKLRGREKEKGINGKILVKLSAKMLLIAWTLMRKKEAFNPTYLNAE

SEQ ID NO: 378054 - protein, 388 aa, unidentified
MQNIVHRPEGRAAIRTDLGAIFVSLELSRATWLITSLSPGAGEKMSKHVVQGGDIVSLLRRLAHLQEKARGRRRKEFPLVVIQEAGLDGFWIHRVLEHEGIESHIVDSASIMTSRRRRRPKTDRIDGEALVRALLAYHRGEPRVCAMVRVPTPEAEDRRRVSRELKTLTAERVGHVNRIKGLLFAQGVSGYAPLRRDRRTRLEELRTGDGRLLPYHLKRQIGRELDRLELLLEQMNAVAAERDALLVPAEEQAAPTPAKMLLGLRGIGPDFASVLWQEGLFRHFDNRRQVAAYAGLAPTPWQSGAVDHEQGVSKSGNPRLRTTMLQLAWLWLRHQPSSALSQWFHQRVGDNGRIRKVMITALARKLLVALWKYVTAGVVIEGATMKTA

SEQ ID NO: 378055 - protein, 354 aa, unidentified
MIFNQECPPRFPSTVGRGIVMSVIIGIDPHKLLHAACAIDERETELARLEVRTNSRQVADLLDWAAPFECRSWAIESAGGLGYLLAQQLVARGEHVVDVPATLSSRVRLLGSGKSTKNDANDARAVAVAALRAPQLAAVLVEDHVTILRLLAKNQLDTSRAKSRACCRLHALVAELVPGGIRKEIVVKQAEQVLLEITPTSATQRQRLDFAYDTLSEIVMLDDRAKRNKQRMIDETLASGTSLTGVFGIGPIIAATLIGYTGDIHRFPTAGHYAAYDGTAPIEFSSSGRTVHRLSRRGNRTLNHALHMIAVTQFRHRHSEGRGYYDRKLAEGKTPREARRALKRQISDRVYRQL

SEQ ID NO: 378056 - protein, 320 aa, unidentified
MKHKVGKDNTLARFIGIDVSKQWLDVATLPERETRRFSNDGAGQEQLGAWLVQLAPELIVMEATGGFETRVATVLAAEGLALAVVNPRHVRDFARAFGILAKTDRIDASVLAAFAEKVHPPVRPLPDEDRRELIDLVDRRRQLVTMRAEEKTRLSQATASARQDIKEHIEWLDERLRRLDIDLTAKLRSSSLWKAKEEILISVPGVGRVTVLTLLARLPELGALNRRAIAALTGVAPFARDSGQHRGRRMIWGGRADVRSVLYMAAVSAARINPVIKSFYLRLKQAGKPAKVALTACMRKLLTILNTMLRNNQSWHAPTT

SEQ ID NO: 378057 - protein, 334 aa, unidentified
MVNGSVRREVRSFKTTTKELLALSDWLAGEGCTHVAMEATGVYWKPVWHVLSDGDFTLVLANAAHVKNVPGRKTDVNDATWLADLLAHGLIRSSFVPDGQTQEMRTLLRTRKQLVRECSRHVQRLQKTLEDANIKLDSVISDIVGLSGRRMIEALIAGETEPGALAAMAHRRIKATPDELEAALRGRVTRHHRFLLQLHLQQIDAVNAAIDQIDQEVDAYVEPFRATVRLLTTIPGIDELSACVILAEIGRDMSRFPTAGHLISWAGLCPKNDESAGKRRSTRMRKGAPWLKTTLVQCAAAAARKKASYLQAQFHRLRPAAAPKRRSARSPPRS

SEQ ID NO: 378058 - protein, 349 aa, unidentified
MKYYVGLDVAMEETAICIVDEQRRIVREGRAASEPEAIAAFLMGTGRTFERIGIEAGPLAPWLCDGLVAAGLPVICIDARHMKAAVSAMPVKTDRIDARNIAFAMQVGWYRSVHLKRPEARKLRLLLSSREMLVRTRMDLDNHIRGVLKAFGLKVGKVRAGQFEVRVWELIDQGDAQIRWVVGTMLTTRAAVVGQLDLLHRAVLAVVKQDQVCRRLMTVPGVGPLTALAFRTAVDEPERFASSAAVGAYFGLTPSKYASGETDYTGHITKCGDKAVRALLCEAANALLTRVNRWSWLKRWGLEVLKRRGKMRAQVAVARRLAVIMHRMWLDGTEFRWQREPDVSAGAAA

SEQ ID NO: 378059 - protein, 415 aa, unidentified
MSLALPEALFFTGIDWAAETHAVCVMDAGGTIVAGFTIEHSADGIALLTGRLARYGTPGSMPVAIERPNGRLVDLLLEAGHPVVPVSPNAIKTWREGEVLSGAKSDAGDAAVIAEYLRLRQHRLRTAAPYSDETLALRTVVRSRGDLVEMRVAATNQLSALLEAHWPGARAIFADVESPISLKFLTRYPTPAAAAHLGEKRMAAFLVKHGYSGRRTAAELLARLRAAPAGTSRESLTEALRDAVLAAGMLAALNAAVKNLDRSVAAHLGEHPDGAIFTSLPRSGQVNAAQVLAEWGDCRQAYDGPDSVAALAGCTPVTSQSGKHRSVQFRWACNKRFRVAMTTFADNSRHASPWAAKTYSDARASGKDHPHAIRILARAWIRVIWPCWLEGIPYDPARHGAAAALARQTAQPIAA

SEQ ID NO: 378060 - protein, 306 aa, unidentified
MLTAEADKCKTKVVVNTAAGVQALLAWCAKHGAQPAQLHAILEPTGLYHEQAATALPQVRVSLVNPAQARDFAKALALRSKNDALDSYVLARYGQTLSPALWHPAPLHARQLRALLTRREALSKDLLRELNRKEKSQFSPSAPLVDGSIDKAIAFLREQIKQIERAIDQHIDNHPDLKQDCELLNSIPAIGPQAGNAILAVMHNRHIDSAQSLAAYLGVVPVQRQSGSSLNSCARLSKAGPSQVRATLYMAALVGTRHNPHIRALYQRLLKAGKSKKAALGAAMRKRCICASGSSKTASPTSPITP

SEQ ID NO: 378061 - protein, 342 aa, unidentified
METAVTIGLDLGKSVFQVHGVDAEGAVVVQRRLTRGKLLGFFAKQPPCLVGMEACAAAHHWGRELSKLGHAVRLMPPNYVKPYVKRQKNDAADAEAICEAVTRPHMRFVEIKTCEQQGTLVLHRVRLMLMRQRVQLSNAIRGHMAEYGLVAPVGRNGLQRLIAILGNPDDDRVPAMARASLAPLVCQFGLVNDQVLENDRRVRASARSTELGCRLMEVPGVGPVLASAMVATVPNPTVFKSGRNLAAWIGLVPRQNSSGGKEKLGGITKQGDRYLRQLLVAGALAVIRYAQRHGTKRPWLVHLLARRSPKIAAVALANKMARMIWAMMMTGQRYRDPVVVAA

SEQ ID NO: 378062 - protein, 341 aa, unidentified
MKQYVGLDISMEETSICVLDQNGGVTFEGCVPTNPEAIAKLLRQHAGNAERIVFETGALSNWLWHQLRALGFPVICLDARHAHAALSMRINKSDQNDARGLAEMARMGWYREAVVKGAESWKTRSMLAARTKLVNLRRDLDNQMRGLCKGLGIVLGRAGSTNLARKVNAVLADAPDLQDIFAPLLLAQSCLTEQIEKFDRQLLAMARGDQTVRRMLTVPGIGPLTALSFVVTIDDPTRFRHSADVGAYLGLTPRRYQSGEIDRTGRISKRGSHQVRTYLFEAANVLLTVVRRGSALKRWGNKLAKRIGAKKAKVAVARKMAVILHAIWTDGTEFQAETRAA

SEQ ID NO: 378063 - protein, 394 aa, unidentified
MLLEARIDAPTAIRTQIAAIFVSLELSRSNWLITSLSPGNGEKMSRHAVAAGNLPGLFGLFAELKRKALARTGKSYPIITIQEAGLDGFWIHRALQQEGIESHVVDAASIAAPRRRRRAKTDKIDGEALLRVLLAYKRGEPRVCAMAVAPSPEEEDRRRIGREREVLIGERISHVNRIKGLLFAQGISGYAPLRRDRRAQLAALSTGDGRALPQRVKLQIDRELDRLELLLTQLKAVEAERDALLAALTKVGDEKPQASHPLAMLLGVKGIGAEFAASLWLECFYRTFANRRQLAAYAGLAATPWQSGSIAHEQGVSKGGNPRVRTKMVQLAWLWLRHQPQSALARWFHEQGKRERKNWRKSAIVALARKLLVALWKYVSAGVVIEGAVLKGMV

SEQ ID NO: 378064 - protein, 358 aa, unidentified
MKYVGIDVHKKMCQAAILDEDGTLLDELRFPNDTDGIEEFAVKLTTLHDEVKAVVESTGNLWIPIHDRLEERGVDVALSNPSKTRLIAEAKVKTDKVDARTLAGLLRADMLFTCYVPGEELRSRRELLRHLLNLVKNRTEVKNRVHGLLDKHGLRMPGATPFSRDNIEWLRGLSLGFMDDAILRSDLAVLEAVDAQVTLIEEKIAVLAAEDRRVRLLMTMTGVGYFTAMLVVSEVGDVGRFRGDKEFASWMGLVPSVHQSGERTKIGGVSGPCNKRLRWALVESAQTAVRHDSRLGGMYERVSRRRGAGCAVVAVAHEMARIMYFMLVREEPYRGENRGLTERKLKNMGKKALDGLRN

SEQ ID NO: 378065 - protein, 332 aa, unidentified
MEILYTNCAGLDVHKKTVKVCLLTQPSSGQPHKEFRTYFTTTEELLKLSDWLKEQECTHIAFEATGVYWKPVFNLLESSFEVLVVNAQHIKAVPGRKTDIKDAEWIADLLAHGLLKASFIPSSPQRELRDLTRYRVRLTEEQEATPEIEADLASPQESPSSPPVALTWAEAVDLLCSIPGIGERAAIGILAEIGINMQQFPTAGYLASWAGVCPGHKESAGKRLSGKTRKGNPWLRCLLVQAAHSVSRQKQCYLAEQYRRLAKRRGTKRAAIAVAHSILVIAYHLLRNRTTYQEKGESFFEEQERQGAEKPLVRQLARLGYHVELQPAALAG

SEQ ID NO: 378066 - protein, 346 aa, unidentified
MNNHNKKCTIKVLGIDLAKQSFQLHGVDEQGKVVLRKNLSRNKLTSFVANLPPCLIGLEACGGAHHWVRVFKSLGHTVRMMAPQFVKPYVKSNKNDAVDAEAICEAVQRPNMRFVPEKSISQQDIQCIHRIRSQLIARRTAQANQIRGLLMEYGIIIPKGISYIRKVIPHILEDADNKLTSLLRELLNELYDEMVYLDERISSLENKLKTISHQNEDCQRLLTIPGIGLLTATALIAAIGNISVFRSGRELAAWLGLVPRQHSTGGMPTLMGISKRGDCYLRTLLIHGGRTVVRVAHLYTDKRNLWISELDKRRGKNISAVAVANKNARIAWALLSKKESYQVTAI

SEQ ID NO: 378067 - protein, 355 aa, unidentified
MNSEKYIGLDVHQATIVVAVTDSTGKLVMESILETEAATILQFFAGLRGNLAVTFEEGTWSAWLYDLLNPHVEKLVVCNPRKNALLKDGNKNDRIDARKLAELLRGNQLKPVYHGENGVRMLRELSRSYLAIVKDLSRVMNRLKAVYRSWAIPCAGRDVYYRRHRAQWLDKIREAGVRRRAERLYEQLDMLQHLRQEARRELLAESRKHAITARLRQIPYLGPIRSALAVALMQTPHRFRTKRQLWAYSGLALETRISAEYRMVEGQVRRSKKLLSIRGLNKDHNHDLKGLFKGAATMASVRPGPLQDFYQAALAKGIKPTMARLTLARKIAAITLTLWKKGESFDAKKLKSQAA

SEQ ID NO: 378068 - protein, 371 aa, unidentified
MAIGDRRPVSSMPEPVHHDQDDNAAGEVILGVDTHKDLHAAAVISPLGVLLSSETFPATEAGYGELLAWAGRFGPVRRAGVECTGSYGAALARHLRAAGIEVIEVNQPDKATRRRQGKTDTLDAESAARAVLSGRASATAKAGDGPVEMLRMFKLAKASAVKARTQAINQLKAVLVAADPTLRETLSGLSNVLLIRRCTQLDVDTPCDTTSAAAYTLRLLARRILALTSEIRKLEHQITTAVTSHASRLLTRRGIGPDNAAALLIAAGDNPDRLRSEASFAALCGVSPLEASSGRTSRRRLNRGGDRQANSALYRIALSRLRWDTRTRNYLARRITEGKTRREAIRCLKRYIAREIYQIITAPPETKPSTA

SEQ ID NO: 378069 - protein, 458 aa, unidentified
MPVGQKRKKDKKVQVPNLDHLEQINLNAAGLDIGAAEIWTCVPADRDEQPVRCFESFTAELHDLADWLQRCGIETVAMESTGVYWIPIYEILEARGLEVNLVNARHIKNVPGKKTEVLDCQWIQKLPTYGLLQASFRPEEQMCALRSYLRHRDNLIRYRSAHIQQRQKALHQMNLQLTKVISDITGQTGLQIIRAIVAGEHNPVTLAQYRDPRCRSSQSEIAKSLEGHYKAEHLFALQQALAGYDFYTQQIKVCDLEIEQKYKAFKPQVDLQAQPLPPPKKKSRRQATQPDYDLRSYLYQLSGVDLTPIDGIDVLTAQTILSEIGLDMSKWKTVKHFTSWLGLAPYNDISGGKVLKRKTKKTDNRANTAFRIAAQSAGRSQSALGGFYRRMRAKHGSAKATTATAHKIARIVYHLLKYRDQYIDPGQDYYQQQYQERVIKNLQRKAKELGMELVPTAA

SEQ ID NO: 378070 - protein, 351 aa, unidentified
MLIIGCDFHTRFQQIAMLDPTTGELVERRLEHETGEAEKFYASLPGPARVGVEATIGAQWFENVLSRYGHELWVGDAAEISAARVRKQKTDSRDALHILDLLVTNRFPRIWVPSPSERDVRQLLRHRHKLVRYRTSVMNQLHGLAMSQGLCRKKKLWSQRGRRELEALRLDPWASRRRQELLRLLDQLNPWIEDLDRAVQKEAERRPEAMHLMKQPGVGPITALAFVLTIGPVSRFQRSKQVVSYLGLNPREESSGGKQRLGSIRKQGNSMLRYLLVQAAQTASQSDPELRRYYQRLKFRRGFSGVAKVAIARKLAVRLYWKLREAAQSLPPARMQGSPSYPMVDARPSIS

SEQ ID NO: 378071 - protein, 408 aa, unidentified
MIYCGIDWAERTHDVALVDDTGQLLAKRHITDDAAGYRSLIDLLAEYGDTEETPIPVAIETSRGLLVAVLRAGQRKVFAINPMAAARYRDRHAVSRKKSDPGDALVLANILRTDMHAHRPLPNDSDLARAIAVLARAQQDAVWNRQQVANQLRSLLREYYPAALEAFAKWDNGLCRPEARELMKLAPTPAKAASLTRTQITAALKRAGRKRGIERLREAFRTDWARQPELVEDALGKQTLALLGQLTAACTAAADLAQAVDEAFPQHPDSEIILSFPGLGIHLAARVLAEIGDDRTRFADARGLKAYAGASPVTRASGKKSSITRQWVKNNRLNHAGYLWSFSAITASPGAKAHYRRRRDDHGDWHAAGQRNLFNRMLGQLHHCLKNRRLFDEHTAFPAPQAPALAAA

SEQ ID NO: 378072 - protein, 352 aa, unidentified
MARKRTLSTLDTSIAYEAVGLDLAKEDTAIAAFGPDHEGPYLIDRMPYDKLYELLADMAPTLVAMEPCSGAHQIAEQIQELGHEVMMISGRHVQAWVKDHCNGQKTDLNDAFAILNLAYDRWLTPIRGKTREECRLLALQASYRQLKGQRTKTMVHVKATLHAWGFPIRAGSFNQKALHELIDANREAFGDEVVETLHLMINRVHDLDHDIATVLKLLTEATQRDPRASLLRSIPGFGVLTTSRWCAVVGDIARFDTPKQTMAFIGLVPNNRITGHHTETSSGREARGQGKMSKRGDKMLRSLCILGAGALCLMVRNDRLPDCPFVASIKGRLHRLDLGSKCLFMSQQSWCA

SEQ ID NO: 378073 - protein, 367 aa, unidentified
MKKVSTAAVKTTKNFSQPKLTIGLDLGDRNSWYCVLDESGQIQLEQRVRTTATALREVFSEMPRSRIALEIGTHSPWISRLLSELGHEVIVANARKVRLIAESRKKDDRMDAQTLARLARIDPQLLSPVKHRSAQAQADLMMIRARAGLVRARTGLVNTARGLAKSYGERLRGCNVRNMNPEKAEGLSPELQSALEPLLAGIEVLSERIREYNERIEKLAQDSYPQVALLKQIKGVGTLISLTYMLTLEDPHRFRKSRDVGCYLGLQPGRRNSGQSEPQLHISKEGDPYLRTLLVQGAQHILGPFGVDCDLRRWGLKLAERGGRNGKKRAIVATARKLAVLLHHLWVSGEVYEPLHNSNRTTVAAAA

SEQ ID NO: 378074 - protein, 425 aa, unidentified
MNSISNKKINQVTDQTLVVGMDIAKKKHYACFVDERGRVLKKSFPVPQSREGLEWLYQCIVKAMEEFEKTEVIVGIEPTGHYWLNLAYFLDEKGIPLVMTNPMHVKRSKELDDNLPTKHDAKDALVIARLVKDGRFSYPRILKGMEAELRVGATFRSKLVEEQGAIRNQMIRWLDRYFPEFSQVFPSFGKMALAVLEYTPFPSDLAGKELEEVLALYRQSEGLQSPQKPKAKELMELAQHSIGVTEGQQMARIEIATLVRRYRQLEKEIEALTEQLIELVQTSVEYEWLKTVPGLGDATIVELLSEIGSFSHYQDPRQLIKLAGLTLREHSSGQHKGQKRISKRGRRRLRALLFRVMMPMIRHNEAFRQLHDYYTTRPDNPLRKKQSIVVLCGKLLKVLHAVCTKHQAFDAKRMMQDIFGLETAA

SEQ ID NO: 378075 - protein, 400 aa, unidentified
MISVGVDVSKGKSTVCILKPYGEVVSSPFEIHHVEKDMEDLDNLLSKLDGEVRIVMEATGIYHLPVVTFLHDKGYFVSVVNPFAMKKYAKDNSIRGAKTDRLDSIMIANYGIEKWFKLQRYEGTEETYAELKLLGRRYRYYMELHVKALQELTHVLDYVLPGIKKMFNSWNEANGKDKLSDFVERFWHFDLITSMSLEKFTEEYIAWAREKKYHRSRSKAEAVYELASSGIPTLSSSTPSTKMLVQEAVSVLRTVDSSLSLILTRMQELVKSLPEYEAVREMGGVGEVLAVKLIAEIGDVRRLHSAKALIAWAGIDPPAYESGQFIGSKRKITKRGSSTLRKVGYEVMRVLKSHPAPKDDAVYNYILKKESEGKSKKHAKIAGLNKFLRIYYARVTAVYQ

SEQ ID NO: 378076 - protein, 352 aa, unidentified
MLADEVDHVIGVDTHRDHHSAAVTTTAGAVAAQHTVGADSSGYAELLRFADGEAPGARAWAIEGTGSYGAGLTAFLAGRGERVVEIDRPKRPARRDGAKSDELDAIRAAREGLSREHLCQPRQRDWHEALRVLMATRHGAVTAQTRAIGSLKSLIVSAPDLLRCQLRGLATDQQLARCARLRICADHSLERRATTMALRATARRALALQAEARELETEIAALVADIAPDLLAEFGVGPITAAQILLSYSHHQRFRDESAFASHSGTSPIPASSGQTVRHRLNRSGDRKLNRALHVIVLTRVAHDPKTRAYVERRTAQGKTPREIRRCLKRYTARHLYRLLQTNPNLTPINPT

SEQ ID NO: 378077 - protein, 421 aa, unidentified
MSTPACAKFAAQIGLDWADTKHDFCLQPGRGGPREFGRFSHQPDEIDAWVQGLQARFGGPIAIALELARGPIVYALQKYDFIVLFPIDPSLLAKYRVAFKPSRAKDDPTDAELALELMLRYPERFHPLHSQSVAMRTLGYLVQQRRMLVDDRKRIVNRLCNALKQYFPQALDWFDHRDTPLFCDFLSRWPTLQQIKRSRVATLERFFHDHNVRRPALVTQRVDGVQRAIPLTEDAAVIQSFQLLTTTLVDQLRILLQAIARFDVAIAAVAPTLPDYKLFSVLPGSGPHLAPRLLTAFGEQRERFQNAGQLQRYSGVAPVTQRSGKKSWVHWRWQCPTFVRQTFIEWAAQTINKSFWAGTFYQQQRAKGCPHQVAVRALAFKWIRILYRCWVTRTPYDESRYLKALQLRGSPLLAGLRPKTT

SEQ ID NO: 378078 - protein, 366 aa, unidentified
MEHIAIDLGTRESQACVRSEGGEILEERRIATRPEKVRRYLEGRAKSRVIVETGAEAFWVAEIARECGHEVRVVPSMLAPSLGVGRRGQKSDQRDARVLSETSCRVEMPTVHIPSTETRRLQSRLGMRDALVRSRTKLVNVIKAYLRTIGERAPIRNAEKLIVQLREKQAHAAQHLEPLLETIEALNLSIEQFDEELEKLAAGDEVAKRLQTVPGVGVVTSLRYMATLDVASRFRNGAAVGSYVGLVPSEHSSGQSQRKGGITKAGSPSVRSVLVQAAWAAMRSRRHYNDPMVCWARAIARRRGMKIAVVALARKLAGILFAMWRDGTQYDALRAAAPSAELPAPPRRPAPSRATRRPLRLEPAAM

SEQ ID NO: 378079 - protein, 399 aa, unidentified
MDAFVGLDWGEQHHQVHALDAGGRTTLEVRVPHNRDGLEQLRLALAGLGEPARVGIAIERREGLLVEHLLAWGHAVYPVNPKVAARSREGYRAAPVKSDALDAYCLADLLRRQVDAWRPLRLPSETLAELAALVRDRERFVVEHRRLQHQLRATLETYYPAMTHLFSSIDRSITLAFLRRFPTPEAAGRLTEHRLALFLRREGYTGRTAPAVLLGRIREHPATPSAGTDRARVQGALALADLLEHVTAILARYDTAIADAVARHPDARVFAGLPGVGAVTVATLIAEIGEDRSRFPTPGSLLAEAGLAPVTRQSGSSRRVVFRYAANHHLRAIWNQWMLTAIRISPWTREAYDAARARGQSHNRAVRSIGARWGRILWRCWQDRIAYDPALDRRVALAA

SEQ ID NO: 378080 - protein, 423 aa, unidentified
MENTAARKRKQVPEGYLIIGIDPHKKRHAAVAITQDFTIRDKFKFDNTREGLETMLRRTRTEIVKADCRGVMFAIETGGHYWRNIAYFLDEQGTPFRFINQYTLKRRREGKDLNHKKNDYRDSEVAAQLLCTGEFTESTIPQGVYAELRTAHNAYRRLVKERTRITNLVKGLLDGLFPEFTQVFKDPCGLTSLSVLSACAIPGVIAGMMEDEFVAAIEAKHQGRLMRKKLRELHYKAKASIGITAGARSVSSEISFLVEKHELIRRHIRIIEGTLVNLVDETEEGKYLLSIRGLNYIAVAGLLAELGCFKSYRSAKQMIKMAGSNPTESESAGKRGAHTPMSKQGRPVLRYCAWTSVIPMLRFNSDFRAWAKQRRERPAHANPLNGREVVGAALNRLLRLSFAMVKNRTYYQVSKPELTLIAV

SEQ ID NO: 378081 - protein, 373 aa, unidentified
MRTHGGMALATMPQAERIVTVGVDTHKDTHAAAVVDEVGRPLASCQIPTTAGGYQQLVGWAEGFGAVARFGVEGTGAYGAGLARFLADRGYEVVEVDRPNRQLRRRRGKSDPVDAEAAARAALSGEAAGQPKARDGYVEMIRALRVARRSAIKAATQAANQLDSLVLTAPEQLRAKLRGLKPAELVAVAARLRPGAITSPLAATKLALCELARRYQALTAEIQRLDVELDRLVAKAAGKLVARKGVGTDVAGALLVAAGDNPDRLRSEASFASLCGSSPLDASSGRQQRHRLNRGGDRQANSALWRIVIVRMSCDQPTIDYVKRRIKEGKNKKEAIRCLKRYVAREVYHCLRDLEVLRPPATASDTPRPHHRT

SEQ ID NO: 378082 - protein, 416 aa, unidentified
MQVIRPICCGMDVHKDIIVATIAITNQDGLAEYKQRQFNSQNYSLYELKIWLKENNCFDVAMESTGKYWIPVFNVLEDEVKVCLAHPKYTKAIKGKKTDKKDSKWIVDLFRHDLIKSSFIPPKEIRQLRELSRYRIKLIGMRSSERLRYQNSMTVSNIGLASVLTDPFGKSATAIMKEAMASKTISEEKIKSLLKKSAKKKTEAVLKSLEGSHIETDQRLKMTIAMAHMEELDKHIEDVELEMAKRCIPYKNYIECLIKIPGISYISAMTIIAEIGVDMSQFETDKQLCCWAGLVPANNESANKKKSVRISKAGSYIKPLLVQCALSAIKSNSEPYYKIKYAYIKKRRGHKKAIVAIARMMMVATYHILLTGEVFNPSDLEEVHKPKTSKNKLTTESALAFLQAQGYDTSVLNLIV

SEQ ID NO: 378083 - protein, 410 aa, unidentified
MDIVHERCAGLDVHKRTVVAAARWPDDQGDRAERVRTFPTFTDGLCQLAEWLTGLGVSHVVMEATGVFWRPVWNRLEDAGFELLLVNARHVKIVPGRKTDVNDAQWLAHLLECGLLRGSFVPPRPIRQMRDLTRYRTRKIQALGQERQRVDKVLEDAGIKLSAVASDHLGVSGRAMIEALCAGERDPHRLAGLARGVLRAKHDQLTQALVGRFGEHHARQLRVMLGVVDDLGEVIAGLDTQIEAAMEPFAGQRELLCTIPGVARRTAEVMIAEIGPDMAVFPTAGHLASWAGLCPGANESGGKRRSARTRKADPWLRRALVQAAWAASRTHSRLGARFWGIARRRGDKKAAVAVAHSIIVIAWHLLTNNTNYDDLGHDFYTRRVDPERETRRLVARLEALGHTVDLAPAS

SEQ ID NO: 378084 - protein, 348 aa, unidentified
MTVYIGVDFHARQQTISYLTTEEGEIKRLQLDHAQPEEVRRFYAQFAGQRVVVGFESSGRAAWFEELLEELGCEIWIGHATAIRLFARRRQKNDRRDADLILDLLVRGDFPRIHRYSAESRAVLQQLRYRQRLVKMRTMLLNSLVFMAASRGVVLRSQLKTKRGLERLRQIDLPPALREQRDELCQLLLELKPKIDKVESSLAAKAEADLRVGRLRTQYGIGPLTGLCLAHTLEHPERFANPRKVTGYVGFDPVEDSSGERRRIGSISKQGSRLLRFLLVEAGQIAVRRDPELARVYQRVLVRRGHAKAKVAIGRRLLVRAFIMLRDEIDYAEFQRRGVAARSSRGIA

SEQ ID NO: 378085 - protein, 332 aa, unidentified
MENFYFIGVDVSKKKLDFCVMFEGKVVHEEETANHQNAIMALLHQFEEDYGIAGGQMLVCAEHTGQYTFPLACACKAVECKLWLENPAEIKYSSGVQRGKNDKVDAKRIAIYAKRFQDRVQYYERPTEDIERLKQLESERTLYVTDLAKYKGQMKDQKDYMPRKLYERKMKRLQTLMDDLEKAIQAITYEMDEVIASCPVLCRQRELLMSIDGVGRVVATNMIITTEAFTRFDDPRKFNCYAGVAPFSYSSGSSQHSKARVSHRADKVMKRLLHLAAVAVTHRIGGELKKYYERKVAEGKNKMSVINALRVKIVARMFAVIKRNEKYKPILS

SEQ ID NO: 378086 - protein, 427 aa, unidentified
MNETESNRVDEFRQFKSQIRGSREYLIVGLDIAKRKHHGFLGDANGKTILKGLIVENSAEGFGHLLSQVRFYMQRDGFSRVVFGLEPTSVYHKPLAEHLISQGHLVVYATNEAIKKNRSLIDGRWDKNDTKDSANVADLVAQGKCHYYDLPDQRLRDLRSLLLLRKRLKKQVHSCRVRIRNNLVAQYFPELDLFWNNAEAENLAIVRGYLDPARIRQLNCEQFIAQVSTHNGGLRQQRRLRHIWEAAGNSIGCRPGPAMALEAELLVASLKSIQEQLDHVEKATQRLAEGFEEYGYLKSIPGFGPYVSAMTLAAIGNPHRFENRAQLIRLAGFDLCASRSGEKSNTAVPVISKKGKADLRYALYQAALVASSLTSHFRSHYNRLLEGRQREKGIRTKMLVKIAAKMLVIAWTLMKRKEPFNPAHIQA

SEQ ID NO: 378087 - protein, 369 aa, unidentified
MEKDTTYVALDDSKRKIVAGILRPNDTAPELREIANDPQHIRRLFTRLQRERPVTACYEAGVSGYDLYRQLRALGVSCDVIAPALTPRRPGQRIKTDRRDAAKLVHLYRAGELTAIHVPDAVEEAGRDLVRCRDDIRRDVLRWRHRVLKLLARHGRLYLAGKNWSQAHWRWIREQRFDLPPLQRAFEASLFALEQALARQAELDKEIEALAETAPYREPVGWLRCFRGIDTLSAMILLVEVIDFQRFRRPRQLMAYLGLVPTEYSSGDTQRRGALTKAGNAHARRVLVEAAWHYRHRPTIGHALARRSHGQPPATVAQAWRAQQRLHRRYRHLVGHGKRPPVAVAAIARELVGFIWAAMTGHESRLQTA

SEQ ID NO: 378088 - protein, 371 aa, unidentified
MNTIVYVGMDVHKESYTLCCYCYDTDKVEYKQTIPSDYKLVLKYMESMRSRYEGEVSFVCGYEAGCLGYSLYHQLREHEVDCKILAPTTMAITNTSHVKTDKRDAANIARCLAFHTYSEVYVPDDEDNSVKEYIRMRDDQKLMLKKIKQQILAFVLRQGKKFEGGKTYWTVAHMKWLKSLELKGLDKETLSEYLLTYEYLTEKIERLDNRIEELASGEKYKEKVKNMSCFLGIKTHTALSMVVEIGDFNRFEKAPKFAGFLGLVPSENSSGDSTNRYSITKAGNSHLRRLMVEAAQSYSRGNVGHKSLALKARQKGCSGEVIAYADKANERLRRRFYKMTLNKGINRNVATTAIARELACFMWGMATGNIS

SEQ ID NO: 378089 - protein, 356 aa, unidentified
METAYDGRQIVGMDLHRRRSVLVRMTEDGRRLGTARITNSPQELRREIARAGKSPKVVLEATYGWYWAADTLAAAGAEVHLAHPLGVKAFTYRRVKNDERDSADLADLLRMGRLPEAWIAPHEVRDLRELTRYRQKLVRLRTSCKDQVHGVLAKLGVPVTCTDIFGTAGSAWLDGLRLPQPYAGKVTSLRHLTGELATEITMLSEVIASLLAGDRGCQAIQQLPGIGPVLAAVITAEIGDVTRFKNAGQLCSWAGLTPRHRESDTKVGRGHVTKQGSRLLRWALTEAIQRVPRDSVIGGVKAAIIARRGKEAKNIAKVAAARQLLTLVFYGMRDGQIRCLAKTPGNPPATQTARTA

SEQ ID NO: 378090 - protein, 336 aa, unidentified
MYCGIDLHSNNNFVAIQDEMYEDVVCRKLRNDLGAVLKFLEPYREELEAIAVESTFNWYWLVDGLKEAGYDMRLVNTTKASDYSGMKYTDDRHDARWIAHLLALGILPEGYIMPPQERGLRDLLRRRSYLVHQRTSLYLSVKTIFARSNCQKVTTHDIRSWDSETVRRMFDDPHVAESVVAMLPVVRVVTAQIKGIEKIALETGKLRDEFRFLLTAPGIGDILALTIMCETGDISRFRKVGNYGSYCRCVKSERFSNNKKKGKGNRKNGNKYLSWAYSEAAHHAKRFEPLAKRYFDRKKSHSHPMVAARALANKMARACYYVMRDQVPFDSSRTFC

SEQ ID NO: 378091 - protein, 428 aa, unidentified
MNSTSNNDHPHNDYAAFIAIDWADQKHAFCLQPAGQANKETGTLEQKPEVIGPWVAKLRERFGGRPLAVAVEQSRGALIHALLSYDFLVLYPIHPTTVAKFREAFKSSGAKSDPLDTEQILEILTKHLELLKPLNPDTEQTRLLARLVEDRRTAVELRTSHLQALQGGLKEYFPQAIELLNHNLRSRLAADFLRKWPTLEAFQQAKPSTIKKFLYGHNVRSPEVVEMVLRWATTAKALTTDPAIIESSRRLCQLHAQVIQTLNPIIEQYDQQIQTVFQDHPEVQLFNNLPGAGPALAPRLLAFFGTDRSRYEAAENAQSFCGIAPVTKSSGKTRVVYRRRACPKFDLQTFHEFARLSVAKCQWARNYVEYYLAKGKKYHTIIRALAFKWIRILFHCWQHRTPYNEEKYMKTLQQRGSIFATLHLEKKS

SEQ ID NO: 378092 - protein, 454 aa, unidentified
MRKPRVIPDEDHEVVYERVAAVDVAKASGVVCMRLPDPARPGRYSNQIWDNVPAARARITELGRELLRHQVQMVTLESTSDYWRIWYYVLESIGLAVQLVSASQARNLKGRPKTDKLDAMWLARLTQWGMLRPSFVPPAAIRQVRDFTRARTDLVHERTRVLQRLEKLLEDAMVKITSVVSDGMKAKSAVAMVAALVAGERDPRAIADLAKGSLRGKRDALAEALDGMFDSHHGVIAQALLDQVAFLDQRITQMEAGAIAALAQVEESWGVDADGETGPGRGTGPDSRVLAAVYRLAEIPGVSVWLAIVIIAEIGLNMALFPTPAHLVSWMGLCRSAAQSGTRRGKGKPKKGNSYARAAAGQAAIGAAGTATFLGERYARIARRRGGAIAQVAVARSIMIIVWHLLADPAARYRDLGPDWHATRINRDKKIRNHIRGLQALGLTVTVTDDEHAA

SEQ ID NO: 378093 - protein, 315 aa, unidentified
MSESLAQVAGIDISKDHLDVHLHPSGATRQVTNDKAGHKALLRWFSRLRVERIVFEATGPYHRLFERALTAAGLTFAKINPRQARRFAEATGRLAKTDRVDAAMLARLGALLQPEASVPKSDVLDELTELVAARRALVKDRTACLNRAKVLRIQLLKSQTLQRLRQIEAQIAAVDRLCLELVTSDQTLAERLVILPSIAGLGEATAVAILADMPELGEIEPKQAASLAGLAPMARQSGQWRGKSFIRGGRAHVRQALYMPALVAMRFNEPLKTRYEALIQAGKPPKIAITAIMRKLIVLANALLRDARPWTPAAP

SEQ ID NO: 378094 - protein, 306 aa, unidentified
MVKRFHGIDRHRRSSTVSVLNREGVEEKFFGSIRDFNEYVETLGWEDVVVMETGAGSFFWADKIEARGAQCFIIDPYRFRIIKDSWNKTDKRDSRNMSKALWVYMVTGEFGLPLVYKPSALIRELRKLYAQYQVLNKQIRMLKNNIQSVLADNGVVLPRLQKNHLLSVKRGKDVLKELDISEASRISIAMNLEILWHVLGKKEELIKEILRIGEPLKEEVDLLISIQGITPLTAMAFLADVGDVRRFKTLRKMSAYLGLVPKMRESGGFSQSGHINRASKVVDSDYTHSVSDPDYRCFALFQGLLR

SEQ ID NO: 378095 - protein, 313 aa, unidentified
MSQTNIPTMFAGLDVAKSSLQLHLANTFHSLTNDAKGHRQLLKLLRAWPTVQIICEATGGYEQPILQALHAAAISVSLIEAGRVRHFAKAKGLRAKTDPIDAAVLTQYGRAFQPATSPAPSTTQRQLSDLTARRRQLLDLKIIELNRADHYSDPFSQKQSRQLLALLEKQIAQCDEHINRLIQQDEQLKAKAQRLDAIPGVGPTVAAVVLAEMPELGQLSTGAAAALAGVAPYNDDSGNQTSPRHIAGGRKAVRCALYMAALSAVRHDRILKAFYLRLRSAGKKPKVALTACMRKLIVLMNRLLKNPNLLLAS

SEQ ID NO: 378096 - protein, 351 aa, unidentified
MVTVGIDPHKHVHIAVAVRGDGRPIGTPLTVKNDALLIITLLKWIRSITDGTATWAIEDGRGFARRLADGLLLAGQEVVWVPSRLTAAHRKLHAATGAKSDPVDATAAAHAAIATPDLDRHRIDEHVRELRVLVDYRADLIKRRTMVINQLKAQLHVWLDHTPQDLTRAKNLAMVTTLTSTAQLSPHVRRALAGMTAEIAALNRQIRDLDTTIRQLVSPLAPTLLQVTGISYNSAAVLIAEIGDITRFPSSARLARYTGCAPIPVYSAGQERHRLHRGGNRRLNSVLYTTAIVQKRFSPAAQQLLAHHGPAKGTRGARRILQRHLIDVIHRAMTADQATWQHHITRHHNAA

SEQ ID NO: 378097 - protein, 362 aa, unidentified
MATSLYEQIPQHSTSPVLHWIGMDVAKSSFDAAVVRAGQHYDAATFRDVPVHTFARTRAGVKACLAWLRSALAEGVRPEHTRVCMEATGNYSTQLATWLLEISPGITPAIVNPHYTAAFIKSLGLRAKTDSLEARALAFYGAERQPVPYEPLSRAQAELRELSRSRDHLVRQEVALKNHAAELTGASRDAEQTYRRLIRQLQSSIARIEQRILRLLTEHPKLGADVVQLQTIDGVGPVTSVTVVAELGDLRRFTHARQLSAFVGISPSIVQSGSSVHLRPKLCKRGNPRVRKVLFMAAMAAIQKPGILKDTYDRLLAQGKEPMLALGAIMRKLLVLMRAILINGTTYNPGLLPCSNGGIDCA

SEQ ID NO: 378098 - protein, 341 aa, unidentified
MKRFIGVDLHKNSFTVCYMQNKGEHGLKTFKVSPNDVEAFKATLTEQDEVAVESTGNTGYFAREVKGAVSRVRIINPIQFKIISESVKKTDEHDAITIARYLSKGLIPEVRMRSKEEAKLASLIGTRDKFVKLRTTLKNKIHNILNASGIVTTKEMFSGDKSLDKLLSMGLDQADLFEIRIIVDQIKSLNKSIDEINKELTDRGKKLPGHKNLTSITGIGDLSATILLNTIGNVDDFGDDKKLAAYFGIVPRVAVSNETSQYGKITKRGNKIARTALVQSTLIAIRYNHYLRRFYFKLKAKKGSGKAIIATARKLLTIVYRTLKNDWVFEDFNKFKLAVSV

SEQ ID NO: 378099 - protein, 350 aa, unidentified
MTISHYIGFDVHKKSISYCVKIADGTIVEEGKLRATRQALREWAGKRQQPWHGGMEATLFSGWIYDTLKPFAAKLEMGNPSMMKAIGAAKKKSDRLDARKIADLVRCNLLPACYVASVEMRELRRMLRYRNTVVAHAVGMKNRMSGLLMEVGAEYSKQHLHGKQYFTELLGRLEEVPESVKDMLRLSRSALEMFETTQRQLLNRLGKEPALVKRLELLRSIGGVGEVTSLTWALEVCDPQRFSSIGDAVSYCGLTSALDSSADKQQRGPISKQRNPHLQSVRIEAAKLAPRWNPQLAEVQQRELQRGNRNRATLAVARKLVAYLLAVDKSGKRFEVRNPPTQGEEEGKVA

SEQ ID NO: 378100 - protein, 402 aa, unidentified
MNFFVGLDWASQAHAVCVLDATGQVCWQGSVEHSAEGLAELRRRLARFGPPAALPVAIERPSGLVVDTLLDAGHPVVPIHPNALKASRPRYSAAGGKSDPGDAFILGDLLRTDGHRFRPLQPLADDTRALRALVRSRDDLVVARVALANQLRALLDRFWPGAAAIFADVDSPIALAFLTRYPTPHSAERLGEKRLARFLGQHAYCGRRPVPELLARLRSAPISQTGDLETEASGEVVRALVAVLLPLVAQIQQLSAAIAAALPQHPDGPLLQSLPRSGSVNAAQILAELGDDRTRFPSNEQLAAEAGVAPVTRESGKHRAVSFRWACNKRLRLALTTFADNSRHASPWAAAIYAAARRRGCHHPHAIRVLARAWVRVLWRCWQDRRPYDVMLHCAAQRAAAA

SEQ ID NO: 378101 - protein, 370 aa, unidentified
MLENVAVRGSRYREPLTRRAAPVSPLASTAGELWDRCRSHARPNSRQTSIARTRQVTVAQIICGVDVSSISLEACIGPTGPARAFSNTAEGIAELLAFCRQQGVDLVAMEASGGYEKQPFALLWAQGLPVALLNPRAVRRFAEGMGLLEKTDRIDARVIAWFAAVKDSRPCDPASAQQQRLKALVTRLRQLTELQVAQRNQRLLVREETVLTSFSALLALVAAQIRILEADIAALIAADPLWQKLDQAFRSIKGVADRTVARLMAELPEIGMASNKAVSKLAGLAPLARDSGKHQGKRPVRGGRREVRAILFVVAGVVRRYDLDFAAFHQRLSAAGKPKKVIRVALAHKLLVRLNAKARQVRNEFVPLPA

SEQ ID NO: 378102 - protein, 337 aa, unidentified
MDNYIGIDVAKATLQIYIPKNDLDVEVSNSESGLKVLYSKLKKQYKKDIDDIVFVYESTGSYSTYLEQFSESKSIKCFEVGAYQSSSFAKVIKNRNKTDIVDARMLSQMYILATDEDIKIPSRDVKAHQIRSYIKYYQSLVKEEIRSKNYLEAATYNLEDKFILKQVEKKIKNIKKEQVDIISKTMEIINSNEKYKKAYANITSIKGVGEKSGIILLYLFLRYPNASRQHITALCGLDPIQRSSGTSVQHKERISKQGLSLVRAILFMPTMTAILHNQEMKLIYDRLVDRGKPKPLAQIAVMRKIILLAHSLYKNDERYDEYRYLNFTQITVDKDME

SEQ ID NO: 378103 - protein, 347 aa, unidentified
MSHSTPESDRIMIGIDPHKASWTAAAVGPGLQPLATVRVPVGPHGYRDLRRFVARWPDAMWAIEGAGGLGAPLAARLSADGIAAVDVPAKLAARVRVLSTGHGRKNDDADAISVAVAALSAAGLRTVTVDEEVTALRALVEHRDDVVKTRTQTVNRLHVLLTQLIPAGAPRQLTADTAAQLLRTVRPRSLGPRTLRRLAADLITEIRRLDRRITVANTEIADAVQASRSTLSELRGIGNLTTGKILARVGDVHRFRSAAAFASYTGTAPIEVSSGDVVRHRLSRAGDRQLNCCLHTMAITQLQRDSPGRVYYLRKRADGKSHKEALRCLKRRLSDVVYRCLIRDADP

SEQ ID NO: 378104 - protein, 382 aa, unidentified
MTTDLLGQPAACRDDAKIFVSLELSKANWVIVLFRPSRGKFSHHATPGGDAVALIRFLHEQQRLEEARLGRSVQIVSCYEAGRDAFWLDRALRAAGIANHVFDPASLLVSRRAKQVKTDRIDGEGLLRTLMALSRGEPKVVSVVRVPSVAAEDERRLTRERERLVRERTQHRNRITALLFTQGIGGIILDRPGWTDGLGELRTGDGRALPPRLTAELRREAVRLELVGDQIKAVEAEMANTAKAAAPQAVVNRLRQLRAIGPVFSAVLAGEVFSRDFADRRAIAAFVGLAPVPWRSGRVDCDQGIAKTGNGRARSTMIELAWRWLMYQPQSALSQWFRARVGTTKGRIRRIAIVALARKLLVALWRFVVNGVVPEGAILRHI

SEQ ID NO: 378105 - protein, 319 aa, unidentified
MDKLTRPAIIGIDVSRDWLDIHCLPGGQRQRMPNTEEGHAQLANLAAKLNALVCFEATGGQEWRLWSALDAAAIATRQLPPAQIKAFAASRGTRAKTDRIDAELIARFMAFRPDAGRNLPHEKIRVLRGLTSKRGQLVETRKRLLAQIKAHGKLGSADMFEAMDGEFKDLLNRQIAKLEARIEQVIATDEGLAKTADNLRSVPGIGPVASTMLIAEMPELGQITGGQAAALTGLAPIAHDSGAMRGKRAIAGGRRLLRHVMFQAALVASHHNPVLKTFADRLRNAGKPHKVVITAVARKLVTIVNALVKSGQNWSAQTL

SEQ ID NO: 378106 - protein, 318 aa, unidentified
MNEIAEHTHFVGIDVSMDWLDVHVLPGNLRCRVANGSRGIWSLIGKLSDYDEPLVVMEASGGFEARALETISSAGIAVAMINPRQVRSFARALGILAKTDRIDAFAIARYAEAVRPEPRMAAHRELGEIKALMTRRRQLSDMLTEEKDRRCRVTSALVRRRLLVSMRNLKKEIELIDREIDRLVVADEVMREREALLRSTPGVGKIVARTLIAFVPELGALSRRQIASLVGVAPFNRDSGTMKGRRTIWGGRANARAVLYMGALVAARRNPILSAFYDQLIARGKRPKVALVACMRKLLTILNAMMRNGTPWEEPVRT

SEQ ID NO: 378107 - protein, 344 aa, unidentified
MGVTVGIDSHKSSLAVAVLDELGRSLGIREFANNPTEHENLRRWIASHGDARLFGVEGSGNFGAALTRHLLESGEDVREVPAFLSHRERKKAPARGKSDPQDALAIARVAARGDGLSAPQRTEMFQDLKLLSEHRDQLVRARTQLINRTHKNLVVSHPGYEQRIPKLTTKRSLQSAMAMLRNDRSVRADLIRDRIAEIRRVNDKIATVEKQLASKVIESGTGLTQLRGIGFIAAAKILGEVGDLRRLRSKAAFAMFTGTAPLEASSGRTKRHRLNRGGNRQLNYALHMMAIARRRGDLDTKAYMVRQQAAGKSDKEAMRCLKRQLSNVVFRQLITEAKGSIPGV

SEQ ID NO: 378108 - protein, 312 aa, unidentified
MATSSYIGIDVSKARLDVAELGGRVWQVDNTPDGIARLVQQMAEMQPELIVVEATGGYQRSIVDALFHAGISVAMVNPTRVRQFARACGLLAKTDKLDAQVLADFGQRVQPKRYEGKTEAEKQLSALLVRRKQLEAMLKAEQNRLRTISPSLRGSVERIIAILREEKKRLEEQIHEFLKEQKAWQAQAEILGSAPGVGPVTTATLLADLPELGKMDRKKIAALVGVAPMNYDSGKKRGYRKTKGGRTAVRSVLYMSTLVATRHNPLIQTQYQQLLKRGKLKKVALTACMRKFLTILNAMLRDKQPFRCASNA

SEQ ID NO: 378109 - protein, 395 aa, unidentified
MILVGIDIGKYSHHFALVRKEDGEVLREPSEINNDLEGFDQLISSFRKYQKKDILIGMEDTGHYHFAILKHLLDKQYTVALINPITTDLTRKMNGSITKTDDLDSLTICDVLSSNKKDKKPYRITKINRFDMYEQRCLTRHHHNLKEELNVYSNRLQKCIDVVFPEYNSLFKSKYGIVYMNVLKKYGSADNIAKADIRSLRKCFEINRRGKRISLTAEKLKETAKNSIGISSSSEVIQIRHLIGQIELIYAQLKEIDKKIEEFSRQINSPILSIPGISHFSGTSILSELGDISNFTNPRQVIKFSGTAPLTYESSQFKAQHTKITKKGSKYLRKTLYQIILPVIQHNKVFGDYYALKLSQGKSHRCAQGHCVRKLLRVIYHLLKTGQQFDPALLR

SEQ ID NO: 378110 - protein, 309 aa, unidentified
MKEQLVYCGVDIAKSHLDAAIGKEKRRLPNDATGHRQFIKWIKQIEAQVQVICEPSGGYERRLIQALVGAQIKVSLVQANRVRQFARAAGILAKTDTIDARVLCAFGEAMRPQTFSASALEQERLRELESQRRHLTHLLVMEQNRAARVSEVLVRRLNRRLIHQIKKQIEQLDLLIQEHIEASPELSHKASKLTAISGVGERTAALLLAQMPELGQLNRREVAALVGVAPFNRDSGKWRGKRAIFGGRRFVRHGLYMAALVAARHNPILRPFYQRLRVAGKPAKLALTATMRKLLIVLNSALKPQSIYP

SEQ ID NO: 378111 - protein, 373 aa, unidentified
MPNVEKDFAKGKPIYVGIDVHKRGWVITVFCEGEELYHATVVPDPAALVRLLKRFEASEVHTVYEAGPTGYWLHDALGEAGFDSMVTPPSLVPSVGGRVKTDRRDSRKLASMLAGGFLKRLHVLTPEERAHRQLLRTRNQIERHRRQTQNQIKSLLLFHGKRVPATVRERWSEAYLHWIETLEWDHQALKTSIDAMLTMYRNLSEQYKQLTHEIELMALTDKYRERAALLTHIPGIGLFTAMAILIELQDVERFRRADQLASYLGLTPSQHSSGERIRMGHITRCGNYQVRTRLVESSWTLIRYDAGAKATYERIKHQTGSGRKAITAIARRLALRVRRVLLDKAPYKLNAGGQLATGRDKMREARRLVLRRG

SEQ ID NO: 378112 - protein, 345 aa, unidentified
MLYVGLDLSRKRLDWQALDEAGRRVAIGAVPPDRDGLVQLAHRLGDAGVVAVIESMSGARFVHDELERSGWDVRIADALKARGLAPLACKTDTIDCWVLAELARRDLIPEIWLPDPAVRAERERARFRLHLVRHRVSLKNRVHAILFQHGLPNGHSDLFGAAGRRMLERLRLPEPWQSTVACSLALIDTLNVEISACERELERLGADHRYIPLLVTCPGIGRVLGYTIASEIGEISRFHSPRKLVGYTGLGPRVDQSGERDRRGPIRKNGPTYLRWALVEAAHAGLRWHQPYRELADRMRARHGKHRGTNIAVVEVARRQTEAIWHMLTNNQPFAPAGAASRLAA

SEQ ID NO: 378113 - protein, 465 aa, unidentified
MPNTRKKHARLQRPPDPTAGLPPLNRHAAGIDVGSAEHYVAVPPDRSPEPVRRFASFTADLHALADWLHACHIDTVVMESTGVYWIPLFQILEARGFAVHLVNARHAKNLPGRNTDIADCQWLQKLHTFGLLNSSFRPTDDICVLRSYLRQRDTLISAAATCIQHRQKALTEMNVQLANVISDISGVTGLAILRALLAGERDPAMLAAFKDYRIKASTHTIAKSLEGNWREELLFHLRQSLELYECYQQKIAECDTQIEAHLLTFDRKIEGSAPPLPTPKRRPKKARRNEPHFDLHTQLYRISGVDLTRIDGIEVLTAQTLIAEIGLDMSRWKSEKHFASWLGLCPDNRISGGKVLTRGTRDVVNRAADALRLAAQNLLHSKSALGANYRRLRARLGAPKAITAMAHKLARLVYRMLKFGQQYVDKGIEHYEARFRQQRLQWLQRQARELNLQLVPNQPVPSPVS

SEQ ID NO: 378114 - protein, 347 aa, unidentified
MRFYTKQHPFYCGIDLHARTMYLCILNQAGETLLHRNMPATPEALLKAITPYHEQIVVAAECMFTWYWLADLCADHGIPFVLGHALYMKAIHGGKAKNDKIDAHKIAVLLRGGMLPQAYVYPAEMRATRDLLRRRMHLARKRGELLAHVQNTNSQYNLPAIGKKIAYKANRDGVAERFADPAVQKSIEVDLALIGYYDELLRDVELSIVKTAKHHDAQTLYLLQTVPGIGKILSLVLLYEIHDIARFPRVQDFASYCRLVKCAKESAGKRSGTSGSKIGNAHLKWAFSEAAVLFLRDNPAAQKLLVRLEKKHSKGKALTILAHKLARAVYYMLKRQTAFDLDTFLQG

SEQ ID NO: 378115 - protein, 341 aa, unidentified
MTLVMGMDQHRAQISAEWIDTITGEISRARVAPADRAGVRKFLARFKGEGLEVALEATTGWRFLAEELERIEAEVHLAEVVQTSGLKGRGKRPKTDWADARHLRELLLIGRLPESWIAPAHLLDLRARVRCRHTLLHQRTEWQQRMQAVLYHHGAPHARGLLKLENRTRLAALKLPAAAHEQLTIALEMIDAIDLQLSPFDLSLREYARRQTGCRTLTDQIYGVGELTSVTILAELGDTRRFQNSRDAVRYGGLDITVRESDQRRAAGHLSRQGPPALRWALYEAAQAARRPSSPDRAYYEQLAERIGGNRACIAISRKLLKRSYHLLRALGDQGLEPVAT

SEQ ID NO: 378116 - protein, 343 aa, unidentified
MEAYVGKQFVGIDLHRRRTVIVRTTEAGEVLEAVRIVNDVQRLASVMARAGDCPEVVLEATYGWYWAVDALQAGGANVHLAHPLGVKAFEYRRVKNDFRDAQDLADLLRMGRLPEAWIAPPPTRELRELVRHRAKLVGLRSHCKAEVHAVLAKCGVQVLMSDLFGVAGTELLDGLDLPAPYAARIASLRRVMDDLDFEINAFAGIIRGRMAQEPGYTAVQNIPGIGPTLGAVLVAEIGDITRFASASKLTCWAGLTPKHHESDTHVRRGRITKQGSRLVRWAAIESVKTISKTSEVGVLRERVGDRRGRNIGSVAAARLQLEFVFYALRDGHVRALEHLPRVA

SEQ ID NO: 378117 - protein, 359 aa, unidentified
MKPEMSILGIDIAKRVFHAVGMDERGKIVLRKRLSRHDLMPFLAKLPAVRIGMEACGGAHYWARRFREHGHEVKLMAPQFVKPYVKSNKNDSRDAEAIAEAVTRPTRRFVPIKDVDQQDIQALHRVRERLIGERTALINEVHGLMHEYGIVMPKGVSKFRQAVVEKLESEKDKLTALSQEMFWKLVEEFAALEKQLAYYQEKLDTLATTHPECQRLMTIPGIGPLTATALVAAVSDASAFKNGRQFAAWLGLVPRQHSTGGKERLLGISKRGDSYLRKLLVHGARTTIRWVGRQTDRRSQWMRQLVERRGTNRTAVAVANKNARIVWALLTSHQDYQLTTGSGEQTRVFAAANGLLVSL

SEQ ID NO: 378118 - protein, 339 aa, unidentified
MEVTTVGLDLGKDVFQAHGITADGTVVFNRTIRRRQLLKFFETLPSCLIGIEACGSAHHWARELTAIGHDVRLMPAAYVKPYVKRGKTDAVDAEAICEAVTRPTMRFVAVKSKEQQALLSIHRVRQLIVRQKTQMLNVIRGLLREFGHVIGNGPVAAMRFIKAFETDDCPDIPDVAKSMLKTLCDQVVALDDRVTFYNKLIEYHARIDERAKRIRTVPGVGPITASAIVATIGDGKQFKNGREFAAWLGLTPLNRSSGGKERLGRISKKGDRYLRRLLVIGMTSQVQRARGYPERVHPWIMQLLERKPVRLATVAMANKAARIIWAILTKDTYYRQAAA

SEQ ID NO: 378119 - protein, 366 aa, unidentified
MLRKAELSGEADSENNLGGSSETMYYIGLDVHKRTISYCVKDAAGHVHQEGKIRSTRCELDAWIKTLPQPRMIAMEATIFTGWIYDHLRSHAEKIKVAHPLMLRAIALAKKKNDKIDTAKIADCLRCDFLPECHMASTEIRDRRRMLRYRNLLVKQMVQMKNRVSGLLLETGVSYNKRRLHKVGYFADLMSTNEEVNESIRPLLKLSREHIVRAQRLDYGLVSSLERDPLLAERLKRLRTVPGVGPITALTWALEIGDFTRFRSIKQAISYCGLCGDERSSADKVMRMPLSKQRNKHIQRVLVEAAKLAPRECHELAMVRDRELQKGNPNRATLAVARKMVGYLLAVERRKQDFVVAEKFKYTAAA

SEQ ID NO: 378120 - protein, 386 aa, unidentified
MQKLNDLSRCLTPLEPDSTLIAVVEMSLSSWLVAGIVPGVERQPLKKLAVDESVLLKLLHRWREEAEKAGYMIKRIAVAFEAGRDGFWLARWLRARDIEVHVIHTSSVAVSREHRRAKTDRLDSELLKRAFLGWLRGERDHCKMVAIPTIKDEDGKRPNRERESLVGEQSRIINRIKATLVRLGIRGFNPKLKKAAERLEGLRTPEGELIPPNTLSELYRDMERRRLVRDQIRQIESARLDRLEHAPGEGAHAMVRLLARVMGIGIETADMLVQEVLSRNLRDRRAVARYAGLTGSPDESGKKRREKGLARSGNARVRRGMIQLAWRFLLFQKDSALAQWFRARTENARGTRKTMIVALARKLLIALWRLVREDVMPDGVILRPAQ

SEQ ID NO: 378121 - protein, 344 aa, unidentified
MEITTIGLDLAKNVFQVHTINRASNVVVMKTLRRSQMRGFFERIDPCLVGIEACGTSHHWAREITRLGHEVRLMPPAYVKPYVKRGKTDASDAEAICEAVTRPTMRYVAIKSPEQQAALALHRTRDLFVKQRTQLVNMIRGLLAEFGIEIPRGIGQALTLAKRIAAGEVPDTPRLAAKVIAGLAGQALDLQARLREIELELLAWLRSNDIARRLATIPGIGTVCATALAASVTDPHQFRSGRQFAAWLGLTPLQHSSGGKERQGRISKMGDKYLRRLLVVGMTSLIRRAKYKPEAVDPWLADLLSRKPARLVTVALANKAARVVWAIMVRGGVYRMPAGVTTPA

SEQ ID NO: 378122 - protein, 401 aa, unidentified
MLNCGVDWASDHHDVCIVDADGTVRWRKRIGHDPEGIALLRAAIADGEPDPAQVAVAVETSHGLLVSALVEAGYVVYPINPKAAERFRDRRKPSGGKNDRLDAEVLAQAVRTDRASLRPLLPDSPRAVEIATLARDRHALVREQTRLTNQLRSALNEYFPAALIAFDLGADSTLAFLARYPTPAAAAKLSAFQIASFLKARRANRDLAAKAAAAKEAFRAPALRARPEIARAKARLVRVRCAQLQALRPELSAYERELDRLLKTHPEGELFRSLPGLGVILASRVLAGTGDNPARFASAAGLCAYAGTAPMLIQSGKRAVVKARHACPKEFRDAVQQWADQARRRSPWAAEFYRRHRERGHNHNESLRALGNRLLELLFDLRRRGLRYDEAVHAANIRWAA

SEQ ID NO: 378123 - protein, 411 aa, unidentified
MEQIYERVAGCDVHRDEVTVCVRTPGPRGGVHKDKARFKTTTAGLIELADWCGERAVELVAMEATGVYWKPVYHALEDRFRVWLCNAYHVKNVPGRKTDMSDADWLADVAAHGMVRPSFVPPAPIRELRELTRYRKKQIDTRASELARLEKVLQDAGIKLTSVASKVLTQSGRAMIQALIEGEGDPRALAELAKGKLRPKIPELTAALSGHFGAHHALVADRVLAHLDFLDDAIAQLSRQIAERVAEGYQPVLDLLLPIPGLQHTTVEVIIAETGADMSRFPTPGQLASWAGLCPGNYESAGKRRKVSTTAGNQWLRRTLIESARAAARTKNSYFGAQYQQIARRRGPNNAAVAVAHSLLDVIWHALSTGEVFTDPGADYFTTRQDPEHRTRRLVNQLERLGYTVELTQTA

SEQ ID NO: 378124 - protein, 360 aa, unidentified
MIVQGTSVGLDVHALSVVAHAVDEETGKVARARLCPDHGEVLGWLHQLRAPVRVTYEAGPTGFGLARAITEAGMQCLVAAPSKLQRPAGDRIKTDARDAAHLARLLRLGEITAVTVPSREMEAVRDLVRAREDARADLMRVRHRLSKLLLRQGIVYSGGTPWTCVHEQWLRRHRFDDIHLKAAFDHSFDAVLVATAARDRLDEQIMVVAASPRFADPVNRLGCLRGISALTGLALTVEIGDWSRFSGSSIGAYVGLVPCEYSSGNSRVQGSITKAGNTHVRRLLIESAWHHRKSYSTSGPTLRARWAKVDPALRARGHAGNRRLNKRWRSFTERGKNPLVANVAIARELAGWCWSLATMQ

SEQ ID NO: 378125 - protein, 343 aa, unidentified
MKDITVLGIDLAKNVFQLHGTDAAGKCRLKKRLSREKLVEFMAQLPRCLVGIEACGGSHHWARTFQQMGHEVKMMAPQFVKPYIGANKNDQNDAAGINEAVTRPTMKFVPIKQIEQQDVLLMHRCRELLIKQQTALSNQVRGLLGEYGIVIPQGLRHVRALPEVIDKNKNSLTDRAVEIFTRLHEQFKKLEEQVNVYNNEVEHNSNEDIRCKEIQKIKGIGPISASAIVATIGDPHVFKNGREVSAWLGLVPKQHSSGEKIRLSGITKRGDSYVRTLLIHGARSFVRGCEKKTDGLSLWVADKKRRGGCNKASVALANKNARIIWAMLATGEVYRAQSEPTIS

SEQ ID NO: 378126 - protein, 309 aa, unidentified
MEQQIKFEQIIKCGCGLDVHQKTVVATVRRSDVDFETKEFNTYTRSLKLLREWCKTEGVTHIAMESTGIYWKPVFNILEEDFEIILVNARHIKNVPGHKTDKKDSRWISKLLLSGLLKGSFIPPRDIRELRDLVRYKKKIVGQIGSEKNRVIKTLEDANIKLSSVFSDVSGASASKMILDIIEGKEDIDGLMEHIHGKVQAPRPDIRQALEGTLTDHHRFMLKLIKESIDEKEKIIEKLDKQIEIAAKQYTLEIDLLQTIPGVGKESAVRIVSEIGADMSKFPNEHHLSSWAGMSPGNNESAGKKKVPE

SEQ ID NO: 378127 - protein, 405 aa, unidentified
MNAVGIDVSKGKSTVTIRKPGDVVLMSPCDIPHTQSAINDLIKQIKSLEGKTKVCMEHTGRYYEPVATWLSDAGIFVSAVNPILIRDFGDDSLRTPKTDKADSKKIARYTLDRWAKLKQYGIMDKTRNQLKTMNRQFGFYMAQKTAMKNNLIALIDQTYPGANDFFDSPARNDGSQKWVDFIHTYWHVDCVRSKSLNAFTEHYQNWCKRKNYNFSAEKAAKIYQISSDLIAVFPKNDITKMLIWQAVALLNTASKTVESLRSKMNELASTLPEYPVVMDMNGVGATLGPHLIAEIGDVSRFTHREALTAFAGVDPGKNDSGKHIQNSVRTSKKGSPYLRKALFQIMDSLIKRSPVDDPVYAFMDKKRSEGKPYYVYMTAGANKFLRIYYGRVREYLSNLSNNETI

SEQ ID NO: 378128 - protein, 318 aa, unidentified
MTDPLFIGIDVSRDTLEIGSTAAAESWCYANQSAGIEALCVELTALAPALVVLEATGGYEFEAACALQANGLAVAVVNPRQARDFARAVGALAKTDSLDARMLAQFARVLHQHPQRERFIKPLADTELQRLQALVLRRRQLVAMLTSERQRLRISHASARPSIEITIEFLKQQIDGIELECAEHVRTHHQALAQALGSIKGVGMATLATLLAELPELGKLCRRRIAALVGVAPLNRDSGLMRGQRAIWGGRADVRRALYMATLVAVRFNPVFKAFYQRLLAAGKPKKVALVAAMRKMLTILNAIAKSGQHWNESLHSS

SEQ ID NO: 378129 - protein, 363 aa, unidentified
MDTNIITNPKKSSVSFIGQTVYLGIDVHKKNWSVTVYLGGIFFQTFHQESKSSILANYLKVHFPGANYKACYEAGFCGFSVQREISSLGIDCIVVNPADVPQTNKGNLSKTDASDSKRLALALSKGMLNPIHIPDRITEADRQLIRYRKKIQVQLQGRRRSLKSIFHIAGISIPVEYDKPYWTANFVKWLRSIILAETSLNKTIQLIVDDVEIFRKRLLETNKLIRELSASERYSQMYTVLSSAPGIGIITAMTMLTEIGNIERFDNFARFNSFIGLCPSEFSSGEDIRKGGMTPRNHSAIRSLLIEAAWIAIRIDPALALKFQELIVTRTKKRAIVVIARKLLSRIYCIWTKKQEYEKGILK

SEQ ID NO: 378130 - protein, 318 aa, unidentified
MRIKECDLQARQQTLAMLDTGTGEVVNRTLPHEGESVREFYSTLPGPVRVGIEATGSMKWFLQLMQELGIDCQVGHPATIRAAEPRRQKHDQRDAGLLLKLLVENRFPSIWQPSQELLDLRGLLLHRHQWVRLRTRIQNALQAIALANGLRRGSSLWSESGQRAIASLPLATHTAQRRSELQAMYAGFEAEIEQLKQQVLQQAGPRPTAGLLMTHPGVGPITALATDVFLGDPKRFSNGKALASYIGIIPREHSSGGRQRLGGLSKQGNPLLRLLWCEAAAHAVRRDPELRRFYRRKLVQKGLGKARVAAARKLGPGN

SEQ ID NO: 378131 - protein, 384 aa, unidentified
MDVLLYCCCGLDVHRDMIEACIQRGIDREPEIIRRTFGTRKAELQNLTKWLEEYDCFTVAMESTGVYWMPVYETLETKTRYLENLWVVNANHMRNLPGRKSDVADAEWIATLLRHGLLEKSFVPPIAIRDLRECSRLHRIFVQERARYVNRLEKFLQAHGFKFSSVMSDILSVTGRKFLEVLKDTGELTMQDVERNGRRLKKSAEEVASAVCGSLTKAEQRLLGQLLRKVDSCQEDVRSILEDMRLLSSHYQEELAIIDSVPGFDEESAMEIIAEISAEPPEYFSSAERLCSWAGVVPRNDESAGKVKSRKTMHGNRFVKAILCQAAWAAVRTRHSPFHEWFWSHRPKLGQKKAIIAVARKLLKLIYHLLNTRQRYRPPLVAAV

SEQ ID NO: 378132 - protein, 404 aa, unidentified
MQQRTAGIDLASEEHRLVVVDADGSDREERRYAHTEDGIEALVRRLVALEVARVAIERPNGLVVDRLLDAGIAVVAVHPNQLAASRDRYRAGGGKSDGFDAYVLAELARTDMHRFQLLVPDSDETKALRALTRTREDLVEQRVALANQLGAQLDAFWPGARRVFADLDSPISLAFLERYPSPADARTLGAKRLTGFLARNGYCGRKTPADLLTRLRSAPEGRTGEAELEARRAIVLALVAALKPLGEQIRLLTSQIAGALRAHEDGGIFLSLFRDPKSVVTAAELLAEIGDARDRHPTSASLEAIAGQAPVAVQSGKKKVACFRWACNKNLRAAVSVLADSSRHHNPWAADIYQRARARGHDHPHAIRILGRAWLRVIWRIWQDRQPYNPDRHGSLNRLLAVEG

SEQ ID NO: 378133 - protein, 359 aa, unidentified
MTPNICLTSYAPQDYNIFIGLDVDKNSFSFTVKDHTTMQRSKKIPSQPEALYNYIQNNYPNQKVICAYEAGPTGLHLHDYLTDKQLPCLVVPPISIPHAPNERVKNNRIDSIKIAEELRCGKLKFIRVPPEAYRELRHLVGIREQYAQSRRAAKQRIKALLLCAYLYPSLKDIEQNWSNHYIKQLQQIDCSFAVRQRLDMLLMDLDYARKQTLLILRQLKTFCEQHPGINQYMKYLDSIPGIGFITAVTVLARIGDPQYLKNPRELAAFIGLVPREHSTGDHVFRGSITHLGCRTLRSLLVEAAWVAIRHNVQLKEFYCRIRNKHHPLVGSNKAIVAVARKLTQIIYRVLKEQRMYMAH

SEQ ID NO: 378134 - protein, 337 aa, unidentified
MRFIGVDLHSNSWTACYLAADGKEELRTFSFSELAQFEASLESTDEVAVEATGNTRHFVKSIRNLVSKVVVVNPNQFEVIRKSVKKTDRHDARTLAKFLSKEMLPEARLKQPEHAQLNSVAHTRDKLIKLRTTLINKIHALHVAAGIKSKKTSFSSVKGLKAALACSWDELTRVELDVIVSQISSLNEGIKRLDRQLAEYGRRLVGHRNLTSIKGVGDKSAAVLLSVIGDVSDFAGEDKLASYFGLVPRVANSNETVHHGRITKRGSKLGRTTLVQCTLVAARYSPYLKNFYERIKQKKGAGKAIIATARKFLGIIYRTLKYNWVFADFPNFVLAED

SEQ ID NO: 378135 - protein, 441 aa, unidentified
MSHGRALSRGDRRRNERLARLRSVVRRDFAVVAVDLASAKQAAVVTDHDSMVLGRRMFTGNTWVIDDILDWAEPIAAKAGYAGVVVGCEPTGHRWKPLLDRSRARGLELVCVNPMLVHRGREEEDFTRDRSDFKDATIIAKRVAELRCYVPYVMEGHWCRLRHLGARRADQLVAVGSARQRLRDLLECSWPAVLSAAADPLDALTWRAAMAVSTDPGRIVAMGFGAFADAVREQLPRWGGTRRNLRILRAIFDAAHAPGGVETERAAACERAAYALEDWHYALDQVTDVEHRMVAVLDALDLYELVTTITGLSVVGAAAILAETGDPARFDCARTWAKHAGLCPRANESGNFHGSTKVSRRGRPGLRLAAWRALWGALRHNPVYAARYTHLTTRADNPLCDGQARAAIAAALLRQLFVVVTRRVAWDPAIAAGTGVVPQAA

SEQ ID NO: 378136 - protein, 345 aa, unidentified
MTNVSRIGLDLAKNVFQVHGLDGSGNVVVRKQLRRSQVEPFFAKLSPVIVGIEACGSAHHWGRVLGKLGHDVRMMSPAYVKPYVKRNKTDGRDAEAICEAMSRPTMRFVPVKTPEAQAVQVLHGTRRLLVRQRTMSGNGLRSRMAEFGIVAAQGLKGLHALMQLLDDPATPLPDLARMALQMLARQWETQNAQICKLEAEIVRAATSDADARRLMKIPGVGPLGATAVQAAVPDASAFKSARNFSAWIGFPPRQFGTGGKQRSGAMSKQGNRELRRLLILGATAYLRHEIARGPRDPWLRAMLARRPFKVVAVALAAKNARAIWAMLVSGESYRPRPYGVAALAA

SEQ ID NO: 378137 - protein, 346 aa, unidentified
MEQIIRIGMDTSKHIFQLHGVDAAEQPVLRKRLGRKAMLAFLAKLPSTVVAIEACGAAHHLARELGKAGHTVKLIAPQLVKPYVPRNKNDGRDAEGLCEAASRPRMRFVPVKTVEQQAALMLLGVRDQLVARRTQLSNTIRGYAAEFGLIEAKGLDKIAALLAAIAHDESVPVLARELFTTLARDYAQVQVELKAIEAKLVAWHRTNALSRRLAQIPGVGPVTAAALVMKAPDPHAFRSGRLFAAWLGLTPKDHSTAGKARLGKITRAGDESLRRLLVVGATSVVKQAKGKHKRGSGWLLELLERKTPKLAAVALANKMARIAWKLMTTGESYDSTRTDTRVASAA

SEQ ID NO: 378138 - protein, 403 aa, unidentified
MIFVGDDWAEQHHDVYLMDEAGRRLASRRLPEGLAGIRQLHELIAAHAEEPDQAVIGIETDRGLWVAALIAAGYQLYAVNPLAVARYRDRHHVSGAKSDASDAKLLADLVRTDRHNHRLIAGDSADAEAIKVLARAHQSLIWARNRHTNALRNALHEYYPAALVAFEDLAHGDTLGVLDRAPTPQQGAHLPLGTIQSALKRGGRQRNIAARARQIQAALRSEQLVAPAPVTAAFAATTRAAVGIIAELNRQISELEATLAEHFEKHPDADIYLSQPGLGVILGARVLGEFGDDPNRYTDAKSRKNYAGTSPLTVASGRKRAVLARHVRNRRLYDAIDQWAFCATSSSPGARAFYDQHRAAGDTHHQALRALGNRLVGILHGCLRHHTVYDEHTAWDHRTQAAA

SEQ ID NO: 378139 - protein, 374 aa, unidentified
MKKNSSAGNVTAVTAEGKASASELRLTVGLDLGDRRSRYCVLDQNGIVIQEESVPSTRDGLKRIPGAAAGSRIIIEVGAQSSWISRYLKELGFDVIVANARKVAMISKSTRKNDRMDAQTLARLGRVDPALLSPIRHRGEQSQRDLAVIRIRAEMVEQRTALINCARGTAKAMGERLPVRESDHFGVDMLAGDKFSKALQQILKPLLTMIEHLSQQIAVYDEQIEAMAKQYPQVKVLTQLYGVGNLIGLTYLLTLEDPGRFPVSRDVGPYLGLVPKQRDSGNSQPQMHITKEGDRYLRKLLVQAAQCMLKKTAPETDLKRWAEGHFRPGDKQGKKKTVVGLARRIAVLLHKLWANGEVYDPNYQQKHKARAKAA

SEQ ID NO: 378140 - protein, 344 aa, unidentified
MSGAYEGRQIVGMDLHRRRSVLVRMTETGQHLETVRISNDPDYLREVMTRAGEAPDVVLEATYGWYWAADTLAELGAQVHLAHPLGVKMFALRRVKNDQRDAADLADLLRMGRLPEAWIAPPATRELRGWVRHRAKLVGLRSNLKCQVHAVLAAAGVAVSMSDLFGASGRQLLAATRLSVESRSRIDSLNRLITALDFEIDLYTRLVAGRLRADPGYRTVQTIPGVGAVLGAVFVAEIGDITRFARPQQLASWAGLTPKHHESDTTVHRGRITKQGSRLVRWAAVEAVQRVPAHTRFGQRRDRIAQRRGRNIGVVAAARDLITLVFYGLRDHHIRCLPSGTGAA

SEQ ID NO: 378141 - protein, 407 aa, unidentified
MEVLHPRCAGLDVHAGSVAACVRIALGTEVTYEHRTVSTTTRGLLEWDEWLTRPRCTHVAMEATGVYWKPVWHVLEEHVMLVLANAMHIRTVPGRKSDMNDATWIADLLAHGLIRSSFVPPAPIQALRDLTRTRKQLVGEMARHTLRIQKTLEDANLKLTQVMSDILGTSGRAILEALIAGETDAETLADLTRGRLKAPRRTLVEALHGHVPDHHRFLLQLHLAQIESVTAAITAIEARIGDALGPFRAAVSLLTTMPGLSDTTARVLIAEIGTDMTRFPSVGHLISWAGLCPRLDESAGKRRSTRTRKSAQWLKPTLVNAAWAATRKKDGYLQAQFLRLKSRRGAKKAILAVASSMLTAASYMLRDGVEYHDLGGQYFAQRDKDRVTQRLLQRLRDLGVVVEVKAA

SEQ ID NO: 378142 - protein, 325 aa, unidentified
MEAKKLCCGIDVSHTTLDVCYQNNLGELFHLRVGNNNKGFATVLEHTGPDYHFVMEATGVYYIRLAFYLHHQSCKLSVVNALSIKRYIQMHLERNKSDKKDAAWICRYAIEQQPPYWEMPDSAYFESKQLYNAIREYTEQIKRFNNQLHSLKLLPVPSKDTIKSLEKVKQQLAKEIINLEVKLETLLQSWQPAQLKSISSIKGVGKRATAMLIVFTQGFKNTHSHRQLISFAGLSPTEYSSGSSIQSKPRIYKRGGKNLRDVLYMCSMNAIKTNTACKTLYERLRANGKTGKQALIAVCNKLLKQVFAVVKNNSLYQPNYCSAKP

SEQ ID NO: 378143 - protein, 319 aa, unidentified
MSKYSMVCAGIDVGKHKLDVACGGRSERLQVDNTADGHRKLSAWLGRQRVKRVGVEATGGYEQAVVVQLRHAGFEVIVFQPAQVRAYARFHLQLAKNDKIDAALIAACTSDTKKVFAPPDPRLAPWAQRLSFIDQITEDIVRLKTRCESCRDERIRRYWREDIARLKKLQKSELKALVAEIRQHRDLAERLDLIASVDGIGLPTAVVILVRMPEIGRISREQVAALAGLAPFDADSGQQHGARHIKGGRARLRRSLYAAALPAALRWNTRLIPLYRRLMAAGKEHKAALIACARKLLIYANTVVERGTPWVREQASLRP

SEQ ID NO: 378144 - protein, 323 aa, unidentified
MNHKVGKDNTVARFIGIDVSKQWLDVACLPERETRRYGNDCAGLEQLCTWIVPLAPELIVMEATGGFETNAATALAAGGLALAVVNPKHVRDFARAFGILAKTDRIDALVLAGFAQKVHPPVRPLPDEERRELIDLVDRRRQLVTMRAEEKTRLTQATPAARQDIKEHIEWLNERLRRLDIDLTAKLRSSSLWKTKEQILTSAPGVGRVTVATLVARLPELGTLNRRAIAALTGVAPFARDSGQHRGRRMIWGGRADVRNVLYMATVTAARSNPVIRSFYLRLKQAGKPAKVALTACMRKLLTILNTMVRNNQPWQIPPTQTI

SEQ ID NO: 378145 - protein, 316 aa, unidentified
MRKKEVFVGIDVAKEELEVAVFPRADTETWPNTEEGILRLVDHLKSLCPTLVVLEATGGLEMPCVGALAAEGLPVVVMNPRQIRDFAKATGRLAKTDRIDARTIARFAEAVRPEIRELKTEEMQELTALGLRRRQIIQMITSEKNRLATASKWPREDIKEHISWLEKRLSDVNSELNKAIRTSPVWREKDDLLRSVPGVGPVLSATLLSQLPELGSLNRKQIAALVGVAPLNRDSGQFRGKRCVWGGRASVRSVLYMAALVATRFNPAIAVFYHRLRIAGKEHKVALTACMRKLLTILNAMARDRTHWSPVPLRES

SEQ ID NO: 378146 - protein, 338 aa, unidentified
MFYVGLDIHAKQITVCVLDGDGKVYQRCHVRQVDQMMRFLETLPGPCQACYEASTGYGMYFECLSKVAQRVVVAHPGLLRLIFRSKQKNDRRDAEKLAKLLYVDQVPAVHVPSADVRVWREIINFRRRLIEKRTRAKNGLRGLLRSLGIQAPPKAGLWTKRGMAWLRQLEFASPMHAMKRDLLIGEIEGFSAQLRRVEKELARYSAGSVAVQILRSIPGVGPRTAEAVAAFIDNPHRFPNSKRIGAYFGLVPSQDQSGSRNRLGHITREGSATVRKLLVEAVWQASRRSPTVRAYLERVQRGEKDRRKIAIVATSHYLVRVMWSMLKNGTLWQETVAA

SEQ ID NO: 378147 - protein, 348 aa, unidentified
MRFYTQQHKCYCGIDLRARSMYICILDQEGNTLLHKNFKTDPESFLRAIQPYREDIVVAVERMFVWRWLADLCNREAISFVLGHALYMKAIHGGKSKNDKIDSRKIAVLLRGGTLPTAYVYPEAMRATRDLLRRRNHLAHKRTELLAHIQNTNSQYNLPDFEKKLSIKSNRVGVAERFPDPSVQKSVEVNLQLMELDDRLLNDLELSIVKQAKGHDVRSFYLLRSLPGIGKILSLVILYDVQDINRFDRVQDFVSYCRLVKCPRESGGKKFGSKNSKIGNAHLKWAFSEAACLFLRGNEPAQSCHERLVNKHGKGKALSIIAHKIGRAVYFMLKRKEPFNMDIFMTCA

SEQ ID NO: 378148 - protein, 347 aa, unidentified
MEVHAIGIDLGKTLFHLVGVDGCGNVVVRKRCSRTQLLRYTANLRVQRIGMEACSGSHFLGRALREQGHDARLMPAQYVKPYVKTNKSDYIDAEAVAEAVQRPTMRFVPIKTEEQLDLQAVHRVRERWVMRRTAVINQIRGLLLERGVTLSKGRSHLEQALPQILEDANLKLSDSFRVLLAQLKLELEQLTARIEQMDSVIQHTVKENEACQRLTTIPGVGPVTATALVAAIGNGSGFRKGRDLAAWVGMVPREYSTGGKQKLLGISKRGNNYLRRLFVHGARTVMQHRAKQSPGLSSWLAQLLARTHQNVAIVALANKLVRMAWAVLCKNEVYRSPVLATSSLGRA

SEQ ID NO: 378149 - protein, 357 aa, unidentified
MAQRKGINFMGQNIYIGIDVHSKTWSVTIITESGYKQKYSQPSSAKALFEHLKKHYPQGNYKAVYESGFSGFSTYYALEELGINCMVIHAADVPTTQYENVMKSDPVDSEKLAKALKSGTLKGIYVRTKETMDDRSLVRLRKVIQRQLAGYKSRVKHLLYTNGVELPERFEHRSSHWSNIFMEWLKNDVELLSSTRNSLDLLLEQVTLFRKNLLKATRMVRNLSKKEEYRKRYECLLSIPGIGTVTALCLLTEIDDISRFRNERDFASYLGLIPTSHSSGAKVTNGEKTFRGNKHLGPLIVESSWVTIRYDRAMASAYGEYRKRMNGPDAIIRIARKMSNRILSVLKSEKKYEYDRC

SEQ ID NO: 378150 - protein, 411 aa, unidentified
MASLLQKALPAETLVVAIDPGKVWNRVLLASGERGLIGEPFSLPTLREGLDELARLIAGSGAVGEPLIAIEATGSLHGPWTVELERRFPGRVRVLAPSETQAARAQLGSRRFKSDDRDCAALVWLARQGLGRRPDQPQLAALLGTVRHRRQLVSELKVLRQRLHGQLNALCPGLSAPQGHGRTLDLLRPSGRAVLACAAAFAGRAPSVRSLLARAPGRLTRANAEYWAQRWRGCLPPPADAELRAERLRLDLERLDALTRALATVDGHTAILLAATQGQVLTSLPGVAVVRAAAFACHSLPIERFPTAEHLYSATGLAPASYESASVSRRGGISRQGLPDHRDALMAIAWGLSQASPAFRQRAHELRARGFRPLQVRVALARHACRLCHALLRSQQPYDETRYRHARRCGR

SEQ ID NO: 378151 - protein, 332 aa, unidentified
MENFYFIGVDVSKKKLDFCVMFEGKVVHEEETSNNQGAIMSLLHHLEEDYGIASGQMLVCAEHTGQYTFPLACACKAVECKLWLENAAEIKYSSGVQRGKNDRVDAKRIAIYASRFQDKVQYYERPTEDIERLKQLESERTLYVTDLAKYKGQMKDQKEYMPKSLYERKMKRLQALMDDLEEVIQSITDEMDEVIASCPVLFRQRELLMSIDGVGRVVATNMIIATEAFTRFGDPRKFNCYAGVAPFSYSSGSSLHSKARVSHRADKVMKRLLHLAAVAVTHRIGGELKKYYERKVAEGKNKMSVINALRAKIVARMFAVIKRNERYKPILS

SEQ ID NO: 378152 - protein, 345 aa, unidentified
MKSKTKKTLYCGVDLHSNNAMYVVTDQTDKVVFKKRIPNQLPVIVSALKPFKSKLVTVAVESTYNWYWLVDGLMDQGYPVVLANPAAIDQYDGIKDANDLTDAAFLARLARLNILPTGYIYPKEERPVRDLLRRRTLLVRQRTATKLSLQNMFMRQAALNINWRKIRRLTREQRVDVLGDNEFLSFVTESQIELIEVFNKKILQFETKALEHAELKPEFELLLSIPGVGLILALTIMLETGTIDRFKKVGDFTSYCRCVRANKQSNGKSKGRNNSKNGNPHLAWTFVEVVHHAIRTSPQAKKFYDRKKSKRNGTLATKALGAKWSKGAYYVMKRQEPFDLKRLFS

SEQ ID NO: 378153 - protein, 420 aa, unidentified
MRNAGIHANSLLEVRRMYNAVGIDVSKGKSTVAVLQPGGTVIRKPFDVSHTSQNLNELADYLSSLDGTTKIVMECTGRYHEPMIKALSEAGLFISIVNPHLIKNFGNNSLRKVKSDPADARKIARYTLDNWTELRQYSGMDNTRTQLKTLNSQFSFFMKQKVAAKANLIALLDNTYPGVNKLFDSPTREDGSEKWVDYAYSFWHADCVRKIGLKAFTERYMSFCKKHHYIFQQDKPEKLFNASKELVAVFPKEKTYKLLIQQSIQQLNLASEHVERLRREMNELASTLPEYSTVMGIYGVGKTYGPQLIAEIGDVSRFTHREALTAFAGVDPGVDESGQHKSKSNRASKVGSARLRKTLFQIMTTLLQNAPEDDPVYRFLNKKRSQGKPYYVYMTAGANKFLRIYYGKVKECLRNLEQTE

SEQ ID NO: 378154 - protein, 416 aa, unidentified
MNAAGIDVSSRKSMVAILRPFGEVVKLPFEVCHSAEDLSALAQQLKSIEGETRVVMEHTGRYYESIAKVLHEAGLYVSVVNPLLIKEYGANSLRRVKTDKADAMKIARYALDNWADLRDYTPMDTIRYNLKTLNRQFQLASKQRTASSNNLIALLDQSFPGIRKCFDSPVRSDGTQKWVDFAHAFWHVDCVRKQSLNAFSERYRKWCKRHGYFFKQANAEEVYTLAKNAVVLVPKSDVTKVLIQEAANQLTSISRSVETYRTEMERLASMLPEYPVVMQMYGVGKSFGPQLMAEIGDVRRFERKQALVAFAGIDPMPNQSGEKNIRSNKSSKRGSPYLRKTLFNIMSIYLKCAPQDEPIFQFLDRKRTEGKPYYVYMTAAGNKFLRRYYAQVRDYLATLENLPPVDMESTGLQHTT

SEQ ID NO: 378155 - protein, 341 aa, unidentified
MSINPGLVQTDNLHGNNVFLSLIDGGGREVYRRRVKANLTAVNEALDPYWPRIEALGVESTFNWYWLVDGLQAQGRDVRLGNPAKMTPYEGIKNTDDHTDARWLAEQLRIGVFPSSYIYPRAIRGVRDALRRRQLFVRQRIQAMLSLEGLMVRYGLEAPGTYALKKWTLREIEATGLEPFVQLQLRTLLGALQDSERRVKEIEATVKTFLQPIAPFGRIQQVPGIGEILGMTIVLESGDFARFANAGCYASYCRTVQSRRESNGKKKGENNRRNGNPHLAWAFIEAATFAPRFEPQIQSWCDRKKRQRNSVVARKALACKLAKAVWHVMNGKDFDMRMLCG

SEQ ID NO: 378156 - protein, 337 aa, unidentified
MKVVRIGLDIAKTVFQVHGVDVHGKTVLKKTLSRGEVLSFFANTPVSLIGIEACAGSHYWARELIKLGHDARLMAAQFVSPYRKSGKNDANDAEAICEAVGRPNMRFVPVKSEEAQAVLAVHRARTLTVSERTALVNQVRGLLGEFGIVVGQGIAQARRLLADIGAGGRQLPILARETIGELHDRLRTLDERILAYDRKISALAKACEPAQRLMAIEGVGPVTATALVASVGNASAFKSGRQFAAWLGLTPRQNSSGGKTKLGGISKRGDVTLRTLLIHGTRSVLRLTTGKTDRKSVWAEALKERSCANVAAVALAAKNARIIWAMLSRGTEYQVAS

SEQ ID NO: 378157 - protein, 387 aa, unidentified
MYYVGIDIAKLNHFASVVSSDGEVLVKPFKFTNDNDGFCTLLSALASYDRSSLIIGLESTAHYADNLVEFLVSKRYQVCVINPIQTSTMRKNNIRKTKTDKVDTLVIARTLIAQPHRFFSQEDIDLMHLKNLGRFRQKNIKERTRLKIQLTAYVDRVFPELQYFFKSGLHQKTIYALLKEAPTPELVASMHLTHLAHLLEVSSHGHFNKEQAKELRILAQKSVGSSDRALSLQVTQSVEQIELLDRQITDVESEMTEIMLGLDSVIMTIPGIGYVNGGMILGEIGDIHRFSKPCQLLAFAGLDPSVYQSGNFNASHTRMSKRGSRVLRYALINAAHNVVKNNNTFKAYYDAKMAESRNHYNALGHCAGKLVRILFKMLTDDVAFNLE

SEQ ID NO: 378158 - protein, 465 aa, unidentified
MTPRRGKGFRTSQALEDLAVTQRHAAGIDVHAAVHFVAVAPADVPAGFVNPEPRLPAGVRKFGANTGDLEALAAWLQACGVRTVAMEATGVYWIPLYELLASRGVDVILVDPRQTKHAPGRPKSDVLDCQWIRRLHSYGLLTASFRPADEIVVWRGFQRQREMLVRYAAQHVQHLQKALEEMNVKLTEVVSDVVGQTGLKIIKDIVRGVRDPQQLAKHRHERCRATVAEIAAALQGNWRKEHLFALKQALEMYEFYQRQLRACDHEIEACLRSFVDKSGGAALPPGPRRQKPRRHEPRFGARALLFRMAGVDLTVIEGISDTTALVLLSELGLDLSRFPTEKNFVSWLGLCPQHRGSAGKIRSRHVRRGANRAARALRMAAQGCHHAKNALGAFYRRIQARRGGAKAVVATARKIAERVYRLLKYGHEYVRQAEQAYAEAYRQRTLQGLARKAASLGYKLVAAAE

SEQ ID NO: 378159 - protein, 350 aa, unidentified
MRRPKEKLIAGIDLHGNNVMIGVMNQEGKRIAHRKLDCDLKDVTEFLEPMKSQLQSMAVESTFNWYWLLDGLRERGYPIDLANPAKIEQYNGLKHVADKDDAFHLADLQRLNILPKAHVYDPQLRPVRDLLRRRTNLVHQRTALILSFKSLYARTTGKTLPAYEAKTMDPKEAPKLYEHPANQLVAQIQAEHIQALEESISRIEKAVLACAQEIPLYAKLTTIPGIGRILGMTITMEVGDIKRFKTDGDFASYCRMVDARRLSNGKVKADNNQKCGNRYLAWVFVEAANFSRRYDENCRRWYDRKASRTSKVVATKALGCKLAKAAWHVMANETDYDASRMFPELANKKK

SEQ ID NO: 378160 - protein, 327 aa, unidentified
MKLPHVIGADPSKASIDLFCHGFQSHLKIKNDMLGFKEMLQWLIQQKITLGNVLIVMEHTGLYSYHFESFLFEQRISFSKVPALAIKRSLGMIRGKNDRIDAQRIARYGCEKMDTLKLESPANADLARLQILHSTRERLVKQRSSLMCAVKEYRIILPKEDPVIADQLALIDTFTRQIKKIEQQINLMIKQQSLDNTYQLLTSVKGVGPVVAVATIIKTKNFTAFKNARKFSCYTGSAPFEHSSGTSIKKKNRISHLADKPMKTLLTQAAKTAIQHDKELKAFYERRLTMGKSKKSTINVVRNKIIYRMFAVIKRQTPFIIQYSKTA

SEQ ID NO: 378161 - protein, 412 aa, unidentified
MDTMYRCCAGLDVHKETVAACVRRVDGSGRVAKEVRTFGTTTGALLQLLDWLTAEGVQAAAMESTGVFWKPIWNILEGAVKVILVNARHIKNVPGRKTDVKDCDWIAQLLQHGLLRASFVPERPQRELRDLTRQRSQLTAEQSRVSNRIHKTLEDANIKLGAVATDILGVSGREMIRALIGGQEDPNQLAELARRRLRAKLPALREALRGHLTDHHRFMLRQLMEHLDYLDRQIAAFDQRIEELMRPFQEAIARLMTMPGVGLLTARNVLAEIGTDMSRFPTDQHLASWAAMCPGNRESAGKRQSGHTRHGNRWLRTALVQAAWAASHSRNTYLSAQYRRLAGRRGKKRAIVAVGHTMLVMMYHMLREGVDYQELGHDYLDKLQPLRLTTYLVKRLESLGHQVKLTPVDQAA

SEQ ID NO: 378162 - protein, 342 aa, unidentified
MKFYCGIDLSARDCHVCVIDEQLKIVVQQKLRNELVKICQLLGPYKAKLKIVVESTFNWYWLIDGLQAEGFDVVLAHTLGLYLITGAKVKTDRRDAYSLAKLLLVGAVPVAYIYPVETRPVRDLLRRRMHLVQVRAGEYGSLRRLLLRQGILSSKQQEIKTATEAELEQWFEHPLVRLHASQELRRIELYSQQIGELEKTILALAQTAPSYELLLQLPGVGQTIALTILYEVGELTRFANVKVFSSYCRVVPGIAQSGNVSRRGRASKQGNHYLKAAFSQAAVHAVRCYPKVRRYYERQLKRHRGRGRQMICYNIIAHKLAQAAFHVLKEQTEYREELLFGR

SEQ ID NO: 378163 - protein, 351 aa, unidentified
MKKRGLRRKRGRLTMDHVAIDLGGRESQICVREADGTIVEECRRATRGLAEYLRRRPPSRVILETCAEAFAVADQALLSGHQVRVVPATLVRSLGVGARKTKTDARDARVLSEVSCRIDLPSVHVPSALSRRRKTLCGMREALVAARTSLVNTVRGWLRTAAAGPLRTGAVETFVERVRVRIAESERPRYVERQLETVEMLNRQIGEADDELAALAHKDEECRRLMTVPGVGPVTAIRFAAAVDEIGRFASAHQLESYLGLVPGESSSGDRVHRTSITKAGPPRLRRTLIQAAWSARRAGGVHPMVLWALEVEKRRGRRIATVALARKIAGILYALLRDGSRYDARRGAAM

SEQ ID NO: 378164 - protein, 427 aa, unidentified
MTKEAQKQQEFGAYIGLDWADRTHVISLRSADSNKVERYQIKHTPEALAEWVNSLQQRFPGQRVAVALEQSRGAVVHALMGYDFLVLFPVNPKTLAKYREAFSPSGAKDDPTDADLLLELVTLHRDKLRAWVPDDELTRAITLLVEYRRQLVDTQTGLSNQLTSLLKLYFPQALAWAGELTTVQACDFLQHWPTLAQVQQVAPTKLRQFYIAHGCRKAEVIEQRLQEIKVSQPLTRDLAVITASVAMVQATISQLRPVLEAIAGMEKQIAELFAQHDDHDLFSSFPGAGPVFAPRLLAAMGADRGRFAAASEVQQLSGIAPVIERSGKSCWVHRRWACPKFLRQSFHEFAGQSIRWSAWARAFYDQQRQRGNGHHAAVRSLAYRWIRIIYRCWQLRVPYCEETYCRALQRRQSPLARVLSLQTRKEG

SEQ ID NO: 378165 - protein, 262 aa, unidentified
MAVVVGVDIAKRSFDLAVLQSNGKYRTKGKLSNDQAGFAVFADWLQQHAEPGAWIVMEATGIYHESLAGHFHALGYRIAVLNPAQIARYAQSQLQRSKTDKLDAKLIATYGQRHEDSLRAWHPEPVSIRTLRALTRRLEDLQSLRQMELNRLEISPEKVQDSIRAVLQRLDEQIAWTLEQIKRHIDDDPDLRGKRDLLVSIDGIADKTAALILAELGDIDRFADARAVTAFAGLNPRLQESGLARGHTCISRMGSVRLRSAL

SEQ ID NO: 378166 - protein, 427 aa, unidentified
MRVLYDRVAAIDVHKDMIKVAVRVPGKKRGTRTTDVLEYRTFYGVLQAMARELRGRGVTHVVMEASGVYTEPVYYALTELDFTEVLVVNPAHVKALKGHKTDAKDAVRLLDLYECGAVMRGSYIPSPDLKEVRDLVRYRVKTVQARTSEIQRLQKTLESAGIKLDSVVSDITGMSSTAMIEALISGERRSEVLADLALGRMRTAGKLADLSMALAGRFTGHHALMCRLHLDRISMFDDAVRGLDAKISPLAARYAAEAELLATIPGFGDVVVAGWLGAIGPAPHQHFATAERLASWVTVCPGNYISARKSRSGRTGDGGNYIKPLLVQAAWAAIRVPGRLQARFHRLVRKFGGPKNKGAKKRAIIAIAHTLLKIAYTILKTGKPYCEPGADFYTRRDSAQAREDYLLRQLRKLRPGCVITITPAEAA

SEQ ID NO: 378167 - protein, 454 aa, unidentified
MQLWCGIDWAENHHDVSVVDETGTQLARMRIDDTVAGFSQLMSMLAEQQRSSAGPITVAIETAKGLLPAALRAAGVPLVAINPLAVSRYRDRHSPSRAKSDAGDALVLANILRTDPHSHRPLPSDSELARSIHVLARAHQDAIWDRMQIASKLRSVLRQYYPAFLAAFPDLGSKEARATLHLAPSPARGQLVRKSALTAALRRAGRTRGIPAAVAAIHAALHCEQLRQPPLVEAAMAEHASALLLALDTAVVSVARLEESLTTAFGQHPDAGIITSFPGLGTILGARILAEIGDDRTRFATARGLKAFAGTAPITRASGMKTIVTRRVVRNKRLGQAAYLWALPMIAHSPAAHAHFTARREHGDSYSAAARNLTNRGIGMLHHCLRTGQHYDETKAFPGHPNQRVTPDRPLAGQAYQETGAHPHPAPGHNPARPVTSFAPPATQACRKTEAQPA

SEQ ID NO: 378168 - protein, 360 aa, unidentified
MSHSNEIVDSSRIVIVGVDTHKHIHVAVALNALGARLASCSASADRAGYLELVTWARSLGTVEAFGIEGTGSYGVGLASFVRRHAIRVVEVSHCDRRKRRNNGKSDTIDAETAARSVLSGTATAVPKTADGAAEMVRQIKIARDSAVKARSATIITLKTLIVNASDALRESLDLLTDKKLIDHCAVLVPGDILDPTASAKHSLRALAARWLALAAEIRTHDDVLDAITQAAAPTLREAFGIGADSAAEMMIVAGDNPTRVRSEAAFAKLCGACPIPASSGLTHRHRLFRGGHRQANAALYRIVTVRMRWHQPTLDYVARRTAQGLTKKDIIRCLKRFVAREIYNALITDHRSRAAVTSAA

SEQ ID NO: 378169 - protein, 371 aa, unidentified
MRFYNTQHRFYCGIDLHARTMHVCVLDYDGQVVYDQNLACRPETFLRAVAPFREGLVVGVECMFAWYWLADLCHEKQIDFVLGHALYMKAIHGGKAKNDRIDAGKIARLLRGGTFPLAYAYPKGMRETRDLLRRRTYLVRKRAELMTHLQILNSQYNLAPFPKKLSFAANRAEMDIAGRFADPSVQHSAAADLALIDALDAQIGTLELYLTRTAKVDDVQTFHRLQTIPGVGKVLALILLYELHDVQRFDHVGQFLSYARLVRCAHESAGKKVGTGGKKIGNAHLRWAFGEAACLFLRSSERAKKWKQKQQTQRGEAKALAILAARLGRAVYHMLRKREAFDETRFWQGGGRRSVTGSSSLSATEVCHAGD

SEQ ID NO: 378170 - protein, 283 aa, unidentified
MLTAEADKCKTKVVVNTAAGVQALLAWCAKHGAQPAQLHAILEPTGLYHEQAATALPQVRVSLVNPAQARDFAKALALRSKNDALDSYVLARYGQTLSPALWHPAPLHARQLRALLTRREALSKDLLRELNRKEKSQFSPSAPLVDGSIDKAIAFLREQIKQIERAIDQHIDNHPDLKQDCELLNSIPAIGPQAGNAILAVMHNRHIDSAQSLAAYLGVVPVQRQSGSSLNSCARLSKAGPSQVRATLYMAALVGTRHNPHIRALYQRLLKAGKAKRPRWARP

SEQ ID NO: 378171 - protein, 418 aa, unidentified
MKRAEDTSGQEKRYIGLDVHKHYITVGGMNVRQELVLRLRNVEMERFKRWAEENLRQTDEVVLETTTNTWDIYDTIAPLVERVVVANPAEVKQIANARVKTDNQDVVRLLRLLIAGMIPEVWVPPVEVRELRALISYRWRLVKMATAIQNRMHSLLHRHNLQAPEGKVDTGENREWWEHVQVSSLERLRLNQELKTLRLVRKHIEEVEAELGCLSTSERWVKQAVHIMQLPGVGIIVTMTVLSAIGDIQRFPSARKLVGYAGFGAGVEDSGEKHYEKGITKSGRKELRWAMVEAAWQAIRSNTRLRAEYDQLCKRKHPNQAIVAIARKLLVILWCLLNRQESYNPATDEDLAYKMLTWAWHLDKSALRGMTNQQFARYGLIQLGKGEHLTKIVKGGRPRRIAPKEEVLALLPELSLKQ

SEQ ID NO: 378172 - protein, 403 aa, unidentified
MDVIAGIDWASEEHRLCLVDSEGRRLLERRVSHDEEGLSGLCRLLGERGVGRVAIERPDGLLVERLLEAGLAVVPVHPNALAAARARYQVGGGKSDGFDAYVLAELARTDMHRLRVIEPDCDETKALRALTRARQELVRARVSLANQLRAELERFWPGAARIFADVDSPIGLAFCERYPSPEDARGLGEKRLQRFLARQRYSGRRSPVELLERLRRAPHGCNGELELEARRTVVLRLVCSLRPLVEGIGRLDSEIAHAVRAHPDGAIFLSLFRDPKTSLTAAELVAEIGDSRARYPGSAALEADAGMCAVAVESGKRRSASFRRACDHRLRDAVATLADASRHHHPWAADVYRRARARGCDHPHAIRILGRAWLRVIWRMWQDHTPYDPARHGGLQRLVAQGG

SEQ ID NO: 378173 - protein, 356 aa, unidentified
MRKDNKNYFSETDIYVGLDVHKKSWDVSIYAESIYFKSFSISPPSSKVLVEFLEKNFIGGRYHVVYEAGFSGFWIYDELTEKGIDCVIVSPADIPMSNKNKNFKTDRNDSKQLAQKLRAGLLEAIHIPEKVQREHRALLRLRNKFVKDRTRIKNYIKSNLMFFGKVIGKDYEDTRSWSKRFVESLSGIEYLSEEGKDIITELLKMLCSHDEALKRVEKKINQLSLTQQYKQDVEILCSVPGISTLSAMIMLIEIGDFNRFVDTNKLKSYVGLIPQEHSSGDKEIKAGITKRGNKFLKKIIVEVSWVAIRKDKTLLSRYTKLTKRMKGSKAVIVIAGILLNRIRSIMRKHEYYKIAA

SEQ ID NO: 378174 - protein, 367 aa, unidentified
MSKAEMSRLCVGVDLHKTQFTVCALNEDGEYLLEKQYPTKEEGYTDFAEEMHNREEEGYAIELAVETTGNARYFKNRMESEFFVVKVVNTNRFKVITMSTKKTDANDAATLAYYLMKEMLPEAHLCSQTSEEIRRLLKTRSVLVQSMVKIKNQIHGMMLGYGIETKASQLQSKRKRQELINDLADHNFSAYTAPSLKVMLKILDDLSSEIKGVEKLLEEMVASNEDVALLMTVPGIGINTATTIAAYTEELERFEGNYKRFAAYVGIVPSVHNSNETRHHGRITKHGPQELRTAFVQAAMGMIRLTNVTSEWRIIKDYQRRKGDKGSGRAIIALARKITRIVFVMLSRREGFNSKLMHYEETIQQTA

SEQ ID NO: 378175 - protein, 466 aa, unidentified
MAKPARSARARAPRVPRKTNPTPPVMHPNAGGIDIGATEVYAALPHDRSAEPVRVFQTFTEDLQALAAWLKAHHITTVAMESTGVYWIPVFQILETAGIEVYLVNAHHAENVPGRKSDVSDCQWLQYLHSVGLLRGSFRPPDEICAARTLLRHRTTLVAQAATHIQHMQKALVQMNVRLQHVLSDLSGTSGLAIIDALLAGERDPARLARLRDPHVKASEETIRKALVGDWRAEHLFTLRQARESYRYCQTLIRECDTEIESRLAQIRSRVDPTQTPPPPPQPSQARRQKGDIHLEAADLRTELYRMLGVDATQVPGLGTNSVAGLVMHLGTDLAAFPRVACFTNWQGLCPNPQVSGGRVLKRGTRDVKNPVATIFRMAAQSLHHSDSALGVYYRRMRAKLGAPKAITATAHKLARIYYHLVTTKQAYDESVFAKNEEREAKRRVERLKREATALGFDLAPKAVAA

SEQ ID NO: 378176 - protein, 406 aa, unidentified
MNMNAVDIDVSKRKSTIAVLRPGGEVLMKPFDIPHKSADFQTLVNKLKGLDGETRIVMECTGHYYEPVARELAQADFFVSAVNPQIINNFQGQDNPLRKVKTDKADSVKIARYTLDSWANLKQYTLMDELRSQLKTMNRQFDFYTKHKTAMKNNLIALIDQTYPGANTYFDSPARDDGSQKWVDFLDTYWHVDCVRKMSLNAFTDHYQKWCCRRKYNFSKAKAEEIYGAAKELIPVLPKDNFTKCIIKQAVAQVNAASQTVERLRALMNETASKLPEYPVVMAMKGVGPSLGPQLMAEIGDVTRFTHKGAVTAFAGVDPGVNDSGDYSQKSVHASKHGSPVLRKTLFQVMDILIKTKPDDAVYLFMNKKRTEGKPYYVYMTAGANKFLRVYYGKVKEYLSTLPQSN

SEQ ID NO: 378177 - protein, 409 aa, unidentified
MKMAGIDVHKKVLMVVVVDTSALQEKPARRRFVTLPSELQRFRIWLQEQGVEEAVMESTAQYWRSVWLELEPHMRLHLAQAFSNRAPRGRKHDFKDAERLVRRLIADELILSFVPNGEQRIWRSLTRMKVQLTRDRVRLQNQMECLLEEMRIKLSIVVSNLLGASGLRILHALAQGETDPKKLAELGDERLHCTEEQLVDALTGRVQPMHRGMLALQLQRLQLIDQQMAQLNHMIAQAMKSHQDAVIRLAEVPGLGVDSAQQIIAEVGAQASTFSSAAELAAWVGTCPGKEESAEQNQSSRSAKGNKYLRRVLNQAAHAAVAKKGCHFQVVFRRLMPRLGYKSAIWAVANRLCRVVWKILHEGVRFIEQGREVGPREKKQRAQLLARALRKLGYEVTITPINQLAPKPA

SEQ ID NO: 378178 - protein, 370 aa, unidentified
MSSITYIGLDVHTTNYTICSFNGYDGKYFGEVTVKPEYQQIEKYVKRLEKQYEPGHRFLCGYEAGYLGYSLFHELESVGIECVILAPSTMCDTKTNRQIKTDPRDARNIANCLAYGLYSAVHVPTEQDDAVKEYMRMRDSAAAELKAIKQQILAFCVRHGKRFEGKSTWTKKHLDWLDKLDFGNPILQNAFWEYLRRYYHAQEMQDIYDTQIAEYAQMEEYRQKVSELRCLIGIETHTALALITEVSDFRRFGKADQFAAYLGLIPGEHSSAEKTNRLGITKTGNKHLRRLLVEAAQHYGRGAVGRKSVSLKKKQEGNRREVVAYADRCNIRLRRKFFRIASHAPRNVAKTAAARELACFVWGIMTENIA

SEQ ID NO: 378179 - protein, 351 aa, unidentified
MLMIGCDYHTRFQKIAMVDTSTGEITNYRLEHANGEARKFYASLPGPARVGMEATVNAQWFERLLAEFHHELWVGDAAKIRAAEVRKQKTDARDALHILDLMVQGKFPQIWIPSAEERDLRQMLRHRNKLVRFRTSIENQLHALAMGQGLCRKSKLWTERGRQELEGLGLDPWANRRRKELLQLLDQLNPSIEELDRAVEKEAANRPEAVLLMEQPGVGPVTALAFVLTVGPIVRFPNSRKLVSYLGLNPSEDSTGGRQRLGAISKQGNSLMRCLLTEAAQTAARFDPDLRRDYLRLKFRRGASGVAKVAIARKLAVRLYWKLRAAAQPHTAARMQGSPTCPMVEATPSSF

SEQ ID NO: 378180 - protein, 403 aa, unidentified
MNAKHHTEFCGVDIAKKHHVACLLNRDGERLVASQSFSNDAEGYERFLHRLQEAGPSNPPLVGMEATGHYWYALRDFLVGRGYDVVVLNPIQTHQQARKDIRKRKTDKIDARHIATLIKNGEHKPALVPDDFAMTCRLVTRLRYRTVGTIARLKVLLESRLLPIWPEYETLFRNLFCHTSRRLLRVAPAPDDVLALDLKDLTDLVRTTSRGRYGSEHAERIRRCAAATVGIRRGLEGARIGIRSLLDQIEALTPIRNQLDADIERLAERLPGYVFTLPGASPFLGLSLWGETDPITAFSSSSQLVAFAGLDTTVFQTGQCTGERLRRRISKRGSPFLRHTLWTMAHRSCYQEGDLREYWLRKKRAGLHNLAAVTATGIKLCHAAWRILTDQRDYLPQRPNTKH

SEQ ID NO: 378181 - protein, 360 aa, unidentified
MQTQDNKNLFDGQPFYVGIDYHKKSWKVTILCEQYEHKTMSQNPDPNLLASYLKRNFPGGQYQAVYEAGFSGFETCRKLKQLGVDCMVIHPADVPSTQKEKLQKTDKADSRKLARTLRSNVFEAIHIPERKLEADRALVRQRFRMMKDVNRTKNRVKSLLFQFGIDIPEQFTAAQTRHWSKVYINWLKQLSIEQESLKQTFDNYIHIGEIQRKELLFINRQVRSLSQANAYKSNYNLLISIPGIGLMTAMTFLVQIGDIRRFTRLDDLCNYIGLVPRMYGSGEKMQTGKMIKRGRKELKIMLIEASWVAIRKDPALMLKFNDLAKRMHKNKAIIRIARKMLSRIRYVLQYQQEYVLGVIE

SEQ ID NO: 378182 - protein, 353 aa, unidentified
MPVYVAVDFHAREQTISWCDTADGEVHRTKLRHQHDDVRKFYEQFSGEVIVAFEASGYSAWFEQMLAELGHTVWLGNAAEIRRKAPRKQKNDRRDADLMLELMLKSDFPRVHTFSAESRTVLRQLRYRHKLVKVRTIAKNSVHAIGLNAGLPLRGRLLTPTGLEQLQALPLSPVLSQQRDEWLALIRLMNKQIGAVEESLAQRAKDDEAVELLRTHPGIGLLTALALRYTLDPVSRFTSTRCVVGYAGLDCVEEQSSERRRMGSISKQGSRLLRFLLNEAGQTAVRKDPQLKQFYRRLLRRRDKPKAKVAVARKLLVRSFIMLRDQIDYAEFVRRGVAARVARETHSPKVTDL

SEQ ID NO: 378183 - protein, 354 aa, unidentified
MSQHYAGRQIVGMDLHRRRSVLVRMTDTGERLETVRISNDPEYLKAVMARAGEAPEVVLEAAYGWYWAADTLAELGATVHLAHPLGVKMFSYRRVKNDQRDAADLADLLRMGRLPEAWIAPPATRELRGWVRHRAKLVGLRSSLKCQVHGVLAHAGVWVPMSDLFGVAGQQLLAELSAGDRLSIESRSRLDSALRVIGALEFEIELFAKLVNGRLRTDPGYRALQAIPGVGPVLAAVFVAEIGDITRFHRPEQLASWAGLTPKHHESDTTVHRGRITKQGSRLVRWAAVEAIQRVSGHTRLGQHRDRVAARRGRNIGVVAAARELLTLVFYGLRDHHIRALDTPAAPVASTPAA

SEQ ID NO: 378184 - protein, 410 aa, unidentified
MDVFCGIDWAEDHHDAALADAGGQVLARLRITDDAAGLAALLELLAAHGDSQQDPVPVAIETPRGLLVACLRATGRPVYPVNPMSVARYRDRHSVAGRKSDKGDATVLANVLRTDLHAHRPLPADSELARAVAVLARAQQDAVWERVHAQNKLRSHLREYFPGFLAAFSTARGGITRPEARAILAAAPAPADAARLTRARLASLLRKAGRQRGIEAEAARLHAAFGQEQMRQLPLVEQAMGRQALALLRQLDAACQSADDLQQAAEESFNQHPDAGIITSFPGIGALTGARVLAEIGDDRSRFKDARGLKAYAGAAPITRASGKSRSVSQRRVKNNRLAAAGYTWAFAALTASPGARAHYDRRRDAGDRHTAAQRNLFNRLLGCLHHCLAAGQHYDEATAFPAQVTPTAA

SEQ ID NO: 378185 - protein, 324 aa, unidentified
MAFSLGIDVGKEALEVALRGEEGAIARTTVANDSDGHDELLRWLSGRGAGPEETSVCMEASGDFEKVIAQRLYEEDYRVSVVNPRRIKGYASSQLQRTKTDSADAALIARFGWRETPRPWEPPTAAESRLQELTRARQALKKEKTRTQNRLDEAEDEAVRRAHRGLLEEIERQIEDLEEEIEEHVEENPKLERQCSLLETIPGVGLQTAAIVAGELGSPERFESARQAAAYAGLVPRHRKSGTSVRGSPQMSKVGNGRLRRAMYFPAMTALRFNSAVKAFGERLKKRGKKKMVVIGAAMRKLLHICYGVLKSGRPFDPSLHPGT

SEQ ID NO: 378186 - protein, 338 aa, unidentified
MIVIGVDVHKQSVTAVAVDEAGRMLDEKTAAIASEELIVWARGLGEQRLWALEDCRQLTRWLERQLLEAAEDVVRVPPKLMAPERRAGRTRGKSDPIDALAVARAALREPQLSRPRPDEQIFRDLKLLVDHRDDLVDERRRAHQRLRWHLHQLDPTFVVPLRMLARSSHLERVGRWLARREPELQVRLARELVARCRALNRNIAELDDELERRTAATAPALLELAGCGALTAAKLLAEIGPIDRFQSDAQLARPSGVAPLEASSGRVQRHRLDRGGNRQLNAALYPIAITQSRYHPGARAYLERKQAEGKSRREAIRCLKRLLVRVVYRTLKTSPALT

SEQ ID NO: 378187 - protein, 315 aa, unidentified
MSDVPCFVGIDVAKAQLDIALRPSGERWAVPNDAIGVMTLVDRVQALHPTLIVLEATGGLERAVTSALATAGLPVVVVNPRQVRDVARATGQLAKTDALDARALAHFADVIRPTPRPLPDAQTQELRALLGRRQPLIVMRTAEQNRLAGTSARLTKDLEAPMTWLNAGIATLDDDLAALLRASPLWRENDDLLQSAPGIGPVCARTFLLELPELGTLTRQQIAALVGVAPLNCDSGTMRGRRTIWGGRAHVRTVLYMGTLVATRHNPRIKVFYERLLAAGKVKKVALTACMHKFLTILNAMLKQRTPWQAQEVQS

SEQ ID NO: 378188 - protein, 324 aa, unidentified
MDKDKKTFGIDISKNTFDVMDCSGNYYQFDNNTKGFVKFLKLLCPVSHCVMEATGYYHYQLAYFLVDNNIAVYVENPLSIKRFIQMKLSRIKTDKSDAKMICMYGQDQELKLWVGYSKNQMECLQQIRLLDTYTKQSTALQNKVQAEQTLGNPSKVVISSLKRSLRNIEKEVILIETQLLELVKSEYQEVLTKVESIPGIGRKTAMMLVVLTDGFKRFESSSQLCSFCGLTPVLRQSGSSVKGRTRISKIGNAKLRNLLFMCSFTACKCNKACKAIYDRITEKGKSKKLALIAVCNKLLRQAFAIAKSGVEYSKEYRSPMPKFI

SEQ ID NO: 378189 - protein, 339 aa, unidentified
MKLYGGIDLHSNNSYIVLIDDHGAVMMRSRRSNEIGLVLQSLAPYRESIDSLAVESTYNWYWLIDGLKAAGYAVKLANPSAMQQYAGLKYSDDRSDARWLAEMLRLGILPTGYIYPETQRPLRDLLRQRSFLVRQGTSQRLHSGNLLSRNLGRKNPRQQVGQMTVEEARQLFPDRERTLAVESSLRVIEVLDQQIAAIEKQVLSRIRPEAGFQNLQTVYGVGPILAMTIWLETGDIGRFPQVGDYASYCRCVASTRISNAKKKGENNRHNGNPYLAWAYVEAATYAARYYRQAARFVERKTAQVNRTLAIKALAHKLARACYYVLRDQGRFEPARLFSR

SEQ ID NO: 378190 - protein, 414 aa, unidentified
MALKIVFPCCCGMDVHKTFIVACIATTDKNGFTNYKSKRFSTFTGDLRKLADWLAGNNCRDVCMESTGKYWIPVFNLLEKSCNVVLAHPKYVKSLRGKKTDKKDAQWIADVFKHDLVSPSFIPPFEIRQLRDLTRYYTKLTGFITGEKNRAQNCLTVSNIQIDQVFTDVFGKSASAITKQLLEQPDGNFDVAPFVHPSVKAPISEIQAAIEGYICFQQAEKLRLIRKHLDSIIICKASLQALIDKCISQFQAQIELVITVPGIQRPSAISIISEIGVDMSVFPTAKHLCSWAGLVPQNDQSAGKKKTTRISRAGAYIKPLLVQCSLAAIKSKKHPEIKERYTALKKRRGHKKAIIAICRMLLTAIYAMLKKAEPYDSSHYRAFDVAPANRTITPEQAILLARRLGYSIVEPQAS

SEQ ID NO: 378191 - protein, 443 aa, unidentified
MAADKPARPGKGGRKKKKTTSSMALPLMRPNAAGIDIGAEEIWVAVPADRDEHPVRRFRSFTGDLRAIAAWLQDCRIDTIVMESTGVYWIPLFQILADGGFEVCLVNARHYKNVAGRPTDAGDCQWLQYLHSVGLVKGSFRPEQGICAVRSLLRHRESLVHAMTKLVLHLQKSLDQMNLKIHYVLSDVMGVSGLAILDAIVAGERDPEQLAKLRNKLVRASEPEVIQALEGDYRPEHVFILAQCLRMFRAHQEEIDQLDREMEQFMMSLPAREPAAGVTAPERPWKRQHRAPAFDLRQQCFRLAGVDLTEVPGIEATTAHVLLTEIGPDLQAFPNASAFCSWLGLCPHNEISGGKILASRTRRCKHRAALALRLGAQAMHHSQTSLGHHLRRMKSKLGASAAITATAHKMARIVYHMLTTKEPTGNRCPRLNSGANSNARWRG

SEQ ID NO: 378192 - protein, 416 aa, unidentified
MSGKREIACGVDVHNKFIVATILSSDGLKLQDRFDTTFDDLLRFKQWLKENSCHKVAVESTGNYWIPIYNVLEGSVNFILANAYQIKHIPGRKTDTLDSEWIAEICLKNLISPSRIFCRDHRELRSLTRTRESLIKVRTKIKNRVTHELEASCIKLSSKLSDIFGKSGRHIVDGLLNGLNPEEILERIPSGRIRAKKEEIRGVIQSNLSPSQIFLIQSHLNMIDALNKQIAEIDAKISAQISSRKEDLRIALSMPGMGSISASTILAEIGDFRDFSSANKLAAYCGLVPSVYQSAGKLINGHITKHGSPHIRAMIVEVAHAIIRSKQNSRLKKFFLRIKARRGTKVGIVALARKVLCILYHLMIRQELYQDELLSKPRKSKLLGVQSTTSMSLDEMIETIIKAGYEVRRNECMKRG

SEQ ID NO: 378193 - protein, 458 aa, unidentified
MRRQQRRSPRAAVVPKLRRHNPAAAGLDIGAAEIWACVPAECDAQPVRAFGTFTPDLHALADWLAQCQVTTIAMESTGVYWIPIYEVLEARGFEVAVVNARHLKNVPGRKSDVQDCQWLQQLHSYGLLTASFRPAEDLRVLRAYLRQRAMLVEHRAGHIQHMQKALQQMNVQLTQVLSDISGTTGLQILRAIVAGERDPQVLARLRHGRCQRSEAEIAKALSGHYRPEHVFALTQALALYDFYTAQVQECDTYIEQHYAAIKPIYAEQTLPPPLGPDPKPNSHAKNAPAFDVRACLYRILGVDLTATEGLEASSAQVILSEIGTDMSKWPTEKHFASWLGLAPHNDISGGKVLRSKPLKGNRRAAQALRLAAQTLGRTQTALGSYYRRLRARKGPTTAITATAHKLARILYHILKHRTPYQPQSQETYEHHLRQRAIRHLKRTATRLGFTLLPQPVAA

SEQ ID NO: 378194 - protein, 493 aa, unidentified
MGACELESGDVALAAIPIRKMTIGIAQTLLLIIDWRITMPKRTTGDRAELKPVNVGAAAIDIGSKMHMAAVNPASTDVPVRSFGTFTQDLHDLADWFKACGVTSVAMESTGVYWIPVYEILEQRGFEVILVNARYAKNVPGRKTDVSDAAWLRQLHSYGLLRGSFRPDAEIATLRAYLRQRERLVEYAAAHIQHMQKALMEMNLQLHHVVSDITGATGMRIIRAIVAGERNPEVLATYRDVRCHSSIETIRAALVGNDRHEHIFALTQSLELYDVYQAKMLDCDRKLEVLIAALNNKGAKPAGKLSKPRIKTKQVNTPTFDVRSALYGLLGVDLTEIHGLGPSLALKLVGECGTDLRAWPSAKHFTSWLCLAPGNKISGGKVLSSRTRRSSSRAAALLRLAATTVGRSDTALGAFYRRLSSRAGKSKAVTATARKIAVLFYNTLRHGISYRDPGADYYEQQYRNRVLANLQRRAKSLGFVLQAIPGDADPAVS

SEQ ID NO: 378195 - protein, 312 aa, unidentified
MNTNNTAQNPVYIGVDVAKATLALHGARMPAEVSNDAAGHRRLLRALPPGAHVVLEATGGYERPLVLALHHAQVALSVLNPRQVRDFARAQGRLAKTDKIDASVLAAFGACMRPAADLPPKAAELSLAELISRREQMLAWRVAEENRAAHHRLTQVRTQARRLVKTLEKEIAQLESWISELMEADAALRSRRDRLVQVQGVGPTVAASLLGQIPELGRLDRRKAAALAGVAPFNCDSGPCRGQRHIHGGRAAPRATLYMAALTACVHNPVLKVFYQRLRARGKPFKLAITAVMRKLVILLNHILKNPDFVLA

SEQ ID NO: 378196 - protein, 336 aa, unidentified
MLIIGCDFHTRFQQIAMVDTTTGEIIERRLEHETGEAKAFYAAMPSPARVGIEATGHAQWFERVLAEQGHELWVGNPALIRAAVVRKQKTDSRDASHILQLLIEERFPRIWVPSPAERDVRQLLRHRHKLVCFRTSVKNQLHALAMGQGVCRRTKLWTRAGRQELDRLTLGPWASRRRQELLEILDRLNPAIEALDQAVVKEAENCSEAVLLMKQQGVGPVTALAFVLTLGPVDRFQKSKQVVSYLGLNPREDSSGGRQRLGSISKQGNQMLRCLLTEAAQTASQFDPELRRDYLRLKFRRGSGVAKVAIARKLAVRLYWMLRDAARPRATGSHAG

SEQ ID NO: 378197 - protein, 475 aa, unidentified
MNIKGKKKKNQVITANIFEQQEILAKVEAIKSNLKASTWHELETKGKFTKNEKLTFICDDMLILGCDIGSETHYVRAIDTRGRELSKSAFPFSNTLEGFQSAKDWAVKIAAVNDKKQIVLGLEPTGHYWFCLAIWMISNGISVVQVNPYAVKQTKELEDNSQLKDDTKDPKLIANLVKDGNFGMPYLPEKLYADLRRLSMFREQLNEDRIRFLNRLHREMKIYFPEYKDALGKVDGAFSLELLKKAPFPEDLLLLGNDGIRQIWHNAKLRGRGYSRSEEILKYARESVGMKDGADASKTAVKWFVERIIELDEQLSEIEKQLNQKCKEIPHTENILEISGIGENTLSGILAEMGDISRFDDVKEIQKLSGLGLVACSSGKHKGETKISHRGRKRLRYWLFQAAKSVVAHSEEFKELHVYYTTRAENPLKKMQSLIVIACKILRVIYTILTKGTVYDPKKLMTDIKRPSKQDTVAA

SEQ ID NO: 378198 - protein, 331 aa, unidentified
MRQIYGIDLSKEKFDVNFIDQTNQQQHCVVKNDLKSISKFLESLPDDSQLVGEHTGVYGDLLLFLCNQMDISISFCPGYSIKHSLGLRKGKTDKIDAARIREYGERFYDTLKQSGINSELMTELQELYSLRRQLVKERKMLLTKQKGVMRLATRSIYARNAYARLLDHLTTEIYDIESQIKEIISSDEEFSKNFNLVTGIKGIGPITACELIIKTANFKRISTAKKAASYAGICPFPNASGQMVKKSRVSPMSDKALKSLMFMCAKSAVAHNKEYRLYYQKKHLEGKPHYLIMTNVANKLMRTVFKVVESGCPWDPNYICSDPRNMNKKVA

SEQ ID NO: 378199 - protein, 325 aa, unidentified
MSLSIGVDVSKSKFDAALMTAQGKYRSKVFDNTTVGFEEFLGWIDVHVEQGRSNARICMEATGVYHEALANFLFDSQAKVFVVNPLRVKRFVESEGLRNKTDKGDAKALARFALHNKLDAWEAPSKGVRELQALVVRLESLQTMRVSELNRLGAAHPSICDSIVAVVAALDAQIETVRLLISKTIDDDPDLKQRGDLLETIPGLGKTTIPSLLAYIGRPERFRTVKALIAYAGLTPAIKQSGSSLDKRQGLHPVGHSALRKALFYPAMTAGRHNPIIAAFWQRLKAQNKPGKVILVACMHKLLAIAYGVLKSKRPFDASLVPKNA

SEQ ID NO: 378200 - protein, 352 aa, unidentified
MGKNNSKNVEVYCGIDFHKNTSTLCILYADGEEAEPITTIRTSLLVRFLANRRGWKIGVEATGGVNHLVEQLKGLGLEVVIINSNKFRGIGIGGKKTDKRDARALADAVRLSFVPEVHHRSKYSRQIKSLLTTREHLVQGRVDSMNHIRGTLREYGITMPGGAENFYKEARAKIEAIDCIGIRDSLRLVYENIVRYLEQEKSVEARVKELTKNDERVARLQTIPGVGIMTSLMMIAVIDDIGRFPNAKEFASYLGLIPSVHASANMRMMGAITRSGSEMLRRYLVHGARAWMRYSPKSDKNRIWAEKVKERRGMNKATVALAHRMARICFAILRDGSQYRVQAASKAEKAAA

SEQ ID NO: 378201 - protein, 397 aa, unidentified
MYIVGIDIAKRKHEAAVIDGEGAVIIKPFSFTNNCSGYNRLLAMLTKAKLPLDEVSFAMEATGHYWLALFTRLQKEGFRVQVINPVQTNSIRSFYIRQAKTDPRDALLIAEVIRFGHFSESTLHPENIYELRELCRGRHAIVSMQADVKRKVVALLDQVFPEYETAFTNMFSDTSMAILQTCPTPKELSEIPLEELCHLIEVSSHKRFRMAKARELQELARNSFGFAMAGDVFSTMIRLYAKHLDFLKQQVREMDRKIAEIMDTLDTPITTITGIGPTLGAYILSEIGDISRFSSAAKLAAYAGIDPTMRQSGEYNGVRNRMSKRGSPYLRHAIWLAASSAVLHDPALKLYFQKKRDEGKPYMASVGHACRKMVSIIYAVMRDNKAYTPCIPNEISA

SEQ ID NO: 378202 - protein, 360 aa, unidentified
MIVQGTSVGLDVHALSVVAHAVDEETGKVARARLCPDHGEVLGWLHQLRAPVRVTYEAGPTGFGLARAITGAGMECLVAAPSKLQRPAGDRVKTDARDAAHLARLLRLGEITAVRVPEREIEAVRDLVRAREDARADLMRVRHRLSKLLLRQGIVYSGGTPWTCVHEEWLRRHRFDDIHLKAAFDHSFDAVLAATAARDRLDEQIMVVAASPRFADPVNRLGCLRGISALTGLALTVEIGDWSRCSGSSIGAYVGLVPCEYSSGNSRVQGSITKAGNTHVRRLLIESAWHHRKSYSTSGPTLRARWAKVDPALRARGHAGNRRLNKRWRSFTERGKNPLVANVAIARELAGWCWSLATMQ

SEQ ID NO: 378203 - protein, 459 aa, unidentified
MRTIGIDLAIKRAHKAIVADEQGHYVTPIIQFHTQAAELDQLLARARAGAQDPYLQIVMEPTGMAWFPVAAYLARQDNVTLYLVNSQQVAALRRFYKRHAKSDRIDARVLALLPRVNPDHLHRLLMPSAITFACQQGCKELDRLTTYITAIKNRLHALDRFAWPGLDELVFPDIFAPAARWVHQHWYDPVDVIQAGAESIRQQWLASGVDEEDAGLWADSLFEIAHQVVALYGDDGRFVDFKRLQAEVCREQEHLSSLEAVHHRLRLKTVRPLYRQIHPSRHLETLKGVGQDGAAVYTSFIGDPHRFNTNRLFRGWHGLIPDSRQSADSEAKGLHVSQAGPNLIKKYAYLNADVGRQWDPQLAAIYYDQMVHKGKHHNQAVCACATHLLDRVLAVLREDKAYELRDVDGTPVTVHQARAIIAERYTVPDEVRERNNKRGRRERAERKAEKKHQRESRPR

SEQ ID NO: 378204 - protein, 345 aa, unidentified
MTCYTGIDVSLRSVSICVVDDKGEVCLEAKVAAEIDAIVDRLRRFSGDVKSVGFEAGTLTQYLTYGLQAAGFEVICLEARQVSVTLAAMRNKTDRNDARGLAQILRTGWYSRVHVKSLHSHQVRALLASRKAILKKCVDLENELRGLLKVFGIRLPSRVGHGSFDAELRETVCSDEMLACALVPLLDARTVLYKTYLKLDNAVKGRVRLDPICRRLMSIPGVGPVTALTFKAAVDDPNRFKSSRTVAAHFGLTPRRFQSGEVDNPGHISRAGDADVRSALYVAAHSLLTRNAQWSTLKAWGVRLAKIRGHRRAVVAVARKLAVILHRMWIDGSEFRWGSPAQTVA

SEQ ID NO: 378205 - protein, 353 aa, unidentified
MNKKIVKQVAGIDVAQKELVVTLGRMYDDWTPELYSYKVFPNNQKGFMALVSWVKKQSTEEVKMRFIMEATGVYHESLAYFLTENQYDISIILPNKISSYSRTLDIKTVTDKTASEAIARFGLERKLDNWVAPKPIYKKLRQLTRERDQLVEERTMVKNQLHAEQAEAEPNKGSVERIKKRIVFLNKQEQEIKAEIVTLTKQDENVRQSIELLSSIPGVGQLTAAIVLAETNGFELIRNKRQLTSYAGLDVREKQSGTSVKGKPRISKKGNKYLRKAMHMPALSAIRHDERFKGIFARLVSKHGIKMKAAVAVQRKLLETMYIIYKTNTPYDKDYLKKDEAESLQVEQQDEKN

SEQ ID NO: 378206 - protein, 341 aa, unidentified
MNVTTIGFDIAKGVIQIHGVDGSGAITVRKRMSRAGALTFFERLSPCLVGMEACGGAHHWARELAALGHVARLISPLYVKPYVKRSKTDAADAAAICEAVGRPHMRFVPVKSRDDQALAQAYKTRGLLVAQRTALINALRAHLTEFGLVAPLGPAGVARLIGLVRAGQEPLPDLARQTLVELADMIEATHVRVAAFDARLKRLAAQDEASRRLMKVPGVGPVAAGTIRALAGDLTRFSKGRDFAAWLGLTPRQNSSGDKVRIGAISKAGNRELRTLLVMGQLAVLRHALAAPAKASPWLAGMIKRRPRLVVAVAMAAKAARVIWAMLARNEDYRPRSAMAA

SEQ ID NO: 378207 - protein, 338 aa, unidentified
MFYIGIDIAKHNHEVSIIDDNGKALGKSFSISNSQKGVDKFNTYLDSFNITSENCVIGMESTGHYWINLFSFLVNLKFNVFVINPIQSDAFRKMYIRKTKNDSKDSYIIAQIMRFGEYSSSNISDENIFALRQLSRYRTSLVDECSSWKRKIISILDQVFPEYSNLFSDTFGVTSKELLSKYPLPENMLELSTEELTNLLTKASKGRLGNEKAQEIKEFAKNSFGVSFAKQTFSFQIKQIINQISFIESQLKELDNEISNMLKELNSEITTITGIGDVLGACILSEIGDISRFEKASQLVAFAGLDVAVKQSGEFTGTEMKKKLNYLILMSYAHRFIV

SEQ ID NO: 378208 - protein, 322 aa, unidentified
MNDKDPAVEVFIGIDVSKERLDLALWPGGARWSTSQKPEAIERLADQIREQNPSLVVAEATGGLEMPVAAALIAREVKVAIVNPLQVRNFARCTGKLAKTDAIDALVLAHFGQAIRPQPRPIADAQTQEFRALIARRRQLIEIGTAEKNRLHSAQGSKIRASIEEHIAWISKQIKTIDKDLDQAIKISDVWRVKDDILQSAPGVGPVLAHTLITDLPELGNLNRKQIAALVGIAPLNRDSGSFSGKRRIWGGRATVRAALYMNALVAARHNPVIRTFYQRLLAKGKPQKVALTACMRKLLLILNGMVRDQTSWGQIQTAPCQ

SEQ ID NO: 378209 - protein, 274 aa, unidentified
MFIGIDYHKAYSVYSVLDLQGDSLGQGRIDHAHPEDFSALVRRWPGCRVVFEAGMNWHWLFEILESELSSERIVLANPFKTRIIAEAQIKTDKVDARILADLLRGKLVPSVHIVGRESRQIKEVLRQRCFFVRQRTMLRNRIHRLLGAQHEVKLPQCSDLFGRKGLSFLEKLELPAPARLLLAQQLALLKELAVRIHEDEKALEGLVQETPALNYVRSLPGMGPILAAVVVSEIDGIERFPSAQKLCGYAGLCPSTHSSGGKTFQGKLLRHCNK

SEQ ID NO: 378210 - protein, 342 aa, unidentified
MQVTTIGLDIAKNVFQVHGIDAKEKVVMRKQLRRSQVIAFFSALPPCLIGMEACATAHYWARELRKLGHEVRLMPAKDVKAYLKRNKNDAADAEAICEAVRRPTMRFVQIKSAEQQGQLMQHRTRDVLIRQRTQIINALRAHLAELGIVAAQGDAGVNELRAIVADDRNERLPIDARASVIVLAAQLEALQTLIGSIEKRIKMQHRSNETSQRVETIPGIGVLGASAIVATVADPTIFRSGRDFAAWIGLVPRQDSTGGKQKLGPISKQGDRYLRRILIVGAIAVLRRAQENPGKYPWLTQLLARRPFKVVAVALANKMARTAWALMAYGGTYRAPELAEAA

SEQ ID NO: 378211 - protein, 355 aa, unidentified
MCILAIDLGKSNSVACVYEMADGAHRFRTVSTTPSAIGGLIDEEQPERVVIEICLQAGWVGDLVRSRGIVLQVANTNEEAWSWRRVKRKTDRDDALKLARMSALNQLPTVHLPTHGTRQWRSVLHYRQTLVARRTSVKNRVRSILEAEAIRLPAGKSAWSLVQRLRLREMARSWDEVNLEELWRAALGEELDHLEQLEATLKRVESKLDALAAQDSRVKQLKTIPGVGPRLAEMVVAVIDDPKRFRSGKEVGSYVGLTPRRFQSGQMDRQGRISGRGHKDLRKLLVEVSWIGLRFNPRLRTVFDRACRGVKKRRKIAIVASARRLLIWCWAMLRDGSAWKPAVPAVSGRQPAQAA

SEQ ID NO: 378212 - protein, 345 aa, unidentified
MSESYSGQQFVGIDLHRRRSVIVRMTTDGDPLECIRISNDAERLATVMARAGESPEVVLEATYGWYWAVDALRGQGAQVHLAHPLGVKAFEYRRVKNDERDARDLADLLRMGRLPEAWIAPPATRELRELVRHRAKLVGIRSNCKAQIHAVLAKCGIQVSMTDLFGLAGTELLDRLELPRPYAARIASLRRIIGALDFEIDAFAGQVRGRLARDPGFLAVQAIPGVGPILGAVFVAEVGDVHRFARAEELTCWAGLTPKHHESDTHVHRGHITKQGSRLVRWAAIESVQILPKHTLVGRIRDRVGDRRGRNIGVVAAARRQLEFVFYALRDHRVRALQGTRPVAA

SEQ ID NO: 378213 - protein, 412 aa, unidentified
MPQHDGPLFFVGIDWAAAEHAVCVLDRDGRKVAAFTIDHTAAGFTGLAARLDKHAEPEDMPVAIERPDGRLVDALLEAGHPVMPVKPNAIKTWRESEVLSGAKSDPGDAHVIADYLRVRIHRLRPAPPLSGHTKAVRTVVRARTELVEARVAAVNQLAALLDAHWPGAKAVFANIESAIALAFLTRYPTAASAASLTEKRLAAFCAKQGYSGKKPAAVLLARLRSAPGGTTDPTTCEGIRDAVLAQVGVLTALNTAIKALDRSITERMDTHPDGEVFRSFPRAGTINAAQILAEWGDAREVFDHPDAIAALAGITPVTKASGKQRGVSFRWACNKRLRVAITTFAANSRFCSPWAADIYDRARASGKDHPHATRILARAWVRVMWRCWQNRTPYDPALHGGAQQRIKQPLTA

SEQ ID NO: 378214 - protein, 386 aa, unidentified
MQTLNDFSRSRIALEPNGTLIAVIEMSLSSWLVAGILPGVERQPLKKLAVDESALLKLLQRWREEAEKAGRRIERIAVAFEAGRDGFWLARWLKARSIEAHVIHAASVAVSREHRRAKTDRLDTALLKRAFLGWLRGERDHCKMVAIPTIKDEDAKRPNRERENLVSEQSRIINRMKATLIRLGIRGFNPKLKRAAGRLEDLRTPGGEPIPPNTLAELRRDMERRRLVRDQIRQIEEARLERFDHAPGDGSHPMVRLLARVIGVGIETADRLVHEVLSRNMRDRRAVARYAGLTGSPDESGRKRREKGLARSGNGRVRHGMIQLAWRFLLHQKDSALAQWFRARTENARGSRKRMIVALARKLLIALWRLVRQGVVPDGVVLRPAQ

SEQ ID NO: 378215 - protein, 351 aa, unidentified
MSHKLNSTITVIGIDIGKNSFHVVGLDVRGGIVLRQKWSRSQVEVRLANMPACLIGMEACVGAHHLSRKLKALGHDARLMPARYVRPYSKGQKNDFRDAEAIAEAVQRPTMKFVATKTVDQLDLQALHRVRERLVSQRTGIMNQIRAFLLERGIAVRQGRWFLRAELPRILAMPPDVLSPRKVRIISGLAADWRLLDERIEQLSGEITELAKQDSGCERLMSVPGIGPLISSAMVAAIGTGDVFSKGRDFAAWLGLVPKQISTGDRTILGKISKRGNRYLRTLFVQAAWVVLVKVKPSRWEGHGLKHWIEAANKRLHRNVLAIALANKLARIAWSVLARGRAFEANRLQVA

SEQ ID NO: 378216 - protein, 404 aa, unidentified
MKGPIVSIDVSKGKSDYQAFKNLNVKYAGSRSIKHTKEGFDEIVNLVREMEKKLETEVCVVYEATGVYHRVLKKVLEDNNIKQFIINPLLSAKTRKNDSLRCPKTDKLDPKSIAKTYYSHSLHNSHKQETIYHELRELSRYYEDILVHIRKDKVAFRAQLDIVFPGYDTLYDDLYGPVALAVIEKYPHPEMLQKKKINTVSKVIQSKTCHRQAVSDTMADKAIEYSKTIYSGCDKDDIEVLILQRLIKKLNEDMAEAERTISEMIKLAQELPDFSIIKSIPGIGDNLAARIIAELGDMTRFKKKNELVAFAGLDPRISESGQDDGDHMHITKKGNKRLRCLLYLAVTCSIRLKRDDNSIKDFYIKKKQQSNPMCSKAAKTACASKLVRIIYSMCKTGELYQYNK

SEQ ID NO: 378217 - protein, 341 aa, unidentified
MTVYIGVDLHARQQTLAFVDTQDGEIQCRELRHQKDDVRAIYQQFTGEVIVGVEASGYTNWFEELVEDCGHTLLVGDAAEIRRLARRRQKNDRRDAELILDLLTHDEFPRLYRYPPESREVLRQLRFRHKLVKLRTMTLNSLQALSIGAGLSLQAKLATARGRTRLEQLHLSPVLTTQRHEWLELCDELSARILTVERWLKGQAKNDARVQRVQTHAGVGLLTSLCLVHTLGDVTRFASTRKVTAYVGLDVTEHSSAERKVYGGISKAGSRLLRYLLVEAGQTAARSDEHLRDFYQQVMKRRGKAKAKVAVARKLLVRTFIMLRDEIDYAEFLRRGKRTGE

SEQ ID NO: 378218 - protein, 348 aa, unidentified
MSKSSQYVGLDVSLKETSICVIDDADKIVWRGQVESTPETIASAVKQHAPHAVRIGLESGQLSNWLFHGLKEAGLPVICVDARHAKAALSLKVNKTDANDALGLAQIMRVGWYREVTVKGLDCQAVRALLVARGQIVSQITTLKNCVRGILKTFGRVLPKGLRSQFPARVRAAIDGHPVLGAIIEPTLRVLEAARAQLLVYDRAVIQRARSDDTARQLMSAPGVGTVVALAYMTGVEDPARFKRSSSVAAYFGMTPRRYQSGEVDHAGRISKCGDGMVRSLLFEAAKVLLSRSARPSALKTWGEALGKRIGSKKATMAVARKLAVILHRMWTTGTTFQWNAEAAAPAA

SEQ ID NO: 378219 - protein, 326 aa, unidentified
MNKSGKVISNERFLSTQEALDKYLDRFKDAEFVLESTGIWEFIYEGIEKRGFEVVLAHPLKVRAIAEAKVKTDKVDAEMLAHLLRADLIPRSHVPPRDIRNLRQLVRHREYLVRQCTSIKNRIHAELLRRGIRRPDSLKKTFTFKHVGWMRSLGIFTITSSLNCLEGIQEQIKEVESFLLAEYNSRKDAQLIATIPGIGFYGALLILAEIDDIHRFSHPEKLCAYAGLVPTVHQSGSRGHNGSITKNGSPHLRWILIEAVHVHTNYCPESKLSAFHRKIAQRRGKQRATVATARKLLHTIYWMLLNKEKFHCQGFNLVEKAASMNA

SEQ ID NO: 378220 - protein, 386 aa, unidentified
MHDGTNLPVPERTSIPGDCATLFVSLELSRSTWVATSLAPGSKKMSKHTLVGDDGRKLLDLLARLKTRAEQRIAAPVKVVAIHEVGLDGFWIHRLLEANVVESHVVDPASIAVPRRHRRAKTDAIDGETLLRTVIAWQRGEPRVCAMTVPPSPSEEDRRRISRERATLLQERIRHTNRVRGLLFGQGVTNYNPLHKNRRECLEEMRTGDGRSLPAHLKAEVLREIDRLELVLRQISEVEAERDEMLRPAKASSPAALLMRLKGIGAEFAAVLYLEGLFRHFENRRQLAAYAGLAPSPWKSGSIDHEQGISKAGNPRLRTTMIELAWMWVRYQPDSALSCWFRRRVGSERGRIRRISIVALARKLLIALSRYITHGEIPAGAVVKPV

SEQ ID NO: 378221 - protein, 355 aa, unidentified
MPQPNDLSRSLVALDHNSTIIAVVEMSQSSWLVGGMLPGIERQPRKKLEPSPERLLALLHRWRDEAVKAGRTITRIALAFEAGRDGFWLARWLAARGIEAHVIHASSVAVSREHRRAKTDRLDTELLKRGFLGWLRGERGHCSMARVPTLAEEDAKRPNRERDCLVGERTRIVNRIKSTLVRLGIRNFKPTLRKAAERLATVHTPEGTPLPPNTLAELQRDMARLGFVVSQIREIEEARQKRLEQQHETGAHAMVGQLARIVGVGVETADLLVHELLSRPMRDRRAVARYAGLTGSPDESGARRREQGLARAGNARVRRSMIQLAWRFLMFQKESALALCIAPAPPTAVVARARP

SEQ ID NO: 378222 - protein, 352 aa, unidentified
MEKGNKLNFSGQHIYVGMDVHKKSWSVSIQSEQFEHKTFTQPPEVEKLTGYLEKTFPGATYHTVYEAGFSGFWLHDQLREKGIDCMVVNPADVPTKDKERAGKTDRVDCRKLARGLRNGDMKGIYVPPRVKVEDRTLVRTRQSMVRKQTRCKNQIASILFFYGITIPEEGRWTRRFIHWLESIRMERASGDFSLKAHLEELNHLRQIIANLNRAILSLSRTEEYRSDVLLLKSVPGISTLTAMILLTELSDISRFSSLDKLASYTGLVPDIKSSGETEYATGITFRRNPALRALLIESSWVTVRKDPALMMAFNKLSLRMKKTQAIVHIARKLLNRIRFVLKNRQKYVLAVV

SEQ ID NO: 378223 - protein, 349 aa, unidentified
MRFYTNSHAHYCGIDLHAKTMYLCIFDRDGQIVLHKNMRSSPEAFLAAVEPFREDLVVAVECIFTWYWLADLCRSEGIEFVLGHALYMKAIHGGKAKNDKIDAFKIATLLRGGTLPIGYAYPPEMRATRDLLRRRQHLVRRRGSLLAHIQNTHHQYNLPTPGAKIAYKANRVGVAEVFDELDARKSMEVDFMLIENYDTTIRDIENHLVRRAKQHDPQGFHRLRTVPGIGKILALTILYEIHDVARFAKVQNFLSYSRLVKCEHSSAGKRLGTGGAKIGNVHLKWAFSEAAVLFLRCNPEGQKLQRRLAGRHGKSKALSILAAKLGRAVYLMLSQDRAFDMERFLARKN

SEQ ID NO: 378224 - protein, 411 aa, unidentified
MDILHARCAGLDVHKDFVTACVLSPGAGSEPIKHLEQFGTTTQELRRLSQWLERAQVTHAAMESTGVYWKPVFNILESSCELVLVNSRQVRNVPGRKTDPADAAWLARLLRHGLVEASFVPERETRELRDLCRMRTTLVRESVQTGNRLRKVLEDANIKLDSVASDSLGVSGRSMIEALVQGETDPIVLAELARGRLRAKRPELALALEGRVTRHHQFLLGEWLRLLHFVEEQIARLEAQIESHMPPFEAAATLLLSMPGVDRTTACALLGEIGQDMTRFASARHLASWAGVCPGNNQSGGRRMSGKSHRGNRWVKGVLTEMAWAATRTKNTYANALYRRLMIHKGKKRALVAVAHHLLEAVWHMLTLGAPYRELGSDYFDRLDRDRLKRNLVRRLQKLGYTVDVQPVSAA

SEQ ID NO: 378225 - protein, 493 aa, unidentified
MSQRKRSPVNKAKSSKVEAAKAKTPPKPASRPPREQAVALPILNPHAAGIDVHSDMHMVCVPGDSVLPEAEGASAGLPANVHKFGANSCDLAAIAAWLTACGVTTVALESTGVYWIPLFELLESRGFEVYLVEPGQLSRCGARPKTDVLDVQWIQRLHTYGLLRPSFRPPDSIMALRSYHRQRQMQIRYAASHVQHMQKALEQMNVKLTEVLADITGLTGRRIIGAILEGERDPWNLAALRNVQCHNDEETIAKALEGTWRPEHLFALQQAYDLYRFHHQQIAECDQRVEAELAKLPDHAGDKPFERKPRNGGRKQNTLTFEACGPLFKALGVDLTEIEGIDVATALVILAELGVDVSRFPSEKHFASWLGVCPRQYESNKSKKKRGPRKGKNRIAIALRMAAQGLGKTKSPLALFYRRIKSRIGGKGAITATAHKLACLVYRMLKYGKDYVKQSIEEYERKIKQQMERSLRRKAAALGYQLVAKPAAEPVPT

SEQ ID NO: 378226 - protein, 451 aa, unidentified
MPQPILAVGVDPAKRLHRAVAVLFPDEVVLDVELPNAFDAVANLDLRLCELANQHGADLVYGLEDHRRYGRLFCQVLTERGRDVRVVNPLWTNRQRAFYGQGKDDAIDGRSIAAVVLRRHHQLPLASDFGEVAQAIREAERSLQDLSKVGTQLVNRLHLQLSDTYTAAYEEYFGKLKSPLALRFFRRFPLPQDLVGHNVEMLASLLLDLAGGKVGPHKGGNRLIAMRSKAQAILETSGAMRASPRTLALELKAELIRQLCDELLANHDRIIRLERMLREQLLPATKQTITTITGISTILAATIIGETGSISRFRSPAAFAVYNGTAPARNSTGGRDRHKARRDCNHRLKRAFYLAARAAVLHDPIAKAYHQSCKSRGLSYVEALKRVARRMSDVVYALLKSGKAYDRSIIEHAIERRREQAAHAARSHAKQSLVHSRPRKSNSPLSQRQVM

SEQ ID NO: 378227 - protein, 338 aa, unidentified
MNKYSGIDLHSNNCVVVVIDNDDRVLCEKRVPNDLERIVALLAPHRDDLMGVVVESTFNWYWLVDGLQRAGFDVKLANTAALDQYSGLKYSGDEHDARHLAHVLRLGILRTGYIYPPELRAVRDLSRKRAQLVHSRTMHILAVETLVARQTGGGISGNCVKQLTENAVAQWGWSADTTLAVQANIELVHATSNVIKKLEKRIRERIQLKPEFAVLKSVPGIGDVLASTIMLETGTVERFAEVGNYVSYGRCVGSGRYSNGKKKAEGNRKNGNAYLAWAFVEAAHFALRNNSAAKSFYERKKAKTNTIIAIKALAHKLARACYHMLKEQTLFDEKRCFA

SEQ ID NO: 378228 - protein, 508 aa, unidentified
MKTLVKLAAGIGKGNYPVWKSAKPEVQRPARVGCIETANTFILPSMKAKNSSASRRSKNNIARRGQPPQPSARMPVIHAHAAGIDVGATSHWVCVPEDAVAEGQSPVREFGAFTKNLDELVEWLLKSQVKTVAMESTSVYWIPLFQKLEAAGLEAVLVNARHVRHVPGRKTDCKDCQWLQRLHSYGLLNGSFRPSDDICSLRSLMRHRDNLSKACGQQVQHMQQALNYMNIHLHHAVSDLNGETGLRILDAILRGERDPKELVKLRDPQITRSTVGEMEAALRGDWREEHLFVLRQSLENHRHLLKQMEICDEELEKALAKVVVNPATVAEAERPKNPPAAESKPKKQKKFKKLKAGTGLRRDWSAELTRICGVDLTRIIGLNVLGVLILISEIGVDMSRWRNAKAFCAWLGLCPGNKISGGKLLSSRTVHVVNRVAVLLRTVAPAVGRSDTWLGVFHRRMRARLGPAAANTATARKLACMIYHLLKYKEEYIDVDCLIYQEKIRKSA

SEQ ID NO: 378229 - protein, 327 aa, unidentified
MTASVSSHNPIFIGIDVGGASFEAAWHRGGCTQYQNRPDAIAAFVARLSAEKQIIRIAVEPTGGYEKRLVKALRGAGLPVEMVHTSRFAAYRTLIGAKAKSDTSDARLLAAYAAAPEEVRGRKAGHVVLPQDDVREQLAELAARRDQLKHMIHAETCRLSTVRSRSIRDDITAHLQALRQADCKTYDAMMQLVRQRDELRNAKRLLQTIKGIGDKTALTSIAAVPELGLISNKAAAALVGVAPFVRQSGTMRAPAHIRGGRAAVRNAFYMAAVTASRHNPVLAPFYARLIAAGKPVKVALVAVMRRLVVFANAVLRSGQPWKGAQII

SEQ ID NO: 378230 - protein, 457 aa, unidentified
MQQYYLGSDVSKGYSDFVILDSQKRRVEENFQLDDTIVGHSFLYDRLLIFFEEHPDAELCAAVESTGGYENNWYNTLRKFQSSLNIKTARLNPAGVCKNTEAGLKRVITDKISAQGVAEYLIAHSEKVMYQQQDYWASLRKQWSFIKMLTKQSTQLLNQLESLLYSANPEILKYCQDGMPAWVFKLLKKYPTAAKLGKARATSVARIPYISISRAEELVANAKTSVASATDTITGQLISAIVGQILQLKKIIKMQTKIMAAECTLPEVELLKTFTGIGDYSAIGLMLEIQAVARFSTAKKMAAFFGLHPVYKISGDGASSFRMSKKGRKEPRRILFMVAMSAINSNSLIRDLYQKHVENGMEKMTAIGLCMHKILRIVYGMLKNNTPFNPEIDLKNRERTSEQPQKERKDKSRRYQDFDATAPISGRQRKKRAERKLSQNAVSVECGICAPAPQLSS

SEQ ID NO: 378231 - protein, 387 aa, unidentified
MISVGIDVAKRTHEACFMGQDGREVSKPLRFRNTLAGVRALLEDVQRLPQPVTIGLEATGHYWLALHDALVRAGLQVQVLNPLQTHAYRRTTVRKVKSDRGDAWLIADVVRIGRGRAAYVPDETILQLRELTRFRWGLIDQIGDAKRKALTILDRVFPEDEGLFSDGFITSSRALLRQATTAAEFAAADLDELAALLRRTSRGKLGRPKAEAVQAAARDSLGLERLGAVAGFELRALLDQIAFLEQHVAATEREIEALLATVEQHLTDIKGLSAVLAASLLAEIGDIGRFPRLESLVAYAGLDPTVFSSGEFTASQAHMSKRGSPYLRRALWLAALSASRWNPDLDAYLQRRLAEGKPWAVAMGAVARKLLARISVVLKENRPYEVR

SEQ ID NO: 378232 - protein, 321 aa, unidentified
MTYVGIDVSKATFVVAYSSAKSSETKTFKNTTKGIREFIRTISPEENHCVLEATGNYSMLLVYLLSKAGFTVSMENPLKIKNFARVMLSVVKTDEIDARLIALYGERMQPAPFKLRSDSLLLLKQKRTVLRQLKKQLTANRNLEGSLKILPFIDSKCKKVLEKTIKFLEKQIEEMEEELTSLAEIEYKKQMDLLTSIKGIGATLAAALIIATGGFTYFDNAKQLTRYLGLSPTYQQSGTSVNVKGHINRNGDAYLRSQLYIGAMASLRCNTECKACFERLRSNGKPGKVAIVAVANKLIRQAFAVVTQEKIYIDGYKFVKP

SEQ ID NO: 378233 - protein, 343 aa, unidentified
MQAITTIGLDIAKSVFQVHGVDAEGNVILRRQLKRRYVLAFFQKLPPCLVGIEACASSHHWSRELQALGHTARLMPPAYVKPYVKRHKNDATDAEAICEAVTRANMRFVATKTPEQQSCLTLHRTGHLFIRQQTSVINATRAHLAEFGIVAPVGRHGVEQLLGVAADSNDNRLPEVARVCVAALGAQLRMLKAQILEFDRMIRAWHRSSEASRRLDDIPGVGPVLATALVASVADPRAFRSGRDFSAWIGLVPKQNSSGGKDRLGNISKRGDRYLRSLFTTGALAVIRYAKIHGTKHRPWLTALLTRRPTKVAAIALANKIARMTWAMMAKGERYKEPAALAA

SEQ ID NO: 378234 - protein, 351 aa, unidentified
MMIIGVDYHPSFQTIAFLVEETGECGEQELNHSDGQAEKFYRDLKQRGICVRVGMEATGYSRWFERLLAELGFELWIGDPAEIKAKRVKKLKYDRYDARLLRRLMLENNFPRIWVPDPENRDLRQLLWHRHRLVQMRTRIMNQLQALAMNEGYRWKKKLFSEQGRAQLEKLALAPWASRRRQELLELLDRMNPTIEELTAAVEREARKRPEVLRLMTHPGVGPLTALAFVLIIGTWERFSRGKQIGTYVGMIPSEDSSAHKQRLGHISKQGNSLLRFLLVEAAQAAARCNPEWRRRYMHLAMRRHRSIAKVAMGRRLGVRLYWMWRNGCEYSPKLEFGSYAGQLVTGHGVK

SEQ ID NO: 378235 - protein, 400 aa, unidentified
MSERRARVWAGIDAGKGHHWAAAVDETGATLWSKKIDNDESAILTALGEILELAEEVHWAVDISGTSSALLLALLAVHGQQAVYVPGRTVNRMSGAYRGEAKTDARDAYVIAETARHRRDFTAIDVPAQLAADLALLTAHRSDLVADRVRMINRLRDVLTGVFPALERAFDYSAHKGALVLLTGYQSPTAIRRRGRARLTAWLANRNVRSADTVAAIAQEAAQAQHTALPGENVAAQIVADLAAQILALDDRLRRIDKQIRETFRCHPQAEIIESLPGMGPILGAEFVVAAGDLTAYADAGHLASAAGLVPVPRDSGRRTGNLHRPKRYSRRLRRVFYMSAQTSIIREGPNRDFYLKKRGEGCKHVQAVIALARRRASVLWALLRDDRVFTSTPPVAQAA

SEQ ID NO: 378236 - protein, 360 aa, unidentified
MMVPRVLERRREAPVMLYVGLDLSRKRLDWQALDQAGEQVAVGAAPPDRDGLAQLARRLGDCEIVAVIESMSGARFVHDELERWGWDVRVADDSKARGIAPLACKTDRIDCWVLAELARRDLVPEVWLPDAAVRAERERARFRLYLVRHRVSLKNRVHAILFQHGIPVAHSDLFGAAGRRTLERLRLPEPWQSTVCCSLELIDTLNTEIRDCERELKRLGADHPYVSRLVTCPGIGPVLAYTIASEIGDIARFQSPRKLVGYTGLCPRVDQSGERDRRGALRKNGPTYLRWALIEAAHVAVRCYPPYRELAETMRDRHGRARGGNIAAVETGRRLSEAIWHMLTNDQPFAPAGARYRLAA

SEQ ID NO: 378237 - protein, 335 aa, unidentified
MQIKHFIGVDVSKDTLDLSVVMEGKNLQHYRIKNSPQVIRSTVKKIMRDLRATVEDTIFCMEYTGMYNLPMVKWLHSQNGKIWLESGVHIRKTLGLVRGKNDSVDSLRIAMYAYTNRQKVKLWKAPRKVIERIAALLSQRARMVKAKKQLSTANLEQRKFLDKGIMMNLNKYTNKTVVVIQKQIDAIEKEISGLISEDEKLNHMYQLITSVNGIGFVTASYILVTTNEFINISDPKKYACYSGVVPFEHTSGTSIRGKNRVSQMANKKIKTLLHMAALTAIQMKGEIQDYYLRKVKEGKNKMSILNAIRNKLVLRIFACITQNRVYENNYCYKLG

SEQ ID NO: 378238 - protein, 324 aa, unidentified
MNKDIKYFGIDISHLVFDATDSDGNYYQLKNNPSGFKKFVKILGSDSHCVMEATGYYHYQLAYYLLEAGIKVSVENPLAVKRFIQMKLSKIKTDKSDSRLICEYAKQVELKLWQGNSKHQTECLQMTRLLSVYTKQSTMLKNKLHGEAVLDNPSKAVVSSLKRSLKQVQKEMKTLEGKLIILVKEVHQDVLTRLKTIPGIGNKTALMLVVLTDGFERFTSGGELCSYAGLTPVIRKSGSSLNGRSKISKIGNQKLRNLLFMCSFNACKYNKACREIYERLVAKGKSKKLALIAVCNKLLKQAFAIAKSGLVYDQTYRSILATNK

SEQ ID NO: 378239 - protein, 407 aa, unidentified
MDIIIERACGLDVHKDNITACIITPIGKEIETFSTKTVYLIELVDWIKEHGCIHVAMESTSVYWKPIVNLLEAEDIEFLVVNAQHIKAVPGRKTDVKDAEWIAKLLRHGLLRASFIPDRNQRELRELVRYRRSIIEERARQLNRIQKVLEGANIKLGSVVSNITGVSSLDMLRSIANGVEDLDILADYARGVMKQKKEQLKLALQGYIQEHQRFMIKTIIDHYDYLTNTIDMLDKEIAQRMSKYQEDIDRLDSIPGIATRMAEQMLAELGTNIKEQFPSAAQMCSWAGLVPGNNESAGKRKSSKTRNGNKYLKSALIEAAHSVRGSKNYLGALYRRMAARKGRKRAAIVVAHAILRISYYLLTRKEMYVDLGEDYFDKQRKQSIVKHSLRRLESLGYTVDIKEQIAS

SEQ ID NO: 378240 - protein, 449 aa, unidentified
MGKGSGVTRGDRRRKERLSELRALLPPGNAIAGLDLGEKKQALAVIDHDGRVLARRSPRVRVHDLGVHLDWALGRARAAGFGGLSVACEPTGSRWMYVQQMCAGRGLPMVCIQPLVSHIAREQQDLTGDKTDEGDCVLVARLAGELHCYVPEELGGVWAVLRDEGRRRAQLITNGTAARQLIRDKLGLACPALLEACAAPFKSLTWLAALEVVLGQGGGNPLRLAGQGYEHFAGLVRAALGGWGGRRLGPAYAAVFAALADERGVARMRRAALRRARHALGDLKYARARRAETEAEMIALLDELGIDTARVCQIPGLTPAGLAAILAETGDLHQYSSSSPVVKHAGMSPARNESGAFRGQSRVSRRGRPGLRLAVWRATWAVLRHCDVLAARHAALTSRGGTGKLAPAQAHVACAASLLRWIYALTVHRTRWDPRIAAGALGHHHAMAA

SEQ ID NO: 378241 - protein, 341 aa, unidentified
MDIVTVGIDLAKNVFALHGIDHSGKAVLVKPKVARDQLLELVAQLPPCLIGMEACTGAHHWARQFVRYGHTVKLIAPKFVAPYRLGGKRGKNDAADAAAICEAITRPHMRFVPVKDIDQQAILCLHRTRQGFVEERTALYNRVRGLIAEFGIVLPQKVERLRREIGAHLEELPGWANRCIGDLLAHADRLNERIEEYYRAIAEAARQDSRSRQLMQLPGVGPTTASALITSLGGGHDFKNGRQLAAWVGLVPGQYSSGGKARLGRITKAGDAYLRSLLVMGARAVMSGLGEKQDRFSRWVRSLVERRGYWRAAVAMAASKLRLAWAVLKYGEDFRLTAGNA

SEQ ID NO: 378242 - protein, 368 aa, unidentified
MSEATTYVGIDAHKRELQLAMLIGDAEQPISWTMPADARALARLHRKLEREAPGLIECCYEAGPSGYALQRRLTGGRVQCRVIAPSLVPKKSGDRVKTNRRDARQLAYLLRAGLLTTVRMPTPAEEAVRDLCRARDDARRDLMRHRHRLGKLLLRRGLVYPGRNWSRAHSAWLTQLEWPEPADRHVVADYGYAIGQTEARLREIDRLLDELASAPPYAAAVAALRCFRGVETVTAMTLLAELHAVGRFPHPRALMAFTGLVPSEHSTGDHRRPGPITKTGNRHVRRVLIEAAWHYRHEPRVTRTLQRRRAGQAPAILAIATRAEQRLCRRYRRLMARGKPKPLVTTAIAREFVGFLWAVWQLPEARMA

SEQ ID NO: 378243 - protein, 349 aa, unidentified
MKFVGIDVGKQKCAVAMMDSDGRISDEFAFQNNHEGIQGLISRLSMDDRVVMESTGSVWSNLYDRLDQVHINVVLANPLKTKAIASARIKSDKVDARILAHLLRADLIPPSYVPPFEIREMRYLLRHRASLVSVRTRVKNQVHSLLDRNGITTGKFSDLFGRSGMEWLKSVELSTLDRLMLDNHLEHLESLKKQMKAVDAEITSRASRDRYVELLLSLTGVDVFAALLIRSEIGDVSRFSSYKKLISWAGLAPSLHQSGSVEYHGRITKQGSRMLRWIMVEAARVAVNHDPRLGEFYERVKKRRGGQKAIVAVACKMLKIIWTMLTRNEPYESRNQRRYDKKLNFITKQ

SEQ ID NO: 378244 - protein, 394 aa, unidentified
MKLIGIDIGKNKHFFCVMDQQTGEIISQPVSFSNDKEGFDFLVQEIKSYPKDSILIGMEDTGHYHFALLKHLLDLQYTVALINPKTTDCNRKMQGGITKNDKLDTINICDVLDTPERKKQYRITKVNSFDLYEQKQLTRHHHNLKEEENVYKNRLQKCIDIVFPEFNKLFNSKYGIVYMNILKMFGSAENIANTDIRTIRKCFEIEGRGNRISLTPERLKECARSSIGISSSAEVIQIKHLTAQIELIEEQLTEIDKKIEEFSIQNNSPILSIPGISHFSGTSILAELGDISNYSKPSQIIKFAGVAPLHYESSQFNAQHTAITKKGSKYLRKTLYQIILPVIRHNPVFNKYYQLKISQGKGHRCAQGHCVRKLLRIIYHLLKTNQQFDPQLLR

SEQ ID NO: 378245 - protein, 344 aa, unidentified
MDYFVGLDVSVRETSVCVVDESGKILKEAKVPTEPEAIASLLARGGFACKRVGLEAGPMSQWLYAGLAATGLPVICVEAQHMRAALSAQRNKTDRNDARGIAQMMRVGLYRPVHVKTLASQERRLLLTARKLLQSKLLDIEADLRGTLKNFGLRVGVVGKGGFRRRVRELIEGNAALSVVMTALIEAHAALQTQYDVLHKRLLDTVRDDPLCRRLMTVPGIGPVISLTFQATVDIPERFPKSRLVGAHFGLTPKRYASGETDHSGRVSKCGDAMMRTALFEGAQVLLCCTKKWSSLKAWGMAIARRRGLKRAIVAVARKLAVILHRMWLDGTEFRWGKEPATAA

SEQ ID NO: 378246 - protein, 345 aa, unidentified
MPIVGGLDIHRKQLTFDFLDTVTGEVKRGQVAPADRAHLRAWLARFAGRDDVAFALEGCTGWRYVAEELAGAGVVAHVAEPADTAFARGRKRHAKTDKTDSRHLRELLAEGRLPECWIPPPVILECRALLELYHDLRAGHTAWVQRIHAVFFHQGAPALGDGALRTGKDLAAVRAAAAAHLSPAGQLQVAVALEVLEALDARMHQVRHQLLSAARHLTGAKVLAARLYGVGPVTALAMTCWLAGKDRFSSARKAVRFAGLDITVWSSDRKGPPGRLSRQGPPVLRWAVYEAGKTHARSSAPDHRYYAQVKDRQDGKRAALSEARKLLRQACHILAELGDDALSAA

SEQ ID NO: 378247 - protein, 366 aa, unidentified
MKKISTVQVLGNEISQEQKLTIGVDLGDRWSFYCVLDEAGKIILEQKLATTPEATKQTFGKIPRSLIALETGTHSPWLSRLLTELGHEVIVAHAQKVELITKSNRKDDRHDARTLARLARIDPELLGPVRQRSAKAQIHLTVIRARAELVSARTALVNAARGLVKSYGERLPKCGTYQVNEKLAEGVSAELRDVLAPLLREVESLNERIKEYDERMEKIAKEVYPEVFLLKQVKGVGTQIALTYVLTIEDPYRFQKSREVGCFLGLRPGRRNSGQSEPQKKISKEGDRYLRTMMVQGAHYVLGPFGADSDLRRWGLKLAERGGKNAKKRAVVAVARKLAVLLHRLWVGGEAYEPLRNSQKAMRAVA

SEQ ID NO: 378248 - protein, 439 aa, unidentified
MQYQKVLKMLESIPYLSVGIDVGADFSWMSIMLPNGILTGNPFKIIHSDPQSRELAAIKIKEAQEMYSLESRCFLESTGIYHIPLLCFLRDKDFDCSVINPIITKNSTNMNVRKLHNDKFDSKKAARVGLDTSLKTSIIPDDAVIDLRNLVRDYYYFKDLQSSIVLKLNAELKVSFPAYLNVFSKVTTQTSLKLLEAYPLAADMLAASKDELVETICCTARFGEKYALAKYDAICAAAKDAAVFGRALPSNALRIRLYIKIYREYQAHLDSILEELHKTVNKLEGTPVHERISLIQSLHGVGFLSAVVLIAEMGSFDLFPSPKKLYAYFGLDPGVNDSGKFKGDRVHMSKRGSSLARRILHMVAINSLKVDKATKNLLIQSFIIITSVNVPERKRLLLSGLSCTKSVTSFLQCSGIISLLRSSRRKNTVNVMRQNTQNL

SEQ ID NO: 378249 - protein, 357 aa, unidentified
MGLFTGVDLHSNNGYYGIINEDEERIFKKKLPNHLPTVLSNLEPFREDIVGIVVESTYNWYWLVDGLMKEGYKVHLANPSAIKQYEGLKYSDDVREAFFLAQLLKLGILPEGYIYPKEERPVRDLLRRRLILIRQRTSHILSFQSLITRNTGVKMSCNDIKKLEVEDVKRFLDEECLILSGETNIAVIRFLSKKIGEIEKAVLKRVKLKEEYKKLLTAPGIGKILALTIMLETGDIRRFAKVGNYSSYCRCVKSEYITNNKKKGEGNRKNGNKYLGWAYVEAANFAKRYCPEAKKFYQRKMAKTNQIVATKALANKIARACYYVIRDREVFKVEKVFGRREGCGSEPRKGLVKSQEN

SEQ ID NO: 378250 - protein, 423 aa, unidentified
MDIIYEQVAGLDVHKDTVVACVRIVAEGKTRRECRTFSTTTDQLVELRVWLEECRCTHVAMEATGVYWMPVFRILGEGVFELIVANAAHIKNVPGRKTDVNDATWIADLLACGLIKASFVPNEEIQEFRSLTRTRKQLVREQTRHVQRIEKTLVEANIKLNSVISDIMGASGRRMIEAMIKGVRQPRQLAELAGKGIKATPKELYDVLHGRLTEHHRFLLDLHLKQWDGLDETIRKIDREIDQRIADTHTKGGSGEVPFRTLIELLSTVPGISTVSASAIVSEIGGDMSRFPTAGHLVSWCGLCPGNNESAGKRKPSRLRKGAPWLKTMLVQCAWAAKRKKDSYYRAQFFRLQSKRGPQKAICAVAASILTAVYHILKNGIEHHDLGASYFDRRPVELKAGRLVAHLKKLGFNVQLQPIPEAA

SEQ ID NO: 378251 - protein, 351 aa, unidentified
MKTEHTARPKLFIGIDIHKRSWKVHCATDLSSGRTFSMSPDPECLREYVGRHYPGHEVSTAYEAGCCGYRAHRCFEGYGWRSLVVNPADIFRRGKERHTKTDRIDAQLIARELKDGRLGGIVVPDPQREQLRSLFRRRNDLVKDMRQIKSYIKMQLLYYGIKVPEEFDNDHWSHAFRNWLDGLEFAHPTGKEVLESRMRSFRFVDREFRDVSTRLRKWTKEHYKEDYMLLRSIPGIGPIVASGILGELGDLRRFGNIKQLAGYVGLSPGIYQSGDTVRHTGVSMRAHRLIRSYFIEASWQAIRTDPVMQGYYRKHHGKNVKSVIVKVARKLLSRTLAVIKTGIPYEIGVVE

SEQ ID NO: 378252 - protein, 411 aa, unidentified
MEAAVITAVGIDVSKSKSTVAVRRPGGEIALRPFEVHHTNSDLKKLASTLKKLGGDIRIVMEHTSTYWRPIAPTLKEAGFFVSIVNAMLIHDFSDNTIRKLKTDRADALKIANYALTFWDTLPPFNNEEETRLLLKMQSRANERITATATALRNGLIALADQTFPGVNIAFAPNTKNANGHEKWVDFFLRYRHKDCVCQYSMEAFTESYRGWCKRKNYKFRTDTAHKIYLLAQEGVATLPKCESTKMLITQACKSLNAVCEAKQSTQLEMQRLAAMLPEYEVVMQMEGAGHITGPALMAEIGDVRRFKNKKALVAFAGIDAPPFQSGTFESKSRHVSKRGSPHLRRTIFIVSNIILTRSNPENAVYCFMDKKRSEGKHYYVYTVAGSAKFLRVYYARVTEFLRSQPSPGAC

SEQ ID NO: 378253 - protein, 344 aa, unidentified
MAAPLPSPAYRLFVGVDIAAATATVAWLLPGAPITRPITIEQTPFGIAQLHARLQATGIAQNDTLVVLEATGSYWITLATTLHQAGYAVSVINPMQAHHFAKALLKRAKTDAIDAQTLTQLAAQLQPARWIPPPAIYYELQQRLAQRDALLDLRQQVRNQLHALVQGPVVSAAVRTRMEQLIATLTDQLTEVEAEIAPALQQDAAWAAAASRLQTIKGIGLLTAAWLVVTTVNFRVCPSADAAVGYAGLAPLPYDSGTSVRGRRRIGHRGNGRLRSALYMASLSAAQHNPIIREFYERLRAAGKLKKVARCAAARKLLRIAWAVVTKEQDFDPTYAQRRQARAS

SEQ ID NO: 378254 - protein, 385 aa, unidentified
MGTQTFIPRDYDVFAGLDVDKKSISVTFTDHQGFLKSLNMPYKVEHLVNYVRKHYGDKKVAFAYEAGPTGYGLYDGLEAQAYPCLIASPSMIPKAPGQRVKTNRLDSRGISENLRGGQLKGIHVPTPLYRELRHLTQLRDTLVSEMVRMKQRIKSLLLMEGLEFPPAPAGSQWSFLVKNKLRDLPCSTTVRFKLDRLLDSLEFDEKQVLKATREIRRFCQTDPELSQCIEYLKTLPGIGWIVASKLLARVGDWRQIKNIRELAAFLGLVPTESSTGERTTRGSITHSGDPRLRSKLIQASWSAIRQDGELLKFFRTVAKKHPRHLGPRVAIVAVAHKLCMRAAVVLMKQRPYEIREKVQSAPLTQEETVPQGTTRRRRVPGEKIS

SEQ ID NO: 378255 - protein, 412 aa, unidentified
MKEKIYVGIDLAKVDSKVAVVNDSSEVIFKPFDITNSKEGIKKLLSRLSSYKTGQIVCGMEVSSNYWENMCSYLKEKDIAPILLNPYQVKKYRQAMGFKIKTDPIDSIAIAGLICGRKHESLYISGDSMMELRELVRIKYSFQRRVKDLKKSVLALLYLVFPEYTRIISHPFSKVSIEILSKFPTSCHMREASVSRLVKIFRRYQGCNFNLDKAKDLISAAKDSFYSGKAFKSRGMTIAMQLDEISSLSLKIADIEDEIISILDPGDPSGGSSDYDILNSIKGVGIGTIATFMGYVGDVSRFSSSDKLISFIGFYPNIFESGKYRKKNPTIQKAGPKELRYMLYLASVACIKHNSSLRKYYHDNVSAGMPAKKALIKVAVKLARMMYSMLKHKTKYESSKVFMQSLPLKKAA

SEQ ID NO: 378256 - protein, 319 aa, unidentified
MKKELFCGIDVSKDKLDICFLSSNPTFKPKYQTLPNEINLIKAYFEPFTQDELLVVFEPTSNYHILLQQTLSALGIKYSMPNPAKSSLFLRHLNTIKTDSSDSYGLAVYARTFKSDINPSKYNAEYIQIKSYNSAVSLLIKLQAQLKNFKHSQSFLKDTKLNEIIENLINEIRNQAKILKELAFNILKNFLPQTERIIKDSKGIGEDLALNLFPQLHFNKDKSEKQIISFLGLSPKIHQSGSSINKPLHITKRGNPNIRKSLFISALVCIRHNAKFKARYENLVNKGKSKKVAIVAVMCAIVRYLKSFFRFEPAGAISA

SEQ ID NO: 378257 - protein, 417 aa, unidentified
MLAVGIDWAEDAHRVALGRPEEGVVEILSIPHRPEGVARLIERIGELEPDPAEVRVGIETRHGHLVEALLDAGYAVVPVNPGLVARRRGPARKKDDSEDARILCLLALDRHQPLRPLVPHGERAAELRAIARDDERAARDERRLLNRLRADLMAVNPAALHFAGEDLGAPTLLRLLERWPTQQALAAAGDAELEAFFRAAHHGFPARALRRLREALAASHFAPRPHLVRAKEATVRLACSQLLLLHAQRRAWERRMGELLAALPEAGWEAEGKRLPGGEVYRSFPGLGARLAARVAGEIGDSPWQFETPNSLACYAGKAPVTRRSGRSELVVASRLACNRHLSNAVQQWAFCSLRASGWARAFYDAQRARGKGHHAALRALGNRWLEVLWHCLRKGERYDEATHVANRERALGRAAA

SEQ ID NO: 378258 - protein, 318 aa, unidentified
MKKHSIACGGIDTGKRKLDVALNGSSDRLQVANVATGHGEVSAWLRRHKIKRVGIEASGGYEQAVVARLRSDGFEVIVFQPAQVRAYAKFHLQRAKNDKIDAALIAACTAAAKKIHPPPDPRLAPMAARQTLIDQIVDQIARFKNYRESCGGSQLRQFWQEEIKRFHGLFRKELKQLVAAIRQHRDLSERLDLIVSIDGIALRTATAILVRLPEIGRLSREEVAALGGLAPYDNDSGDQDGARHIAGGRERLRKCVYAAALAASFHWNAELIELYKRLTAAGKEHKVALVACTRKLLIYANAVVARGTPWVSHAAAAR

SEQ ID NO: 378259 - protein, 346 aa, unidentified
MLYAGLDLSRQRLDVHVLDEDGRTIEVTAVRPDADALRTLAVHVLRQGQEVSAAIESMTGARFVHDTLEFAGWDVAIADAAKVKGIAPLAAKTDKIDAWVLAELARRDLVPEIWLPTPEVRAERERARFRLHLVHHRTALKNRIHATLMTFGHPVSVTDLFGVAGRELLAGLALPEPWTTTLGTSLRMVDQLGAEIDACERDLRRLGADHASIPLLLTVPGVGWVLAYTIASEIGDIGRFSSPKKLTGYTGLCPLVRQSGNRDVRGPLAKNGPKYLRWALIEAATHAARDAHYRERYERTKQRLGRQRGAKVARVDIARKLAEAIWHVLTKNEPFAPAGPTMLLVA

SEQ ID NO: 378260 - protein, 393 aa, unidentified
MSIIDRPHALAATAVENGIVAVSLELSRSKWLVTSLLPGSEKMSKHMVAAGDAAALLVLLGRRRRQAEEHLGGAVRVVAIAEAGLDGFWLHRLLEANGIESHVVDAASVAVPRRRRRGKSDGIDGETLLRTLLAWRRGEPRVCSMVRPPSPQEEDRRRVVRERAVLIRERIAITNRILGLLMSQGVTDYQPLRRDRRQRLETLVTGDGRALPPQMKRELLRALDRLDVLLQQLKAVEAERDAMQEAAAEATASEAATAGDPAQLLLRLRAIGPQTAAVLVLEAFYRRFDNRRQVAAFAGLAPSPWQSGAVAHDQGISKAGQPQLRKTMVELAWLWRRHQPGSALSRWFAERARGQDRRRRRALVVALARKLLVALWRYVNAGVVPDGAAFKAA

SEQ ID NO: 378261 - protein, 420 aa, unidentified
MKVPVINDFAALIGIDWADKKHDVCEIPMDTNDIQFSVISSTPQALHDWAQTLKQRYPNQLIAVSCELKKGPLINALSQHEHITLFPINPSTVAKYRKAFSHSGAKNDPSDALLQVEILKLHMHKLTPIQLDSVEIRTLEQLVIYRRKLVQERVDLSNRITAILKNYYPQVLEWFKEKDTVIFCDFILKWPTLSLAKKARQQTLLQFFNQHNSRYADVNEQRIKDIKAATALTNDVAIIEPNKLMIEILLPQLNVLMTGIESLDKEIKRLYKKQTDSKLFDSLPGAGPQLAPRLLVAFGSNRKRFNTAAEVQMFAGIAPVIEQSGKKKWTHWRYSCSKFLRQSFVEWAGQSIRYSFWAKAYYQQQISKGKPHNVAIRSLAFKWIRIVFRCWKSNQPYDESTYLNVLKERKSPLLKFMVES

SEQ ID NO: 378262 - protein, 316 aa, unidentified
MISYFVGLDVSKATLDVGFLPESIPQFQVRNDPEGFAQLIACLNELEVERVLLEATGGYEQAVFKALRLEGLNVVRVNPRRCRDYASAMGKIAKTDKIDAQMLARFARDFEDLPQIEPNQDRDELGELIKLRGNLVQHRDDDKRRMKQTTSATAITVYTEHVAYLNDQIKALDKAIERASNVLDRTTAMRLRSVKGIGVISCGTFMAYLPELGSVTGREIAALAGLAPYNKDSGKKSGPRKIEGGRYRVRKAAYMSIWSMIQHVPEVRTRYEALIARGKRAKVAAVACMRVLLVRLNAMLRDGTEWKELKPQVPAP

SEQ ID NO: 378263 - protein, 335 aa, unidentified
MHYLYYVGLDVSKETFDASLVAFEDANEMAHRKFANSRKGICSCLHWVEKRHGILLDDVIFCAEDVGSYISEMAVCASDRTLTFNFSLISPLVIKYSMGIARGKTDRVDARRIAEYAITHYRKIALYLPAEKELCQLRTWLILRAYLAKQRVAKLVLLEKLDYKEKFADVSIQRSMLQEEIAYAETHMKTIEREMKELIAADSNICRNYKLLTSIKGVGPITAIVMLCSTLNFTKITDHRKFACYCGLAPFEHSSGTSVRGGCHTSSMANRDIKVQLNRSALIAIRCDPQLKAYYERKAAEGKHKFSVLNAVRAKIAARCFAVVRRGTPYVALQI

SEQ ID NO: 378264 - protein, 349 aa, unidentified
MDIVGGFDVHRKQITFDYVEIETGESRRGEIRPADREHLRSWLEQFAERLCGREAAFALEATTGWRYVVEELERVGVEAHLAEPADTRALQGRKKRAKTDRIDARHLRELLLIDRLPESWIAPEHVQQIRTLMRIRHTMIEERAAHQQRIHAQLFHNGCPQEKDLLSAEGLERLQQVGLPRAARKVVDLCLKMIEHINEELEPIEAELRAYARSQSGCRALMNHYGVGELTSVALFSELGDTRRFSSSRKAVRFAGLDVTVHSSDDKRAAGKLSRQGSPVLRWAAYEAAKGAWRKGSPDHEYYLQTRERIGTNRAALSIARKLIRRAHHTLRELGEEAMSEPPAVSTSA

SEQ ID NO: 378265 - protein, 323 aa, unidentified
MAMTYVGIDVSKATFVVAYSSAKSSETKTFKNTTKGIREFIRTISPEENHCVLEATGNYSMLLVYLLSKAGFTVCMENPLKIKNFARVMLSVVKTDEIDARLIALYGERMQPAPFKLRSDSLLLLKQKRTVLRQLKKQLTANRNLEGSLKVLPFIDSKCKKVLEKTIKFLEKQIEEMEEELTSLAEIEYKKQMDLLTSIKGIGATLAAALIIATGGFTYFDNAKQLTRYLGLSPTYQQSGTSVNVKGHINRNGDAYLRSQLYIGAMASLRCNTECKACFDRLRSNGKPGKLAIVAVANKLIRQAFAVVAHEKKYIDGYKSVKP

SEQ ID NO: 378266 - protein, 437 aa, unidentified
MTSPCQFYSYKYQEVILLAFKIFRFNCCGLDVHKTWIYACIGITDSNGRTEYKQARFSSFSKGLKELCDWLAKYNCSEVCMESTGKYWIPVFNVLEKADISVILAHPKYTKPQKGNKTDRKDAKWICNLFMCEMIKPSFIPPADIRHLRDLVRYRFKLTCMITGEKNRAQNCLTVSNLKLDDVFSDVFGKSSRSITEYMLAHPGEIFDVAPFVDGRCKTPVEEIQAAVDGAISPEQAVKLRQCLSHIDELEKHLKEIEREILRLSDKYEAALDLIRTVPGFGKRPMTAIQILSEIGGDMSVFPTAKHLVSWAGCCPRNDQSNKKIKSTRISRAGNYIKPILVQIANGLLRSKKHPEITDRYKRIKSHRGHKKAIIAICRMLLTAIWHILSDLKPYTPEGYLEPRPVKESKVLTKSQALHLLKQRGYIIKDDAEPALN

SEQ ID NO: 378267 - protein, 343 aa, unidentified
MKEVITIGVDVAKNVFQVHGVDGEGAVIVGRQLRRSQVLPFFRKQPPCLVGMEACATSHHWARQLIELGHEVKLMPPNYVKPYVKRNKNDAADAAAICEAVTRPTMRFVAVKSAEQQSVLMLHRTRELLVRQRTMLVNAIRAHMAEFGVVAPVGIPRVKELFAVIADADDDRLPPIARACLEGLAKQFLSLHEEIAIAERRIHTGHRSNEASRRLETIPGIGPITATALAATITDPSVFRSGRELAAWIGLVPRQNSTGGKDRLGRISKQGDHYLRWLLVAGAMTVIRHAKRRGTANLWLAGLIANKPTKVAAVALANKIARVAWVLMRDGGTYRKPVAAAAA

SEQ ID NO: 378268 - protein, 348 aa, unidentified
MTHSTITTVGLDIAKNVIQVHAVDAKGTPIIRKSLKRHQVLPFFANLPPCLIGIEACGGAHDGARRLMALGHTVKLMAPQFVKPYVKANKHDAADAEAICEAVTRPTMRFVPVKTPEQQALLALHRARQGFVTARTAQANQIRGLLAEFGLVMPKGMAALKQRLPDILEDAENGLPDACRELMQTLSAHLNELHRQVEAITQRIAMAHQANPLSRRLAQIPGIGPVIATALLAAIGDIREFASGRQLAAWLGLVPKQSSTGGKTRLLGISKRGDTYLRTLLIHGARSALSAAQRSKEPGATWVTRLADRRHPNIAAVALANKNARIAFALLAHDRDYQPGHSPVRATA

SEQ ID NO: 378269 - protein, 409 aa, unidentified
MERVIERGAALDVHKKSVTACVRVPGPEGGRRQEVQTFGTTAAALLTLRDWLSAHGVTHVAMESTGVYWKPVYYVLEELCTCLLVNAAHVSKVPGRKTDVRDCEWLAQLLEHGLLRGSFVPPVAIRELRDLTRYRAVLVQDRTREANRLHKVLTDAGIQLASVASNVLGKSGRAMLTALVEGTTDPEVLADLAQGKLRRKLPALREALAGRFRKHHALLVSQLLAHLDYLDEALGDLTAQIEQALGPFASEAARLDAIPGVGPRTAEVLIAELGVDMRQFPTARHVASWAGLCPGTHESAGKRRAVRTRKGNRWLRAALIEAALAAINVRDSALAARYRRLVRHCGHKKAIVAVAHKMLTTAYLLLADGRTYQEPGAGYYDARRKDRDIRRALHALERHGYRVSLEPAA

SEQ ID NO: 378270 - protein, 348 aa, unidentified
MYPFYLGIDLHNKNTYAVLIDKAGDVIDQREFSNDETSKYLKEVVPSETYAVLEATRNWPFMYDLLSQHVERVELAHPKELKAISSAAVKTDQIDAKVLAQLARLNYLPTAYAAPPETRDLRLYVRHREILVQERTQSKNRIHAVLAGYNLRAQVTNLFGKTGREWLQGVLDGELLRSAARRVIEDHLSILDHFDGHIEALEKDLKFTIEQKEAVKLLKTIPGVGRIIATTMVAEIGDVQRFHSPKALCNWAGLTPRIRSSGGFTRHGHISKEGSPFLRGAMTRAATVASRRSKRWYLVHESLVKRCGKKGAKVAVARRLLTVAYHMLTRNEPYQENYGKQLPASRGA

SEQ ID NO: 378271 - protein, 415 aa, unidentified
MYNIVYPVCCGIDVHKSFVIACIAATDDKGLTTYKRKRFSTFTGDLRLLSEWLAQNRCKDVCLESTGKYWHPVFNVLEQTCNVVLAHPKYVRSIRGKKTDKKDARWIADLFKFDLVVPSFIPEFKIRQIRDLMRYRVKLTNCCTGEKNRAQNCLTVSNIKLDDVFTDVFGKSASAITDQLLLNPNGNFDVTKFIDGRCKAKPDKVQAAVDGFMCAEQIEKLKIIRSHMSSIEECKARLESVIRSLIEQYQAQVDLVLTVPGIQLFSAIAIISEIGVNMSVFPSAKHLCSWAGLVPQNDQSAGKKKTTRISKAGNFLKPLLVQCALTVCKSDKHPEIKNRYLALKKRRGHKKAIIAICRMLLTAIYAILKKSEAYNPNLYRKEVSVPDSRALTMKQVIAFAKRRGFIVIDPDGVVA

SEQ ID NO: 378272 - protein, 343 aa, unidentified
MDHFAGLDVSVKETSVCIVDDTGRIAKELRVASEPDALLRVLGNPAYRFKRIGLEAGPLSQWLFGALAEAGLPVICVETRHMRAVLKAQINKTDRNDARGMAQMMRAGLYRPVHVKTLRSQKLRVLLTHRKLLQSKAIAVDNDLRGTLRNFGLKVGVVGTVKFEARIKELVESFPDLAELVEPLLIVRRTLREQIGILHRRLLAIVRNDDVCRRLMTIPGVGPVVALTYRATVDVPARFRNSKAVGAVFGLTPSRYQSGEIDRPGAISRCGDEMMRAMLYEAAHIMLVRLAKWSWLKAWAMKIARHRGMKKAIVALARRLAVIMHRIWVDGTEFRWSREVTAA

SEQ ID NO: 378273 - protein, 345 aa, unidentified
MDCIGIDVHKRESQIYILADTGEIQEVRIRTTRERFTAVLGNRTTARILLEAATESEWVAQCLELLGHEVIVADPNYAPMYPDRRRRVKTDRRDAAALAEACRTGTYRAAHRLSAAQREVRRHLCTRDHFVRTRVRTVVLIRALLRGEGLRIRGGMIETFLGRLRELDVPDALQVRLAPLVACLEFVNAQIAAADTEMAAVTAANPLLQRLATTPGVGPVTSAAFVAVLDRVDRFRSPQQVASYIGLVPREASSADRRHRGHITKAGNSRLRWLLVQSAWGVIRCRKPAAIPLRTWAERIAQRRGRSIAVVALARRLAGLLFILWRDGTTYDPGRLRMPTGSAAA

SEQ ID NO: 378274 - protein, 348 aa, unidentified
MAVTIVEAGPVVVGGVDTHLDVHMAAALDGIGGLLGVEPFPATPAGYRMLLAWMGSFGAVARVGVEGTGAYGAGLSRFLRRQGVEVIEVDRSNRQARRQHGKSDPADAIEAARAAHNGRARGLAKSRDGNVEAIRALLVAKRSARAVRIKSVNQIRQLTFTAPDALRERMRGLGTVPLMVEAASLRPRPDAGTVVYSTKVALQTLGRRAVSVDAEAARMDELLGELVADTAPSLLDVFGVGVDTAATLLVAAGDNPQRLRSEAAWAHLCGVAPIPASSGKVIRHRLNRGGNRQAKGALWRIVMVRMLHDPVTRAYVERRSKEGRSKLEIIRILERYVAREIYRHLPRG

SEQ ID NO: 378275 - protein, 383 aa, unidentified
MSRSGLGPSSVLVTPDHAGNVVGVDPHKRTLTATVADPRGGILASGHFRVSGDGHRALEAWARQFGQIARWGVEGASSWGRHTAVFLVARGYDVRDVCANRTPRSDRARQRGKSDTLDSERIARETLAHPLLPRAFKRAGQDSGPEELHELLSLRHNQRRSILTSRQHLLNEAEHLLSSLPLEQREQLPDTKAVRPRLAALAARNRRRRHDQPTTLRLKLLDDYRAQIANLDAQDKQVTAELAALVKTSGSTLGELCGLSTVLVAELLVEVGDPRRFTIGGFARFNASAPLAASTAEGPGEPVRHRYNPGGNRRVNRTLHMMALTQLRCEPRAQAIYANARANGHTKKEARRILKRHLSDVIYRRMTRDLAQPAADHPLLIAA

SEQ ID NO: 378276 - protein, 343 aa, unidentified
MQSISTIGLDIAKSVFQVHGIDAAGQVVLRRQLKRRHVLAFFQKLPPCLVGIEACASSHHWSRELQALGHSVRLMPPAYVKPYVKRQKNDTTDAEAICEAVTRPSMRFVPTKTIEQQSCLMLHRARHLFIRQQTAVINSIRAYLAEFGIVAPVGRRGVEQLLEVVADPADCRLPELARTCLAALGSQLRALKVQILEFDRRIIAWHRSNATSKRLDAIPGVGPALATALVASIADPKAFRSGRDFSAWIGLVPKQNSSGGKEKLGSISKQGDRYLRSLFTAGALAVIRYAKIHGTGHRPWLTGLLARRPTKVAAIALANKLARMAWAMMARNERYQEPAALAA

SEQ ID NO: 378277 - protein, 379 aa, unidentified
MSVVGIDVGRSQHVAAVCRDQAQEAERGVLRVASGREGFDQLDAWMARQGEVALVVMESSGHYWMPLASHLWARGQSVAVVNPLRAKYFAKSRLQRTMSTQPTPREPLAGGELREASRFVMTLVQEQAKVCQRLQRLIDLGFPELGDVFEDPGCASALAVLRVAPTAAAVRRKRAASLAAAKAPGGRRSLGARKAAELKALAERSVAPPELEEQVAFEISVLIGQYDLLESQIKGAEARLASLLDDDVARRLQSIPGVGPATAATLMAEIGDIWRFDDVDQLLAYAGVHPREASSGQKGSNPETSWHMAKSGNAHLRTAVYRMALVGTQHNPVIAAHYRRKREAGKSKMNALGHCMSKSLSLVWGVWRNGQPFDPSYRA

SEQ ID NO: 378278 - protein, 331 aa, unidentified
MKKNQIIVGIDVSKATLDCFIHSIALHFIVENSSIGFVKLLETVIKSTKCKKENLFLCFENTGKYSKMLSVFLHSQEISFVMAPALAIKKSLGITRGKNDKVDSFRIANYAYEKKEKLTPTILSDEKIDKIKSLLSLREKLVKHRTAYKNGMCDLHDCYREGETHMIRDVQQRLINSVNDEIEKIENEIESEIKRDASMNRNFELILSVRAIGKIVGFYLIAHTGNFTSFIDARSFACFSGIAPFANSSGTVIGRSRVHPYANKQLKTLLSMAAMSAIQIKGEYREYYKKRVGEGKNKMSTINIIRNKIIFRAFAIVKRGSPYVDLYKFVA

SEQ ID NO: 378279 - protein, 334 aa, unidentified
MEKVTTAGIDLAKRVFALHGVDGAGRVGLRRTVRREQLMQTVAALPPCLIGMEACSGAHEWARRFQELGHTVRLMAPVFVAPYRKSGKNDGNDAEAICEAVARPSMRFVPIKSLEQQAVLTLHRVRQGWIEERTATINRLRALLTEFGIVLPNRAQYVRRGALAAAEPLPLLARRAVEDLRAHLGVLDERIASYDRELQAQARQSEAAQRLMQIRGVGPLTAVAIVATVGCARDFRSGRQFAAWLGLTPRQHSSGGKHRLGHISRRGDAYLRCLLVQGARSVLLTAMRHSDRMSRWAVSLQARCGYHKALVAIAAKNARIAWALLAKNQTLRAV

SEQ ID NO: 378280 - protein, 393 aa, unidentified
MIQRKNAESEPVRIKKFASFIAISGLPACLNPDPDSRLASIVKVIGLSSSPFFLKSVKDKRMENFYFIGVDVLKKKLDFCVMFEGKVVHEEETSNHQGAIMSLLHHLEEDYGIASGQMLVCAEHTGQYTFPLACACKAVECRLWLENAAEIKYSSGVQRGKSDKVDAKRIAIYASRFQDKVRYYERPTEDIERLKQLESERTLYVTDFAKYKGQMKDQKEYMPKSLYERKMKRLQALMDDLEEAIQSITDEMDEVIASCPVLCRQRELLMSIDGVGRVVATNMIITTEAFTRFDDPSKFNCYAGVAPFSYSSGSSQHSKARVSHRADKVMKRLLHLAAVAVTHRIGGELKKYYERKVAEGKNKMSVINALRAKIVARMFAVIKRNERYKPILS

SEQ ID NO: 378281 - protein, 356 aa, unidentified
MTSTIKYVGMDVHKQSISIAMRNATGKIVMECVIETKASTVLQFFDGLRGDVQVTFEEGTWAAWLYDLLKPHVAKLVVCDPRRNALLQDGNQNDRVDARKLSDLLFMNKLNPVYHGDHGLRTLKELGRSYLTITRDQSRVMSRIKAIYRSWAIPCSGKQVYGARHRAEWLGKIQEPGVHRRAELYYRQLDALRALRQEVRRDLLVESKKHKVWKRLCAIPSMGPIRAAELLGILQTPHRFRTKRQLWTYCGLGVVTSSSADHEVANGQLRRRKKHVQIRGLNENCNHDLKNLFKGAAVVASIKPGPLAEFYAALVAKGMRPEMARLTLARKIATIVLIVWKRGVCFDAQYLKSQTA

SEQ ID NO: 378282 - protein, 343 aa, unidentified
MTNITTIGLDLAKSVFQVHGADRDGRPVLRRKLRRSQVLGFFAKLPPCVIGIEACASAHYWARELQELGHSVRLIPPQYVKPFVKTNKNDASDAEAICEALSRPTMRYAAVKSAEQQSVLTLHRARELLVRQRTMLINAIRGHCAEFGIVAAQGAAKVTALIEVIQDHQDDRLPALARQALGSLVRQYEMVQEQILGLERQLMSWHRATEASRRLATIPGVGVITATALVATIGDASQFRSGRQLAAWLGLVPKQHSSAGKDRLGRISKRGDGYLRKLLVHGARTVLLWSRRKKEERSRWQEALLARRPTNVVLVAMANKTARIVWALLSRREVFCAKAHVTT

SEQ ID NO: 378283 - protein, 405 aa, unidentified
MNAVGIDVSKGKSTVTIRQPGDVVVLAPRDYRHTQSSINDLITTIKCLEGETKVCMEHTGRYYEPVASWLSAAGIFVSAVNPWLIKDFGNESIRTPKTDKADAKKIARFALDRWAKLPQYSRMDELRNQLKTMNRQFGFYMDQKTAMKNNLIALLDQTFPGANSFFDSPARSDGSQKWVDFVYTYWHVDCVRSKSLEAFTEHYKNWCKRKGYNFNAAKAKEVYLAAADLIAVFPKDDYTKLLIRQAVAMLNVASETVETLRIKMDQTASQLPEYPVVMEMDGVGATLGPQLIAEIGDVTRFKHRGALTAFAGVDPRANESGDYKRVSNPTSKKGSPHLRKTLFQIMDGLIQRSPADNPVYAFMDKKRAQGKPYYVYMTAGANKFLRIYYGKVNAYLSPTEGAEDS

SEQ ID NO: 378284 - protein, 465 aa, unidentified
MKSKTSKSKKQSKKISIDSGWDPINLHAAGVDIGSREHWAAVPPQSGKPSIRKFGAFTTDLEAMAEWFKECGVTSVAMESTGIYWIPLFQILERKGFQVILVNARQTKNVAGRKSDVQDCQWIQRLHTYGLLQGSFRPEDGYCVLRTYLRYRDELVGARSPQSQHMQKALLQMNIQLSHVLSDVTGVSGLAIIAAILKGERDPVKLAALVDPRVRASQQTIAKALVGDYRPEHLFVLRQACELYHTYEAKISACDEQMVREVTSLPIKVDPIAKPLPARKAGRPAVYDKMAGVDMRPELYKKFGVDLTAIEGIGVLTGLVLLTEVGPDLSRFRTEKHFCSWLGLCPDNRISGGRVLSSRTRRVVNRLSDALRIAASTLERSQSALGAFSRRMKARLGAAEGITATAHKLARIIYRLIKHGEAYVRQGLEDYEKKFAARKLNLLQKTAKAFGFELVQKQAMTQSVS

SEQ ID NO: 378285 - protein, 427 aa, unidentified
MGAMSESEVQELQFAALVGIDWADQKHAWCLQAADTTHRENGEVEHTPEAIEAWVGQLCRRFANRPIAVAVEQVKGALVFMLSKYGFLHLFPVPPTMSAKMREALYPSGSKDDPRDADMLLELLLQHRDKLRRLSPDSEATRRVQNLVDERRNLVDEKTAQINRLTHQLKIYFPQMLEWFEQLDTELVCVLLERWPTLEELQKVPPQRLRTFFHKQRCRYPELIERRLVGIRQAIPAIRDRAVIEAKSTVVKVSAQVIRSLVRGITDLDRKIEEAAAAHPDFFIFESLPGAGAVLAPRLLAAFGSQRERYTSAEEVQTYSGIAPVMKRSGKKKWVHFRWACPKFVRQSFHEWAGHSIAHSQWARSYYQQQRKRGKGHHAAVRGLAFKWIRIVFRCWKDRAVYDESRYLITLAKRNSPLAAVPGGTML

SEQ ID NO: 378286 - protein, 344 aa, unidentified
MTSIDYIGLDIHKKTISFCAKAQDGTILDQGTIVARRDTLLAWAKARPRPWIGAMEATLFTGWIYDLLKPLAQELKVAHPAMLKAIAASKKKNDQVDARTIADLLRCNLLPECYMAPSAIRDLRRVLRYRNLVVRQATRMKNRIAGLLMETGTPYNKERLHGRAYFSELLASLREVPRSVVELLQLSRGQLEFFATIQRRLLKGLCQNPDLSERVARLQTIPGVGEIMALSWALEVGEVKRLPSIAQAASYCGLTSAQHNSAGKEQRGPISKQRNKHLQTILIEAAKLAPRHNPQLAVVHERELKRGDRNQATLAVARKLVAYLMAVDKSGKPFAMRASGAEAA

SEQ ID NO: 378287 - protein, 332 aa, unidentified
MMAQNDRVVVGIDVAKDKVDASIRSLSQRQTFPSTTEGRRTLIRWLRKHKVGKAAMEASGGYERDWAKALREARIEVRIVDPKRVRSFARSAGRLAKNDAIDAEMIAWFAETFGEAPSQAYDAARDKLVQIVRARQSLLDLQTSLQNRGEHAAPEVVQKMQARLLKTIALEVAKLEAAITAMIKATPHLAELAEIIESVPGLGKITSAGLVAAMPELGQVSNNIAAALLGVAPYDDDSGQRRGDRHIKGGRRKVRNLFYMACLGAATRHNPMLKAFYDRLIAKGKEPKVALTACMRKLICILNTMIARREKWDATRYKMSDPARLPPSACPA

SEQ ID NO: 378288 - protein, 394 aa, unidentified
MGEQEWGPVVIGMDPHKRTVTIEVMTSTEQIVGHGRFTTDEAGFTEMLEYARRWRDRTWAIEGCEGIGRHVVARLLPLGEPVVDVPAKLSARMRVFATGQGRKTDDTDAHSIALVGVRMAGLRSVVHDAQLEVLWLLVDRRRRIGEDHTRVVCQLHGLLLEIVPGGAKKDLSAAQARAILATVRPRDVVGKTRKRVALEMVADLEKTYRRKKEANKELTELVAATGTSLLGLHGIGPTGAARLLVEVGDITRFPTKGHFASWTGTAPIDASSGDNVRQRLSRGGNRHINQVPHIMATVQLRTRTTQGRAYYDRKAAAGKTPNAAMRCLKRRLSDVVYRTMLDDIVTTAGTGPGGHQGASLSSSAAGSQPHTDTSDQSLPGPVTTHHRTPLKTPA

SEQ ID NO: 378289 - protein, 315 aa, unidentified
MYIGIDIGKADFHCALLLEEKVATKSFPNNGKGFNQLAAWLRNRRVDNGHACMESTGGWSEALATFLHDRDYVVSIVNPLAVKAFGRSELSRTKTDKADAALLARFCAAHRPKPWIPPSPQERRLRQLVRRRSDLVASRTAESNRLEAPETDAVRTSIETSVAFLNEQIAEIEEQIKNDIDSDPKLQNNRKLLESIPGIGTTSASSLIAEVQDMQQFDSARKLAAHAGLSPQVRQSGTSIHSSSLTPIGNRALKQIFYMPALSAMRHNPIIIAFAQRLRERGKRPMQIVVAVMHKLLVIAYGVLKSQRPFDPNRA

SEQ ID NO: 378290 - protein, 350 aa, unidentified
MDKGITVGLDMGDQKHSICVLDAEGEVQSRATVTNTAQAIRKYFKKLEPCRVAMEAGTHSGWVSRILEELGHEVLVGNPRKLRAIWDSNEMDDTRDAEMLARIARLDPHLLHPIHHRGPQAQRDLAVIKARDMLVKARSMLIAHARGLVKSVGQRISKCSAEAFHNRLQAEMPEELRPALEPVMKSLEELTRRIRHYDQLVERLCREQYPETERLRAISGVGPMTALAFVLTLEESARFAKSRAVGAFLGLTPRRDQSGQTDKQLRITKAGNGYLRRLLVGSARYILGPFGPDCDLRRFGTKLAARGGKNAKRRAGVAVARKLGVLMHHLWKTGGTYDPLYQENRKRKSA

SEQ ID NO: 378291 - protein, 478 aa, unidentified
MPQARSAATSVAAPHVVPQLGHETLYVGIDVGKLQHVAGFVSPTLLARYQRFESCPALTFAQSREGFRALVDRIQTSVPLTQVYVLLEVTGHYHKALVQYLHELDIPVYLMHVQKRQAGLLKSDKRDALGLANHLYNTLEKGVQSADPLQAVRRLAPPSAAAAQLYGMIHHREELVRERTQRKNKLTSICDELFPEFTQVCKDPNSASALALRTVFPTPAALASASVSALQAARSGHYPSTGQLFALQQLAAESIGTRDLARVRGLTFEQQQLIAELALIEQHVVALDAEITQVLAASREGCMLTSIPGIGPMQAATIIAAIGSIANFDRPAQLKAYCGWAPTLRQSGKTLDHAKLTPRGVRGLKQALFLAAWGAIRGGDNEFARLYERLVPRKCAFDERKREYIGKNKVVGRVAGQLVTVLFTLLKRDQEVVARANGSPLLPEPTLYDPALHRRHRAGLYAAPGAAPRDTIVRLPIP

SEQ ID NO: 378292 - protein, 309 aa, unidentified
MKEQLVYLGVDIAKCYLDAAIGNEKRCFSNDPIGHRALIKWIKQIEGSVQVICEPSGGYERGLVRALVGAQLKVSLVPANRVRQFARAAGILAKTDRIDAKLLCAFAEAMQPGTISASQLEQEHLRELESQRRHLTHLLVMEQNRAARVSDVCVRRLNRTLINQIKKQIEQLDLLIKQHIEESGELSVKAAKLTAISGVGTRTAALLLAQMPELGQLNRREVAALVGVAPFNRDSGKMRGKRAIYGGRRPVRHGLYMAALVAARHNPILRAFYLRLRAAGKPAKLALTATMRKLLIVLNSSLKHDLNYA

SEQ ID NO: 378293 - protein, 451 aa, unidentified
MARKRRKHRKLERSLPEMRPNAGGIDVGATEIFVAVPADRDTDSVRSFPTFTQDLHELADWLQQCRVDTVAMESTGVYWIPLFQILEARGIEVHLVNAQHVHHVPGRKSDVLDCQWLQYLHSVGLLRASFRPEHAVCEIRSLMRHRQNLVEMACVHVQHMHKSLDQMNLQIHHVISDITGVTGLAIVDAIVAGITNPKELAKLRDYRIKASEETVTKSLVGDYRREHIFTLKQSLTAYRYYQQLIADCDQEIQQRIESFHPKPDDSAGAAAAGLSDSTPTSSTFDLHSHLERIFGVDLTRIPGFECLRIQTIFSELGVDLLSKFETDERFCSWLNLCPKDGTSAGRRIRAPKIKTKNRVTQELRLAAQSLHHNRSYLGDYYRSQRARHGAVRAIKNTAHKLARILFHVVTTRQPYDETVFAKLEARNQKRRLHKLQSMAKQMGYSLVQAHA

SEQ ID NO: 378294 - protein, 370 aa, unidentified
MSNVKLFVGLDVHKATIAMSVAEAGRNGEVRYIGNFANNPVAIISQLKRLSEHHGEIECAYEAGPCAYTLYRKLKDVGICCMVVAPSKLPAVRGRVKNDHRDSLSLARLLRSGDLVAVWVPDPTHEAMRDLVRARQAASFDVRKARQRIQSYLLLRDRHYVSKPWTSRHKIWLADQAFDHPAQQITLQTYINALEQAESRRAGLDQQINDLLPSWSLAPIVKSLQALRGVASVIAIALVAEIGDFERFASPRDLMAYMGLVPGEHSSGASVRPRGITKQGNSVTRALLYEAAWCYRQSAKVGQWMTARRPRDLPQYALDIAWKAQLRLCSRYRKLVARGEKSQVAITAVARELLGFVWAIAREESRHVPT

SEQ ID NO: 378295 - protein, 430 aa, unidentified
METSITTPEAVAAYIGIDWADQKHVIALRSATELNKIEHQVIDQKPEALMEWIGQLEQRFSLQGKILVCLEQSRGALIYHLMGYEFFELYPVNPLQLARYREAFSPGGAKDDRPDSELLNELLYCHRDRLRALKPDSVLGRKLSFFNQGRREAVDQRTRLSHAIKSQLKVYFPLTLELLDQDTSTALAADLLLRWPNLEAIQKQSVHTLRKFFYGHNCRGEQRMLQRLELVQKAKPLTQDSAIIEPAALRVQMLARQLKNLLPDIARYDKKIAELFAAHPDRLLFENLPGAGEALAPRLASAFGSDPERWESALEIATLSGIAPVRRASGIRSGKKGERKASVHFRQACPKFLRQSFHEFAGCSIRYCSWAQAHYSSQRAQGKGHHAAVRSLAFKWIRILFACWKQRTPYDAQRYLKTLQHRGSPLANAC

SEQ ID NO: 378296 - protein, 350 aa, unidentified
MTTIARCITGGVDTHLDVHVAAALDERGALLGIESFATTAVGYRRLHRWLESFGTLELVGVEGTGSYGAGLTRHLLANEVAVVEVDRPNRQRRRLAGKSDPHDAEAAARAAQGGDATGLAKSRDGNVESMRVLRVARFSARRSRTQAINQMRSLISTAPDELRSELRDLSIYKVLELASAYRHTGRTDVTGVTKLTLRTLARRALSLEDEVKEIDRLLKILVAETAPELGAIDGVGTDVASALLVAAGDNPERLKNEATFAKLCGVAPLDASSGKNERHRLNHGGDRQANSALWHIVFTRMVNDPRTKHYIERRMKDGKTKKEAMRCLKRYVAREVFAQLPRSELALDNP

SEQ ID NO: 378297 - protein, 417 aa, unidentified
MSTEVRFFGGIDWASETHQVCLVAADGKIIGERAFAHGGAGLAEMCDWLVTTSGEEPPAVAVAIEVPHGPVVEILLERRFQVDAVNPKQLDRFRDRFTVAGAKDDRRDAYVLADALRTDRHCFRRLTVEDPVVIELREWSRMAEDLQQERNRLANRVREQLWRYYPQAPELGDDLAADWFLDLWALAPTPAKAARLRESRVTSLLKAHRIRRLEAAEVLRILRQKPLVVASGTIEAATAHITAVAARLKLVNQQIKQAHRRLDELADKLAEGREEDAPGQKSKQRDVTILRSLPGVGRIVLATLLGEAAEPLRKRDYHALRTLSGVAPVTRRSGKRCVVLMRQACHLRLRTAVYHWARVAIQHDARSRARYAELRKRGHSHGRALRSVADRLLAVACAMLKTQSTFNPEHAAEAATA

SEQ ID NO: 378298 - protein, 353 aa, unidentified
MKCDKYIGCDLHQATTVVAVLDAEGKIVMETIVATEAAAIIRFLKGLSGTLHITFEETTQARWMYDVVRGYVKEVIVCDPRRNKLLGEGSKADKPDARKLAELLRAGLLRPVYHGHEATRQLKELVRGYETLSADTQRMMVRIKAIYRAHGIRTPGSAVYQQKQREQWLQLLTEPGTRQRVNWLYEELDHLRPLRKQAKMAMVAEGRKHQAFRLLRTIPQMGPVRCAMLVATVDTPYRFRTKHQLWAYSGLAIVTYMSSEYEIKSGRVVRSRKPLATRGLNRNCNRRLKELFISAAVAGSRSEPYRSYVEGLQQKGIRAEMARLTLARKIAAVALRVWKKGETFDPKKLNSMT

SEQ ID NO: 378299 - protein, 341 aa, unidentified
MWIIGVDYHPSMQQIAWVDTETGECGERRLAHCAEAEQFYRELKQKGVSVRVGMEATGHSRWFERLLAELNFEVWLGDPAQIRAKQVRKQKNDRRDAEHILKLMLEDNFPRIWVPTAENRDLRQLVWHRHRLVGMRTRVMNQLQAIAMNEGVRRKRRLWSQQGRAQLESLSLPVWTSRRRQELLQLLDRFDPSIDELSAAIEQEAARSPEVQRLLTHPGVGPITALAYVLVLGTPDRFRCGKHVASYLGLIPCEDSSAERWRLGHISKQGNALLRYLLGQAALSVARCDQQWRQQYAHLTMRRNHAIAKVAMARKLAVRLFWMWRRGWDYQQLKRFGSHVG

SEQ ID NO: 378300 - protein, 341 aa, unidentified
MEQATTIGLDIAKYVFQVHGADSAGHVLFRKRITRGKLLGFLAAQAPCVVAMEACAGAHYWAREIAKLGHHVRLIAPAYVKPFIRRQKNDAADAEAICEAAQRPSMRFVPVKTQEQQANGIVFRARDLLVRQRTQCVNALRGHLMEYGYVFPKGITHVETLAAVVEDLQSSLPDRVRVILQLLVDTFTALEAQITALDAEINQRSKSDPTARRLMTIPGVGPITSTAITALVPAAEGFPAGRDFAAWLGLTPLQKSTGGKQKLGAVSKRGERTIRRLLIIGASAVVQQASRRGAPKGSWLAQMLARKPKMLVTVALANKMARIIWALLVKGGTYRTPVAAA

SEQ ID NO: 378301 - protein, 395 aa, unidentified
MYKLLVGIDVSKERFSAAGIDSGGKEAFSQAYTMDSKGFEELLKAVRTHCEEDSKVLVAMESTGCYHINLFSFLNSQGIGALVVNPLLISNYGKLSLRKTKTDKKDAMTIAKFLLDHHKEISQLSISQDNQDLRDLSRERESLSHLISATKVEIKRVLRTTFPELETIGEIDTGVMLRLIREYPSARLVRAAKLKGIIKLLKEPRRGNKLTYTAEDIYRAAKASIATVSPGKEIILRGKVATLLHLQERLEEITKLLTELCQSTRMEDLNILQSIKGVGPNTAAPLLAEMGSIENFSSHKKLIAFAGLDPSVTESGQYIGASRLSKRGNRHLRRAIYLMTTSVVSWNAWFKAYFQKRKAEGMAPQKALFATAHKLIRVIFAMLSQRTYFKVKEAK

SEQ ID NO: 378302 - protein, 404 aa, unidentified
MTSAVMDNTADQDVVGGVDSHTDTLHVAVISDHGGHLADAEFTTTAAGYAAALAFLTAHGHVIAIGVEGTASYGAGFTRAAREAGLHVVEVNRPDRAERRRIGKSDPIDAYAAARAALSGRASSAPKDDTVAGIRALHNAARSAVKARTAALNQIGSLLITAPDTIRAKYGRLKGTDRTDALARLRPAGDAVHTAVLTALKSLARRVKKLTVEHETLVKALDSVVSVHNPGLRAAHGVGPDTAAQLLVTAGGNPDRMRTEASFAALCGAAPVPASSGRTNRHRLSRGGDRQANAALYRVALVRMSSDSRTREYVARQTAAGRTKKEIIRLLKRAIAREMFRCLTTTVTVPGIDDLRPLRRSKNITLTAAARHFALWPATISTLERGTRRDDDLAHAYRNWLQAV

SEQ ID NO: 378303 - protein, 349 aa, unidentified
MAMVGGLDLHRRQITFDVVEVESGQEWRGRIWQPDRERFRHWLGHEVTSRARGGQVALAVEGCTGWRYVAEEITAAGFEAHLAEPADTQAARGRKHRAKTDRTDARLLRDLLVAGDLPESWIPPTDVLEWRERVRLYVSLVNQRTVWCQRIHAELYQHGVAVPEGAIRTAKTRAMLADDRLPLSPAARQRVTVGYRMIDATDTEALPLKRDLTRFGMKQPGCRALVNAQYGIGGLIAVAVWTELGDCRRFSRSEQVVRHTGLDVTVDASDRRRAGGYLSRQGPETLRWALYEAAKNSSHQRSPDHDYYIRLKGRHDGKIAAISMARKLARRSYHVLRNVDPDLVYAMPN

SEQ ID NO: 378304 - protein, 344 aa, unidentified
MLYVGLDLSRKRLDWQALAGDGQRVEIGAVPPDADGLAKLTQRLGDADVVAVIESMSGARFVHDRLELAGWDVRIADAAKARGIAPLACKTDTIDTWVLAELARLELVPEIWLPDPEIRAERERARFRLHLVKHRSALKNRVHAILFQHGVANPLSDLFGAAGRVLLERLRLPEPWTSTVGASLALIDVLDEQISACERELRELGAEHRYIPLLLSCPGIGWVLAFTIASEIGDIARFPSPRKLVGYTGLCPRVDQSGERDRRGPLRKNGPNHLRWALVEAAHTAYRHPLYRPLLERKRAQLGKKRGTKIAAIDVARKLTEAIWHMLTRNERFAPAGATVSLAS

SEQ ID NO: 378305 - protein, 387 aa, unidentified
MPQPNDLSRSLVALDQDSTIIAVVEMSQSSWLVAGMLPGIERQPRKKLEPSAERLLGLLHRWRDEAVKAGRKITRIALAFEAGRDGFWLARWLRAHGVEGHVIHPSSVAVSREHRRAKTDRLDTELLKRGFLGWLRGERGHCTMARIPTIAEEDAKRPNRERECLVRERTRIVNRMKGTLARLGIRNFKPTLRKAAERVTTLHTPEGSALPPNVSAELQRNMARLGFVVSQIKEIEAARQKRLEQEPETEPHAMVRHLARVVGLGVETADILVNEVLSRPMRDRKAVARYAGLTGSPDESGAKRREQGLAKAGNARVRRGMIQLAWRFLRFQKESALALWYRARTADSRVGTRKTMIVALARKLLIALWRFVTTGETLEGVVLRPAG

SEQ ID NO: 378306 - protein, 326 aa, unidentified
MEWTVAIGIDTHRDLHVAVALDRLGRLLGSLEFAVDEHGFAELVRFARSLGQPTFAIEGTGSYGASLARALLAEGLLVYECERPERRSRKGKNDLLDAEAAARRLLSGQRLPLPRSGAGREQLRLLLAERRSAQRSRLQALNQLQAALVSLDPPLRARLSRLTPAALEREPLLRRPLLAPLRRLSKRIRLLEGELCEIDAELGELTRALCPQLLAETGIGPLCSAQLLVSAADPSRLRSEASFAALAGVSPIEASSGQVKRHRLNRGGDRQLNWALHMSALNRIRHHPETRAYYERLLSKGKTKREAIRIVKRVLARRLYRTLVAA

SEQ ID NO: 378307 - protein, 414 aa, unidentified
MELLHERCAALDIGKKDLKACVRTPNPAGKRSRRQEIRTYATTTNSLLELRDWLVAEQVTLVVLEATGDYWRGAFYLLEDDLNVILVNAAHAKGLPGRKTDVCDAAWLCQLGECGLLRASFVPPEPIRQLRDLTRYRTTLTAERSREAQRLEKELEDAGIKLSSVATDILGVSGRAMLAALIDGERDVRVLAEMAKARMRSKIPQLVEALTGNFGEHHAFLCRLHLERIDQLSASILALSSRIEEQMRPFSRRLDQLATIPGVGQSVAEVIIAETGGDMSRFQTAAHLASWAGVCPGHHESAGKRKSGKTRHGNRWLIGALGTAAMAAARTKDTTYLGARYQRLAHRIGKKKAIVAVEHSILTAVWQMLTNDVDYTDLGGDYFARLDPERAMRRIVRQANTLGFTVRFDPIQAA

SEQ ID NO: 378308 - protein, 354 aa, unidentified
MPRKINQLEAVATLGIDIGKNTFHLVGLDREGAIALRQRLSRSQVEARLANMPPCLIGMEACVGAHHLSRQLKAHGHDARLMPARYVRPYSKGPKNDFRDAEAIAEAVLRPTMKFVGTKTVQQLDLQGLHRVRERLVCQRTSVINQIRSFLLERGIAVRQGLRALRAEMPIILAMTDKLSPRMIHILEDLCTDWRYLDERIETVSNEIETLSGQDDGARRLMTVPGIGPIISTATVAAIGSGDVFAKGRDFGAWLGLVPRQMSTGGRTVLGPISKRGNRYLRMLFVQAARAVLLRPQSWEKHGLKPWIEAAARRLNRFKLAIALANKLARIAWGVLHGGRNFEIRSTKPAPQAA

SEQ ID NO: 378309 - protein, 346 aa, unidentified
MEEITTVGLDLAKSVFQVHAIDASGQVVLSKAVRRAGLLPLFGKLPPCLIGMEACATSHHWARALIGLGHDVRLIPPAYVKAYVRRQKNDAADAAAICEAVSRPSMRFVPVKSQDQQAVLMLHRARSLLVTQRTALICALRSHMAEFGIVVATGPRNIAPLLAILADAADDRLPAVARSALEPLARQMAQLQGEIEQLDRRILDWHRSSQISLRLATIPGIGPLTATALAASITDPSMFRSGRELAAFLGLVPRQSSSGGKERLGRISKMGDRYLRTLLVVGATAVLRHAKAGGSSSRVWADALLGKKPFKLVAVALANKTARIAWAVMTRGEVFRDGLRTRAMAA

SEQ ID NO: 378310 - protein, 339 aa, unidentified
MDRQYVGIDFHRRRSVIVRKNAAGEKLASVRVANDPMVIAAAIAEAGPEPEVVIEATYGWYWIVDLLQAHGASVHLANPSGLNWGQRRVKNDERDAIDLIDMLRLGRLPEAWIAPPATRELRELVRYRAKLVALRSGLKAQVHAVMAKEGVLPTVTDMFGPRGNVQLDAMPLGDAYTVRVESLQDLIEIYDREVAMLERHIRQRVRSDPGYKAIQAINGIGPTMAAILVAEIGDVARFRSAAALCSWAGLTPKHHESDTTVRRGAVTKQGSRLVRWAVIEGAARYHGGPKLAGDFRRIAERRGKNKATVAVAHKILTLVYYGLRDGEIRCLAPADPEAA

SEQ ID NO: 378311 - protein, 351 aa, unidentified
MMIIGVDYHPSFQQVAFLDRDTGEYGEQRLNHHDGEAEKFYRDLRLRGINVRVGIEATGYARWFERLLAELGIELWIGNAAEIQTKRVRKQKTDRQDAQLLLKLLLEDRFPRIWVPSPENRDLRQLLWHRHRLVQMRTRILNQLQALAMNEGQKWKKGLWSELGRAQLEKFPLPPWASRRRQDLSELLDRVNPILEELTAAVEQEAQKRPEALRLMTHPGVGPITALAFVLIIGTPERFHGGKQIGSYVGLIPSEDSSAGRQRLGHISKQGNALLRFLLVEAAQAAIRYDPDWRRRYLHLAMRRERRIAKVAMARRLAVRLYWMWRNGWEYWQSREFGSHAGELVTGHGVN

SEQ ID NO: 378312 - protein, 265 aa, unidentified
MVLSPLFVGIDVAKATLDIAVRPTAETWSASNDATGIDALVLRLGAWAPTLIVLEATGGSQGPLGAALVAAALPVVVVHPRHIRAFAQAVGILAKTDRMDARVIAHCAEAVKPAPRPLPDAETHERRALRVRRRQLVERVSAERARLDPAPPRIQDAIQAHIAWLTTQIAGLDDALTRASQTHPVWQAKDDVLQSIPGVGPVLARTMLGQVPAWGTRGPTPLAALIGVAPFHRDSGTLRGRRPVYGGRAEVRAVLSMGALVATRR

SEQ ID NO: 378313 - protein, 418 aa, unidentified
MHETQSWFAGVDWASQKHDVWLTDASGKRLGKRTFAHSGEGLAQMCDWLMATSGGKPEDIHVAIEVPHGAVVETLLHRGFKVYSINPRQLDRFRDRFSPAGAKDDSRDAETLSSSLRTDRRAFHQVSLAGPAIIQLREWSRMADDLRADQIRHANRLREQLQRYYPQMLQFDSDLAEEWVLKLWEAAPTPAKAARLRQAEVEKLLKRHRIRRIDAAKVLAILKEQALIVAPGVTEAAVAHIRVLIESIRLFTQQLKEAHRQLDKLCKLLAAPIAGENEQIGPEPEQTLGAILQSLPGAGRIVISTLLAEAFETLKRADYPILRKLCGVAPVTRRSGKSRAVTRRLACNPRLRNAIHYLADAARRCDEKSKAKYLALKARGCSHARALRTIGDRLLYVACAMLKNRTLFDPCLESQKCA

SEQ ID NO: 378314 - protein, 270 aa, unidentified
MMNNAKQTKDTKQTKTNVANKPNEPIYCGIDVGKKVFVVSLSCKDKTKTFSNTGGDIKQAITYLNTNAGTNLALVVLESTGGLEIPLAKALHQSGFNVVIANPNKTSQFAKSYSNAKTDNQDAKMLALYAKFLSLDESKLTHLLYVPPSEEQEHLEALVVRRHQLVAMRVQEKNRLGQIHQSQLESVKQVIAYLDEQIAKLEQDIDTLSKHFDDTTKKFKDIKGIGGVTVATLMSMLPELGTLSNKEIASLVGVAPHPKESGTLKYTNRT

SEQ ID NO: 378315 - protein, 358 aa, unidentified
MNRNAAQGAGQIIGQIEGRQVVGLDIAKNVFQLHTVDMATGEIVNMQLKRAKVLEHFANRAPCLIGIEACGAAHHWARELTRLGHHVRLIHAKAVRPFVAGNKTDATDARAIWLAVQQPGTKFVGIKNLAQQATLTLHRQRELLMKMKTMQTNALRGLLYEFGAIFAKGRNALLGEIEATLERLAGDMPQYVADSLREQAQRIKALSADIKAIEVRLAAVLRTDRDMKRVAAIPGVGLLTATAAIATMGQASAFKSAPEFCAWLGLVPKQHGTGGRVNLLGISKRGDTYLRTLLIHGARSVLTHAKEPGPWLEQLQARRPAGVAIVAQAAKMARTIWAVTARQQDYQRGYQSTRPQAA

SEQ ID NO: 378316 - protein, 490 aa, unidentified
MSKRRKLSTFERLNSGKMNRAQRKELARRVCADDPGLEVVHRNVAGIDVGNESHYVAVAPGCDPQPVREFGCWTADLKRMAEWLKSCGVKTAVMQSTGVYWIAVFDVLERAGLNVWLSNARDTKNLPGRKSDVQESQWLMKLHTYGLLRNSFRPPEEIRAVRTVWRLRGRHVQDASREIQHMQKAMTTMNLQLANVISDVSGETGQAIIRAILKGQRNPRELAKLRDYRIKASEEEIACSLEGHWQEEVLFELQQSVDRYDFCQRQIAECDQRLQKCLAALPSRTMAPQRESKTDPAVNCPEGKDATEKSKKKKRSKPRDNEPKFDLESELTRICGVDLTTIDGVKVMTIQTFVAELGTDMSRWPTEDNLVSWLKLSPNRPVTGGRVMRQRPLKTKNRVSTVLRTAATTLADSDSYLGARYRQFRAHLGPGKAAKAMAAHLARLIYQMLTHGQAWVDRGAQEHEKRRTHRETQFLLRKAAALGYRLEPAA

SEQ ID NO: 378317 - protein, 415 aa, unidentified
MIDQHQWYAGVDWASESHHVFLTDNSGKKIGERVFKHDGEGLAAMASWLIAASGSKDPMQIQIAIEIPHGPVVETLIERGFRVHSINPKQMDRFRDRFTMAGAKDDSRDAEVMASSLRTDPSCYRELAGADPVITELREWSRMAEDLGTERNRLTNRMREQLWRYFPAILELDSDLGAEWLLDLWEAVPTPAKAMRVREKTIAALLKRHRIRRFDAAHVLAVMRKQPISVAAGTTEAASAHIASLIARIRLLNQQLGEAHHQIDKLTMHLVPQDGKETGQRKLHDVEILASLPGVGRIVLATLLAEAFDALQRRDYAALRSLTGVAPVTKRSGKSYIVLRRQACHNRLANAMYHWARVAIQHDIKSRTKYAALRSRGHSHGRSLRSVADRLLNVACSMLKNGSAFNSSPEAQNAT

SEQ ID NO: 378318 - protein, 319 aa, unidentified
MSKTVLGIDTAKKTFETLLMFGGKALKKSFSNNRKGFDLLQGWLKSLHIDQVHACLEATGMYSEALAEFLYERGHTVSVINPLRIKSFAMSDLKRNKTDGTDARTIAEFCLAKDPKTWHPLPPEIKQLQALTRRIESLEEMLHIEANRLEQASATVKPSLRRMIGNVKKEIKSVERLIKDHIDKHPDLKHQSKLLQTIPGIGEKTARLLLGEVEFREFDSARALAAHAGVTPGKRKSGTSIDWTRLSKIGNGRIRKALYFPAISAVRYNEVIKQFARRLSQNGKAKMQVICAAMRKLLHIAFGVIKNNQPFNPNPDVYI

SEQ ID NO: 378319 - protein, 466 aa, unidentified
MENNYILYVGMDISKGKADAAILKVSDRRSVKPKFIRKKLSFKFVKSEVASFLETVRSYSDVNCTSICFALEVTGIYSTNVYNYIKVNLYENESIKFLNTDFVNQWRNAHNIAKSDPLDAQTISTIIGTDSNVQYVNDNVFENKNGYQDLKALVHRHYQIKKIYSQEINRLIAQCDCLFPELQYVFEPKSAAFIAVLSSYPTTHDIINTSRVEVFDVVYEATKHRCSMDKIDKLFELCQDTLVPDDISSYGKSIILDLVENIKNIKGQLKSIERYIREVASLNPAYKLLLTITGCGPITAATVIAETGNIRRFKNADCFVSYSGTSPRNKRSGTSVETMGKISKKGSRYLRHAIYMIAEFARRHNPVLKHQFERIKNGNKKRHMLANIAIANKIARYIYSIMKNKSSFVILHDHIMRLPEETRYTFFNSISLDFPKNTRKQIYQYSDINGEVHKFVYTKTDEMIPA

SEQ ID NO: 378320 - protein, 347 aa, unidentified
MMRLAYMGMDVHAGTTVLGAMNSRGDFVGNRRFDTSETGIVKALGQFPAKTKYLALEESTLAHWVAQVAKPHVADVLICDPRHNALIYGGAVKRDPVDTEKLCRLLRLGELKRVYHAQEDHRAIFKAAVQHYIDLRNQQVVLKLKIKAMYRHWGVVRVPGEAVYSTEGRKEYLKQIKPAAVKNELKRLYAILDQTERMQALAAQEMKRLARRYPEIKEFKKIPGIGPIGAITFDAFVQTPDRFPNKHKLWRYCRLGIIDHSSDGKSLGFKRLDRSGIGELKAVSYRAWYNAQKGNNEVHQFYLASLQRTHSKVHARLNTQRKIIAVMYGVWKRGEEYSAEVFLGSSD

SEQ ID NO: 378321 - protein, 342 aa, unidentified
MDEYDGRQFVGIDLHRRRSVIVRQSESGEQLSAVRIVNDPIALGLEIERAGPNPEVVLEATYGWYWAVDTLQAVGARVHLAHPLGVKGFRYRRVKNDVRDAADLADLLRMGRLPEAWIAPPATRELRELVRYRAKIVALRSGLKAQVHAVLAKAGVLITVSDLFGAGGRQRLAKVPLGGAYASRVRSLLELIDILDGHEARFAALIADRLDADRGYQAIQQVPGIGPTLAAVFVAEIGDAGRFADPAHLFSWAGLTPRHRESDTIVHRGHITKQGSKLVRWAAIEAVQRQQTTAKISVDKDRIEARRGKNIAKVAAARKLLTLVYYGLRDGHIRALDRARAA

SEQ ID NO: 378322 - protein, 387 aa, unidentified
MPQLNDLSRSLVALDQDSTIIAVVELSQSSWLVGGVLPGIERQPRKKLEPSPERLLGLLHRWRDEAVRAGKEVTRIALAFEAGRDGFWLARWLEARGVEAHVIHPSSVAVSREHRRAKTDRLDTELLKRGFLGWLRGERGHCTMARVPTIAEEDAKRPNRERECLVAERTRIVNRMKATLARLGVRNFKPTLRKAAERLATIHTPEGMPLPPNVLAELQRDMARLGFVVSQIRDIEKARQKRLEQEPETGSHAMVRQLARVVGVGIETADMLVHEVLSRPMRDRKAVARYAGLTGSPDESGAKRREQGLARAGNARVRRGMVQLAWRFLLFQKESALALWYRARTADSRVGTRKTLIVALARKLLIALWRFVTTGEALEGVILRPAG

SEQ ID NO: 378323 - protein, 414 aa, unidentified
MHTQLFVGIDTHKNSHTAAVLDSYFSTLSTITFANSFNGFNELVEKLEKMAKGKTYLFGLEDSQGLGSFLAEFLLKKGFSVVDINPISTDRGRRLTVHRDKSDDRDAVLIAKTLIREKVSLHPVRINKNSIALREMIGYRQILVEESTRIKNRLHVALFNQYMGVLGYFSSLFSKCALAFFARYPDPCLLKDTDLDTLATFLKANSKGRYGREKARAILSATSNSIAGSLVDTRAYIIRRHIARLSEIQAELEKIKEMLCPLVEKSSYVCLTSVPGIDTVTAAKIISQVIDIDRFSSPSKLAKFIGIAPREKSTGRKKRYEKSKYGKKFLYSTIYFMALAHISRTRDGKDKNPISRAYYLKKVSEGKTKKEALTCLARRLCDLIFAIMRDRSIYNFSKSKFTKQHSVFLDTVVA

SEQ ID NO: 378324 - protein, 348 aa, unidentified
MSKSSQYVGLDVSLKETSICIIDDAGKIVWRGRVDSTPEAIATAVKQHAPNAVRIGLESGQLSSWLFHELKEAGFPVICVDARHAKAALSLKVNKTDANDAFGLAQIMRVGWYREVTVKGLDCQAVRALLVARAQIVSQITTLKNCVRGILKTFGRVLPKGLRSQFPGRVRAAIDGHPVLGAIIEPTLQVLEATRAQLLVYNKAVIQRARSDDTARQLMSAPGVGTVVALAYMTGVEDPARFKRSSSVAAYFGMTPRRYQSGEVDHAGRISKCGDGMVRGLLFEAAKVLLSRSARPSALKTWGEALGKRIGAKKATMAVARKLAVILHRMWTTGTTFQWNAEAASPAT

SEQ ID NO: 378325 - protein, 405 aa, unidentified
MTVYIGIDWSSQKHDIVYLNEEGGIIAYQTIPHTPCGFEAFDDQRRKLVIDTDDCLVGIETAHNLFLDYLSSHQYPRIYIIPPTMIKNSRGRFGASKANTDRSDAHLIADMLRTDRARLHPWHADSLLTQQITALVSLLQFLTRAIIQTNNRLRNVLWRYYPNATTVFSALDLQISLEFICAFPTPQAADQLSFEKFKAFARLHHYPQPSKLAACFARLHKPQPQAKLQTVLAFQSEAVRLARLSLHAVQDKAATIREIQILFKEHPDYPIFSSLPGTGKILAPALLAKFGDDRQRYPSPQVLQSVAGTCPVTHSSGKHKYVSFRRACDHEFRWIVQQWAKCSIDDSVWAYSYFQSIRPHCDSLSHAYRRLANRWLEIAWRLWQDRVPYDEERHLRQHALRVKPI

SEQ ID NO: 378326 - protein, 333 aa, unidentified
MEKKWFIGIDISKKTLDVVIYVPTKKHADETNYERFLNKEEGYKSLLCWLKKKNMAKKRLVISMENTGIYSFDLCLFLEAASIDYCSFNPLHLKRSLGLVRGKNDRVDAERIAYFAYLHRDELSSSKLSGSSIIRLRDFAAERKRFVKQQAEYKGFLTDRKDCEMTSTIERAAHMVKILDEEIASVEEEMLQIINSDPSILRNYELLNSIKGIGTINAMNTIIHTNNFQAFETARQYACYLGIAPFEHSSGTSIKGKTRVYPTGAKLLKADLSQAANSAIVWDKEMKEYYERKRKEGKAYGVVLNAVKFKLVGRMFAVVKRGTPFVELMTYKK

SEQ ID NO: 378327 - protein, 359 aa, unidentified
MGIIAANTVIGMDIGLHHSWCEARTTASGPPLKEARLPNRPEEFRAVVEDLPHPIRVVMEATGNWPYLYECWELLVEEVQLAHPLKTKAIASARIKTDRIDKRILAQLGLADLVPQAYIPPREVRDLRDVLRHRVFLVRLQTKVKNRIHSYLWKLGIEHDLTDLFGKHGLAWLQTVELREPFRALLDQALTVLATLQQEIKAATRTIERLATADPRVALLVPIRGIGKYSALLILAEIGEVTRFPEPKKLVAFAGLCPSTHQSGAVTYPGRLTKQGSTWLRWALVEAAQRYAKAPGRLGTFYRRLARKKGPNPAKVAVARKLLVAIYHCLSHGVVFQEPPAIGGVSVGGPPTPRMIPGR

SEQ ID NO: 378328 - protein, 345 aa, unidentified
MELHTIGIDLGKTVFHLVGLNLCGEVVVRKKFSRKQLLHFTANLQVKLIGMEACGGSHFLGRALREQGHEVRLMPAQYVKPYVKTNKSDYIDAEAIAEAVGRPKMRFVPIKSDDQLDLQSLHRVRERWVMRRTAVINQIRGLLLERGITLRQGRGHVDAALPGILEDASAMLSGALRMLLAQLKLELDHLQMRIDEADAMINKAAGENEACRRLVAIPGIGPVTATAIIAAIGNGAAFKKGRGFSAWLGIVPGEYTTGGKQKLLGISKRGNSYLRRLFVQGARAVLQQSAKQSSGLSAWLAQLTTRTHSNVAAVALANKLARMAWAVLAKNEPYRPPMLVGAATA

SEQ ID NO: 378329 - protein, 429 aa, unidentified
MSYRIAGIDVHKKMLAVVVSNVEVESEFQFERRMFGGNPEQLRLLAAWLLEQEAEEVVMESTAQYWKPVWGALERYWKPIREKREGAKRRSGTLHLAQAQSNRGRRGRKKDFVDAERLVKRLVARELTLSFVPDAEQRLWRAVTRKKYQLRRDLVRLNNQLESLLEETHIKLSSLVSDLLGVSARRMLKALADGETDPAALAALAHQRLRATPEQLCDALGACTDLKPVYRRLLKMTLEQLQLLEQQIGQLDQELATLLHPHQDAVHRLAEVPGFGVDSAQQIIAEVGPTAATFPSEKCLSSWVGACPGDEESAGVNYSHQSPKGNRHMRRLLNQAANAAVKVKGSIFEVIYRRCVPRLGHNQAIGVIAHRQCRLIWLILHNGALYEERGPAVTMQSKYKRTWRMIRQLRQLGYRIDPPNLQPSQAQAQ

SEQ ID NO: 378330 - protein, 387 aa, unidentified
MKKTKETLQETNTTKEQLLHLSFELSDTKWKLASSDGKRVRTKGIAARNLEQLQEEIERARQRFKLQDDVKIVSCYEAGRDGFWLHRYLLSCGIENIVVDSSSIEVDRRKRRAKTDRIDAEKLLHMLMRYHGGERLLWRVVNVPSVEDEDGRQLHRELDVLKRERIRHRNRIKGILMQHGIALKNPSGNKFLEELDSIRTWDGEKLPSDLKARLVREYDRLQMVEDQIYSLKKERQRRLENEDSPSLKKVVQLMNLRGIAVNSSWKFVNEFFGWRHFKNRRELGSLAGLTPTPYDSGGSQHEQGISKAGNSRIRTLAVEMAWVWLRLQPQSKLSRWYMERFGGGGKRMRRIGIVAMARRLLIDLWQYLEYGVIPEGASLRTEMIRFY

SEQ ID NO: 378331 - protein, 376 aa, unidentified
MEKGIIFAGLDVHKDTIAVALAEAGRVEVREWGKIANTTAALQGLASKLARGHELRFCYEAGPCGYRIQRQLTALGHECVVVAPSLVPRKPGERIKTDRRDAVKLAKSHRAGDLTPVWVPDPAHEAIRDLVRLRTIAVRSLRRARQQLSGFLLRQSCHYPGRSTWTRSHRHWMAGLKFEQPVHYIVLQDCIAAVEEASARRDRLDREIAATLPTWSLAPVVHALRSLRGLDLTGAATLVAELGDVTRFDKPGQLMAYLGLVPSESSSGRRRRQGGITKAENGVARRTLIEAAWTYRYPARISRALLRRQEELAKPIRDIAWKAQERLCRRHRQLMRAGKLPSVATAAVARELTGFVWAIAHEVGPKPRFLAETAGK

SEQ ID NO: 378332 - protein, 416 aa, unidentified
MNRTLTRRIAFSEQFDLFVGVDLGKTTNIAVLIDRRLKCHGRFKFTHSRQEYDQFAKWLRQARVGMASPHVLVGMEPTNDYWQWVANYLNQVGLSYRLVNAFTVKKHREGSQLDYAKNDERDAQAISQLLTQGQFTETQLLPEPYAQMRQYEQTHWQLSAEIRRQKTLLRQHAERLFPELGQLFGDYTGMTAVALLQNHANPQAIAALSWPSFEARVRQDLTGQRLMVKKVRLAYDLAPNSIGGYGGDALQQLIQQHLASLNHLQQQRATIESALLACFHTLPTAPYLLSLGLGEVATALIAAELGDLSQFRHPKQLVKLAGIQPTPNQSGFYEREATPMSQKGRPRLRTYLFFGTMRLVRWNAAFKARKEALVNRSENPLKPIEAIGALMNKLLHLAWAVCRQETAYSTERFMAG

SEQ ID NO: 378333 - protein, 341 aa, unidentified
MQVTTIGLDIAKNVFQVHGIDAAEKVVVRKQLRRSQVLEFFKALPPCLIGMEACATAHYWARELTKLGHQVRLMPAKDVKAYVKRNKNDAADAEAICEAVGRPTMRFVRVKSAEQQGRLMQHRTRDLLMRQRTQVINALRAHLAELGIVAAQGREGIKELLAIITDEGDERLPLDARTSLIVLAAQLQALQTMIGSIEKRISAQHRANEASKRLETIPGIGILGATGIAATLTDPQAFRSGRDFAAWIGLVPRQDSTGGKQKLGPISKQGDRYLRRILVVGAHSVLRRAKQSPQKYPWLTQLLARRPFKVVAVALANKMARIAWALLAKGGSYRAPALAAA

SEQ ID NO: 378334 - protein, 337 aa, unidentified
MSEITLLAIDLAKSVFQLLGVDEQGHERLERRVSRRQLLPSLAKLPECTVVMEACGSAHYWARCVRQLGHRVRLLAPQHVRAFNRGQKNDRNDAWAIACAARQPGIPSVAVKSEEQQAILGLHRLRERLIRERVARTNQLHGLAAEFGVLLPRGSPRKLRQMLLEKLDAAALPALLGAPLRVQLESLQALEQQLHTLTRQLEELATRSQPCQRLMQLRGIGPIIATALLAQMGDASHFRQGRQFAASLGLVPQQHSSAHRTRLRGITKRGDAYLRGLLVHGARSALRVAARHPHDPLCRWALAVRERRGPNRAAVALANKLARRSWASLRYAPLTAA

SEQ ID NO: 378335 - protein, 400 aa, unidentified
MTRRFTLFCGIDIGKANHTACLIDADGNFILRCQSFTNDAAGFAVLLKRLDGASKGKPILIGMEATGHYWYALHEHLVGHHYKVVALNPVQTAEQARKQIRKTKTDRVDAGHIAVLMKNGDYRPTLIPGELAMTCRQLSRLWYALGLQQAKTKQLIHAKLEFLWPEFEGHFADPLCLTARAILQQAPTPRELLGLEEKVLIELIEEASRKKLGANLARRLRLSAQTTIGMRRGAEGAAIAVRTLLKQLDATKPVRLHLQQQIVALSARLPSYVLSLPGADEIRAVSLFGETDPISQLRDPEQLIAFAGLDPKVRESGQYQAPHRHISKRGSPYLRRTLWMMASLAVRREGDLRDYYLRRRREGLHYLAVVTAVALKLCRVVWRILRDQRDYQPHTPSAQS

SEQ ID NO: 378336 - protein, 334 aa, unidentified
MNNISLIGIDLGKHSFHIHCQDEAGNAVIRKKFTRAKLIEFLSNCPPAVVVMEACGGAHFMARKIIELGHKAKLISPQFVRPFVKSNKNDFVDAEAICEAASRPSMRFVVPRTESQQAVFALHRIRDSLVRDKVKTTNQMHAFLLEFGISMPKGLAVIRRLSTVLADNTLPPYLVRLLMRLHEHYLYLVEQITAIEGELDSIAKKDETTQRLMTIPSVGPITASMLMVHLGNGQRYKKGRDFAAATGLVPRQYSTGGRSTLLGISKRGDKHLRRLLVQCARVFIMRIEHQSGALAEWVKQQLTQKHSCLVACALANKLARIAWAITAKHTVFQA

SEQ ID NO: 378337 - protein, 342 aa, unidentified
MQVTTIGLDIAKNVFQVHGIDAAEKVVVRKQLRRSQVLAFFKALSPCLVGMEACATAHYWARELTKLGHRVRLMPAKDVKAYVKRNKNDAADAEAICEAVRRPTMRFVQVKSAEQQGRLMLHRTRDLLMRQRTQVINALRAHLSELGIVAAQGREGIKELLKIIASEQDARLPVDAHTSLVVLAAELAALQTLIGSIEKRIMAQHRSSEASRRLESIPGIGVIGATAIAATVPDPKVFRSGRDFAAWIGLVPREDSTGGKQKLGPISKQGDRYLRRILVVGACAVLRYARQQPEKYPWLTQLLARKPFRVVAVALANKMARIAWALLAKGGTYRAPALAAAA

SEQ ID NO: 378338 - protein, 414 aa, unidentified
MELLHERCAALDIGKKDLKACVRTPSPKGKRSRRQEIRTFATTTNALLELRDWLVAEQVSLVVVEATGDYWRGAFYLLEDQLNVILVNAAHAKGLPGRKTDVCDAAWLCQLGECGLLRASFVPPEPIRQLRDLTRYRTTLTAERSREAQRLEKELEDAGIKLSSVATDITGVSGRAMLAALIDGERDPQVLAEMAKTRMRPKIPHLVQALTGNFGEHHAFLCRLHLQRIDELTAAIAELSARIAEQMRPFARQLEHLMTIPGVGQTVAEVIVAETGTDMGRFRTGANLASWAGVCPGHHESAGKRKSGKTRHGDRWLTGALGTAAMAAARTKDTTYLGARYRRLAPRLRKKKALVAIEHSILVAVWHMLTNNVDYHDLGGDYFARLDPERAMRRIIRQANSLGFTVRFDPIQAA

SEQ ID NO: 378339 - protein, 366 aa, unidentified
MLIIGCDYHPSVQQIAWADTETGGCGEKRLMHSDGEAERFYRELKQKGVQVRVGIEATGHSRWFERLLAELGFELWVGNAAEIRAARVRKQRNDRRDAKHILKLLMEDRFPKIWRPSPENRDVRQLLLHRHRLVGMRTRVMNQLQAIAMNEGLRRKSGLWSKKGRARLESLSLAPWTSRRRQELLELLDRLNPMIDELSKAIEQEAARRSEVQLLMTHPGVGPITALAFVLIIGTPERFHCGRQIASYLGLIPCEESSADHWRLGHITKQGNALMRFLLVEAAQTVARCEPEWRQHYFHLVLRRGRAIAKVALARKLAVRLFWMWRKGQDYQQVKKFGSDTGQLEVPNGVKSITVKVIERPAPSMA

SEQ ID NO: 378340 - protein, 347 aa, unidentified
MAIVGGFDIHRRQVTFDYLDTVSGQVRRGRIDPACRETLRAWLARFADRGDVTFAVEGCTGWRFVVEELQRAGITALLAEPAETAHQRGPKKRAKTDRADARHLRTLVAEGRVPVSWIPPGQVRELRVLLQLYRDLREEHTAWVQRIHATLFHQGVPGLAGRLADPQARALLEHGPDIGLSPAGTQAVAVALRRMDDLEAALGLVHAQIAAFARHQAGCKALAAELYGVGPLVAAIVWAFLGDTRRFSSSAQAVRHTGLDVTVYSSDDKRTPGHLSHQGPPILRWALFEAGHQGSRASSPDHRYYTDVAARIDANRAALSVARKLARRSHHILRRLGDAAYAPLPGW

SEQ ID NO: 378341 - protein, 343 aa, unidentified
MKITTVGIDLAKYSFQAHGVDGRGKAVLNKQLKRDQVVRFFANLPPCLIGMEACGSAHHWARKLSSLGHTVKLISPQFVKPYVKTNKNDCADAEAICEAVSRPNMRFVPIKTPEQQGILALHRARQSFVKARTAQANQIRGLLAEFGIVIPQGISHIAKRLPQVLEDAENGLPGAFRLLLQRLRENLKEMDRQAGELEREIQLWHRHDDTSRKLAAIPGIGPISASALAASAGDAKSFANGRQMAAWLGLVPRQYSTGGKPRMLGISKRGDTYLRTLLIHGARAVIRVCEHKTKTDSWLKDLVARRNKNVAAVALANKNARIAWALLAHETDYRSDYRRALAR

SEQ ID NO: 378342 - protein, 377 aa, unidentified
MSVYVGIDVHRKRSQVAVVDQTGEVLVNRNVPNGTETVLSVIGELPAGTPVAFEAAFGWGWLVELLDDYGFEPHLVHPTRCKAIASARLKNDKVDAHILAQLLRADLLPEAWIAPPAVRQLRARLRHRIQLVRLRTLLRNRIHAVLAEHGHDRPAGCWSGPGRDWLAGLDLPAASREVIEDCLGMIDAIEPVVDRLDGEVRDQARTDPRVRVLTGLPGVGELTALVMLAEIGDIGRFGSARKLAAWAGLTPTVRGSDRTIRHGHISKQGSTWLRWILCEAAQSAKRSPEFAATYQAIARRRGKKIATTAIARKLLTRAYHLLTEADAEADAEADAEADAEAGVDADTLAEETCTPRRTRAGTQTGRSPQPGRARVSA

SEQ ID NO: 378343 - protein, 402 aa, unidentified
MSKCIAAQAREQTTTAGETTSGWSRYAAFIGLDVHKETIAVVVALPGRDGPQYRGEIKHEPKALKRWLKRLNDEFGGALLLFCYEAGPCGYGLYRQLTEAGHDCQVVAPSLIPKKPGERIKTDRRDALKLARLLRAGDLTAVWVPDTEQEAMRDLTRARDDMKGQERKARQQLNAFVLRHGHPWPRGKTRWTQAHYNWLESIRFEQPWLQIVLQEYVDAVKAATQRVDDLTDQLMQALPGWSLAPVVDSLVALRGIDKLAATVLLAELGDISRFDSPKQLMAYLGLVPSEHSTGSRRRQGAITLTGNGHARRMLVECAWSYRFPARQTMHLKRKAKDASEMAKAIAWRAQKRLCGRYRQLTQAGKNIKLVCVAIARELVGFLWDIVRHEMPRLAPQRSAVAG

SEQ ID NO: 378344 - protein, 341 aa, unidentified
MQVTTIGLDIAKNVFQVHGIDAAENVIVRKQLRRGQIIAFFEALAPCLVGMEACATSHHWARELTKLGHEVRLMPAKDVKAYVKRNKNDAADAEAICEAVRRPTMRFVRIKSAEQQGQLMLHRARDLLMRQRTQLINALRAHLAEVGITAAQGREGIKELLAIIAQDEGSRLPVDAHASLTVLAAQLQAVQTTIGSIEKRIVAQHRSNEASKRLETIPGIGVVGATTITAVVTDPKAFRSGRDFAAWIGIVPRQDSTGGKQKLGPISKQGDQYLRRILIVGAHSVLRRARQQPEKYPWLTQLLARRPFKVVAVALANKMARIAWALLARGGTYRAPQLVAV

SEQ ID NO: 378345 - protein, 466 aa, unidentified
MRKPQVIPDEDHEVVYERVAAVDVAKASGVVCVRAPDTKRPGRYVNRIWDNVPATRARIAELGAELLRGQVQMVTLESTSDYWRVWYYVLESIGLAVQLVSASQAKNLKGRPKTDKLDAMWLARLTQWGMLRPSFVPPAAIRRVRDFTRARTDLVHERTRCLQRLEKLLEDAMVKITSVASDGLKAKSVVAMVAALIAGERDPRTLADLARGPLRAKKDALAEALDGMSGSRHGVIAQALLDQVAFLDQRITQMEAGAIEALAQVEESWGVDATGETGPGRGTGPDSLVLAAAHRLAEIPGISVWLAIVIIAEIGLTMSVFPTPAHLVSWMGLCRSAAQSGTRAGKGKAKKGNSYARAAAGQAAIGAAGTATFLGERYARIARRRGKAIAQAAVARSIMNIAWHLLADPAARYRDLGPDFYASRISRDKKIRGHIRGLTALDLTAEDICAALGITVADIPSGGHAA

SEQ ID NO: 378346 - protein, 405 aa, unidentified
MNAVGIDISKGKCMVAILRPLGEVVKKPFEVEHDYGKLESLAYDLKGLEGETRAIMESTGRYYEPVAQVLHEIGVFVSVVNPALIHDFGNNSLRRVKTDKKDALKIAKFGLDNWAGLREYTPMEAVRQQLRNASRQLDLYTKMKTGLKNNLIALLDMTWPGINTFFNSPVREDGRQKWVDFAYTFWHADCVCLLREEAFVEKYRQWCKRKGYNFSQYKAEDIYVESWGHFTTLPKNTSTRTLIHEAIAALNAISRTAEVFRAEMQRLAEQLPEYPVVMAMYGVGKAIGPQLMAEIGDVRRFSHRGALIAYAGVDPQPSQSGKYDRDSNPISRKGSSNIRKNLYQVMVTLLRKMPADEPVYQFIDRKRNEGKPYFVYMTAGANKFLRIYYARVKEHLNKLGNSPAL

SEQ ID NO: 378347 - protein, 431 aa, unidentified
MNCNTQNAKIETIKEKTLVVGIDVGSETHYARAFDWRGYEYSKKAFSFSNTEAGFVSFLEWMQDIAKDNGKQELVPGMEPTGHYWFDLGKFLQDKGIKPVLVNPYHVKQSKELDDNNPSKNDRKDPKVIAGLIKDGRFTYPYLPEGVYAELRSASNLRFQTQEELTRILNRIARWFSIYFPEYKDVYGKSDSKSGLMILEQAPLPADIRVLGVDGVNKIWRDAKLRGVGIKRATKLVEAAEHSIGSQEGLTTARMEIKNLLSDYERYSKRMEELVELIDELVKEIPYVEKMLQIKGVGIKTISGLVAEIGDIRRFDNPKQIQKLAGYALVEDSSGKHQGETRISRRGRKKLRYLLFEASLSLVGKNEEFKELHYYYTHREENPLKKKQSLVAVACKFLRIAYKILTTGVDYDGAKMINDIRRPQKQMLQAA

SEQ ID NO: 378348 - protein, 346 aa, unidentified
MRFYNRPHTYYCGIDLHVKTMYVCILDGAGQVLVHRNVPSTPAAFLETLAPYREGLVVAAECMFTWYWVADVCAAEGITFVLGHALAMKAIHGGKAKNDRIDSHKIAVLLRGGMLPQAYVYPAAMRSTRDLIRRRLHLVRKRGQLLAHIQNTRAQYNLPVFGRKLAYRTNRDGVVEHFPDPSVQKSIAVDLALIDQYDALVIDLDLTIVREAKRHNADAFHRLRSVPGIGKVLALTILYEIHDITRFDRVQEFASYARLVKCKKQSGGKTLGTGGAKMGNVHLKWAFSEAAVLFLRHTEGKKLIARIAKQHGKGKALSILAHKIGRAVFYMLSRETVFSMEKFLAA

SEQ ID NO: 378349 - protein, 461 aa, unidentified
MAKKAKKVKTAKGAELRIVNPDAAGIDIADGIMQVCVPADRSKDNNRTFGAYTSDLHAISAWLRECGIKTVAMESTGVYWIPLFCRLQEDGLDVVLTNARDVKNITERKTDESDAEWLMLLHQYGLLKASFQPHNDAKRMRTLTRHRDTLSREASSIVLRMQKAMQQMNIKLTLVLSDITGKSGIRIIEAILAGERDPKRLAELADIQCKTPKEEITKALEGNWEEDLMFVLRQNYDTFKHYCIQLGECDAELEKLMENYRAEVAKVEDTSYSPAKKRRDYKKTRHTVGFDVERKAYEMWGVNVFEIPGISHLTALELMSELGHDFTRKFPSSKQFCCWCNISPNTKISGGKRISSHVPHRRNNVGLIFRSIASSLANAKNQLGNFYRRIRSRTGGKAAVIATAHKVAEIFFAMVANQTTYNPEKVGIDEKVLLEKRITRYKRELERITGTHIEIGNACVP

SEQ ID NO: 378350 - protein, 326 aa, unidentified
MVNALGIDIAKDKLDVVLLNEASQEYGGVFANNLKGFKQLQHWLNKRVEGELHVCLEATGQYGEAVAEFLYQASYAVSVVNPARIKAFAVSRLSRQKTDQTDARLIALFCQSQRPEVWTPPAPEQRVLQAMVRHLHDLKAMRQQEDNRLTSGVSAAPVLQALQQHIAFLDGQIAELEQQIHDHLDHYPHLKQQRDLLDTIPGLGDLSIATLLAEVPNILAFETAAQLAAYAGVTPHQFRSGTSVHRRTHISKCGNARLRAALYFPAMVALRHNPVVHAFGERLRANGLPPKAVIVAAIRKLLHLVYGVLKSGRPFDPNYSAQALPA

SEQ ID NO: 378351 - protein, 348 aa, unidentified
MDKILKQSLGFDVSQEKFDVALFVCGEDLAPREVASETFDNTKNGFKKLSQWYDKLIDKQLPIFACMEATGVYHEHLCRHMYTDPRVKVSVVLPNKSRKFIDSLDWSSKTDKLDAKALSLMGLNRKLRLWVPPKELYRKLRRLTREREHLSIAHSAQINFIHAMETEFGSCEENLMRVKQLKELIHQQIKAIDKQIENIVNSDDELKQEVALLKTIPGVGQQTAVVVLAETNNFQEVERSKQLVSYAGLDIRQKESGKWKGKTKISKKGNRHIRAVLYMPTLTIIRGNSRLAQYYKCQIEKGKHKMTAITAISRKLLVLMYGVWKTKTVYQDDFNLHLSQMASGNARD

SEQ ID NO: 378352 - protein, 387 aa, unidentified
MKNNSNSKKQARGSEEWTSPKLAALQEAWRQKQGTEEKLTIGLDLGDRQSNYGVLDQSGEVIGRGQVVTQSQPLEVWLGQMPPSRVVIEVGTHSPWVSRLVKQTGHEVVVANARRVKLISESSRKNDRVDAEMLARLGRVDVQLLSPIQHRSKQGQADLIGVRVRAELVELRTSAVNAVRGFVKSFGQRMPKCDAGVMNRSHAKEVDEAIRGEMELVLEVVEKLNEVIAKADGELKKVNAERYEKETAKLEQVTGVGTLTALTYVLTLEDAGRFRRSRDVGSYVGLRPKSSQSGERDPEMRISKEGDVYLRKLLVQCAQYILSKRGPDTDLKQWGLRIASKGKKKAKRRAVVAVARKLSVLLHRLWVSGEVYEPLRQRQRRQHSVAA

SEQ ID NO: 378353 - protein, 369 aa, unidentified
MKKNNTCQQSPRRRSRVRPGWRTIGMDLGDKSSRYCVLDEQGRIVQEGSVGTTKRALAQKFGALRRCRMAVEVGTHSPWVSRLLKSLGHEVIVANARQVKLISASTRKDDRLDAQTLARLARVDPQLLRPIQHRSEEAQAHLLVIRVRAALVETRSSLVNTARGLAKSVGERLPKCDTDQMGVERMEGLPAQLQQALQPLLKEVESLTEKIKESDVSIEQIARTEYPETALLQQVSGVGTLIALTFVLTIEDRDRFQKSRDVGCYVGLRPKRSESGESQPQLRITKEGDVYLRKLLVQGAHYVLGYRGPDTDLKRWGVGLASRGGKNAKKRAIVAVARKLGILLHRLWVTGEVYEPLRNSQARARTVAA

SEQ ID NO: 378354 - protein, 323 aa, unidentified
MTTQACLGIDIAKRTFDAVLLQDGRTRHRQFTNTVAGFLQLEAWLRDHATAPLHAGLEATGIYGDALALFLHQRGAPVSVINPARTHAFAKSELARTKTDKADAALIARFIAANRPPVWTPPPPEQRQLQALVRRLDALHAMYRQEHNRLDLEDAASILRESIAAHLTHLDDQIRQLQHRLREHVRTYPPLQQRCVLLQSIPGIGECTALKLLAELPSPSCRTARQAAAHAGLCPRQRDSGSSVHGRTRLSKTGNARLRKALYLPAVVAMHHNPILQEFARRLLERGKPKMAVVGAVMRKLLHQAFGVLKHGQPFNPNHALTP

SEQ ID NO: 378355 - protein, 494 aa, unidentified
MNGQRVRLKFNRARILLEEGTNMIRSVGIDLHQGQHRARCLDERAQSCDSFSFQTTPEGLATLEEHVFRDGANPIIVLEPAGLPWLMVAVYLRSCHPDCRLVKAKTQKVAALRRYLRGPVKSDRLDALTLAKMPFIDPEQMDEIYLPPAEIHALQRLTRQRKRIEQDITGRKVRISAIVDGYLPGVRRTFNDAWSSPVRAFLKSRLNPFIVVRDGEDALHAFLSKNSYHSKWSKAQTRLVFLACQSVAAVCKLSESAGTVNEDFFMDLQDEIARELRMLEADEIESEALARRIAELYQKLHSSDNLRTIPGVGEHTAPIFLATVGDPARFPNQSAFANYEGVVPGARQSSNVEAKGLRMTKAGPSIMRMALYQAGDIGRRWDPQLAAVYYREMVYHGKNHKQAMGAVMSHLGARILAVLKEDRPYELRDPEGKLISKDETRKLILSKYHVSEDIRRERRRRNSKISKARETATYRTNEATEAPQPVPVQAVSRK

SEQ ID NO: 378356 - protein, 349 aa, unidentified
MANLTIGVDLGDRYSELYVVDAAGACVETGRIRTTVAGLEQWFGGRVPARVVLEAGTHSPWASRVLQRLGHEVLVANPRKLRALYENDSKDDRVDAEYLARVGRLDPALLKPITHRGEAAQADLAVLSSRDVLVRTRTLLINHTRGVVKAMGGRLPRCSAESFARRVGPHVPPALRPALAPVLAQLQQLTAAIRGVDREVERRCAEQYPATAQLRQVSGVGPVTALAYVLVLEDPRRFPRSRAVGAYLGLRPRRSQSGEQDPQLRITKAGHPFLRRLVVQAAHYILGPHGPDCDLRRHGERIAARGGKNAKKRAVIAVARKLAVLLHVLWISGEVYEPLRQRLVLAQAS

SEQ ID NO: 378357 - protein, 370 aa, unidentified
MTISNILFIGMDVHKDSIEIAIADGDSHEVRRYGRIGGTHDAMRKALRKLVAQGKSLHFCYEAGPCGYELYRYLVSEDHDCWVVAPSLIPKRPGDKVKTDKRDAVQLARLLRAGELTPVYVPNREDEAIRDLSRAREDTMLVQKSARQRLKSFLLRHDIRYQGKTSWSEAHLRWLADEVRCPSPAQQIVFQEYVNAVTESQQRLQRLDEQIKRFAQAWRLYPAVKALMSMRGVKMIVAITVVSELGDLSRFDNPKQLMSFLGLIPSEYSSGPRQKRGGITKTGNGHVRRILIEAAWCYRYPAKVSREMQLRQEKLPLVIRDIAWRAQLRLTQRYQHMQRKGKPHNVTVVALARELAGFMWAIVNEVKYPR

SEQ ID NO: 378358 - protein, 366 aa, unidentified
MASVSQLAPIHLGLDVHRDTISVAILVPDQQVPEVDRIPHDEASVRRLVARLGDPRRLRACYEAGPTGFELARLLEGMGVGCQVIAPSLIPVAPGDRVKTDTRDCRRLARLHRAGELVAIRIPTIGEEAVRDLCRTRADMVTDRTRARHRLGKFLLRHGRIWRGGATAWTHAHERWLLGQQFDEPALTATYAHYRAVLLTRDAQLDAIEADLACWYTRPPFATQVARLAAYRGVTQLGALTLASEVGDWRRFPRAAAFMGFCGLVPSEYSSGQRTWRGRLTKAGNAHLRAQLVESAWSYQHRPAVGAQIARRQQDLDPQAVARAWAAQLRLCGRFRRLAARKTSKNLVVAAVARELAGFLWAEMTA

SEQ ID NO: 378359 - protein, 469 aa, unidentified
MVKSVGIDLAGIGEHKVRCLDEKAQLCDGFGFETTPQGLAKLEEHIFRDGSNPVIVFEPTGLAWVAVAVYLRSRHPECRLVRTQSRNVAALRKYLRRSSKSDKIDAITLAKMPFVDAERLAEVFLPSAKIYAIQRLSRQRRHLELDIASRKTRISSILDGYLPGVRQTISNLWSKQARVFLSSRINPLTVAREGEDALTLFLATARPRRKADAIDSHMLYQSCQAAATIYLMSESAGTINDDFFSTLQEEIARELRLMDVEEAESESITKHVNELYQELHPSNNLGTIPGVGEHTAPIFLSVIGDPTRFRSQAAFANYTGVVPDSRQSSKVEAKGLPMTKAGPAIMKWALYQSADMGRRYDPQMAWLYYREMVHNGKNHKQAMGAVMSHIGSRILAVLRENKPYELRDVDGTPISWEAARRLILTRYQVPEEIRRDRRRRTASNASLKKPLSNQREMAAIGVHKAAEAP

SEQ ID NO: 378360 - protein, 464 aa, unidentified
MKVAKVNQQTRRVKKTRAPSFPIINPNAAGIDIGSAEHWVAVPEDRDEQPVRKFACFTQDLHAMAAWLKQCEVKTVVMESTGVYWIPVFQILETHGFEVKLVNAKQAKNVPGRKTDVLDCQWLQRLHTYGLLSGSFRPDDAICVLRSYWRHRHTLIGYISAHVQHMQKALTQMNVQLHKVISDITGVTGMSIIRAILSGERDPVKLAQMKNYRIRSTTETIAKALEGDYRQEHLFSLRQAVELYDFYQQQIQACDHEIEAYLSQLDGINIASNPIPPSRRRIRTHKGNQPDFDLRTHLYRISGVDFTQIDGLDVLNVQTILSEVGLNPDAFPTVKNFTSWLAICPNNRITGGRIKSRSTRKAVNRAAEAFRMAAYTLSHSSSALGGFCRRMHARLGAPKAITATAHKIARIFYQMWKYRTPYQDLGADYYEQRYKQRLLSNMKKTAKQIGYFIELTPMPQSAVS

SEQ ID NO: 378361 - protein, 341 aa, unidentified
MMIIGCDFHPSTQTMAWKNTETGECGGGELKHDGEAQTFYRRLQGQKVRVGMEATGHARWFERLLAECGIELWVANAAQVRAAATRKQKTDKRDAELLLELLSDGRLGKMRIHMPTPGERDARRLVLHRHRLVQMRTRVMNQLQSIALNEGLRKKRTLWTKAGLEQLLALELMPWAATAREDLLGLLDALNRRIAELDQAVEQEAEARPEVRRLRTQYGVGPVTGLLYVLTILDPTRFATSRQVASYLGLIPSERSSGERQRLGHLTKQGNAVLRGLLTEAAHAAVRYDAGWRRQYVRLAMKKNRSLATVAIARKLAVRLWWMWKLGLEAGQMVESGSHVG

SEQ ID NO: 378362 - protein, 438 aa, unidentified
MSNKVIFNLDELFISVGIDVGADFSWMSIALPNQQFVGKPYKILHNSIDSLTTAVSKIKEAEELYSLESRIFLESTGIYHYPLFCYLRDKGFNCSVINPIITKNSTNINIRKVHNDRFDSKKAALVGLKPDLKVSLMPSDLALNCRNLCREYFDLMDNRSAYVNKLQGELRMAFPQYLGIFSKVTINTSLTLLETYTSPSAFLKADKQEIIDIIKSTARFGLTYAQNKYNAIIQAATDANQFGYIIASNIKRIHLYISFIRKYDEEINSILELLHELVDANEDSDFVKQIHLIETFKGAGFLSAVSIMGEIGDFSAFSKPKQLFAYFGLDPSVKQSGKFEGTKVQMSKRGSAIARRVIHTLTLQSISISRNREAKNPVLREYYLKKCDSKPKLVAMGAVSHKVCNMIFAILRDNKPFKIIAPQEHIKQYNSAKCDIAA

SEQ ID NO: 378363 - protein, 311 aa, unidentified
MNSEAYVGVDVSKDQLDVKALPCNETRQFSNDDPGIKKLVTFVRKIDPQLIVFESTGGLEMAAVSSLIENHLPVVVVNPRQVRDFAKATGRLAKTDSIDTDTIARFARDIRPEVRPIKDEHTQLLSALNARRRQIVDMLVAEKNRLYTAPKPNMKSIQKHIQWLERSLEDINQDIDKIIKKSPTWRENDRILQSFKGVGPVVSASLLGDLPELGTLNRKKIATLVGVAPLNCDSGRFRGRRRIKGGRANVRRKLYMAAVASLRHNPMIRDFYDRLIDAGKPSKLALTACMRKILTILNAMMKNRTYWIATF

SEQ ID NO: 378364 - protein, 352 aa, unidentified
MEKNNKLDFGGQHIYVGMDVHKKSWSVSIHTEQFEHKTFTQPPEVEKLTYYLERTFPGATYHTVYEAGFSGFWLHDKLREKGIDCMVVNPADVPTKDKERAGKTDRVDCRKLARGLRNGEIKGIYVPPRVKVEDRTLMRTRQSMVRKQTRCKNQITSILFFYGIVIPEDGRWSRRFINWIESIRMERASGDFALKAHLEELKHLRQIIANLNKAILSLSRAEEYMADVLLLKSVPGISTLTAMILLTELADLSRFSSLDKLASYAGVVPDIRSSGETEYVAGITFRRNAALRALLIESSWIAVRKDPALIMVFNKLSVRMKKTKAIVHIARKLLNRIRFVLKNRQEYVPAVV

SEQ ID NO: 378365 - protein, 338 aa, unidentified
MKLYGAIDLHSNNNVTVLTDEKDKVVYQKRLTNDLPLILEQLSPYASSIEGIVVESTYNWYWLVDGLMEKGHRVHLANTAAIQQYEGLKYTDDDSDARWLAHLYRLGVLPEGYIYPKGERAVRDLLRKRSQLVHQKTANLLSIQNLYSRNTGSSISANRIKQLSSEKVDALFPNPDLSLAVKANLTVMRSLATEIAILERIVKERVKLRPAYRYLLSMSGIGQILALTIMLETGDIRRFRKVGNFASYCRCVGSEKLSNGKRKGSGNTKNGNKYLSWAFVEAANFAIRFEPLIARYYQRKKSKTHRVVAIKTVAHKLARACYHVMRDEVPFDVNRAFA

SEQ ID NO: 378366 - protein, 346 aa, unidentified
MKIKRIGVDLAKNVYQLHGVDDRGNAVWKRRLSRGKWLAVLCNTAPAGTVVGMEACAGAHHWARELTDRGYEVRIIPPQFVKPFVKSNKNDANDAQAICEAMERPNMHPVRIKTVAQQDIQAVHRIRNEIKSHRIAKGNQIRGLVAEYGLVAPQQLSALRKAIPVWLETADNGLTFLFRELLQGLWEDLSGLDRRMAELDRHIAVIAQQDPGARRLQQMRGVGPLIATALVATIGDGQQYRNGRDMAAALGLTPRQHSSGGKDRLLGISKRGDAYLRCLLVHGARSAMRTAKGKEDQLSRWIIKLQARRHNNVAAVALANKMARMAWVIMARGEDYNPECSAMSAS

SEQ ID NO: 378367 - protein, 351 aa, unidentified
MPNAMTDSKLSLVSVVGGVDTHADSHTVAVLDQLGRRLGCAVFPASRAGYGALVDWLAGYGRISAVGVEGTGSYGAGLTRWLSARQIAVVEVNRPNRADRRRRGKSDPVDAEQAAAAVLANTATAVPKARTGLVESIRLIHGTRAGAVKARTAARNTFINTVRTSPDAVREALQPLTRARQLKAAIGYRPAGDGPLATVKRCLRRLAVRITELTSEIIAADADLDRLTRQLAPDMRSRLGFGPETTAQLLITAGDNRDRIGSEAALAGLCGVSPVQASSGRSRYYRLNRGGDRQANRALHMIILCRLRHHQPTRAYLAGHSIDGKATPHLRRVLKRYLVREVYQLLGDLKT

SEQ ID NO: 378368 - protein, 389 aa, unidentified
MPSVSERPEAPTAIQTHLAASFVSLELSRSIWLITSLSPASGEKMSKHSVRAGDVAALLARFSELKRKASERTGKSFPIVVIQEAGLDGFWLHRVLQSEGVESHVVDPSSIATSRRRRRAKTDRIDGEALLRALLAYKRGEPRVCAMVKAPTPEEEDRRRLCRERKVLIAERVKHVNRVKGLLFSQGISGYEPLRRDRRQRLDELTTGDGRPLPVHLKTQIRRELDRLELLLDQIKEAEAERDALLAAPQPAAPAPAGRMLLEFKGIGAELAAVLWLEALFRHFDNRRQLASYAGLAPTPWQSGSVDHEQGVSKAGNPRLRTSLIQLAWLWLRHQPQSALTLWFKERVSGNGGHFKKSTIVALARKLLVALWKYVTAGVVIDGAVMKDA

SEQ ID NO: 378369 - protein, 361 aa, unidentified
MQRVKVNEKSFEGQPIYVGIDYHKKSWKVTILGHEYEHKAMSREPDADGLADYLKRNFPGADYKAVYEAGFSGFGSQRRLKELGVDCMVIHPADVPTSEKDRQQKTDKADSRKLAKMLRSGEFEGVDIPDEGLEADRALLRQRYRLSKDLARYKNRVKSLLFQFGIRIPDRFSGSPSRSWSKNYMEWLKELPEGSENIRTVVGNYVEIGIQTKKQLTGVTLQVRELAKKERYGKHYGLLVGIPGIGLLGGMTLLTQLGDLGRFGSLDELCNYVGLVPRMHGSGERMVTGKLTRRGRKEIKIMLIEAAWVAVRRDPAMMLRFNGLKKRMNANKAIIRIAKNLLSRIRHVIRHQTAYEPGVIK

SEQ ID NO: 378370 - protein, 364 aa, unidentified
MCEYYTTIGMDVSDRKIQICVMSKANGSPKIIMETVIPTTKESLTKFLSTQDKSSPVTFETGMHCRWMQDVIESLGHKVYVANPCHLRMITESKTKNDVNDARMLARLTLADPGLLHPVKLRDAEHQKMLNLHEMRNLLIKQRTGIIVQMRAIAKSMGFRIAKTSTGHFHKLDTKSWPKEFRDITWPMIKNLEQLSVTIKTYEKQIRELAETPVFKAQVERLMEIHYVGLYVATGFIAVTGGDMDKFEKARDIGPWLGTTPKQDQSGDIDKQCHITKAGSPFMRRLLVESAQMILREGSIDTDLKLKGLRICVRGGKIAKRKAITAIARSLAVLMVAMLKKPDSPYVPLSEQSEKELLFMRAAM

SEQ ID NO: 378371 - protein, 317 aa, unidentified
MNAQNDRENYVGIDVSKTQLDIAIGQEGQSWQAANTSAGICALILRLLEFQPCLIVVESTGGLEKPLVKALQKVALPVALVHPGRVRKFAAGIGWIAKTDRLDARLLAWYGFAAQPKARPRPEPACEILSELVRRRGQVVEMLTAERNRRSTCPISLSDTLEEHIAWLTAERDRLTAQIKTMLASQPEFNDKDVVLQSVKGVGPIFSATLQAELPELGIYSHKQIAALVGVAPFNNDSGSFRCKRRSKGGRSGVRSTLYLATLSAIQHNLVIKAHYQQLIDRGKLRMVAVVACMRKLIVILNAMVRDMRTWQPQALT

SEQ ID NO: 378372 - protein, 451 aa, unidentified
MARPKRSRPMRDISPTHPNAAAIDIGAKMHVAAVPPDRDADPVRTFGTFTGELHRMADWFESCGVLTVAMESTGVYWIPAFEVLDQRGFEVVLVNARDAKHVPGRKTDVSDAQWLRQLHEYGLLRASFRPKGELATLRAYLRQRERLLDYAASHIQHMQKALMQMNVQLHHIVSDITGATGMRIIRGIVAGERDPAALAAHRDRRCHASAEEISAALAGNWREEHIFALGQALDLYDLYQAKVAESDARIEQVLARLRTALERPACRLPPARHRDNSANAPAFDARAILYSVLGVDLTQIHGLGPSLVLKLVGECGTDLSPWPDAKHFTSWLCLAPSNKISGGRVLSSRTRRSGSRAAALLRLAAVTVGRTQTALGAFYRRLSARIGKAKAVTATARKIAGLFYNAVRHGMVYADPGASYYEERYKARVLANLRRRATSLGFVLQEAPSSA

SEQ ID NO: 378373 - protein, 345 aa, unidentified
MTEYKRIAIDTSKAVFTLHGVDQQDRPVLRINLRRPQLLAFFKKLPPTEIAMEACGSAHHWSRELTALGHAVCLVPPQYVKPYVKRSKNDRNDAEAICEAAGRPGMHFVPVKSVTQQAQGMVLKVRETLVGQRTQMTNTLRGHAAEFGVIAGKGLRQIGPLLSAIEQETTIPAEAREMAALLGQEIEHLDRRIKELDVKLAAVHKANEVSQRLATIPGVGPITALTLAIEVDPAAFESGRHLAAWAGLTPQEHSTAGKQRMGGISRAGNERLRVLLVTGATSVIKAAMRPGSALMTDWLRALLARKPRKVVAVALANKIARVAWVLMTRGEVYRRPAAAAAAAAA

SEQ ID NO: 378374 - protein, 353 aa, unidentified
MKCDKYIGMDVHQAMTVVVVLDADGKVILETMVPTEAAAIIRLMQSLSGPLRVTFEETTQAAWLYEVIRAHVTEVIVCDPRRNKLLEDGSKADKIDARKLADLLRAGLLRSVYHGHEATRNLKELVRAYETLSIDTQRTMARIKAIYRARGVRTAGRGVYQPKQRERWLELLPEAGIRQRAAWLYEQLEQLRPLRRKAKEAMLAESRRHRAVSLLRTIPQMGPIRSAFIVATVDTPHRFRTKRQFWSYVGLAVVTHMSSEYEMTAGRVVRRRKPVATRGLNHNCNRRLKEGFISAATGGSLHEPYKPFLERLKQDGMRAEMARLTLARKIAAVALIVWKKGVAFDPKKLNCTT

SEQ ID NO: 378375 - protein, 347 aa, unidentified
MRFYTRQHRHYCGVDLHARSMYVCVLDRDGNVLVSKNIASAPEPFLELIAPYREDLAVAAECMFTWYWLADLCAREGIVFVLGHALYMRAIHGGKAKNDRIDAHKIAGLLRGGMLPQAYVYPQTMRATRDLMRRRNYLMRQRAELLAHITNTNHQYNLPALGVRPARPAERSGLLEHFAEPQVRRSVAVDLSFVEHYDRELPALERYLESNAQAHDPLALAIVRTVHGMGKVLGLSILYEIQDIGRFARVQQFLSYGRLVKPTKSSAGKVLGHSGKKIGNAHLKWAFSEAAVCFLRANKPAQALRARLMAKHGKGKSLAIIAAKLARAVYFMLKRGEAFDAERFFAH

SEQ ID NO: 378376 - protein, 380 aa, unidentified
MNAPCARIGECRVQANHKNRGEVEMAVYVGIDVHKKYCQAALMDESGRIQRELRFDNTLEGASGLVNLARSIDAHVKAVVEPSANYWIKIYDRLEDEGVQVKLSNPSRTKAIAEARVKMDKLDAKTLAYLLRGNLVAESYVPTRKNRERRALIRHRASIMRMRVEVKNRIHMLLDKHDLSYEYTDLFGKEGLEWLRSLNLPRIDQQILQSNLQIIETVTAEIRNADIQIAKDAVNEEQAKLLMTMPGVDYYAAMILLSEIGDVKRFASREKLASWVGLAPQVHQSGDTQWTGHITRKGSKRARWILTQCAQSARQHDPKMRAFYERIEQKHGSSKAIVAVARKMLAIMYVMLTRNEPYHGENRQLTAQKHKRLERIANAA

SEQ ID NO: 378377 - protein, 351 aa, unidentified
MKTEQTAQPKLYIGIDIHKRSWKIHCATDLFSGRSFTMPPEPEALKTYVRKHFADHEVATAYEAGCCGYHAHRGFEGYGWRSLVVNLADIHRKRKERFTKTDKIDAQLIARGLKDGRLGGIHIPEVDREQLRSLFRRRNDLVKNFRRIKSVVKMQLLYFGISVPEEFDNDHWSHNFRHWLNSMAFANPTARETLDSRMRSFRFIDKELRDVSTNLRAYCRKHYKKDYYLLRSIPGIGGIVACGIICELGDLRRFNNIKHLVGYVGLAPGVHQSGDNQRATGITIRAHRLMRSYFIGASWQAIRTDPIMQSYYRKHVGKNVKSIIVKVARKLLSRTLVVIKTEIPYTIGVIE

SEQ ID NO: 378378 - protein, 327 aa, unidentified
MDDTGRIVREVTVASEPEALLAVLKNPAYHFKRIGLEAGPLSQWLFSALAEAGFPVICVETRHMRAVLKAQINKTDRNDARGMAQMMRVGLYRPVHVKKLRSQKLRMLLTHRKLLQSKAIAIDNDLRGTLRNFGLKVGMVGTVRFEARIRELVENLPDLAALVEPLLVVRRTLREQFCILHRRLLVIVRDDEVCRRLMTTPGVGPVVSLTYRATVDVPARFHKSKSVGAVFGLTCAKYQSGEVDWSGRISRCGDEMMRVMLYEAAQSMLVHSKKWSWLKAWAMQIARRRGMKKAIVALARRLAVILHRMWVDGTEFCWTREQAAAAA

SEQ ID NO: 378379 - protein, 466 aa, unidentified
MTSFYLGIDVSKGYADFVILNHQKQPVMDNFQLDDTFQGHSQLYEILNRFLTGHEKAMLYTAVESTGGFENNWHQTLIGFQASLPIQTARLNPKGVLHNSKADLKRNKTDKISAQSVAEYLISHPEKVCYQQENLLANLRKHWSFIQMLTKQCTQFLNQLHSLLYTANPELLSFCRDGIPAWVVNLLLQYPTARRLAKAHATTLARIPYVTIDRAQELIASAKNSVASSSDDVSAQLIIATATQILHLKKTISAQTDLMAAQCDMPEVRLLKTFIGIGDTLAIGLMIEIENIARFKTAKKLSSFWGVHPVYKISGDGGGSFKMSKQGRVQPRRLLFLAALTAIKCNPVIKSLYEYHLQQGKGKMDAIGVCMHKILRIIFGMLKNNTAFDPKVDETNRKRELRLNKSGPKKDKNRRFQNYDAGAPVSGRQLKKRMEREQSQSVNNTECGISAPVPIASILADVFAKL

SEQ ID NO: 378380 - protein, 345 aa, unidentified
MIHVGADLHHRFCYMTALDASGRELSARAVPNRSAELRCYFEQFRGPVQVAVEACSFWPAFREAVGEGAEVHLVHRQRVKAIAAAKLKNDRIDWGILAHLLRCDLLPKAWMADAETQALRQQVRLRASLVRQRTRSKNQVHALLHQQGLRFEGSDVFGNRGREWLATVEMPKGTRSAMKVHLKLIDEFSRQVAGQDRQLEQLRKKDVRASWLETIPGIGKYSSLLLLAEIGDIQRFATKRALCHYAGLIPWMRESADKRRSGGITRVGSPWLRWILVEAAQTAIRTAPEVNAWFQCLARRKHQHTAVVAVARKLLVAVWSMLQDGVVYEESHFAVNSARAKAGAN

SEQ ID NO: 378381 - protein, 410 aa, unidentified
MDVMVERGCGLDVHQAMVVACLLTGPPGRRPRKEIRSFRTLTAALREMRDWLRENGCTHVAMESTGIYWQPIYAVLDGGFELVVGNAHHIKNVPGRKTDVKDSEWIANLLRHGLIRSSFVPAKPVRELRDLLRYRRKLVDACAAERNRLLKLLETANIKLSSVASDVFGVSGMAMLRALIAGTETPAEIAGLARGRLRRKLAELELALEGCIEDHHRYLLGMQLRRIEAAEHDIEELDARITAKLEPYDEQHQRLMQIPGVDWFVAAVIVAELGVDMTVFPSAAHAAAWAGLCPGNYESAGKRSGGKARKGNRHLKTALVTAAVAASRKTGGYLKDKYFRLRARRGPLRAAVAVGRKILIAAYHMLATGTVFKDLGADHLDKAYRQRTIRTLVRRLNHLGYKVALIPAQA

SEQ ID NO: 378382 - protein, 377 aa, unidentified
MSEITRLMLMIVRVGVDLAKSVIQVHAVDAAGRRVVARALKRDQFLAWCGQLPAGTLVAMEACSSAHHWARKLRAMGVDARLIAANFVTPYRMEGKSGKNDATDAAAICEAASRPSMRFVPIKSCEQQGVMSLHRVREGLKEERTGCINRIRGVLAEHGLVFGKSPRVLRSMLAEVLEDADNELSGCARLVLLKAFEHWRELDAHIVWCDRQVGQHVRSSPQARQAIRVTGIGELGASALVGAVGEFKQFDSAKQFGAFLGLVPSQNSSGGKASLGRITKRGDDYLRTLLIQGAKSAVMSADKRDDPTSRWLVQLTARVGWQKACVAMANKNARILWAVMTRDVAFDPRHVSVKPQAKVAQADRVAPAPSVAVPCPA

SEQ ID NO: 378383 - protein, 372 aa, unidentified
MQKILYIGLDVHKASISVTTAEEGREGQVRFIGTIPNTSMDVAKLAKRLANEGRRLAFCYEAGGCGYGIYRQLVDLGHGCTVAAPTLIARKPGERIKTDRRDSQKLALQHRFGDLTEVWVPDPVHEAIRDLVRARMDAVMQLMRARQQCLAFLLRQGRNYGPGKKNWTLRHRRWLATQKFEQITHQIVFQDYVEAVWSAQDRRDQLEARISAMLSDWSMAPLVEALRTVRGIDLISSVIFVAAVGDLGRFESPRQLMAYLGLVPTEQSSGSRIRRGGITRAGNGEARRMLVEAAWSYRYQPRVSSGKTDVVERQPKPVRDIAWKAQVRLCSRYRKLAAGGKKPTVVVTAIARELSGFVWAIGQTVRPPMRQA

SEQ ID NO: 378384 - protein, 354 aa, unidentified
MPETVKTAVAVIGIDIGKNSFHVVGLNQRGAIVLRQRWSRGQVETRFANMPPCLIGMEACVGAHHLSRRLKALGHDARLMPAKYVRPYSKGQKNDFRDAEAIAEAVQRPTMKFVATKTVEQLDLQALHRVRERLVSQRTGIVNQIRAFLLERGVAVRQGPRFLRTELPRILATPSDVVAPRMVRIIEDLVGDWRRLDERIEGLSGEIEAIARQDVGCERLMSVPGIGPIISSAMVAAIGAGDTFSKGRDFAAWLGLVPRQISTGDRTILGKISKRGNRYLRVLFVQAAWVVLIRPKSWERHGLKPWLERARKRLHHNVLAIALANKLARIAWSVLARGRNFEARRIDEATGQPA

SEQ ID NO: 378385 - protein, 426 aa, unidentified
MQVVHECCAGFDVHKKTVMACVRRMLEKGRIERQVREFGTMTADILALGDWLSGLGVTHVAMESTGVFWKPIWNLLEGSFEILLCNAQHIKKVPGRKTDVKDCEWIAQLLQHGLLRASFVPERDQRDLRDLTRNRAQLVQDHTRVVNRVHKTLEDANIKLGSVATDIMGVSGRLMLESMIRGEMDPEKLAELAQRRLRGKIPQLKPALEGRLREHHRFMLEMLLDQLKSLEGLIRRAEVKIEEISCNSKLSVSGEENSKVPFDEAVRLLDTIPGINTVVAQGVVAEIGTEMGRFPTSGHLASWAGMSPGNNESAGKRRSGKTTKGNRWLKTLLVQAAWAAARTKNTYLQAQFRRLVGRRGKKRALVAVGHTILVMAYQMLKNRTSYAELGPDYFDRLDPQRTTRYLVKRLEALGHKVTLEPQQSVA

SEQ ID NO: 378386 - protein, 366 aa, unidentified
MKKISIEQTFRDDILKEQKLTIGMDLGDHWSCYCVLDEAGKIILEQKVAMTPEAMKQTFAKIPPSLIALETGTHSPWVSRVLTELGYKVIVAHAQKVQLITKSNRKDDRHDARTLARLARIDAELLGPVRHRSAQAQIHLTVIRARAELVSARTALVNAARGLVKSYGQRLPKCGTQQVSRELGAGLHAELREVLEPLLQEVESLNERIQEYEVRMEKIAKESYPHVELLKQVKGVGTQIALTYVLTLDDPQRFPKSREVGCFLGLCPGRRDSGESQPQMRISKEGDRYLRTMLVQGAHYILGPFGEDSDLRRWGLKLAARGGKNAKKRAVVAVARKLAVLLHRLWVSGEVYEPLRNSQKAMRTAA

SEQ ID NO: 378387 - protein, 351 aa, unidentified
MKTQITATPKLYIGIDIHKRSWKIHCATDLFSGKSFTMPPNPEVLEAYVDKHFRGYQVTTAYEAGCCGYYAHRSFERYGWKSLVVNPADIHRKGKEKYTKTDKIDAQLIARELKDGRLDSIHIPGVEREQLRSLFRRRNDLVKDYRRVKSYIKMQLLYLGVSIPLEFDNDHWSHKFRDWLDGIEFDYLTARETLDSRMRYFRFIDKELRDVSSKLRAYCRKHYKKDYYLLRSIPGIGGIVACGIICELGDLRRFNNIKHLAGYVGLAPGVHQSGDNQRSTGITMRAHRLLRSYFIEASWQAIRTDPIMQAYYRKHIGKNVKTIIIKVARKLLSRTLAVIKTEIPYAVGVIE

SEQ ID NO: 378388 - protein, 408 aa, unidentified
MEVVYPRCAGLDVHQQTVVACARVASGSTVQQEVRTFGTATADLLALTDWLTAHGCTHVAMESTGVYWKPIWHVLDGQFALILANALQIRSVPGRKTDVNDAMWIADLLAHGLIRSSFVPPAPIHELRDLTRTRKQLVREISQHTLRIQKVLEDANLKLTSVLSDVMGMSGRAMIEAIIRGEQDAERLADLSQGRLKASRPAVLAALQGRVTAHHRFLLRLHLTQIDALQVAVRGVEARLGDALTPFQAAIDRLMTIPAVGRTVARVIVAEIGVDMSRFPTAGHLVSWAGLCPRLAESAGKRLSTRTRPGNPWLKTTLVQVAWVAARTRNTYLRAQFLRLKSRRGPKKAILAVAASILTAAYYILKDEATYHELGADYFERRDKAQIARRLIRRLEQLGLSVEVRPAA

SEQ ID NO: 378389 - protein, 349 aa, unidentified
MDYRVYCGVDFHARQQTICSLTTESGVMSTHELKHQNKAELKAFYAQFSGPVLVGLEARGYSPWFEQLLESLVHEVWLGDATEIRRRARRRQKNDRRDAELILDLLIHNEFPRIHRPPATSREILRMLRYRHKLIKIRTIIKNSLQSLSIQSGLSLRARLFTHAGLAQVRAAAMSPVMQYQRDQWLQSLEPLNQRILEAANWLQQQAAGDERIERLRTHPGIGLLTGLGLVHTLAPVGRFSNQRKVAAYVGFDPKERSSGEKKRYSGISKAGSRVLRFLLVEAAQTACKGDPELKRYYLRLLHRHGKPKAKVAVARKLLVRSYILLRDGIDYAEFNRRAVAARLAREAT

SEQ ID NO: 378390 - protein, 411 aa, unidentified
MSQMLVGVDVSLKSHHVHFMKEDGSTLADFSVSNDQTGAETLIKRMLETAEKSQANQLKIGMEATDLYSWHLAHYLQDQMKGYEPKFQASIYVLNARKVARFKKGYDSLVKNDRIDAWVIADHLRFGRLPAQMKDAIQYEALQRLTRTRFHFMREIARNKTYFLNQLFLKFSGLRQDNPFSDKFGATSMAVMEELEPETIAEMSLEELVEFLQDKGKNRFEKPEEIAKYLQKLARSSYRLNKAMQDPVNISMSVTLSTIQHIESQVKRLDKEIAKLMKGIPQTLTSVKGIGDVYAAGLIAEISDIKRFKDHHALAKYAGLVWNQNQSGEFESQETARMRTGNKYLRYYLIQAADKIRKYDSEYKAFYTKKYDEVPKHKHKRALVLTARKLVRLVFSLLRTNQLYTPPERRD

SEQ ID NO: 378391 - protein, 367 aa, unidentified
MKKQTSATSETPVKDRMIIDFTGKTIYVGIDIHQKDYQVAKVIDGVCLGNHRMSANGDLLIKHLHSCYRGAEFKCVYESCAWGFNLQRKLTAAGMQCIVVHAADVSTSDKERKRKTDKVDALKLARTLAAGELKGIHVPDETTQKERNLIRYRTRLMRDINRSKNRIKSLLKYQGIEVPEQYAKNNWSRNFLIWIEEQASKDELLADTLLLMLDQMKLLRQLLLKTEKKLRELRNGKYASKVKLATSVPGIGPTTAMQFLLEAGDLNRFKGFDALNDFIGFCPDTDSSGETDRDRGITTRRHKQLRSALIEAAWQAIRVDPALMNSYQELTKRMKGVHAIIRIARKLLRRLRAVLLTGIEYQKGVVA

SEQ ID NO: 378392 - protein, 403 aa, unidentified
MEVLYPRCAGLDVHKKVVAACVITPGKREIRTFSTITGDLLNLKEWLLECQVTQVAMESTGVFWKPVYNLLEDRFSLLLVNAQHIKNVPGRKTDVKDAEWIADVTRHGLVRGSFVPDKEQRELRDVVRYRRSLIQERSREVNRIQKLLEGCNIKLSSVATDIAGVSGRAMLEAMVNGVEDPKILAEMAKGAMRRKKASLEEALRGFLSAMQKMMLKRQLEHLDFLDKQIAEMDNEISGKMAKQSKTIEQLDTVPGIDRRSAEEIVAEIGTDMSRFPSAAHLASWAGLCPGNHKSAGKRKSGRIRPGNHWFRSTLILAARATTRRSKNYLSALYRRIVGRRGDKRAIVAVAHAIAQIIYSMLLNGTVYQDMGALYFDERDKERLIHRSVRRIEALGYKVSLQVA

SEQ ID NO: 378393 - protein, 437 aa, unidentified
MKALTVLDARAAFVDVGSEHMHVSVAGDEPVVFGTVTSQLHALRDWLKAQGVRSVAMEATGVYWLPLYGVLEAAGMEVRMVNGRQTRNLPGRKTDMKDSQWGATLHMHGLLRAGFVPPADIRRLQDYLRLRADHVASAATSVQHMQKALERMNIKLHDVISSLAGTSGLAVVRAIVAGERAPQALLALCDAQIRRAKAEPVLESLRGTWDAEHIFALRQALQSWDHYQHQIADCDRQIESVLPPHDPERPPLPKLRARKRAGVNSPAIPKLREILAQMCDGRDLTQLPAHTHYGVLQIVGEVGTDLTQWPTEKHFTAWAGLAPGNHDSGKRKGRAKRGRNRTGQLFCVMARSLVRSKDIALGGFYRRMAARRGGLIANMALARKLAAWFWRVMVKGDEYIEKGLASYDAQVLLSKQRALKRLAKELGQQLVPIPQTA

SEQ ID NO: 378394 - protein, 359 aa, unidentified
MSIAHLQGSGNVIIGIDTHADTHVAVAITDQGGRLDQLVFNADPAGFARVDSWARSLGTPIAWGVEGTSSYGAGLSRHLTRTGAVVFEVNRPDRALRRRVGKTDPLDAEAAARAVLAGTATAIPKTGDGPIEAIRVTRLVKRSAIKARTQAINQLKALIVTAPDELRRDLAGLTNPRLIDRCARLRPADTLHDPTVATKRALRRLARRVQALTDEIDDLDAELAALVAATAPKLLDQFGIGPDGAAALLITAGDNPHRLHSEAAFAALCGTNPIPVATGKTDYHRLNRSGDRQANAALYRAVLTRLAYDPETKAYIAARLAPGGGNKKHLIRKLKRYLARQLYPIILDALAPPMTAHAA

SEQ ID NO: 378395 - protein, 521 aa, unidentified
MTSSRTRRRSSSRRQSPTSLGKPRGVLHPRVQQVGPEHFGIICFDCAKIRSKFLLADFYGRLLIPPTVVAHTRPALDAAVQQIRQAFEHHQIRDGLVAIERTGRYHRVAQRTFAAAGFETRILHPFVTKQYRQPVDPGNKTDDADLAAIHRATVTGCALLEATRDEAWTTLQLLIRHRRDLVCKGAALNCQIRDHLEAALPGYAACFDKLWESPIPWHLLRHYPTAVQLHEAGVTILCQSLRQAGIRFQQRTLQTVVDWAEQAAPGDVAASQHLRIALALYEDRQRKTQEIKALERDIASRLVQTPYVLLLSFPGINVVSAADFAGEMGPIEHYLNAKSITGRAGLRPSRYQSDAVDLANGPLVRHCNRALRAAILGIADNLVTCNHHFQALATQWSAQGKDPRHTRVKVGLRFCRIAFQMVAGRQVFRHPSIQGRHYILDKLTAFHREHDTGMVEVLRDLQAAIGQVPPREHAAEAKPLQEELHRIHDGRRRGPQVLGDILPIVLARLGVGAVQSPESGE

SEQ ID NO: 378396 - protein, 409 aa, unidentified
MIIYVGIDWSSKKHDICFVNAAGAAIARQVIAHTPAGFAEFERQRERLSVEPAECVIGIETAHNLLLDYLWGHHYTQVYVIPPNQVNRESQARWPSGARSDPSAAYLLAEMLRQDRIRFPVWCPDLLLTRQMRSRVSLLMHLTRHITALSNRLWAVLCRYYPAAITVFSDLTAQIELAFILAYPTPQAAAQVTWTEFQVFAADHRHTQPRKLPAAFARLQQAQPEADADTVATFQAEAVQLAQLLLPLVQAKQAQLHALTRLFQQHPDAALFDSLPGAGEFLAPGLLVKFGDDRNRFPDAASVQALAGTCPVTDSSGKHHVVRFRKACDHEFRTLTQQWAQATLTVSPWAQAYWQAMRPHCRSNSAAYRRLANRWLAIVWKLWQTHQTYDEDYHLQQRAAHSQPRSTKP

SEQ ID NO: 378397 - protein, 475 aa, unidentified
MKTRVDAADEDALLVSLTGLKSQYIQEDVMVESSGLSRGDKRRNAKLARLRELVPAANAIVAIDLADEKQVAVVTDHDSRVLARRRVKAKVWRLGPVLEWARQHAREHGFEDVTIGCEPTGHRWRVLDQLAAQRDMTLVCVQPLLVGRARESEDYTRDKTDDKDAVLIARLVAQLRCYPPERADETWAELRHLGSYRDRLITAATADVQQLRDLLECAWPAVLSAAADPFDSITWCAALAVVVRRCDGRPERLARGGYQRFEDAVRREFPRWGGQRGPRRRIVAGVYTALTDPAGVTAQRPGALQRAKWVVADWHTTTIRLAEVQTRILEILDELQLTELVSSIPGLSALGAAAILAETGDLSRFDSPRALVKHAGLCPRENTSGTMTGRSRISGRGRPRLRLAAWRAVWGALSHNPVMAARYRHLTTREHNRLTDGQARAAIAAALLRWIHVIITQRVTWDAAIVTAPEHPAAA

SEQ ID NO: 378398 - protein, 482 aa, unidentified
MVVPNEEPKKPTKPNKPTKPNKLTKPNKSRERSLPVPVPVSAAALHVINPDAAGIDVHSDMHMVCVPADRDANPVRQFGANTADLQEIVAWLKKCRVRTVALESTGVYWIPLFELLESEGFEVNLVEPGQLSRCGARPKTDVLDAQWIQRLHSYGLLRASFRPPDSVLALRAYWRQRQMQVRYAASHVEHMQKAMEQMNVKLTEVVSDITGLTGMLIIGAILEGERDPIKLAQLRDRRCQHSEEQIALALEGTWRPEHLFELRQAHELYQFHHRQITECDQQVQAELANFPNRAGEKTRTVKRRKRGRKSNDVRFEATGPLFQALGVDLTSIEGIDVGTALVILAEIGVDVSRFPTEKHFASWLRLCPPQDESNKTKKRRGHRKGTNRVTIALRMCARSLGKTMTPLGLFYRRIRSRIGGLGAVKATAHKLACLVYRMLKYGQQYVTQSMEEYEAKVKANMLKALKRKAAAMGFQLSPLPTQ

SEQ ID NO: 378399 - protein, 413 aa, unidentified
MDKIYDICCGIDVHKKLIVACLNHKRKKELREFGATTRELMELAEWLQKNNCEIVAMESTGSYWKPLYNIMESYGLHVIVVNPAHMKAVPGRKTDVKDAEWIAELLQHGLLQPSYIPSKDQRELRELVQYRKSLVGERTRELNRLQKMLEGANIKLSGTVTNINGKSARKILEYILSGNEIDEKKYDEMYEEKLIAHNLKASKEQILDDLKGFMSPLQRRMLKELLQHLDELNVHIENLNDEIDNFMKPEEKQASQMIQDVTGIGNTSAQAIIAVIGTDMERFPSDRHISSWAGLCPGDNISAKKRKGGKIRKGNALLKSTLVLCAHAAVRHKSSYFHAQFKRISTHRGKKRAYVAVAHSILIAIYHILKDGVKYQDLGAEYYNQFNAERKIHAYLKKLKALGWEPPKEAVPA

SEQ ID NO: 378400 - protein, 377 aa, unidentified
MKKVRFIGLDVHADTIAVAVAEPGGEVRSLGVIPNRPESVRKLVKKLGPSASLRVCYEAGPTGYVIYWQLTALGVPCEVVAPTLVPTKAGDRVKTDRRDAEKLARSYRAGDLTAVWVPDAAHEALRDLVRAREAAKKDQLRARHRLGKFLLRHGRRPSTAMTAWTQRHLTWIRQVQFEHRAQEATRLDYLHEVDHMVGRIERLERAIDEAVKTAPPSMRVVIEALQALRGIALVSAVTIVAEVGELSRFERAPQLMGYSGMGAREDSSGPRTRRGGITKTGNAHLRRIAIEAAWAYRHRPAVGGALRKRQATVSEEVKAIGWKAQLRLHARYRKLLGRGKCQQQVVTAVGRELLGFIWAIGVTVERQQRKTSSSIAA

SEQ ID NO: 378401 - protein, 387 aa, unidentified
MPQPNDLSRSLVALEQDITLIAVIEMSQSSWLVAGIVPGIERHPLKKLEPDEAALLRLLWRWRDEAAQKGRTIMRIAVAFEAGRDGFWLARWLRARGVEAYVIHSTSIAVSREHRRAKTDRLDTELLKRAFLGWLRGEQDHCSMAALPTLEEEDAKRPTREHQTLVGERTRIVNRMKGTLARLGIRGFKPTLRKAPERLETLRTPESAALPPNTRAELQRDMARLHFVIDQLREIERTRLERLEQRPAEGQNAMVRLVARVVGVGIETADMLVHEVLSRNLRDRRAVARYAGLTGSPDESGSKRREKGLAKAGNARVRRGMIQLAWRFLLHQQNSALAQWYRARTAEARGGMRKTMIVALARKLLVALWSFVRTGEVPSGIVLRPIA

SEQ ID NO: 378402 - protein, 409 aa, unidentified
MTPLYVGIDVSSRNNVVYLMKPDGSKIKNFSVPNSKDGSQKLVKEILSAITSFALTDVIIGLEATSVYGDNLVCFLREDGSLVPYNRKIHVLNPKQVNKFKESYNDLPKNDYVDSFVIADCLRFGRINKEVYLDDYRYKALQNLTRARYQAVSNLTREKQRFMNVLFKKYSSLAQEKVFTDTFSTTALAVYEEFDSADTLAYMDLHELTEFLQKKGKNHFSDPEEVAKAIQKAARSSYRLPKTVNDSVNQVLSISISSIRALEAQIKQFDKAIAAQMELIPNTLTSIKGIGPVYSAGIIAEIGDINRFPNQAKLAKYAGLAWRQHQSGDFEAQNTRLIKTGNRFLKYYLGEAALSLVRCDAEYSRFYHLKYKEVNKYQHKRALALTARKFVRLVFRILKDNRLYTAPEA

SEQ ID NO: 378403 - protein, 410 aa, unidentified
MDVLYTRCAGLDIHRDSIVACVRLAEAGGVTRLVETFATTTTDLERLSEWLRGHGVTAVAMEATGVYWKPVWAVLAGDFELVLANAHHVKAVPGRKTDVNDATWLADLLAYGLIRPSFVPSLSEQALRDLTRARKQLTREKASHVQRIDKTLQAANIKLGSVFSNIMGQSGRALLEALAAGESNPEQLAGLVRTKIRASHAQVVEAVRGRLAAHQRLLLRLYLTQVDALDAAIAAIDHELGERLKPVQETVQRLTTMPGLSPLSAAVVISEIGLDMSRFPSAAHLISWAGLCPKNDESAGKRRSTRLRPGAPWLKAVLVQSAWCAVRVKASYLHALFQRLKARRGPRKAIVAVAAAMLTAIYHMLKRGAAYHDLGPDHFQRTERSRLAARLARKLGELGFDVTLTQRAAA

SEQ ID NO: 378404 - protein, 430 aa, unidentified
MTKFEHTADARVLVGIDISKHRHEVLIAAPGKTRRRRLTITNTLDDFQRLIAILSDYARPVQIGFEATGNYHRALIYQLGMAGFDVKLVSSVALARTREALHNSWDKNDPKDAQVILHMLQIGATQVFMDPLRAGITDIQELSMTHEVVSRAKTELWHRILGHYLPLYFPEAARFQRSTRSEWFLAFLEMFPSAHLITAMDKDDFTAAAWDVVGRKVAKAALISDIYETARSSVGLPVAAEADALRMFRMVLAEGRSLMRQRSEIEARAVALLGDHPDYRLLTSVPGIGPINALTILAEVGDLRRFRHHRQFLKFCGMDLATVQSGLFRGRSRISKYGNARLRRTLWMAGQTAVLHRANSFRDKFERYIAQDRHNPDLRRKAYTAIAAKMARTIHAVIKSGEPYRPFFGGGEPERKDLSLASRGGSFLTS

SEQ ID NO: 378405 - protein, 344 aa, unidentified
MTTKCMAGIDLHSNNLFCAIVDMEGRRVFEKKLPCEMESLVQALKPFKKRLEKIAVESTYNWYWLVDGLQDHGYPVVLANPAAMEQYNGLKHADDKSDGFFLAEMARLNILPTGHICDRAVRPVRDLLRRRMGLVQKRTSLILSLKSLHTRMTGRDLGTGRIKALELKEAESLFEHPADQLITRLDWQLVEQLGRSIQAIEALILARVKSLPGYQVLQTLPGVGKILGMTITLETVDPKRFAGPGEYASYCRCVDSRRMSNGKKKGENNGKCGNKYLAWAYVEAANFAQRHDAACRKFYDRKKAQVNGIVATKALACKLAKAAWHMMSQNTAFDAGRMFPGVQR

SEQ ID NO: 378406 - protein, 408 aa, unidentified
MTVVGIDVSKGKSMVAAMKPGGELVTTPYEVKHSGIELSRFALDVLCMEPDTRVVMEATGRYHEPVAALLHSEGIFVSVLNPLLIKQSGAGSLRKVKSDPKDALKIAKYGLDNWSTLREYTPMEAIRQQLKLCARQCDLYSKNIVMLTNNLISLSDKTFPGVNELFSSPEKENGHLKWVDFYRTFWHCDCINRMSPDAFEERYKKWCKRKGYHFSADAADALYAASCGLYTTLPRDNNAKLLVTVATDQLIALRENQSKLEAEMLNLCKQLPEYETVMAMYGVGKSTGPHLMAELGDIRRFPHRSSIVAFAGVDPGVVGSGKMQLSSVATSKRGSPQLRKALFQVVSAYVKRKPENEAVYQFYAKKRDEGKPYYVCTTAAANKFLRIYYARVKECLNAAESATQAEEG

SEQ ID NO: 378407 - protein, 423 aa, unidentified
MEKLEAITAKTLIGGIDIAKKVHWARFVDYRGIPIGKAIRFENNKAGFEHIVAETERLRKAHGMDYVLLGMEPTGPYWKALAWRLKGLGLRVVTVNSHHTKQAKSLDDNSPTKNDKKDALVIARLVKDGRYFEPYLPEDVFGELRVSSNTRIALMKRMNGVKNRVMGILDEYFPEFTDVFRKPLKGKASMQILKSCPFPVHILELGVEGLLAEVKKAVKKTVGKKKVSALLEAARDSIGVGYGLESARMQMKMLIEELEFLQKQLEEAEARMRVLLEMTGYAELLLGIDGVGVVSAASFLGEIGDPLRFDSPRQISRMAGYNLVENSSGQSKSGTSISKRGRKQLWALLYRMAMVMVSKNSELKLLYHHLKTRRDNPLKGKQALVVVSKKIITIIYQILKTRKAYEPALVLGAVRKQQLGLAA

SEQ ID NO: 378408 - protein, 407 aa, unidentified
MTFFVGLDWAATTHAVCVIDETGTVRWRGTVAHSAAGLAELVQRLNRFGASATLPVALERPSGLVVDTLMEAGFPVVPIPPNVVKASRPRYSAAGGKSDPGDAYLLADLLRTDGHRFRPLQPLADETRALRALVRGRDDLVAQRVALANQLRALLERFWPGAAAIFAAVDSPIALAFLTRYPTPQSAERLGERRLAQFLRRHAYCGRRAPAELLARLRTAPLSRTGEAETEASGELVQALVAVLTPLVAQIQQLSAAIAAALDHHPDGPVLQSLPRSGQINAAQILAELGDDRARFTSADQLAAEGGVAPVTHASGKHRGVAFRWACNKRLRQALTTFADNSRHASAWAAAVYTRARARGCDHAHAIRVLARAWVRILWRCWQDRRPYDVTLHRGAQPLLAPEPLGG

SEQ ID NO: 378409 - protein, 391 aa, unidentified
MKSSHHIDTPAAGDKDGTLYVAFELSKSKWLIGIVLSGESKLSRHQVAGGDTAAVWQLISKKQAQAEKKLGRPVRVVSCYEAGFDGFWLDRWLAEQGVDNRVLDPSSIEMPRRARQAKTDRLDLERLMRVLIRHEGGEPRVCSVVRPPSPEQEDARRLSRERDRLVGERTAHGNRIKGLLHGQGVRDVEPRRKDFREQLARARTGDGRALPAKLVAEIVREHARLMLIAGQLAEVEGQMRAEREAAVPDSRARQVNQMLGLKGFGPVGGETLANEVFWRDFRNRREVGAYFGLVGTPFDSGESSREQGISKSGNSRARTLAIELSWLWLRYQPDSALSRWFKARVGDQKGLVKRIAIVALARKLMVALWRYLTLGVVPENAIVRAAAPAGR

SEQ ID NO: 378410 - protein, 321 aa, unidentified
MTYVGIDVSKATFVVAYSSAKNSKTKTFKNTTKGVHEFIQTLSANEHHCVLEATGNYSSLLVYLLSRANITVSLENPLKIKNFARVMLSVTKTDETDARLIALYGERMQPAPYKLRSDAILTLKQKRTVIRQLKKQLIATQNLKGSMEALPFFDPKCKKAIEKTIVFLEKQTKGLEEELAALAQSEYKKQIDLLTSIKGIGVTLAAALIMATGGFTYFDNAKQLTRYLGLSPTYQQSGTSVNVKGHINRNGDSSLRGQLYIAAMASLRCNAECNACFDLLRSNGKPGKVAVVAVANKLVRQAFAVVTQEKPYVDGFKSEKP

SEQ ID NO: 378411 - protein, 363 aa, unidentified
MTSLSEIVEVVIGVDTHVRTHSAAAVDARTGGVLGEVTVEATPEGYQALVDFAGAHSLLRAWAVEGTGGHGAGLARLLARRYELVLELDRPERARRRNGAKSDPLDAIRAAREALSRAKLGTPRSAGQRQALSVLLAARRSAVQAGTDAQRQLFSLVIAAPEQLRERFRGQTLPAMTRLAARLRISPRWDLETATTARVLRDLARRALELSDEAARHEKDILAIVRSWRPDLLAQPGIGPIIAATVLCAWSHPGRIRSEAAFAMLAGAAPIPASSGQTTTRHRLNRYGDRQLNRALHTAVLCRLRYDPTTQAYAQRRTTEGKTSREIKRCLIGGLSVVRPARAVVPRSRRGMATLPCRCDGQL

SEQ ID NO: 378412 - protein, 513 aa, unidentified
MVSSAALQEPVTKRGPGCRDPDIGEAVYPKSEYKAIPLKRIPFYHHPATTFYSITEKESDDSKEKFEKKSGNKVQLVPIIQPDSAGIDIGSSEIYVAVPGNRSEKPVRRFDTFTDDLHQAAKWLKDCNIESIAMESTGVYWIPVFQILDSYGFQVILVNARHVKNVPGRKTDVQDCQWLQYLHSVGLLNGSFRPAQDICAIRSLLRHRDNLVKASGSHIQHMQKSLTQMNLQIHNVISDITGVTGLAILDAVLSGERNPDKLADLRDGRIRADKKTIAKSLTGDYRREHLFTLRQALQSYRNYLRQIKDCDAEIERYLREFESRIDLEKNPPPASGKSSRKPIADKTDFDLKTHMHRIIGTDQTLIDGISDLTAHVFFTEVGPDLSKFKNVCHFCSWLNLSPNNKISGGKILSSKTGPGTNRLANALRLSANSLWRSNSYLGDYYRRMRARHGAPKAITATAHKLARIIFHLVKYLKAFDETIFAEQEKVHQKHLKKRLEKQAKSMGFQLVAV

SEQ ID NO: 378413 - protein, 320 aa, unidentified
MSSIVPICTVGIDVSKDSLKLAVRPSGEHWSINHDPQQFPALIEKLTQLAPSRIVLEATGGLETLVATHLAAARLPVCVINPRQARDFAKATGQLAKTDRVDAHLLAHFGEALQPELREIPSTQTQLFEALLTRRRQLVQMRTAEKNRLSISGHPRKIVKDIEAHIGWLDRRIRQCDDELKSALQASPVWRANDRLLRSVPGIGQVVSQTLLAELPELGQLTDKQIAALVGVAPFACDSGGWHGKRHIRGGRSSVRSALYMATLSAIRSNYRIRSFYERLLAAGKQKRVALTACMRKLLVILNAIVKQQKPWRDYTLLNA

SEQ ID NO: 378414 - protein, 326 aa, unidentified
MQTVLNNCCGLDVHKDSVVACLLKTQDPLMFSNNQEDVIKEIRVFNTFLNDLTKLRIWLEAEGCCHVAMESTGVYWFPVYDALENACSGKMELLVTNARHMRNVPGKKTDIKDAEWIATLLRAGLLRGSFIPPLDIRELRQLTRYRKNVVGDITTQKNRIEKNLQQAGFKLSTFLSDIFGVSGRNLIRVLIQKGKLTPGDVENETKRISPEKKNEIKLAINGKLSQRQRQFLQLQITMLDDLLGHLTAIEQSITELSQPFMKEIDHLDTIPGISVTAATAIIGEIGVDMNKFPTAEHFCSWAGVVPGDNQSAGKKKVPESLLETPT

SEQ ID NO: 378415 - protein, 428 aa, unidentified
MVKVKTSAPARTPRPMIAHQELLHFAGFDWASDHHDVVVLDKTGHILESFRLDHTTAGWKQWTLRVAKYPNLGVAIETSFGAVVDQLLQSEVTVYPVSPLSAKRYRERKAPSGTKTDFHDGWSIGDALRTDGHHWRPLSAKDPMIEHLRILCRDEVALIEERTALIHQARQAARDYYPTAVEAFDDWTLPSVWSFIETFPDTASLVKAGPKKWQRFLHAHKLYRPSTTEKRLALFASAAEWNIPEYMVSAKRIYLLTKIKQLRALEKQLDEYRRLIQALFDKHPDSGLFGSIPGAGEKLAPRLLAEIGSDRALFEDASGLQCISGTAPVSFQSGKLHKVKMRRACNHHLRHTIHLFADCSRQSSTWASAYYDALKARGKTHAQALRSLGQRWLKIIFRMWQDGTRYDADLHMRNQVAHGSWVLSAPTK

SEQ ID NO: 378416 - protein, 342 aa, unidentified
MKVKAVGIDLAKNVFQIHCVDERGKVLLRKQLKRSQMASFFANLSPCLIGMEACSGAHHWARKLQSFGHSVRLIAPQFVKPYVKSNKNDVADAEAICEALLRPNMRFVAVKTIDQQALLALHRARQGFVKARTAQANQIRGLLSEYGLVIPQGIGQIAKRVPELIEEASNELPGMLRMLVSRLMEHMKALDGQVAQLEAHIKGWHREHEASRKLERVPGIGPLTASALVASMGEAKSFDNGRQLAAWLGLVPRQRSSGGKPTLLGISKRGDSYLRSLLIHGARAVIRAAQRKPVRGGWLHELLKRRNPNVAAVALASRNARIAWALRAHERQFEANYAAVPA

SEQ ID NO: 378417 - protein, 367 aa, unidentified
MKKGSTAAKQRVRNISGQTLTIGLDLGDRNRWYCVLDEAGRIQLEQRVRTNAKALQEVFGAMPRNRIALEIGTHSPWVSRLLSELGHEVIVANARKVRLIGESRKKDDRLDAQTLARLARIDPELLYPVKHRSAQAQADLMMIRGRAGLVRARTGLVNTARGLAKSYGERLRGCNARHLNPEKAEGLSPELQAALEPLLNAIESLSERIVEYNERIEKLAQQDYPQVALLKQGKGVGTLIALTYLLTLEDPHRFQKSRDVGGYLGLQPGRRNSGRSEPQLHISKEGDPYLRTLLVQGAQHILGPFGIDCDLRRWGLRLAERGGKSGKKRAIVATARKLAVLLHHLWVSGEAYEPLHNRNRGAVAAAA

SEQ ID NO: 378418 - protein, 375 aa, unidentified
MQNKVRFLGLDVHADTIAVAIAEADGEVRSLGTIANRAESIRKMVKKLGSVGQLPGRYEAGPTGYVLYWQLAELGVNCEVIAPTLVPMKAGDRVKTDRRDAERLARSHRSGDLTAVWVPDAGSEALRDLVRAREAAKQDQLRARHRLSKFLLRTGQRPAQGMKFWTLGYMAWIKQIRFAQMAQEATKLDHLTEVEHMGERVARLEQAIEEAVKLASPEIQEVVKDLQALRGIAPISAVTIAAELGNISRFEGARQLMGYSGAVPSESSSGKRTQRGSITKTGNAHLRRIAIEAAWSYRLRPGVGPALRKRQDGVSEEIKEIAWKAQHRLHKRYSRLEVAGKDRRKIITAVGRELLGFIWAIGTRAEAAVKQRRAA

SEQ ID NO: 378419 - protein, 335 aa, unidentified
MMDTTTGELVERRLEHGTGEAERFYAALAAPARVGIEATLATQWFEKMLTRYGHELWFGDAAEIRAAMVRKQKTDTRDARHILNLLMEDRFPRIWVPSAVERDVRHLVRHRHKLVRFRTSVMNQLQALAMGQGLCLGKKLWSTVGRQKLESLQLDPWANRRRRELLELLDQLDPAIEELDRAVIREAENRSAAVCLMQQAGVGPVTALAFVLTVGPVSRFANSKKLVSYLGLNPSEESSGGRQRLGAISKQGNTLLRCLLVEAAQTAARLDPELRRDYQRLKFRRGHSGVAKVAIARKLAVRLYWKLREAAQPNTAARMQGSPVTPVVGESLSSY

SEQ ID NO: 378420 - protein, 487 aa, unidentified
MENRAYLGIDVSKGSADFILVDADKGILEKGFLLDDCPQGRKMLCRLIQGWLDGGITHLYCAMESTGGYENNWYGMLCGLGASYQNTGKTLRVARVNPRAVKACTKALMLRTQNDQTSALAIASYQIGFSEKIRYSPGQGQSEDPIWLAARGQAGLIRMLLKQKTQLSNQLEKLLYSRFGELMIYCRNGVPGWLVRLLRRYPSRQSLQRAGTKKVARIKGITLARAQSLLAKLDASQPATPPITSHTIQATARQILYLQEQIQAQQAYLSQQFAEHPDVLLIESVKGIGLDSAVRILVEIEDISRFDTSNAFCSFFGVPPSWRESGDGHWKVGMSKQGRPQVRAILYMCSLTGIRWNPDLKKLYHRFRKKGMSHYQAMGVVMHKLLRIIYGVLKNQTPYDPQVDRANRKRSKQARQAYQEKKAQKTSQHITMRQRFNSQLEDSTEQAPLSRRAYQKRKQEASQSSPLEEHAGSPPVKKSKKVPMMNI

SEQ ID NO: 378421 - protein, 336 aa, unidentified
MYCGIDLHSNNSVIAIIDDTDRVVTQKRLPNDITKIVGFLARWQDELTGVVVESTYNWYWLVDGLQDAGLHVHLAHTAAIKQYDGLKHSGDETDAQHLAHLLRLGILPTGTILPREHRAVRDLARKRMQLVHCCTTHVLAVENIMARQLGGRMTSNQIKLLTADAIDSMPVAADVGLAIKANVAVIATLQSQIEVLEKRLQERIKPRPQYGFLTSVPGIGQALATVIFLETGPIDRFADVGNFASYARCVDSVHTSNRKKKGEGNVKNGNKYLAWAFVEAANFAVRFCPEAKRFHERKKARTNNMVATKALAHKLARACYHILKEGKPFDVTRCFA

SEQ ID NO: 378422 - protein, 402 aa, unidentified
MNAVGIDVSKSKSVVAIMRPFGEIVSTPFEIKHTASDIHSLIELINSVEGESRIVMEHTGRYYEVLAHQLSEANLFVSAINPKLIKDFDNDSLRKVKSDKADAVKIARYALDKWQNLKQYSVMDKLRNQLKTINRQFGFYMKHKTAMKNNLIGILDQTYPGVNTYFDSPARSDGSQKWVDFASTYWHVDCVRKMSLNAFIDHYQNWCKRKKYNFSQSKAVEIYGKAKELVPVLPKDAITKLIIKQAVDQLNSASTTVESLRTLMNETASKLPEYPVVMAMKGVGTSLGPQLMAEIGDVSRFTHKSAITAFAGVDPGVNESGTYEQKSVPTSKRGSADLRKTLFQVMDVLIKTHPQDDPVYQFLDKKRTQGKPYYVYMTAGANKFLRIYYGRVKEYLSSLPES

SEQ ID NO: 378423 - protein, 392 aa, unidentified
MLYIGIDVAKSKHDCFIIDSDGVVYTDNLRITNDRIGFNKLLETILNALDGEPATNAKVGLEHTGHYSINIKRFLESQGFVVTCFNPLETSAFRKASTLRRTKTDKCDAKIIATMLFSDESIPTSSPSYQIQELKSLTRHRFRLIGYRGKLKVSFARIIDVVFPEFPGFVRSVNQKSSHQLLLELPTPDTIAACHLTRLTNLIRKSSHGRYGREKAVALRDLAASSIGLSDEALAFELQQTIRMIQNVQAEIDALDRKIKSIVQELDTPLLTIPGISYTLAAIILAEIGDINNFSNPSKLQAFAGLDPSTYQSGKYTASYAAMVKRGSTYLRWAMFQAARLVAMRDKTFADYLAKKRSEGKHFNVAISHVSKKLLRTIFYMLKHNEAFVPQS

SEQ ID NO: 378424 - protein, 411 aa, unidentified
MSFKILKNNCCGLDVHKTWIFACIGITDSHSRTEYKQTRFSSFTKGLQELCNWLAKYNCNDVCMESTGKFWIPVFNILEKNNIWVTLSHPKYTKPQKGNKTDRKDAKWICDLYMCGMVKPSFIPPADIRELRDLARYRFKLTCMITGEKNRAHNCLTVSNLKLDDVFTDIFGKSSRSITEQILQHPGETFDVAPFVDRRCKTPIEEIQAAVDGAISLEQAVKLRQCLNHIDELEMHKAEIEREIFRLSDKYEEVLTLIRTVPGFDKNPMTAIQVLSEIGGDMSVFPTAKNLVSWAGCCPRNDQSNHKIKSTRISRAGYYFKPVLVQIANALIKSKKHPEFTTRYRRIKARRGHKKAIIAICRMLLTAIWHILTDLKPYTPEGFLESRPVKESKVLTTSQELNLLKQWGIYH

SEQ ID NO: 378425 - protein, 475 aa, unidentified
MRLPVVKKARVARKQVRVEPPEGRPTPKRQRFPSVKNQTDKRSSKPLLFVGLDVHKESISIAVAEDGRDGEVRSCGTIAHDLRALEKVMAKFKKEGKELRVCYEAGGCGFGIARRLLQLKIDCQVVAPSLIPKKAGDRQKNDRRDALKLARLHRSGDLTAVHIPEATDEALRDLCRARSDAMNDLRRTRQQLKAQLLRLGYKYSGKTSWNDAHERYLRALMMPHAAHQVVLEEYLQSIAAAGERVQRLTAQIETLAKTWRLWSAVQAIMCLRGFQVLSATLFLSELGDLERFAHATHLMAYLGLLPSEHSSSDTVHKGRITKCGNSHVRWILVEAAQHYAKPPKVGRELSRRQEGQARRIKEISWSAQNRLYRRYRALTGRGKKAQKATVAIARELAGFLWALYREWKTPGSIAARVAVPRAQRVDRPDASRKSPTAREYTLKPMMPNPPGMRAGSAKRTPQREVVGSGGTRSHR

SEQ ID NO: 378426 - protein, 315 aa, unidentified
MTNLKKSKTTVNVGIDVGKAFLDIYIHEKQRHWQEENNDAGIKRLLKRLSHYQVERLVMEATGRYEFNLAQAAYSKNIPVCIVKPLLVRRFAGAMDQLAKTDKIDAQIIAHFAVMMKPTITPRKSKKLIAIKELIARRRQLMSLRTQELNRIKIMGKALALSCKRIIKCLDSEITRIENKLAKHVEEQAEWAQKQALLKTVPGVGNTLVYTLLADLPELGALNKKEVASLTGLAPINRDSGRLRGKRRVQGGRANVRTVLYMATLSATQCNPVIKAFYKRLVAQGKHKKVAITACMRKFITILNAMVRDKVEWAM

SEQ ID NO: 378427 - protein, 387 aa, unidentified
MLLDHLSDGPAAIRTQFGAIFVSLELSRSTWLVTSLSPGRGEKMSNHSVEAGDIAELLNLLAELKRKAQARTGESYPIIAIQEAGLDGFWLHRALQQEGLESHVVDPASIATPRRRRRAKTDRLDGETLLRALLAYKRGEPRVCAMVVAPSPEQEDRRRLCRERRTLIAERIEHVNRIKGLLFAQGVSDYAPLRRDRRARLEALRTGDGRALLPHLKAQIGRALDRLELLLGQIAAVEREQDALLAASKPTGEKAAPDPVTMLLALKSLGPNFAAVLWSEAFYRQFANRRQVAAYAGLAATPWRSGGIAREQGVSKAGNPRLRITMIQLAWLWVRHQPQSALTQWFKAHSQRSRKRAIVALARKLLVALWKYVTAGVVIEGAVMKTA

SEQ ID NO: 378428 - protein, 352 aa, unidentified
MTIKTLGIDIGKNKFHLYGVDSFGKMVLKKQLTRSKLHEFMVNLPPCLVGMEACGGAHHLARLFKDWGHDVRLMAIQHVKPYAKSYKNDFNDAAGICEAVTRPHMNFVGIKTVSQQEILALHNDRSRLIEERTALANGIRGLLLEHGLTIAQGIHKILPNVTQLLDPECEEVTPLLKSLLFDLIEEFKYKNTLIKKRDDQFKSFAKANPQVQQLMTVPGIGIIAATAFIGKVGNVNVFKNGRQLAAWLGLVPQQYSTGGKIQLGRISKRGDRYLRSLLVHGARSVLKTLKYKKQESLSPLMAWFRKIADRRGHNKGIVAFANKMARILWALLSSGNDYQHNYKNTTFENAVA

SEQ ID NO: 378429 - protein, 423 aa, unidentified
MNESTLCVGADVHLDEIVLRAVDKTDGHEVIKRFHVTNNLPGALAAASMIAQAATQAGATRIEIGWEATGLLWVPFHRFLSTCPRLAPFEVELVCINPKLVANFKDGLVLRRPKNDERDAWDIAARIRFGELPVSYVPSDFWQGLRRLTRYRYQLARILSREEMRFQSYAFLKASDWKRVKPFSTVFGATSVALLTEFTVAELTALSHDQLVDLITHRGRGRFEDPTATARMVQEALRSSYPIDPQMDQMVTATLATGWEHIRYLKRLMKRLDQHIARYIAPVPNPLITVKGLGAVITAGLLAEIVDITRFPEHKHVAQYVGLTWEKRSTGNFVSQNTRMTKVGNVYLRYYLILGADKLRLFNLEYQAYYWRKYHEVSKYQHKRALVLTARKLVRLVYALLAKNQPYARSQIIQLREEPSESD

SEQ ID NO: 378430 - protein, 377 aa, unidentified
MQKVRWIGLDVHADTIAVAVAEPDGEVRALGVIPNRPDSIRKLVQKLGPVGVLRACYEAGPTGYVLYWQLTALGVHCEVVAPTLVPTKAGDRVKTDRRDAAKLARSFRSGDLTAVWVPDAAHEALRDLVRAREAAKKDQLRARHRLGKFLLRHGRRPAIPMGAWTQRHLTWIRQVQFELPAQDATRLDYLHEVEHVAARIERLERAIQDAVQTAPPSRRAVIEALQSLRGVALISAVTIVAEVGDLSRFARAPQLMGYSGMGPREDSSGARTRRGGITKTGNAHLRRIVVEAAWAYRHRPAVGGALRKRQAPVSEEVKAIGWKAQLRLHARYRKLLGRGKCQQQVVTAVGRELLGFIWAIGVTVAREQRPRPSAIAA

SEQ ID NO: 378431 - protein, 421 aa, unidentified
MKNSAAKKLKQVPVGYLIVGVDPHKKKHAAVIVTQDFTTHSKFKFNNSKEGFDMALERARMEMVRTGSRGVIFAIETGGHYWRNLAYFLDERGIPFRFINQFTLKRRREGKDLNRRKNDYRDSEVAAQLLCTGEFTETQLRHGVYAELHAAHNAYRRLVKERTRITNLVKGLLDGLFPEFTQVFKDPCGLTALSVLSICPVPEVITAMTEDEFVNIIRAGHQGLLMRKKLRALHYTAKTSIGIDAGAQSVSSEISFLVEKLYLIKRHIRSIDETLVRLVDRTEEGKYLLSVIGLNYISVAGLLAELGSFQSYRSAKQLIKMTGSNPIESESAGKRGSHTPMSKKGRPVLRYCAWTAVIPMLRFNPDFRAWAKKLRERPVQTNPLSGREIVGAALNRLLRLAFTLVKKQSFYRSPQLVQVTG

SEQ ID NO: 378432 - protein, 430 aa, unidentified
MNPPCEQTAQDWLAHRAFGGLDWASQKHNVIVVDSRGKIVEEFEIAQSALGWKKFRERLAPYGAIPIAIETSQGSAVEQLLEAGMEVYPINSKSAKSYRERKAPSGVKDDRLDAWSFADACRIDGQGWRALRPEDPLVKELRLLCRDEVGLIQQRTSFICQLRHALGEYYSIALEAFEDWGSMSAWMFVQRFPTPQLLQEAGKRQWEKFLHARHLWRTESGPRRMELFAQATELCGTVPMANAKSQLALSLISMLFALEKQLGIYRQRIEELFSRHPDHDLFGSLPGAGPKLAPRLLSEIGDDRGRFEDGPQALQCLAGSAPVTRRTGKGKVRANPDHWPCHQRWACNRYLRHAMHLFAEQTLGQCVWAQIYYQHHRQKGSSHADALRRLAQRWLKIIYRMWMDRKPYDAMLHHQNQVKHGSWVFELKTA

SEQ ID NO: 378433 - protein, 456 aa, unidentified
MSNPHKVKIKSAIGKANCQLPTLHPHAGGIDIGATHLQVAVPCDADPRPVRTFTTFTDDLLKLRDWLLQCGVTTVAMESTSVFWIPLFQILEASGLDVCLVNARHAKNLPGRKTDVSDCQWLQYLHSVGLLRASFRPPEHICAVRALLRHRTNLTRYAGQQVQHLHKALTQMNVQIHNVLSDVVGMTGLLILDAILAGERDPHQLARFRNARVKASRDTIARSLHGNWQPEHLFALRQALATWRHYQTQMAECDLEIQRVLGTLDARVDLAAQPLSAPRVLHSHGQHFAFNARAELYRILGVDLTQVPGMQAGTALVLFTELGPDFVSKFPTAKCFASWLGLCPDNRITGGRIISVRTRDVKSRAAMALRLAAQSLWRSKDYMGDCFRRWKARLGTPKAITAMAHKLARILWHLVKYHQPYDPTVWAAAEEKMKAKRLKRLEQTAASFGFKLVSAA

SEQ ID NO: 378434 - protein, 455 aa, unidentified
MGKRKRKNRGWCGSERPVLESNAAGIDVGAREMYVAVPPDRDSEPVRVFGTFTSELQALVTWLQRCRITTVAMESTGVYGIPLFQLLEDAGIQPCLVNARGWKNVPGRRTDWHDCQWLQSLHAVGLLRAAFRPTQEICAVRSIWRQRSELVAMAAQHVQPMQKALTQMNLQIHHVISDITGVTGLAIVDAILAGERDPDRLAKLREPSIQASSEIIRHSLFGDWRREHLFVLQQSRSLYQSYRQQITACDREVEALLGQLPPRAAPTDLPPSAPATRQKKRTAGAVSFDYRTEAYRLFGVDLTRVPGLEANVRALFSEIGNDLSRFPTAAHFASWLGLCPDNDKSGGQVLWRGVRKIQQRAGQLFRLSAHSLHRSPTRLGHFLRRMKAKLGPKAATTATAHKLAVIFYTLVTKHIEYDDSNWATQEQEIRKRMENKLKHHASLLGFQLVPVAVPQ

SEQ ID NO: 378435 - protein, 343 aa, unidentified
MELHTIGIDLGKTLFHLVGVDACGNVVVRKRCSRTQLLKYTANLQVQRIGMEACSGSHFLGRALREQGHDARLMPAQYVKPYVKTNKSDYIDAEAVAEAVQRPTMRFVPIKTEEQLDLQAVHRARERWVMRRTAVINQIRGLLLERGVTVPKGRSHLEQALPLILEDAHVKLSGSSRVLLAQFKLELQQLIARVEQMDSVIQYAVKENEACQRLTTIPGVGPVTATALVAAIGNGSGFRRGRDLAAWVGMVPREYSTGGKQKLLGISKRGNNYLRRLFVQGARTVMQHRAKQSPGLSCWLAQLLARVHQNVAIVALANKLLRMAWAVLCKNEVYRSPVLATSS

SEQ ID NO: 378436 - protein, 340 aa, unidentified
MTITTIGLDLAKSVFQAHGVDEVGATVLVKRLHRKQMLPFFSKLPPCLIGVEACGTAHYWARTLSAIGHEVRLIPPSYVKAYVKRGKSDALDAEAICEAVQRPTMRFVPVKTVEQQGILMTHRARSLLVRQRTMLANALRAHLAELGFVANPGIANLAKLAEQVMADKAALPSYARAALEILIRQIMVVSGEVAVLDQQLMAWHAESEASRRLAAIPGLGIITATAIAATVTDAEQFSSGRQFAAWLGLTPQQHSTGGKTRLGGISKQGDRYLRRLLVVGATAVMRHVKDKPTPMADWIRKLSEKKPFRLVSVALANKLARIAWVVLTRKEAYHPYAHLA

SEQ ID NO: 378437 - protein, 350 aa, unidentified
MMIIGCDFHPRYQQIAMMDTETGELTERRLEHENGEAQAFYASLAKPARVGMEATGYGQWFERMLAEQGHELWIGHASEIRAGVVRKQKTDARDAAHLLRLLVEKRFPRIWIPSPAERDARQLLRHRHKLVCFRVSVKNQLHGLAMSQGICRKKKLFTAKGREELEKLSLGPWASRRRQELFGMLDRFNPVIDELDRAVQQQAENHADAARLMTQPGVGPVTALAFVLTLGPVARFPRGKHVVSYLGLNPKERSSGDKQHTYSISKQGNTMMRWLLVEAAQTAVRYDPELLRLYQRLKFRRGASVAKVAVARKLAVKLYWMLRATASVAQLAPMQGSSGGTLIPHVGSKF

SEQ ID NO: 378438 - protein, 317 aa, unidentified
MANTHVGIDISKHQLDVAVRGEEACDRMAHDQETIDALCRRLCERAPDRVVLAATGGLEMPLATTLQAAGLPVVVVNPRQARAFGRASGQLAKTDRIDARWLAEMAARMRPPVRTLPEAERRDVRALVVRRRQLTAMSAPEKTRLHSTPAIARPSIQALLDYLQTELARLDQALEDHLQNHQTWCRHAELLRSVPGVGPVTAAVLVADLPELGQLSRRTLASLVGVAPLNQDSGQLRGKRRIWGGRAGVRRILYMATVSAVRHNPAIRAFYTRLCDKGKPRKVALVAAMRKLLVMLNAIMRDQVPWQKEPVTKPLHT

SEQ ID NO: 378439 - protein, 312 aa, unidentified
MKAEKKKSIGIDVSKDTLDIAIGDNFFGVIKNDPKAIRRFVASLASEEIKQVVVESTGGLEQTVIAELARASVPVALINPARVRYFAKSSGQYAKTDRLDAHLLVEYGEHFELRHYRLPSEEERKLSDLGSRRRQLMEMIVAEKNRYQAMPRMKKTIQKHLTWLQQEVLEIEAEINTMLENNREWQEKKEILTSCKGVGNVTAFTLLAELPELGTINRKEIAALVGVAPINRDSGKRSRKRTTYGGRSKIRSVLYMATLSAIRSNPHIAKFYNRLVENGKKKMVALVAGMRKLLTILNAMVSKNQPWIPDFA

SEQ ID NO: 378440 - protein, 334 aa, unidentified
MEHYIGIDAHCEYCDIAVVNEAGRLVSHRSVKTSAKNLIEAVCKVKDARIVIVEESTLAGWLHRTLDPYADHVSIVDPKRNALISTAEDKSDRNDAHRLALLYRGGYTHAVHHTLDAGFLELKEMVLHYHDTVEQVTRFKNKLNAVYRKHGLFRVPAAIYDSAEGLEWIKRLPFSSSRHRAKQTLSMITRAQKIKVQARNKIRQMSVRFPEIDMFMAIPGVGLIVAATVVAIVETPHRFPGKEQLWKYVALAVAKPGSAGKTQGRHASREGNRLLKKVLMMAAHNAARGDHRFGRAFRRHQQKSLSNAQRTVARMILATMYGMWKTGECYREVA

SEQ ID NO: 378441 - protein, 345 aa, unidentified
MKITTVGIDLAKNVFQVHAVDEHGRVALRKQLRRDQMTTFFVNLPPCLIGMEACGSAHHWARTLQGQGHTVRLMAPQFVKPYVKSNKNDVADAEAICEAVARPSMRFVPVKSVEQQSVLSLHRARQGFVIARTAQANQIRSLLGEFGLVIPKGISHVTKQVPRLLDDASNQLPGVLRQLITRLSEHLKDLDKLVDELEMQIKAWHRSSELSLRLEKIPGIGPLGASALVASIADANSFANGRQLSAWLGLVPRQHSSGGKPTLLGISKRGDVYLRTLLIHGARSAILAAQRKAVNTNVWLVGLLSRRHPNVAAVALANKNVRTVWALLAHGREFRPSYVPKQLAA

SEQ ID NO: 378442 - protein, 347 aa, unidentified
MKFYTTFHQYYCGIDLHARLLYVCILDNLGNKVVHQKIKADPHQLRKLLKPYIGQIVVGVECMHCWYWVSDFCHELKVDFILGHALYMKAIHGGKAKNDKIDSYKIASLMRGGNFPLAYNYPAETRSTRDLLRRRTHIMRHGADLKAHVVNTDSQYNLPAQSLNLKNVSAREGLCHHYDDPIVQRMIALDMNILDCYIRELKHVESFIENKAKQHYGALLMIVRTFPGIGQILALTILYEIGDIKRFPSVQQFASYSRLIKCKAESAGKVYGTSGNKIGNGYLKWAFSEAAVLYLRGNDKAKHYLAKLQKRMSKGKALSVLAHKIGRCIYFMLRDRQVFDEEKFLKG

SEQ ID NO: 378443 - protein, 412 aa, unidentified
MQTLVERGCGLDVHQATVVACLLHVMRDGRMQKQMRSFGTTTRELVSLREWLRSEGCTHVAMESTGVYWKPVYAILEGGFQIVVANAQQVKKVPRRKTDVKDAEWIADLLCHGLLRSSFGPPKPIRELRDLTRYRRKLGESQAAERNRLPKLRQSANIKLASVATDVFGVSGRLMLQALVEGKASLAEMAELAKGKLRNKIPQLQLALEGKLEEHHRFLLQLQQDRLDAAERDLATLEQRIQQKLEPYAAQVSLLQEIPGVDWTLAAVIIAELGVDMSVFQCVSQLASWAGVCPGNNESAGKRKSTRIPKGNVYLKTALVEAANAAARTKGTYLRDKFYRLKARRGYKRAAVAIAHKILVSIYHMFSQQVSYNDLGDLYLDKLNKHHLTRNLVHRLERLGYSVTLSPQQIAA

SEQ ID NO: 378444 - protein, 342 aa, unidentified
MDIATIGIDLSKTTFHVIGLNARGEIVLRRKLSRKQLLLYTANRQQMLIGMEACGGAHYLGRALREQGHDVRLMPAQYVKPYVKTNKNDYLDAEAIAEAVQRPTMRFVPIKTDEQLDLQALHRVRDRWVARRTAVMNQMRGFLLERGVVIRKGPSYLVAQVQEILVGGGAFFSARLRGLLRELKQEWDELDKRIEQTNAELQRIAKQDDACHRLMEVPGVGPLVSTALVAAIGNGVTFRKGRDLSAWLGLVPRQHSTGGKPKLLGISKHGNEYLRRMFLHGARSVVMQIGRKPSALATWLTDLTQRTHRNVAIVALANKMARIAWAILSKGTHYCAPALATV

SEQ ID NO: 378445 - protein, 392 aa, unidentified
MVVSVGIDVSKNKHDCFIVSSEGEVLADVFTIPNNMDGFDALLEKIRACTTPQDKIKVGLEATGHYSYNILGFLLDNGLPTYVLNPLRTNLYRKSLSLRKTKTDRVDARTIAAMLLSDAGLKPYTDTVYHNEELKSLTRYRFDKVKERAKLKSSVSRLVCILFPELEKLTPTLHMPSVYALLDEFPGAKQIAEANLTHLKAILHNASKGRYNRDKAIDIRESARASIGAVMSAKSLELRHTIRLIRELDAEIEDIEAAIQSIMNEMHSPITTIPGIGTRMGAMILAEVGDFSRFDSPDKLLAYAGMSPSTYQSGQLKNCYPHMEKRGSRYLRYALYNATKYVCLWAPTFAAYLAKKRAEGKHYNIALSHAAKKLVRLIFAMEKSRQPYCSAT

SEQ ID NO: 378446 - protein, 326 aa, unidentified
MTRESNGRAASERPGASIGIDVAKATLEIWVEPEGVGWTVANDPAGIATLVEQVQMRAVSRVVVEATGGYEYAVVAALSLAGVPVAVVNPRQVRDFARATGRLAKTDRLDAQVLAQFGAAIRPEPRPLPTAEVQELDATVTRRRQLLEMLQAERNRHGTARGKLAQQIQQHIRWLERQVAALDDELKRLIEASPIWRAKEDLLRSVPGIGPVTASTLLAELPELGRLDRKQIAALVGVAPFARDSGTLRGTRTIWGGRASVRTVLYMATLSAVRWNPVIAAAYHRLCNAGKLPKVALIACERKLLVILNAMVTHGAPWDPDVAQIA

SEQ ID NO: 378447 - protein, 416 aa, unidentified
MNAVGIDVSSRKSTVAVLRPLGEVVCLPFDVTHDIAGLASLVEKLKALDGETRVVMEHTGRYYEAVEKALHEAGLFVCAVNPLLIKEYGANSLRRVKTDKADAIKIARYALDNWADLRDFTPMDAIRYDLKTLNRQFQLASKQRTASANNLIALLEQSFPGIRKCFDSPVRSDGTQKWVDFAHSFWHVDCVRKQPFPAFCERYRKWCKLHAYFFKLRNAEKVYALAKSAVVLTPKSKVVKVLVQEAANQLSSISRSVEVYRAEMDRLAAMLPEYPVVMAMYGVGKSYGPQLMAEIGDVRRFERKQALVAFAGIDPMPNQSGDKNVRSNKSSKRGSPYLRKTLFNVIRTYLQCAPQDEPVFQFLNRKRAEGKPFYVYMLAAANKFLRRYYAKLRDYFASLDTLQPVAPIPTILKAAL

SEQ ID NO: 378448 - protein, 340 aa, unidentified
MRIIGCDLHASQQTIAMLDRETGEVVEKTLKHEAGTVREFYAALPAPVVVGLEATGSMGWFLQLLDELGITYRVGHPATIRKAETRKQKHDRRDAMLLLQLLTENRFPAIWIPSTELRDLRALLLHRHQWVRLRTRVQNALHAIALGYGVQRGHALWNRDGQVMLASLPLPLHAAHRRDELQALYQQLDKHVDRLDDRVKHAAAARRRSTELMTHPGVGHVTALATEVFLGDPSRFADGKALASYVGMIPSEYSSGNRQRFGGLSKQGSPLLRFLWGEAALHAVRRDPELQRFYRRKLQQKGLGKARVAVARKLGIRLWIMLRDQINYDEFCRRSPRRQS

SEQ ID NO: 378449 - protein, 362 aa, unidentified
MRIIGCDLHARQQTVAMLDTATGEVVKMTLTHEGNNVREFYSRLPRPVRVGIEATGSMQWFVNLIEELRIDCQVGHPAEIRAAEPRKQNHDRRDADLILKLLMENRFPAIWLPSKELQDLRALLRHRHQWVRLRTRIQNALQSIALANGLRRGPSLWSQDGQNTIASLPLAPHTAYRRNELQAMYAKFETEIEKLNQRVEEQACKRTGARLLMTHPGVGPVTALATDVFLGDPARFADSKALASYVGMIPREYSSGGRQRLGGLTKQGNPLLRFLWGEAGAHAVRRDPELQRFYRRKLIQKGLGKASVAVARKLGIRLWIMLRDQIEYHEFCRRGQKQQKSSDACAGMPETPYGANSRRPID

SEQ ID NO: 378450 - protein, 387 aa, unidentified
MARKRTLSTLDTSIAYEAVGLDLAKEDTAIAAFGPDHEGPYLIDRMPYDKLYELLADMAPTLVAMEPCSGAHQIAEQIQELGHEVMMISGRHVQAWVKDHCNGQKTDLNDAFAILNLAYDRWLTPIRGKTREECRLLALQASYRQLKGQRTKTMVHVKATLHAWGFPIRAGSFNQKVLHELIDANREAFGDEVAETLHLMINRVRDLDHDIATVLKLLTEATKRDPRASLLRSIPGFGVLTTSRWCAVIGDIARFDSPKQTMAFIGLVPNNRITGHHTETSSGREARGQGRMSKRGDKMLRSLCIMGAGSLCLMVRNDRLPDCPFVASIKERLAWPRPWFKVLVYVAAKLVRIATALLKYGETFSFEKAGISKAVLKHWELEQAKAA

SEQ ID NO: 378451 - protein, 463 aa, unidentified
MARNNKGKKNKKQVRSLKAIQPDAAGIDLGSREHWVAGPPLEDNTPNVQRFGTTTPELLRLADWLKEQKVKTVAMESTGVYWIPLFEILDSRGFEVILANARQVSHVPGRKTDMLDCQWLQLLHACGLLRGSFRPSDDICRLRALFRERNTMIDQRSDWVRRMQKSLDQMNVCVHHAVSDITGVTGMAIIRAIVDGERDPRTLAQMRDRRCQKSEEQIAEELTGNWRPEHLFNLRQALKMYDQFCQIVTEYDTEIFAYIKTLQPGVDDDQTAPPPASKSKARNIAKKGQEPMRQALYQLTGFDMTIINGIGVDTASVVLSELGFDYSAFPDEGHFVSFLRLAPNLSISAGKKVPSKLKGTTTSRVATALRMAALALRNSKTALGAFYRRISRRKGASVAVFATARKLAQIIYRFVCHGQAYIDIGAKAYEAQFNNRQLKYYTKALKDMGYKVKPLAAATVLAA

SEQ ID NO: 378452 - protein, 422 aa, unidentified
MKSFRSGRSGPAWLAIDVAKNRHEGLLEDPKGNRQRLAIANSRDGFDTLATQLRPYGACEIALEPTGDYHRPLANFLVRKGHHIHFVSSVATNRTREALFNSWDKNDPKDAQVILHLLKSGTTQTFLDPLEAGHLDLQELLGSYRKIVDRKVRLYHVLMTHYFPLYFPEAERFASNPRTEWFLEVLHVAPCPAVVLGFTKKTFVKRFTAAGGHFTSRQRLVAEYYETAKESVGIPVSADSWAVKMFQLTIEQYIGLTKLRRKMEECVHAQLEDNLDYQRLRTIPGIGPIIALTVLAEGGDLRRFSHYRKFLNYCGLSLSASQSGTHRGSPQLSKRGNARLRCAFWMAANAAINQRRNAFRRKYDNYVRVNPLDPDLKRKAYTAVAAKVARVAYGLIKTDQEYRHFDEAAISNGRIPSPGPSR

SEQ ID NO: 378453 - protein, 331 aa, unidentified
MNYSHFVGLDVGKKTFDASLMSADEKELSHKSFDNTSEGIQSLLDWIAGYHLSLSKLLFCAENMGSYVTELSVSSASMGFSLALVCPLTIKKSIGLQRGKNDRIDAKRIANYAVLHYRKLELYKLPDKDLVRLRGWIIIRDNLVKQKVSSIKLLETFSQMAKLADVTDSISFLEEQLKSIKEKILQVEEAMEQLIATSCSLCTNYLLLRSIKGVGIINAIVLLCVTNNFQRFDNPRKFACYCGVAPFEHTSGISIRGKTQTSPLANKEVKVYLTRAAITAISWDPQMKAYYKRKIAEGKHKASVINAVRAKIIARSFAVIRRQTPFVTLVV

SEQ ID NO: 378454 - protein, 343 aa, unidentified
MDHFAGLDVSVKETSICIVDDTGRIVREVKVASEPEALLQVLGNPIYRFKRIGLEAGPLSQWLFSALAEAGSPVICVETRHMRAVLQAQINKTDRNDARGMAQMMRAGLYRPVHVKTLRSQKLRMLLTHRKLLQSKAIAIDNDLRGTLRNFGLKVGMVGTAKFEARIKELVENLPDLAVLVEPLLMVRRVLREQFSILHRRLLAIVRDDEVCRRLMTVPGVGPVVALTYRATVDVPARFRNSKAVGAVFGLTPSKYQSGEINRTGAISKCGDEMMRVMLYEAAQILLVRLAKWSWLKAWAMKIARHRGMKKAIVALARRLAVIMHRIWVDGTEFRWTREAAVA

SEQ ID NO: 378455 - protein, 418 aa, unidentified
MDKIKTKGRKVVNEKTLLVTVDIGKTMNMGYCRCPDKTEVKPFEFQNGYQGFNKFLNIIFKTQATKKLEHIVVGFESTGAYAEPLMHFLRRKGIQLVQVNPLHTKRLKELQGNSPNKTDKKDPKVIADIIELGHALTVVIPEGAVADLRRLTNARERTLQRRTALLNQLQDIVFICFPEFLKIMKDVKTKTAHYLLKHYPTPADILASGLDRLIFEMKKVSRGKLGIERATALYEAAKTSVGIQEGRIGLALELQEFLLSIEECERFMGRVEEEMSCCLRDIPYSSLLLSMKGIGKITVAGLIGEVGDFKEFHRASEILKYAGLNLYEISSGKRKGNRRISKRGRSLMRKLLFFAAIRTVRKNGIMHGHYQRYLQNGMKKIKALVAVSRKLLEIMFALVRDHNLYQEKYLEIRCLKAA

SEQ ID NO: 378456 - protein, 412 aa, unidentified
MEGETVIAGVDTHKDVHVLCLLDGLGRKIWSGSFGADPEGYDRLAEAIGDPGSCMVVGVEGTASYGAGLTRRLVELGYNVVEVLRPKRDKVRPGEGKSDPLDAERAARKAASGKGCSVPKSQDGWVEAVRQLYVARRLAVATSTSCVACAKSMLTTAPSALRERFRGRERPKDLMPLLARGRKAGDALEESVLASLRSVAAVWKEARSQVESLDERIRALLEANAPALLGVEGCGTTTAAALVVAAGDNPGRLRGEAAFSMMCGASPIPASSGKTDRHRLNRGGNRQANWALYEIAIKRMAYDERTRRYVARRTSEGKSRREAVRCLKRYIAREVYHVLMDPNPDGAAPEGPELAKMRKAMRVTQKKAAAELGLSAATLGHLERGKRRSTKLERRYYELLCELERALPQTAS

SEQ ID NO: 378457 - protein, 413 aa, unidentified
MSPDLLLREVPAERLVVAIDPGKVSNRVWLTTGERGLIGEPVSLPVLRDGVDELDRLFAASGVSGPPVIGIEATGALHRAWATEVERRWPGSLRLFAPSETQAARGQLGSRRFKTDDRDCAALVWLLRQGAGRPSAPSAIEALLGAVRHRRQLVDARRVLQQRLHDQLNALCPGLSAPAGHGRVLELENPSGRAVLACAVAFAGRAPSVRSLLARSPGRLTEANAQFWAGRWKRLLAPPVDAELRAHRLGRDLERWLGLREDITALEGQLAELLAGTDGQILTTLDGVAVVRAAAFAAHSLPIERWASPEQLYSATGLAPASYQSASVTRRGRISRQGLAEHRDALMGIAWGLSQHSVAFAERDREYRARGFRPIQARVALARHACRLAWRLMISQQPYDDRRYDRARHRRGR

SEQ ID NO: 378458 - protein, 373 aa, unidentified
MPKYSTAFGMDVHLRSTTVCALDADTGEAVTRRFPGNPWGEIAGWMDGFPGPSLAAYESGYLGFAPQRELAGLGVECVVAAVSKIPRSAADSASKNDRNDAARMAKAILAHDISPVWVPSPEVEGIRDLAGAHDGATARLATAKQRLLAFLAKRGFVYGGTTPAGNPRKYWAYDFLRWLDKVRPEDDGGVRTLAALRNEVEAAAEARSDLLSEYRAAVDASPIAAEVAALQSIKGCAFALAAAFSAEVGDFTRFRSGRQVTAYFGLAPSQRSSGDSVRLGGISGAGNALVRKLAVEGSWCYAAARHQPKLMPRDTGVPLEIRMHGRKGSERLLRRREEMLARDMPAAKANAATAAELVRWLWALGMMCREGAE

SEQ ID NO: 378459 - protein, 349 aa, unidentified
MTIVEDRPVITGGVDTHADLHVAAALDSIGGLLGVQEFPATAAGYASLLGWLGGFGDIALVGVEGTGSYGAGLARHLAVAGIRVVEVDRADRQDRHRAGKSDPLDAVSAARAAQSGRASGAPKGRDGAVEAIRALMVAKRSARAERTQAINQARALIVTGPDELRARFAGHRPAQLVEAIAALRPRPGDVPGYATRVALHELGRRAQFLDAQLDRLDELIGPLVTARAPGLLALHGVGPDTAALLLVAAGDHPERLRSESSWAHLCGAAPVPASSGKVSRHRLNRGGDRQANHALWRIVITRLGSRPGHPATRAYVERRTKEGLSKKEIIRCLKRYVAREVYHQLRAGA

SEQ ID NO: 378460 - protein, 369 aa, unidentified
MADRITYVGLDVHKESIVVAVAEGGLRGEVREYGRIANTATALDRLLRKLGGDGMALRFCYEAGPCGYGIQRRLSAQGHECVVVAPSLIPKRAGDRVKTDRRDAASLAKLHRAGELTAVWVPDARHEAMRDLVRARLDAVHALRRARQQLSGFLLRQGRHYGRPAWTKLHRRWLASLKFEQAVHHLVLEDYIQTVEAAEARRDRLTAQIEAMLPNWTLAPVVAALQTMRGMALVNAATLIAELGDLTRFANPRQLMAYLGLVPSEHSSGASVKRGGITKAGNGAARRLLIEAAWSYRFPARLSRELLLRQENQPRPIREIAWKGQVRLCARYRKLARAGRPANVVTAAIARELSGFVWAIARQVTVPAG

SEQ ID NO: 378461 - protein, 408 aa, unidentified
MNRYYGGVDWADEFHQVWVSDAEGKKVAEMKVEQSPKGLSEFGRWLHERQGEQIELWAAIEKPQGRIVDFLLDHGVVVYPVNPKALDRARDRFRMSQSKSDSFDAYVLAEFLRTDHVHLRALEPDSEQAQELKMLTRDHHRLGRHKTRLLNQIEVTLKEYYPRPLEVFSDLESKIALDFLEHYPTPRALSELSRRQWNRFAKREHHLGEERCKELWEKLSQPQLKIPEHVVRAKTQLLLVLVIQLKSLAEAVKNYSEEVERFFASMPAAELVKTLPGGKSGTTVPMLWAELGDAKSRWQSFRHLQAEAGGVPVTKASGKSRVVQFRFACNKLLRYASYWFSFNSLNRCEWANKYYRDQRGKGHGHPQALRALGAKWLKIIFVMWRDHKPYDENYHLSNIARQQMRQAA

SEQ ID NO: 378462 - protein, 384 aa, unidentified
MDIIYKSCAGIDIHQDNVVVCVLYGPLTSTRPKREERRFDTTTQDLKLLNEWLQSFNVEAIGMESTGVYWKPVWRALVDDFELILANPQRIKSIPGQKTDKQDAHWIAKLTRVGLIPRSFVPDLSIQELRDLTRQRKHYIESRNKEKNRAHKILQTSGIKLTSFMKDIFGKSGRNLLNLLVDGEVITETNIRQNVFTSLKRKVPQLLAAMDGYFSKHHRFMLKQSLEMIDTYDKLIMALEKEIDCRLEIYEHEIDILDSIPGIDRITAAVLIAEIGVDMSQFPTVNHLASWAGLCPGNNESSGKKKSSRIRKGNRYIKKCLTQAAFVASKRKGTRYYSKYRRIQQRRGPQKAVIAIAHDLLKTSYYLLSRQTLYQEPTTIKISA

SEQ ID NO: 378463 - protein, 404 aa, unidentified
MYNAVGIDVSKGKSTVAVLQPGSTVIRKPFDVSHTSQNLNELADYFSSLDGTTKIVMECTGRYHEPMVKALSEAGLFVSIVNPHLIKNFGNNSLRKVKSDLADARKIARYTLDNWTELRQYSGMDNTRTQLKTLNSQFSFFMKQKVAAKANLIALLDNTYPGVNKLFDSPTREDGSEKWVDYAYSFWHADCVRKIGLKAFTERYKSFCKKHHYIFQQDKPEKLFNASKELVAVFPKEKTYKLLIQQSIQQLNLASEHVERLRREMNELASTLPEYSTVMGIYGVGKTYDPQLIAEIGDVSRFTHREALTAFAGVDPGVDESGQHKSKSNRASKVGSARLRKTLFQIMTTLLQNAPEADPVYRFLDKKRSQGKPYYVYMTAGANKFLRIYYGKVKECLRNLEQTE

SEQ ID NO: 378464 - protein, 350 aa, unidentified
MEIIAFDSHKRYTQSLVEDARGRVIAEDRITHEQGAIWQYLKRFKPGCSVAVETIGNWYWIVEEIEQAGMKALLVHARKAKVMVGNVNKTDRLDVRGLNRLQRTGTLPTVWIPPGELRDKRDIARTRMFLVSQRTQLKNRIHATLDKYALEVKEVADIFGVRGRQLLEERCKSLPPHTRFTVEQQLTQVDGLEGAIDALEKRMSEVFAETEEVRLLRTIPGIGFLLAVVISLEVGDVSRFGRAEQLASYAGTTPRVHASGGKLRYGRLRTDVNHYLKWAYVEAANAICLNRSRWPKRHVCCLYERLRPKKGHAVAIGAVARHLAEATYWVLTKKEQYQDPQSSRRSSTEA

SEQ ID NO: 378465 - protein, 474 aa, unidentified
MSETHSTSSNDRIVAKPERSKRPKTSGLPIIHERAAGIDIGSRFHVVAVDPALCEEPVQTFQAFTSDLVRMADWLIALGVETVAMESTGVYWVAAFEVLETKGLEVILANAREARAVPGRKSDVNDAQWLQRLHACGLLRASFRSGREIAALRVYLRARERHLDYAAAHIQHMQKALTFMNLQLHHVISDVTGVTGMKIIRAIVAGERDPKVLASMRDARCKASAQTIHAALSGNFQPEHLFALAQGLALYDFYQSCIAQCDAQIEKAVATLNASRVMPEAALPKARHRTKQPNEVNFDVRAAMYQLSGTDLTQIHGIGPFLALRLVAECGTDLSRWKSAKHFTSWLTLAPGCKISGGKVLSAHTRKTSNRVAAHLRLAAVTVGRTATALGAFYRRLAARIGNAKAVTATARKIAVLFYNAMRFGMNYQDPGADRYEEQYRERVIKQLHRRAAEFGFALSPQNIDPTAAAGSVS

SEQ ID NO: 378466 - protein, 413 aa, unidentified
MDVLHPRCCGLDVHKSSISACILVQVEGRVQKHQRRFGAMTQDLQELANWLRQFEVTQVAMESSGVYWKPVWNILEGQFTVVLANAQHIKNVPGRKTDQKDAEWIAQLLQHGLLRPSYVPCEVIRDLRDLTRMRASLSQEASRISSRVQKVLEDANVKLASVATNTLGKSGRAMLEEIIAGQNDPEYLASLALGHLRAKTPQLRLALEGKIRPHHRFLLQRLLDQLRFVEHEIVLLEERLEDIGRERPELAQAVARWDTIPGIDRVAGWTLLAEVGHTMAQFPTAEQLASWASLCPGNHESAGKRLGGTTRKGSPWLRRMACQCAWAAARTKNTYLSAQFRRVASRRGSKRAIIAVAHSLVIIGYYLQKNQRNYEDLGGDYFDRIDSDGLKRYFVRRLEKLGHKVTLVPIKAA

SEQ ID NO: 378467 - protein, 397 aa, unidentified
MYIVGIDIAKRKHEAAVIDGEGTVIIKPFSFTNNCSGYNRLLAMLTKAKLPLDEVSFAMEATGHYWLALFTRLQKEGFRVQVINPVQTNSIRSFYIRQAKTDPRDALLIAEVIRFGHFSESTLHPENIYELRELCRGRHAIVSMQADVKRKVVALLDQVFPEYETAFTNMFSDTSMAILQTCPTPKELSEMPLEELCHLIEVSSRKRFRMAKARELQELARNSFGFAMAGDVFSTMIRLYAKHLDFLKQQVREMDRKIAEIMDTLDTPITTITGIGPTLGAYILSEIGDISRFSSAAKLAAYAGIDPTMRQSGEYNGVRNRMSKRGSPYLRHAIWLAASSAVLHDPALKFYFQKKRDEGKPYMASVGHACRKMVSIIYAVMRDNKAYTPCIPNEISA

SEQ ID NO: 378468 - protein, 341 aa, unidentified
MGEVITIGLDIAKSVFQVHGIDVAGAVVIRKRVTRAKVLEYFGELPPCLVGIEACPSAHHWGRELQGLGHTVRLIPPSYVKAYLKRGKNDANDAAAICEAVTRPSMRFVPIKTKQQQTALMLHRARQLLVRQRTMLSNALRGHLTELGIVSAKGRNGTAELLRIIADGRVSPAVCGILTVLARQYGAISTEIAAIDKNIMALHRGCEASRRLAEIPGIGPIGATALVAEIGDWKTFSSGRSLAAWIGLVPKQHSTGGKDRLGSITKQGNRYLRWLLVVGAMAVIRYARKHGTERRPWLSRLMECRPTKVAAVALANKIARMAWAIMVRGERYKEPKLLLAA

SEQ ID NO: 378469 - protein, 385 aa, unidentified
MPRISTKHEGTMFQRRILKKIEKSPTTPITIGLDVHKSSIHAAIFQGDTVITDWRTSANYDALADQILPLLSFTKVIAYEAGPTGFSLARILQQHGFKVVVCAPAHTPRASVRQNKSDRIDAAKLAQFSAYNMLTAVTIPTEQEEQERLVLRHRNAIVDKARRVKQQIKAEFLFFGMGEIASWSRNEIEHLSEIPCSENQRFALDSLLREMDMFDGELKATNVRIERIMKEHHADAKVILESHPGVGPVTAATFALELFRPKRFRNGRRVASFLGLAPGKDQTGETDRSQPLLKRGQGRLRSQLIEAAWRWIRLDPAARSVYGRIASKKKGNAKKAIAAMARRLAVRLWTMWTRGEMYNPEKVNQGKIQSKQHRGVTRKTKAAAS

SEQ ID NO: 378470 - protein, 429 aa, unidentified
MPQLWAGIDAGKTEHHCVVIDGNGTKLLSQRFKNRESAILTLMGDVASLPGGTDVAWATDLNHGGTGLLQTLLSSHAQPLFYISGRVVHHASGAYRGEAKTDAKDAVIIADQARTRRDVTLMRQADDVTAELRLLSARREDLVHDRTRAVNRLRAILVHYFPSLEGAFNYATTRGPLVLLTRYATPSAIRRTGESRLASWLKGQGCWKSAAVAKTAVEAAREQTSVVAGEDAAARLVSRSARDLLRIRDELAELEAEIDAVLQDSSSADLLVSLPGFGRRLAADFLAATGTDLAAFETPDRLASFAGLAPVPRDSGKISGNHHRPRRYDRRLLNACFQAAFIASRNCPVSRSFYERKRGEGKSHKQALIALARRRINVIWAIFRDQTSYHPTGAEPAAFASGTIADGSAARGLGAGGNPWEGIGNRHSW

SEQ ID NO: 378471 - protein, 376 aa, unidentified
MENDSTVYVGLDVHKESITVAYAIGMGEVELLGKTGTTKTDIERLCKRLQSKGPGVRIVYEAGPCGYGLYRQLVQKGFDCMVCAPSLIPTKPGERVKTDRRDAIKLARALRAGDLSAVYVPGVEDEAFRDLARVWVTAKDDLKQARQRLKSFLLSHGVRYTGRADWGPAHRHWVSQYCFTTEWQQLAFEEYRRTIEDRLAQCARLELALRDAAVTWRFYPAVLGLQAMRGVQFTTAVGMLAELGDLSRFEHPRQLMAWLGVAPSEHSSGDRRRQGSITKAGNSYARKLLVEAAWSYRHPARVSPDIQRRHEGLPKAIIDRAWDAQIRLCRRYRKLAARGKNANIAVVAIARELSGFIWDISRLAMSLAVPRSKQPA

SEQ ID NO: 378472 - protein, 349 aa, unidentified
MTIVEDTRVVTGGVDTHAEVHVAAALDAVGGLLGVREFPATAAGYAGLLGWLRSLGTIALVGVEGTGSYGAGLARHLAAAGVRVVEVDRADRQDRHRQGKSDPLDAVSAARAAQSGRASGVPKGRDGAVEAIRALMVAKRSARAERTQAINQARALIVTGPDELRARFAGHRPAALVGAIAALRPRPGDVPGYATRVALRELGRRAQFLDAQLERLDELIVPLVTARAPGLLSLHGVGPDTAALLLIAAGDHPERLRSESSWAHLCGAAPIPASSGKVSRHRLNRGGDRQANHALWRIVITRLGSRPGHLATRAYVERRTKEGLSKKEIIRCLKRYVAREACHQLRAGA

SEQ ID NO: 378473 - protein, 324 aa, unidentified
MNKNKEFFGIDISKDVFDVVDSSEKHHQFKNDPSGFRVFGKLLNENSHCVMEATGSYYQGLATWLYSQSIDVSVVNPLSVKRFIQMRLKTSKTDKLDALMIRMYGESEQPKLWTPPSKLIIEATELHKLIELLVRQRAGLKNRLHALESKGITRSLVLTTVRRQIRNLSNEIAELEIKLEAVIKEYEPDLLTRLCSIPGVGKRTSIYLIVLTQGFEKFESSRQLISYFGLNPIIRESGSSIRGKSRISKTGDNQVRKLLFMCAFTACEHNKACREIYQRLTAKGKSKKLALIAVANKLLKQSLAIAKSGLYYDENYRSVNVNLG

SEQ ID NO: 378474 - protein, 322 aa, unidentified
MDNMKMTDHTTTNWTTFLGFDVGKDTIAIFDSASGQHHILENRAAPLRRFLKTCDPQSYAVCEATGGYEGCLLDCLLACNITCHRADARKVKSFIRSFGTLAKTDAIDARALADYGRERHARLAVWQARSTAQVELQTLAHHRVDLVKLRAAEKCRLQAPQAKIIRPFCRKLIAHLDKQIATIEREINRRIASDERLARTVECLLAMPGVGQITAHTLCAFLPELGTLTRRQVAALAGLAPHPRDSGKMHGYRRTHGGRPQIRTALFMAAMSARQHDQQMRAFYQRLIKNGKKPIVAITAIMRKMIVILNARMRDMEMLHQS

SEQ ID NO: 378475 - protein, 357 aa, unidentified
MYPFYLGIDLHLKRSYMALMKANGEPIDRRRLRNKEVAAYLQEKVPKKTYAVLEATRNWAWMYDLLSEHVERVELAHPKKVKLIAEATLKSDKIDATTLAHLARLNFLPTAHAAPPAVRDLRTLMRHRSWLVWQRTQAKNRIHGVLAGYNLVSPVGDLFGKLGRQFVVEAQQQVRPAARRVIQDQMKLVDHLNEQVQALEEQIDQVITLAPRQAEDFRLLDSLPGVGRVTALMMLAEIGDIRRFNSPKALCNWAGLTPTVKQSDLIVRHGRISKQGSAHLRGAMTRAASVAARTSPRWYRVHEKLVKRCGRTGAKVAVARRLLTVAFHLLKKREPYREDYISNAQKNAGEPAALHGS

SEQ ID NO: 378476 - protein, 340 aa, unidentified
MNITRLSIDLAKDVFQLYGVDGKQIGILTKRITSRAKLVEFVSKLKACEIYMEACCSSSYWARTFQGYGHRVKLISPQYVKPYIQRNKNDYRDAQGIMEASFWAGTPYVTPKTVEQQDIQSLLRIRSNYIEIRTTVSNQLRGLMKEYGVFVVAGYQKLKQALPGIFDRNIENGLTPQMKELIEGQYDMLLIFDEKIDKLDIQIEQMSKQHEVCQRLQKIEGIGPITALAIIALVGHGQGFKNGRHFSAYLGLVPRQHSSGQKEKLLGISKRGDVYLRELLIHGGRSVVMHCSQKSDARSVWVNKIKDTGGMNKAAVAVANKNARIVMAMLLSGENYQKAA

SEQ ID NO: 378477 - protein, 325 aa, unidentified
MAVIGIDVSKQKIDCAWLRDVASGKVKTRVFPNRRQDFPRLLEWLEHQTGEPQDQFHVLMEATGIYHETLAYWLHAAGIQVYVLNPAQVRDFSRSLGVRGKTDKKDSVVLARYGATQRPEAWQPEPEEVRKLKALAARLDALDKDIQRERNRREKAEFAMATDILRSIDDILLALTRERDRLQQEVDDHLDQHPGLKHDRALLQTIPGVGPAVSLRLLTMLRGRVFKSARQAAAFSGLVPVSWESGSSVRGRPRLSKAGNPKLRQSLYMAAVVGLRRNPDISALYQRLTGNGKSKMAALGAAMRKLIHIAYGVLKTQTEYRPQTA

SEQ ID NO: 378478 - protein, 348 aa, unidentified
MRQETKVYVGLDVHKEFCQACVMNKSGKVISNGRFLSTQEALDGFLDRFEDAEFVLESTGIWEFIYEGIEKRGFEVVLAHPLKVRAISEAKVKTDKVDAETLAHLLRADLIPRSHVPPRDIRNLRQLVRHRAYLVRQCTSIKNRIHAELLRRGIRRPDNLKKTFTFKHVGWMRSLGILTITSSLNCLEGIQGQIKEVESFLLVEYNSRKDAQLIATIPGIGFYGALLILAEIDDVRRFPGPEKLCAYAGLVPTVHQSGSRGHNGGITKSGSPHLRWILIEAVHVHTNYCPGSKLSKFHAKVAQRRGKQRATVATARKLLHTIYWMLLTKEKFHCQGFNLVEKAATLIA

SEQ ID NO: 378479 - protein, 337 aa, unidentified
MERQYVGIDFHRRRSVIVRLNAAGDRLAVTRVTNDPLAISAAVAEAGPVPEVVIEATYGWYWVVDLLRANGATVHLANPNALNWGERRVKNDVIDATDLADMLRLNRLPEAWIAPPGIRELRELVRYRAKLVRLRSGLKAQVHAVMAKEGVLPTVADMFCAAGNAQLDAMTLGPNYELRVASLRELIAIYDREVAMLERDIHRHLRHHRGYAAVQAINGIGRTIAAVLVAEIGDVMRFPNPEALCSWAGLTPKHRESDVKARRGEITKQGSRLVRWSLVEGIARYHGGPKLSSDYHRIAKRRSVNKARVAIARKVLTLVYYGLRDGEIRCLARAAAA

SEQ ID NO: 378480 - protein, 382 aa, unidentified
MENRPLKFGAKRIFGLDLSKKTLKACRLDEDSGFEKQSIFDERMTDDGRQRLALRLRKGDYVAMEGGSSTSFLARYLMENTEADIFVLNPCKLHIIFESACKTDRQDCIKIAKYIRDTNPSNWCLIPVPTYEETSMRSLINSQISTKQERNRAINQMHAFFNLNGVSFLKKSDLKESGRRHDLVDHYFPDGIQGMQARLMLQDLDNIELTEEAYGELVRQALLSRPKETLIWMSIPGIGPLTALACVAYIGDGRRFSTPDQLRNYVGLVPRIDQSGIREVIYGVNHYGCMPVRRNIVQAAWSVMNLSFDCRFRQRWLELKAAGKKGQKVAVKVANDMLTIGWTLLKKGELYNGLGDFSYLKRKLRIYKMTAIDSRCFGECLK

SEQ ID NO: 378481 - protein, 342 aa, unidentified
MYFIGLDIHKKTISYCVKEVSGQIHSEGTVPATRPDLDTWMKTIPQPWSAAMEATIFTGWIYDYLLPHAAELKVAHPLMLRAIALAKKKNDRIDAGKIADCLRCNFLPECYMASTAIRERRRTLRYRNLLVRQAVQLKNKISGLLLETGVSYNKQKLHKVGYFQELLKTNKEITGRLRPLLKQCRESLERLQKTESALVRGLTKDPLLTKRVERLKTIPAVGPITALTWVLEIGDVKRFPSLKQAISYCGLCGDEKSSADTAKRTPLTKQRNKHLQTVLVEAAKMAPRRSSDLAMVYEKEKMKGNKNRATLAVARKMVAYLLAVDRGEREFVPLENYRNAAA

SEQ ID NO: 378482 - protein, 391 aa, unidentified
MFYIGIDIAKKNHEASIIDSSGKSLSKSISFPNSTKGIEKFNNFIAEFGVTTNNCIIGMEATGHYWISLFSYIVDLGFTCYVINPIQSDAFRKMYVRQTKNDSVDSFIIAQIMRFGEFSISNFSDENTFALRNLTRYRFALVDECSDWKRKLVAILDQVFPEYSSLFSNIYGVTSKELLSKYPLPEDMLSIPAEELGNLLCECSKGRLGINKAKEIQSRARESFGIKFAKRSFSFQIKQIISQISFLEEQLKEIEIEISSLLEDICPVITTITGIGSVLGASIVSEIGNISRFERANQLVAYAGLDTRTKQSGDFSATNTKLSKRGSPYLRRSIWLAATVAAFKDPALSIYYKGLRVRGKAHGTAIGAVARKLTNIIFAVLRDQKPYTPNI

SEQ ID NO: 378483 - protein, 404 aa, unidentified
MTTQRPRLLVGIDASKAHHWWVAIDDMGTTVWSRKVSNDEAAILAGLSEVLALSSEVRWAVDLTGTAPALLLAMLADHGQPVVYVPGRTVNRMSASYRGEAKTDARDAYVIADAARMRRDFARVEVPTNLAADLALLTTHRSDLIADRVRLLNRLHDVLTGISPALEAAFDYADHKGALVLLTGYQTPAALRRCGQTRLTRWLTARNVRHPETVAATALTAAHAQHIQLPRQDTATGITADLAAQILALDEQLKQLDRRIRDAFHTHPQAAVIESVPGMGPILGAEFLVAAGDLTSYPDAGHLASAAGLVPVAKDSGRRTGNLQRPQRYSRRLRRVFSLSAQTSIIRDGPNRTYYLKKRAEGHKHIPAVIALARRRVDVLWALLRDNRPFTTTPPARAVASAEG

SEQ ID NO: 378484 - protein, 322 aa, unidentified
MSGSILGVDIAKKKFDVALLINGKLKHKVFTNNQEGFELLMAWLHKQNVAHVHVCLEASSTYGDELAIYMHDAGHTVSIVNPARIKGFAQSELMRTKNDTVDAGLIARFCHAMHPEPWTPLPPAIRNLQALVRRIDSLISMKTQEMNRIDVSHESVRTSLNNHIAYLDKEIGSLKKQIATHITDDPELKTKRDLLKSIPGIGEATIAAILAELPVFERCDRVQKVVAFIGLAPRQFISGSSLKGKPRLSKVGNARLRKVLFMPALVSIQCNPVIQAFYHRLKGKEKNGKVIVCAIMRKLVHLIFGILKSGKPFDPNYAPYCA

SEQ ID NO: 378485 - protein, 418 aa, unidentified
MGASTGMLSADPPTQYPRLEVRSMSKARKRGPGPSHLLMTPDHAGNVVGIDPHKRTLTATVADARGGVLGSAHFRVSGEGHRELEAWARQFGQIARWGVEGSASWGRHTAMFLTGRGHDVRDVCPNRTPRQDRARQRGKSDMLDSERIAREVLAHPLLPKAFKRAGQERGPDEQHQLLALWHNRRRSILTSRQHLVGEAEYLLCELPLELSEQLPDTKTVKPRLAALARRNRRRRYDAPTRLRLQLLDGYRTQIKALDLEEKQVVAQLEALVDQSGSTLGELCGLSTRSVAELLVEVGDPRRFTEGGFARFNGSAPLPASTAEGPGEPVRHRYNPGGNRRINAILYRMAITPAALRATRPTHLHKRARRRAHQERSPPNPQAAPLRRHLPAHDPRPGGPAHRPTPPRCITARATLHLT

SEQ ID NO: 378486 - protein, 351 aa, unidentified
MKEYIAFDSHKHYTLMEREDRQTARTVQLRVAHQPGAIRACLRNCESGTDVAVEATGNWYWIVSEIEQAGLKPQLVHPRKAKLMMGLINKTDKLDVHGLNRLQRNGTLPTVWIPPAELRDQRELTRTRLVLVAQRTRLKNRLQSTLAKYGLAVRDCSDAFGTVARSQWPELLAQLPEQTQWVSQQLLKQLDLLEEQIGQCEKRLNPLLKITPQIERLKSLPGVGLILGASIALEIGEVSRFASAEHLASYAGTTPRVHSSGDKLRFGRLRPDINRYLRWAFVEAANVVALHHQQRPERHVSQLYWRLKQRKGHAKAIGAVARHLAEATFHILSRQEDYEDPALRKGRSKPV

SEQ ID NO: 378487 - protein, 403 aa, unidentified
MKEFNPAQHRVETASALERVRAGESLGAEPYAAYVGLDVHKETIAVAVAEPGRGEPLYHGEIANKPKSIEKLIAKLSAAYEGGLLLFCYEAGPCGYVLYRQILASGHDCQVVAPSRIPKAPGERIKNDRRDALKLARLLRAGDLTPVWVPDQEQERMRDLSRARDDMKAQERKARQQLNAFLLRHGYHWPRGKSRWTPAHENWLAGLKMEHPWQQVVLEEYIAAERAAGERVAQLTDHLMRALPEWSLAPVVDSLIALRGIDKLAAIVLLAELGDISRFESPKQLMGFLGLVPSEHSSGGRRRQGAITLTGNGHARRMLVESAWSYRFPARQTKHLKGKAINASQAAKQIAWKAQTRLCGRYRTLTRAGKNAKLVCVAIARELAGFIWDIVRQEMPRRLSRGV

SEQ ID NO: 378488 - protein, 364 aa, unidentified
MSRVVYVGMDVDKAKIVAAKLDDGSGREIEERVIANKPSAVKKYFEALVDEGDVMATYEAGCFGYGICRQLTEMGVTCLVAAPGLIPRKPSDRVKTDRRDAKILALALRAGQLTGVHIPTKHDESVRDYLRMYGDLRSDLRKTKQRVLHFLLRRGIRYEAGGNWTLRHKEWLNHLEFESEIDRQTLDMYLAHLLELERKCAEVASVAEHIGEEERYREPVKTLCAFKGVKTLTALSFICEIGDFRRFATAGQFMAFLGMVPSERSSGDKRRQGGITKAGNSHLRKLLIEAAWHYRSYHPTSRALIERRKEVDPQIVSFANKAGRRLNRKYLRLLHRGKRPQVAVTATGREFAGFLWAAMVGQVA

SEQ ID NO: 378489 - protein, 446 aa, unidentified
MNDRSDLSRGDRNRNEKLARMRGLLPLTNAIVGIDLADHQQAAVVTDHDSRVFARRKLSCRPWELGDLLEWARAKAQDAGFTSVTVACEPTGHRWRVLDQLATQRGLSLVCVQPLLVWRAREAEDLTWDKSDPKDAVIIARLAAGLRCYVPERTTATWARLRHLGARRVHLTTDATAGVQQLRDLLECVWPGALSSSGSPFRSRSWCASMTVVLDRADGDLSRVRRLGRARFVAVVRRELPRWGATRPCLRIVNAVFDALADPVGVVAHRPGGLERAQLVLADWAHTRRRLAEVEARMVAVLDELGLTELVTSIDGLTAVGAATLLAETGDLTRFRSPRAVVKHAGLCPRDNTSGTYQGKTSLSGRGRPELRLAAWRAVWAALPNNSVLAARFHHLTTREDNRLARQQARAACAAALLRWLHVVVTGGVRWDPVIATGRSTARAAA

SEQ ID NO: 378490 - protein, 376 aa, unidentified
MTRIVYIGMDVHKDTYSLCSFDSHENYMFSEITVKSETASVLSYIKSIENRFKDNDVMVVCGYEAGPTGFSLCRDLQKKNISCVVMAPSSLPKSPDDKKRKTDKIDARNLALHLAHHTYKAVAVLSPEMETIKELTRTRAAASKAQKRSKQNLLSFLLRKGMVYPYGGRAKYWTQKFYAWLKTLEFTNVIERYSFEEYLAEVNHQMSRVSRLDEKIAEIAEDPLIKDDVKKLCCFSGISTLTAVSFISEIGDFNRFEKANYFASYLGLCPGIHSSGLSSQNRGITKSGNKNLRRLLIEAAQSMSHSQKCGKKSLRLLARQKDMNPLVIAYADRATERIKRKRTLMIFRGVNTNKATTAAAREMACFIWGMMTNNIA

SEQ ID NO: 378491 - protein, 281 aa, unidentified
MRFYTKQHPLYCGIDLHARTMYLCVLNQDGEILVHRNMPAGPEPFLNAVAPYRSDLVVCVACIVTWYWLADLCAREGMPLVLGHARYMKAIPGGKAKNDKIDAPKIAILLRGGMLPQAYVYPAEMRATRDLLRRRRHRMRKRAALLTHVQQTNSPYTVPEIGTKIAYKTNRAGVAERFADPAVPNSIEVALALLDYDDEWLRALELAMVTTAKQHDANPLSLLQTVPGIGKILSLVLLSEMHDIARFPRVQDFGSYCRVVKCAKESTGKRYGTSGTKSSHA

SEQ ID NO: 378492 - protein, 329 aa, unidentified
MHYLGIDVAKAKLDCCLLLELSSCKRKTKSFSNNDSGFTELVHWLDKQRISASDTHAVMEGTGVYHERATIALHDAGMQVSIINPAQARDFAKGLAIRSKTDGLDSLVLARYGALVQPTIWIPPTPQARALQALLSRVDAVHQDLLREKNRQEKADATDTPELIRQSLADSIMFLQTQLKKLRQGIDDHINRHPELRDDAALLITIPGVGIKTSQHLLSVIHLHHFHTAERLAAYLGVVPIQRQSGSSVLGRPKLSKTGPSHIRAVLYMAAVVASRHNPHVKALYERLIASGKSKMSALGAAMRKLVHLCFGVIKNRQPYNKNYSQESC

SEQ ID NO: 378493 - protein, 457 aa, unidentified
MTKRKSKAKSKTFKVPKLPPNLQHLNLNAAGIDIGSEQHLVAVPEGRDKVSVREFGTFTTDLEALATWLKQCGVTTVAMESTGVYWIPLFELLERRGFEVKLVDARHVKNVSGRKSDVLDCQWIQQLHTYGLLAGAFRPADEVCVLRSYLRQREMLTQSSSRHIQHMQKALQQMNLLLHNVVSDITGVTGMRIIKAILAGERDPRVLASNRDERCHHTTATIAKSLVGNYREEHLFALRQAVDLYEMYQAKIADCNQAIIKQVEKQPDISDDEPPTPDKQVPARDRIRDGVDVRDLLFKKSGVDLFAIPGLAADTLLILASEVGFDMTPWKTEKHFAAWLGVCPGTRKSGGKVLQSKTKRNPNRATQAFRMAAASLYRSQTALGAFFRRIKSRSGGKQAVTATAHKLARIYYAMLSQGTSYVELGQKAYEQRFKERRIDHLKVQAKSLGFQLVPCTS

SEQ ID NO: 378494 - protein, 344 aa, unidentified
MVLKQNVGIDVSMDTFDVNLTLMDENFDKQCKGRKKFNNNEEGFVKLLDWIDKHMCNDIEISYTMEFTGVYYERLAYWLKSSKQIVFVVIPSKAKWYCASLSKSSKTDKLDAQALSWMGLERQLKEWNPLSLGFLNLRTLTREREELLKEKTVVKNRLHATCKKAIGQVNTVARYHQRLQIVVEQIAEIEREILALIKEDELLYDKVENITTIPGVALITAATVIAETNGFSAINNQKQLTSYAGLDVKIKESGKYKGNSKISKQGNSHIRRVLHFPAQTAIIHNKPLSVFYKRINEHKIKPMIAGVGVQRKLLCLIYILWKTDNTFDPYYEINKYHKIMKKVG

SEQ ID NO: 378495 - protein, 351 aa, unidentified
MSMLADVVDAVVGVDTHRDVHHAEIAYPTGAVIATCSVRNSSAGSAQLLSWAREHAPGPRLAACIEGTRSYGAGLARAAAAAGLAVIECEQPTRKTRRGKGKSDPIDAHLAVLTALQLDAGKLPVPRADGDREALRILLCARQELTTTATAQANRLRALLRDGDDHDLDLARGSFSDAVLARLARRRQPPDASRALAVRQGEIRRLAVALREAARALKANRAELDAIVGELAPGLTSRPGIGPVTAAQAIVSFSHAGRCRHEAAFARLAGTSPVEASSGQITRHRLNRGGDRALNRAIHVIAGTRMRCDPATIAYVTRRRAQGKTDREIRRCIKRYTARQLYRALTAALAT

SEQ ID NO: 378496 - protein, 364 aa, unidentified
MAHLSNWIGIDDHADKLTIALYVGSQKQPAKEWEVAPTESGLRQLVRWLKELKGAAHCVYEAGPCGYELYRLLVSKKIDCVVAAPSLTPRKPGERIKTNRRDARKLADLHRAGMLTLICVPDRRQESVRDLLRARDDVRKNALSARHRLSKFLLRQGRRYRDGTNWGSGHWQWIRSQVMAEPCDQIVLKHYIATLEERQEELKALDAHVLEAAQQPDYAPMVGQLCVLRGIDTLSAMVILTELGDLRRFTSAKQLMAAVGLVPREYSTGDKTRRFGITKTGNAHVRHVLVQAGWHYQHQPRAGWSVRKRRSSQSADVVAVARTADERLHRKYRRMTGRGKRSTVAVTAVARELAGFVWALGQQR

SEQ ID NO: 378497 - protein, 392 aa, unidentified
MFFVGIDIGKNNHVASMMDESGKVVFKAFSFPNTSDGGHALFSKLTSYSSSTDDFEIGMEATGHYWLSVYSFLFEKKFLLHVINPIQTDGWRRGTEIRKRKNDIIDSVLIADLIRYGQFVETRLADEDLFSLRTLTRFRTYLVESISDLKRKVVCVLDQVFPEYQSIFSDIFGKTSKEILLQFSSPIDFESVSSQTLAELLAKLSRKQIGPAKAAQLKAAASCSFGVTFAKSSFTFQLKALIEQIAFIEKQVKETETEIAGIMEKLESPITTITGIGNITGAAIISEIGDISKFDSPRKLVAFAGLDATVTQSGEFEAAHNVMSKRGSPYLRKAIFQAALVAAFKDPVLSAYYQKKRAEGKHHLTCIGAVARKMCNIIYAVVKNNQPYVPKA

SEQ ID NO: 378498 - protein, 379 aa, unidentified
MSAPAQGAVHVDLAAIFVSLELSRSTWLITSLSPGSGERMSKHSVRGGDVAGLLDRLARLQEKAQARAGRTFPIIVIQEAGLDGFWVHRVLEREGIESHVVDAASVLTTRRRRRAKTDRIDGEALLAYKRGEPRVCSMVRAPSPGEEDRRRLCRERKTLVAERVRHVNRIKGLLFAQGISDYEPLRRNRRPRLEELASGDGRALPAHLKAQIGRELDRLELLLEQLKAVEAERDALLERVGDAAPEPVAALARLRGIGPEFATVLWLECLFRPFGNRRQVAAYAGLAPTPWQSGSVRHEQGVSKSGNPNLRTTMVQLAWLWLRNQPTSALSLWFRSRVKRDDGRGKKKAIVALARKLLVALWKFVTSGVVIEGAVVRAA

SEQ ID NO: 378499 - protein, 391 aa, unidentified
MIYIGIDVAKDKHDCFITNSDSEVLFKAFTIFNNLDGFNDLYQKIESVMDDVTKVKVGLEATGHYSYNLLGYLIDKGLPTYVINPLHTNLYRKSLSLRQTKTDKVDARTIASMLMSDVNLKSYSDTSYHNEELKSLTRYRFDKVKERAKLKTSVSRLVCILFPELEKLVPTLHMASVYALLSEFPSAKHVATAHLTRLTNLLSKSSKGRYGKDTAITFRDSARASIGSNMPAKSLELKHTIKLIQELDSEINEIENEIKIIMDEINSPILSIPGINYRMGAMIIAEIGDFNRFDSPDKILAYAGFSPSTYQSGQLDGAYAHMEKRGSRYLRYALYNATKYVCHWDPTFAAYLAKKRAEGKHYNVAISHAVKKLVRVIYHLEKTKQQYIKAA

SEQ ID NO: 378500 - protein, 370 aa, unidentified
MRVSVGVDLHKSQFTVYYRYEGTGEGILKQYRTHRYGYEEFLCALRGYKAKGINMEVAVEATGNARYFKNVVEREGIKVRVINTLKFKVVNESVKKTDKHDARTIAEFLEKDMLPESKLCSEKSEAIRRILKSRKSLVRAIVSLKNQIHGLLLGSGIESRKGDLQSVKKRQQILNVLAEHGYADATVKPLLETIDCLSEEVKKLEKVLIELVKEDRAVEVVMSIPGAGIITASTISAYVDDINRFNSYKEFSSYAGLAPWVQTSNTTEHYGKITKRGPEPLRTAIVQIVLGMVRSRRTNDYRIMKRYKTMKSYKGSGKTIIATARKLSKIIWYMLKNDTLFNPFKMTDPKLQRIIDEMRKEAMELESIPA

SEQ ID NO: 378501 - protein, 343 aa, unidentified
MDYFAGLDISVKDTSVCIVDDTGKIVREVKVASEPDSLLAVLTNPAYRFKRVGLEAGPLSQWLFSGIAEAGLPVICVETRHMRAVLKAQINKTDRNDARGIAQMMRVGLYRPVHVKTLRSQKLRMLLTHRKLLQSKAIAIENDLRATLRNFGLKVGVVGTIKFEARIKDLVENVSDLAMLVEPLLIVRRALREQIGILHRRLLAIVRDDDVCRRLMTVPGVGPVVALTYRATVDVPARFRNSKAVGAVFGLTPSKYQSGEVDRTGAISKCGDEMMRMMLYEAAQSMLTRTIKWSWLKAWAMKIARHRGMKKAIVALARRLAVIMHRIWVDGTEFRWSREVEPA

SEQ ID NO: 378502 - protein, 344 aa, unidentified
MKKSSIFVGLDVHKNSIEIAIAEAGRNGEVRSYGKIDGSLGALDKVIRKLVSKGYELHFVYEAGPCGYEIYRHLAAQGFDCMVVAPAMIPKQSGNRIKNDHRDAQMLARLHRAGELSAVFVPFAEDEAMRDLTRSREDAKLAEKKAKQRILAFLLRHGHHFNGRSHWSQAHLRWIAGIKMPHPAQQIVLQEYVDAFTECTRRVERLTGQIQQLLPQWRMVSVVKAYQSLRGVSLIVAATTVAEIGDMTRFTSPVELMSYLGLVPSEHSSGEKTKRGAITKTGNGHVRRVLVEASWAYRLPARVSRELRKRQKVCRRRYAISPGKPSFDCVPATNECWRRVSPNR

SEQ ID NO: 378503 - protein, 355 aa, unidentified
MTTMADPESKVTGGVDTHKDFHVAAVLDWVGRVLATAMFPATRSGYLELVAWLESFGPIDRVGVEGTGSWGKGLTRVLTAAGIGVVEVIRPNRQTRRRYGKSDRVDAIAAGRAVLNGEATARPRNSEGPVESIRLLKVARNSAIKQRTATANQIHAVMITATETLRESLTGLSMKMIVDRVTKYRPTDAVCPTQGAKLALKTLGQRWRYLSNEIATIDETLDVLVEATAPPELLAMMGVGTQTAAQLLITAGENPDRLNSEQSFAALCGVSPVDASSGLQLRHRLNRGGDRQANSVLYRIAIVRLRYHQPSRDYMTRRTAQGLTKKEVIRCLKRYLAREIWQHLTNHQQTHQKAA

SEQ ID NO: 378504 - protein, 339 aa, unidentified
MANVAVLGIDIAKNVFQLHGVGADGQVALRRRVMRDQLLQVTEAMPPCLIGIEACTGAFHWQRHFESQGHTVKIIAPQYVKPFLKGQKNDGNDAQAICIAVQQPHMRFVPKKSIIQQDIQGLHRARQRLVNHRVALISQMRGLLLERGVAIAKLASIAQRTIPEIINNPKIDITELTRDIIGTLHAFLLQLNEKIRYFDKQIEAVFRESDVCQRIAKIRGVGPKTATAVVAAVGDGADFKNGRHLAAWMGLVPRQHSSGDRRVLLGISKRGSQHLRTLLVHGGRSVVRTAQRKSDPASEWVNELRERRGYNRAAVAVANKNARVIWALLQHGGEYRANP

SEQ ID NO: 378505 - protein, 315 aa, unidentified
MMRTQVFVGIDVSKAQVDVAFRPEGRFSAPNDEAGCAQVLERLRAVPPTLVVLEATGGLEIPLTGVLAAAGVPVVVVNPRQVRDFAKATGRLAKTDTLDAQTLAHFAQVMRPELRPLPDEQTQALAAILARRRQLVEMLTAEKNRLGSAPKPVRKSLRTHIAWLERELRHTDSNLAHAIRESPVWREKDALLRSTPGVGPVMTTTLLANLPELGTLTGKQIAALAGVAPLNRDSGTWRGKRTVWGGRAQIRATLYMAALVAARFNPVIRAFYQRLCATGKAKKVALTACMRKLLIILNAMLKHRTPWRTELVPCA

SEQ ID NO: 378506 - protein, 367 aa, unidentified
MSKAEISRLCVGVDLHKTQFTVCAVNEDGEYLLESMYPTSTAGYEAFKEKMHAQEEKGYSVELAVESTGNARFFKNQMETEGFIVKVVNTNKFKVITTSTKKTDANDAATLAYYLMKDMLPEAHLCDQTSEELRRMLKTRSILVQSCVKIKNQIHGMMLGYGIETKSAQFQSKKKRQELMNDLADHEYSAFTASSLEVTLNILDDLETQIKRVEKQIERMIEENEQVALLKTIPGVGIINAATIAAYTADMDRFEGDFKRFASYVGIVPGVHNSNESVRLGRITKHGPQELRTAFVQVALGMIRLTKQTSDWYLIKDYRQRKGTKGSGRAIIALSRKVARVVFAMLMNREEFNPELMYRNPLTQRTA

SEQ ID NO: 378507 - protein, 351 aa, unidentified
MLIIGCDYHPGFQQIAFMDTETGEFGERRLEHGEGEAEKFYRGLQQAGIRVRVGMEATGHARWFERLLEELHFELWIGDPLEIRATRVRKQKTDRHDAQLLLKLLLEDRFPRIWVASWENRDLRQLLWHRHRLVQMRTRIMNQLQAVALNEGVRQKKRLWGQAGRAQLESFVLAPWASRRRKELLELLDRLNPSIRELNAAVEQEATRRPEVQRLMTHPGVGSLTALAFVLIVGTPQRFACGKQIASYVGLVPTEESSGGRRRLGHISKQGNSLLRFLLMEAAQATVRSDPDWRRKFLHLAMRRERAIAKVAMARKLAVRLYWMWRKEWDYEQVKRFGSHAGQPGNPLGVQ

SEQ ID NO: 378508 - protein, 335 aa, unidentified
MKKIHVGIDISKEKCNLCFRSGLEIVREEECANDVKALKKAFKAALKGLGASLEEVLVCAEYTGRYIYPLTVACQELDIFLWMDDPTRIKNSMGLTRGKNDAIDAARIAEYAYRYSDKAIRYRIPDAALVSMKNLLADREFLLTDKKRYQSQLTDQKKYMAPGDFNHKNSRWKKVIKSIDDQITAIDAEIESLIAADPVLTRQKELLVSIDGIGERIAINMIAITGGFTRFQNARQFCSFAGLTPYKYDSGTSVRSKAKISKRANQTMKALLHLAAVGAATHMKEGEYKDYYERKTKEGKHVMCVLNVIRAKLVHRMFSVIKRNSEYTKEYKTAC

SEQ ID NO: 378509 - protein, 387 aa, unidentified
MSTQYFCGADVSKNSFSIAVKNETFILENSFSMDSKGFESMDKILSPYKDKLLIGMESTGIYHSNLFYFLKNKSYNCFVMNPYKMRQFFNFISDKPTKTDKKDAKAISMCVEFNRDKIETLSSQQKYQVRYLVREKETLAHQIAKTKTEIRTILCLVFPEIEKFSIFGSGMLSLLYNFPSAACIRSIPEKEFIKTGEKLINTRGRKLNIAMTSIYQLATTSIACCYPVYEQLLKMKIDTLNILTQQAQIIKQLIEKQAEKYFHREIEILTSIPGIGKESAMYFLSEVVDIKRFNGWRKLIGFCGLDPVIKQSGNYNGKWKLSKRGNKHARRIAFIMAGCVKRSCPYFRQYYIKKRNEGKSYTEAVVATSTKLLRTIYTLLKEDRLFI

SEQ ID NO: 378510 - protein, 343 aa, unidentified
MQVTTIGLDIAKNVFQVHGVDAAGKTVITRQLRRGQVIGYFAKLPLCLIGMEACATAHHWARELTKIGHTVQLMPASYVKAYVKRSKHDAADAAAVCEAVTRPSMRFVPVKTIDQQAALMLHRCRDLLIRQRTQLINALRAHLAELGMIAAKGKEGVKDLAAIITDAVKATVLPEPMRQALQALVKQLAALQQQIGELERNIHAQHRASDRSRRLETIPGIGVLGATAIAATITDPSVFKSGRECAAWIGLVPRQNSTGGKERLGGISKQGDRYLRRLLVMGATAVIRHARTHPDKHPWVTKLLAKKPYKVVAVALANKMARIAWSILAKGETYRAPALAATV
